United States Patent Application Publication US 2004/0216190 A1 - sequence listing, part 3

SEQ ID NO: 3647 - DNA, 2119 bp, Glycine max
  Clone ID: GLYMA-23APR03-CLUSTER5083_1
attggctagtggctatagctgcaattattcaagattcaatacttgtgcagttctccacttctctagttcaatcggctattttattcatatcaggtaatgtggaaagctgtggagagagcagtaggcacaggtttcagcagggagaaatgtgaagtgaagttggttgggagtccactaacacatgaaaggtttcttcggaggaacagaggaacatagattgtttcgatgatgggtggtcgatgttacagttcatatcgtagtaatgctgtggcagctgtgatgagggacaggaaatggaaatccaattcaaagtcagaagaagctgatgttgttgtgattggtagtggcattggcggactgtgctgtggagcactgttggcaagatacgaggaagatgtgttggttctggaaagccacgaccaaccaggtggtgctgcccattcctttgatatcaaaggctacaactttgattctgggccatcgttgttctctggcttgcaatcaaggggtcctcaggctaatcctcttgctcaggtcttggatgcgctcggcgagtctcttccatgcgctacttacgattcatggatggtccacatacccgaaggacaattcttgtcgcgcataggcccgacggagtttttcaaggaccttcaacagtatgcaggtccaaatgctgttcttgaatggcggaaacttttagatgctgtacttccattatctacagctgcaatggctcttccccctctatctattcgaggagacttgggcgttctttccactgctgcagctagatatgccccctctctattcaaatcctttcttcaaatgggacctcgagcttctcttagggccacaaaacttctccgacctttctccgaaatacttgatgatttgcaactcaatgaccctttcatacggaattggattgacctcctctcattcttgcttgctggggtcaaggctaatgccgtactctcagcagagatgatttacatgtttgcagagtggtacaaaccgggatgctgtcttgagtacccccttcatggaagtgcagctattattgatgctcttgtgcgagggctagagaaatttggtggaagaatttctcttcaaagtcatgtggaaaacattgttgttgaaaatgacagagccattggagtcaagctgggaagtggtcaattcatacgtgctaaaaaggctgttgtcagcaatgcatcgatgtgggacactttaaaattgctacccaaagaagttgttccaaagtcctactcagatagggttaacacgactcctcaatgtgattcattcatgcatctccatttgggatttgatgctgagggtatacgcagtgatctgggaattcatcatatagttgtaaatgactggaaaagaggagttgatgccgaccagaatgttgtgttgatatcaatacctagtgtacttagtcctaatctggcaccgcacgggaaacacgtgttacatgcttatatgccaggaactgaaccatttgagttgtgggaaggacttgatcgtaggagtgctgaatacagaaatctcaaagctgaaagatcagaggtaatgtggaaagctgtggagagagcagtaggcacaggtttcagcagggagaaatgtgaagtgaagttggttgggagtccactaacacatgaaaggtttcttcggaggaacagaggaacatatggaccagccgtgcaagctggttcagatgcctttcctggacattcaactcccattgcacagctttattgttgcggagactccacctttcctggcattggagtcccagcagttgctgccagtggtgcaattgtagcaaattcattagtctcggtatctcaacattccaagctgctcgatgcaattggcatataaaaccaaggtttcatcttcatgtccccacgttttcacactggaaaagattgaatcttttctacttctcgtgcaaaaactacatcttggtcaataacttatgtgtggcttttcacatctagcatgttttacctagctctcttcattcaattttcacttgtaattattactagactaaatgttacctttttaatgattcacaaaaaattgttggaaaaaaaaaaaaaaaaaa

SEQ ID NO: 3648 - DNA, 1031 bp, Glycine max
  Clone ID: GLYMA-23APR03-CLUSTER5084_2
gtaccgtggcccggccccccctcgagattaagtagggagccccccccccaatgttatgaatggatgtccagatataatatattatgagttgagtgattatgtaaaataattttatattattatttaataataaataattgttggcataattttaaaagataatctttgtaaaaattaataaatttattataaataataatttataattaaatagcagtatcagtgtactttttttttttcttttatatcatctatctgggctgtttctccgagtaatactatcagagatttccactaggatggtgaatattataatattttcattggagaggttaatggttaagaattgttagctttgaaattactatgttcaacatagtggagatctctagaattgatttttagctgcaatctctgtcatatttgttgagcatcatttgtctttgcttattatatagtttcagtggattccagttggcaagttggcttgaaatcttaatattttgttcattttattttatattctgctgcaggatttgacaaggaaaatatattatgcatatggtatcaattctatacatacttcaggatatttgtatcaattgaaattttaatatccaatctttgtgacgagttcaccgccagaatttatcaattttttgccttactcttctgagctatggtttcagtcaaactttataacatctttaaattccatgaaaacagaactgattgtacattactctgcatttttttcagctttatgtgcagcaaccataatttgtgcaattattaggatttgtattttaaactcaatgatttcattttacaggcttgtgaaaagttaaaccagatagaactttcagactgtgaaatatatgcttcttgtgaaccttgccctatgtgccttggagcaattcccctctcacgagttaagaggtcggtttatggagcaaagccgccgccctggggaccctcgcccctcgcgcttgagccacatccccctcccattcaacacgtttctatcgaac

SEQ ID NO: 3649 - DNA, 1585 bp, Glycine max
  Clone ID: GLYMA-23APR03-CLUSTER5136_1
cccgttccccaccctacctcctccgccccccgccagaacaccaacccctcccctccaccaccacccccctcctcccattccacccccaaaatccccaccaccatacacagaagcgtcacccagcaccaccagcccgagctcagaagcagccggctcaaacttcaattcatggaagtgtgattctaatctccacaacaaacctaaccctaaaaagctaaccctttttttttttttttttaaatattggttctttttttacttaccctagatgttagagccatggacataaccccaacaacaacgatcaacaacaacaacactactcccagtgcaacaacaaaatccccagaaaatgaaacagaaacaccgaccaggatcaccacccccatcactcccacaacgacaaaaacctcatctttctcgaatggtgtcctcaaacgcacccaccaccaccaccacctccaccaccctatccctccggtggttacctacaaagaatgcctcaaaaatcacgccgccaacttgggtggccacgccttagatggctgcggcgagttcatgccctctccgaccgccaccgctgccgaccccagctccataaaatgcgccgcctgcggctgccaccgcaacttccaccgccgcgagccggaggagccccccatcgcctccaccaccacgcacgtcatcgagtatcagccccaccaccgccaccaccctcccccgccgctgcacgcggcggcggtagccacccgcagccccaattctgcttccccaccgccgatctcctcgtcgtactacccctccgcgccgcacatgctcctcgccctctccgccggactggcggctccgccggagagcaccgccgcgcctgccgccgcgcccacgagaaagcggttccgcacgaagttcagccaagagcagaaggagaagatgcacaagttcgcggagaaagtagggtggaagattcagaagcgcgacgaggatttgattcacgaaatttgcaacgaagttggcgttgatagaagcgttctcaaggtttggatgcataacaacaaaaacacctttgccaaaaaggataacaataatattgttactagtaatgatattaatattactactaaaaataatatttctactgataatgatgcaaatgggagtgatgtcaaggtttttgaaaaccctaacaatgatggtggtgaagatcgcgctgaagatccgagtagtaatcactatgatggggtgaacgttgttggtgctaatggatcttctagttcttgatctaagggggaagaaaataataatgtattagataggttaatgatgattatgatgatgatgatgatgctacaaggttaattaatcagctgtttttaatttcttttcttttctatttttgtttttaattgtttagtttttatattgttaatgagagcatgatgatcaatcagtttaatgggagagaatgttatatccggaagagaatttattttgcttttaatggttttatgctgaattaagttagcttttagttgttaccacttgttatgaatgtatattatgtttatctttagcgtgaaaaaaaaaa

SEQ ID NO: 3650 - DNA, 803 bp, Glycine max
  Clone ID: GLYMA-23APR03-CLUSTER5147_5
ggtacaaagctgaatagccattcgtatgtcgcagagaaagaaaaccctagctcaccgtttcaagatgcaagatcttcgttgaagaccctcactggtaagaccatcactctcgaagtcgagagttcagataccatagacaatgtaaaggccaaaattcaagacaaggaagggatcccaccagatcagcaacggctcatttttgctggcaagcagcttgaggatggacgtacccttggctgattataacatccaaaaggagtccactctccacttggttcttcgtctccgtggtgggatgcaaatctttgttaagaccttgacgggaaagacaatcacccttgaggtcgagagctccgacaccattgacaacgttaaggctaagattcaggacaaagagggtatccctccagatcaacagaggctgatctttgctggaaagcagcttgaggatggacgtacccttgctgattacaacattcagaaagagtctactcttccccttgtgttgcgtcttcgtggtgggttttaaaagtctgagaatgttctgtaggtgtcttgaagtctaagcatgtggaagttccgaagatctttgggtttttttttttaatgttcctgaaaggtttactcttgttaaattgtttccatggtcaatagtggcctttgaaaaactgttgtttgttctggtctttttataaattctgtttggttcgtgaatttgccaagctaccttttatgaaatttagttctttgcaaaaaaaaaaaaaaaaaaaaaaaaaaaaaagcggccgctctaccaggatcca

SEQ ID NO: 3651 - DNA, 627 bp, Glycine max
  Clone ID: GLYMA-23APR03-CLUSTER515536_3
gtcggtagccgtcggttcacttctccaggtaaggaaagggttcgtactcatggcgccgccgcagccaaagtcgggccttttcgttggcatcaacaagggtcatgtcgtcaccaagcgcgagctgcctccccgcccgtgccaccgcaaggggaaatcaacgaagagggtgtctatggtcaggggcctgatcagagaggttgctgggtttgctccttatgagaagcgtatcactgagcttctgaaggttggcaaggacaagcgtgccctgaagcttgctaagagaaagcttggaactcacaagagggcaaagaagaagagagaggagatggcgggcgtcctcaggaagatgaggtcggctggtacgcacactgacaaaaagaaatagagagcatttcaagttcatggagctggctgccagagattatgttccagtgtctgattttccatacatgtagaacctaatagacatgtcaaagtattatgtatcgaaccagctcatgggattttgctccttccaatgcatccagggtttatgtatcgaaccaatttatgggatcttgctcttattctaatgcatccatggtttgcgaaaaaaaaaaaaaaaaaaagggcggccgctctagagga

SEQ ID NO: 3652 - DNA, 1754 bp, Glycine max
  Clone ID: GLYMA-23APR03-CLUSTER5167_2
aatctctcttttctctccatcccaattaggtgaattcacatcattttgagaatcactacacaaaataaaaacaaacttttcatggattaaaagtttttataaactttgaatatgaaatcaattaccattgaataaaattaatctcattgtattaaaattctcattaaatagtttaagctacaaatatcaatataactcaaaaattagttagcactttatcaaacaatttaatgttagcatatatgttaaaatataagtaaatattaataataaatattatgaatgtctaaattttggtttcccacacgggggttgacgggtgggtatggctaatttatttataatttagtatgcaatgctattacaataatatttttttggtaatgattacaataatgttatatggttcatgataaaatttatattttacaattttttttaataaaaagtataaattaaaaaagtttctttaaataaataaatctcctcttatttgttctgctctgaccaaaaaaagatgtgttttgttcggtggtggaagcggaggtcacagtatcacaacaggcagaggctacggtggtcgagtatataaactagtgtatgacgcacaaatttttttaatccttagattactctggttcatcattatatcttgggcttctcatacaatattcttcctcctccacacaatatcctgaatgtgttaacgtgcgcccttgttcctactacgccactatctcctccttcttatcgcgtttttccggtgccgatgatggcgtcggttccgtcggctgcgtccacaacctcatcgagcaagagtcagggctccgtcgctcgcgctccatggagattctgtttctcctgtcacggtcgcggttctctggcagcggcggttgcggcggagataggctttcggatctcgaaagcacgagggacttgtcggcgagaaaattacagaagccattcggcgaggtcgttcaggtcaatgttcaagttgcagaagagcagtagacacgatggcggcggcacgccggagcaggagtgggaggcgaagaagatattggcggaggaacaaggaaaatgggattgaaacaccaattttttttcttcttataactaggaaattaaaacaagcaaacaaaaaagtaaaaaccataaacaacaagcataagtgcataactcactaagcgaggaaagctacaactcctcacatcttctaacagtgaggtgccaagatctaaaggaggtctatctgggagagttctcatgaactgttcttagcattcatttgctaattatttttcgagagagaactataaaaactatttttgtgggatctaatagaaaatagtaaatactttttgcttaaattaacatgaagtagaacggcgatggtggcataaatccgatgatggcgcggtcaaggtcggtggtgttgacgccggtgatggcggtaacggtggtttccgcgacggagaattgagattgtggacgaaagggagagggtagttctttccgagtccgacgaaggctttcccgcaatccaaggtctctaaatgggttcatgaacgttttcctttgtatagaggaaggatattgtgtgagaagttcaagatagtatgatgtaccaaaagagtaatctgagggttaaaaaaatttgtataccatacacaagtttacacacttgaccaccgtagcatgtgccttacatgtgaaacaaacgttctgcttttggctccttggcaagagaaatt

SEQ ID NO: 3653 - DNA, 1656 bp, Glycine max
  unsure (1)..(1656): unsure at all n locations
  Clone ID: GLYMA-23APR03-CLUSTER5175_2
accgcaacatttttgtttttcttccattccaattatcgctacctcctccttcttcttcttccaatattaaatttcacagaggatgggtggtgaggaattgagtttgatggagaacgaaaggaaagggaggaggctgtggaagaaggtgaagtaccagctggtggagtaccactccttgcccggttatttgagagacaacgagtacattctcgctcactatcgatccgaatggccaatcaagcaggttttgttgagcgctttcaccatccacaacgaaaccctcaacgtttggacgcatttgatcgggttcttcatatttctggcattgaccatatacactgccatgaaaattccgaaggttgtagatcttaattcgctacagcattttcctgacatgctcaagaaggccgacctgcacaaattacaatcagaaatcttgacgtgtctcccttccatgcctgatttgcacagactcagggatgaaatctcaagttggcatattaaagaatatctgtacaattgtttgccagtaagattttccagtagcaatcatactgatgcatgtgttctgcttagtgtaaaagatgacctggcgaacataatagcaccacttatgattagaccaattacgaggtggccttttttcgcatttttagggggtgccatgttttgcttgctagctagcagtatttgccatctcctctcttgtcactctgcacgcatggcatacattatgctcaggctcgactatgctggaattgcagccctgatatctacctctttctatcctccagtatattactcttttatgtgtgacccatttttctgtaacctatacttgggatttatcactgtattgggcatcgcaaccatcttgttttctcttctcccagtgttccaaaatccagaattccgcaccatccgagcatctctcttctttggaatgggtttgtctggtgcagcacctattctgcacaagctttatctattctggggccagccagaagtgtttcacacaactgcttacgagattctgatgggtgttctctatggaattggagcattggtttatgccactaggattccagaacgatggatgcccgggaaatttgacattgccggacacagtcaccaattgtttcatatattggtggtggcgggggcatacgctcattatcgggcagggttagtttatctcaggtggcgtgaccttcaaggttgttgatttaatatgcatctatgagcaaacagtggttgaatactctgctgttatgtaactagtatgtgttagtatacactcctctaactggtgtgaatttgtgattccagcaggggatgtttctgcagccatagggattatgtacacacttagaacccttagcacaaatcactagtcagcaataaaaatttcatttggtctaccgtgacatactagaaacatttttnttctgcctgcatgtatcttgttattcaagttgtattattagccttgtgttttgctctggaagtcgggatactattttggaagccgaagtggcttntcaagattatagtcccaagggttgccctntcattcctgcaataaaattgtgtattttttatttttaattaaaaatcatgtggatgttatgcaaatttagctccatttcatcaact

SEQ ID NO: 3654 - DNA, 762 bp, Glycine max
  Clone ID: GLYMA-23APR03-CLUSTER521_4
gagtgactggtttttgagagtcccgaggtaggtgtctctagaacagtgagaaaaatagatactactactcttatactagtctctgcgcacaaccctccgttctcactttctcccttcttcaatgccactcttcttcctttctctttcccactgagagagactgcaaactaatttctagtattccgacacagataatggatccggcggcgatgatgaacggcggcgccaacccgacgtcgtatcacctgtcagagatctggcagttcccgcctcccaacgcgccagacgagctgggactcagaaggccccacttcacccacggcttcgcggacttcgccccggatccgacccgagacgccgtcccgggtcgcgacccggccagcattgcccagaagaagcgccgcgacgcctcggccgaggaggaggaatccgctaagggcgcctccaccaccaatgccgtgaatgaggggggtggtgttggtgatgggaaacgggtcaagacgagtgagagtgggaaaggtgaaggagaaaccagttcaggaaagcttgcggagcaaagtggtaagccaccttcggagcctccaaagcaagactacattcatgtccgagccagaaggggtcaagctactgatagccacagtcttgcagaaagagctagacgcgaaaagatcagtgagaggatgaaaattcttcaggatatagtcccgggttgtaataaggttattgggaaagcattggtccttgatgagataattaattata

SEQ ID NO: 3655 - DNA, 1198 bp, Glycine max
  Clone ID: GLYMA-23APR03-CLUSTER52214_1
aacactcatagtttgctttgaccatggccttaaattctccaaactccagcaactttagcactgccctctctcttgggttggcttccaacaccaacgaagccttaacggtgaaaggaatgggccaactagggttgaaccaaaggatcactaaggtgagaaaatcctcattgaccgcaaaagaaagatcgtgtctggttcatggtggcagtgaaaacaacactgagagtatcataagagcaagtcagattgtaagagcccaatggtgcatgcagtatcatcaacaccatccccagtttccagtaataatgttgtggttgttgttgcggacaaaaagaaagccatcgagattctgcaggccaaacttctctgcgcctcagcatttgctcctaaaactagtcccacatcgctcaggccaattagccttagccaccgtttaactccaacgcccccactcaaaacgcgtcgtggttttcttaatgacgatgattttgcttattctctttgtccctctccgctgtctgtttgttttccccatgaaaccagtaccttgcagaatcatgttcgtggcggcgacaccaagtacgatggtcggatgcatagctatccgtacaagaaaaatgggccctacacgtgtcccaagtgcgggcacgtgtttgagacgtcgcagcggtttgcggcgcacgtgagttcgagtcactacaagtacgagaccaagagtgagagaaagaagagactcatggccaaaatccgaaagagaaatctccgtatagaatgggtaagtggtggactcactgttgttcctgacgatgctcctcctactagtgcttttgcttattcggcacgaaacaacaacaacgttgctcctccacctcctgttagggtggtgaaggttgaaggtcagagtggtatggagcttcagcttgctcctcctcctggatgggaaaaattaactgctggaggtggagctgttaaaatcaaattggagcctgtagctagctagggtcttaatctcttatcaagggtccagtagttttagtactctgtttaattgttattcatagggtcagattcaatcttcaattgtgtttatggaccacttatacggtctatagtgcttaattaattgggtcttgtcttcattgttcgccttctctcgttgaataaatactggattttatcttcaaaaaaaaaaaaaaaa

SEQ ID NO: 3656 - DNA, 1934 bp, Glycine max
  Clone ID: GLYMA-23APR03-CLUSTER5225_2
tgtttaatctaaactcaactctccgatttagatctatcatttaattaaattagttggccccattccaagcaaaatcaataaactttcaaaattgcagtttctatatttgactaataacaagttaaatgcaacaattccaaattcaatatttgaacttccaaatctttctggtttgagtttggcatcaactgacttgagtggtcatctggactttcatctattttcaaagataaaatatctaggtattctcgatctttctgacaatagtcttctctctattaactttgatagtaccgttgactacatcttacccaaccttcaatccttaaatttatcttcctgtaatattaatagtttccctaaattcttagcaccacttcaaaatcttctccaactagatctttctcataacaacattcgtggaagcattccccagtggtttcaagaaaagctcttgcactcctggaattatacaactagttatattgacctcagtttcaacaagttgcaaggagatctcccaattccacccaatggaattcactactttttagtctcaaataatgagctgaccgggaacattccttcagcaatgtgcaatgcaagctccctcaaaatactcaacttggctcataacaacttgacaggccccattccttcagcaatgtgcaatgcaagctccctctatatactcaacttggctcaaaacaacttgacaggccacattccacaatgtctcggaacatttccttctctttgggcattggatttgcaaaagaacaacctttacggaaacatacctgcgaacttttctaagggaaatgcattggagactataaagttgaatggcaaccaattggacggacaattacctcggtgtttggcccactgcacaaatctggaagtgttggacctggcagacaataacatagaggatacatttccccattggctagaaagcctccaggagttacaggtactcagtttgcgatcaaataagtttcatggtgtcatcacttgtttcggtgccaagcatccatttcccaggctcagaatttttgatttgtcaaataacaattttagtgggcccttgccagcatcatacatcaagaactttcaaggaatggttagtgtgaatgacaaccaaactggtttgaaatatatgggtaaccaatattcctataatgattcagtagtggttgtaatgaaaggtcaatacatgaagctcgagaggatattaactatttttacaaccattgatttatcaaataatatgtttgaaggagaacttctgaaagtccttggagaattgcattctctcaaagggcttaacctttcgcacaatgcaattactggtaccattccacgatcctttggtaatttaagaaatttggaatggttggacctctcgtggaaccagttgaaaggagagattcctctggctttgatcaatttgaattttctggctgtgttgaacctttcacaaaaccagtttgagggtatcatacctaaaggtggacagtttaatacatttggaaatgattcctatggtggaaatccaatgctatgtggattccctttgtcaaaatcctgctataaggatgaagattggccaccacattcaacatatcagcatgaagaatcaggatttggctggaaagctgtagccatgggatatgcatgtgggttggtatttggaatgcttttgggatataatgttttcatgactgggaaaccacaatggcttgggagacttgttgaaggtgtgcttaattaatgaagagtgaaaaggacaaatcataaggaaaggaaatagtttagtttaatatggttcttttgtgtgtgtctgtatgttttctgtaattttaacttctgtcctttgtgtaacaaatctcatctctcttgactcgagtgatgtatttcatgttgtttac

SEQ ID NO: 3657 - DNA, 1239 bp, Glycine max
  Clone ID: GLYMA-23APR03-CLUSTER5267_10
ggcacaacgccattttatcatacattttctctttctttctctcttccttgttttctcaagccttttctctttctctttcttacgagttgcaaataaaactcccctttttctccggatcaatgagcgatcatctggtgctgttcgtggaccggctggtgcgacccgtgccgatggtccagccgctggcccaacagccccccgagcccgcgacgcccgttgatgaggcggcggcggggccttccgggtcgtctccggcggcggaggaagacggtgacgacggcggagaggatgcgccgctgctgcacctggcggagtgtcgcatttgccaagaggaggacagcgtcagcggtttggagacaccctgctcctgcagcggtagtcttaagtatgctcatagaaagtgcgttcagcgttggtgcaatgagaaaggagacataacttgtgagatatgtcacaagtcctatgaacctggttatactgccccaccacctcgtcctcagcctgaagaaactacccttgatataggtggaggctggacaatctctggcacgccattggacttgcgtgatccccgactcttagcaattgcagaggctgaacgtcaattcttggaagctgaatacgatggatatgctgcttctcatgctagtggagctgcattttgtcgttcagttgctttgattttaatggcccttttactcttgaggcatgcactttctgtcacagattctgacgctgaagatgatccatccacttttttctctcttttcttgcttcgtgctgctggttttcttttaccttgctatatcatggcttgggcaatcagtattttgcaacgccggcgacaaagacaagaggcggcagcactagcggcaacccaagttgctttcgttctacaatccgggcagcgtaggggtctgcagtttgcaatagcaccaggaccaccaacaatgaatacacaccagcaggaacaagtgtaattttttgtatgccaccagtgtatgtaacaaggcttgttggaatgatgccatgcatttttttactcatgattttctgagctctaatttacgtacatacacactagcttgagctactttgagatggtgcataatatttcttggatccattgccttagaaaagaaacatctcattttgttgtattgcagcttcaagtctttgaaagttatagcaatgttaattaagctaaaaagttaacatgtcattccttaaaaaaaaaaa

SEQ ID NO: 3658 - DNA, 1399 bp, Glycine max
  Clone ID: GLYMA-23APR03-CLUSTER5267_11
acttttcctttatccattttccaagcaaaacttttcaaacccaaaaaaaatccaaaaaaagaaaaacaaaacgcttaacgcaatacaaaaaccacagtttcaatcacatctctctctctctttctcgcaaatttctactttctggtaagattttctctctcgttttctcgagaaaacctcgggatctgtgtttgcttgacgcgattccacgatttcccctaatttttcggtctgaaattgcgattttttgttcttcgtttttgtttcgttagggttttctatttgagattcgttgttccaatgagcgatcacttggtggtgttcgttgaccgtctcgcgcgccctgtccccgttgacccggtggcgcagccgccttccgagccgtctcctcctccggcccccgtgaatgctgacgcttccgggagctccggcaccgctccggtggaggattgtgacggagagggcggcggcgaggaggagccgctgatccagatggcggagtgccgcatctgccaggaggaggacggcgtttccaacttggagacgccctgcgcctgtagcggcagtcttaagtatgctcacagaaagtgtgtccagcattggtgtgatgagaaaggagacataacttgtgagatatgtcatcagccatatcaacctgggtatactgcccccccacctcgtcctaatcctgaagaaactactattgatataggaggtggctggacaatatctggcacacccttagacttgcgtgatcctcgactcttggcaattgcagaagcagaacgtcagttcttggatgctgaatatgatgagtatgctgcttccaacgccagtggagctgcattttgccgctcagctgctttaattttaatggcccttttactcctgcggcatgcactttctgtctcagatggtgataattctgatgatgatccatccagttttttctcccttttcttgcttcgtgctgctggatttctattaccttgctacatcatggcttgggcaatcagtattctgcagcgtcggcgacaaagacaagaggctgcagcactagcggcaacccaagttgcttttgttctacaatctggtcagcgtagaggtttacagtttgcaatagcaccaggaccacccacactacaccaggaacaagtataataatttgtatgcttttttatgtatgaatgaatattaagaaggctttgttgaaatgccgtgcatttttactctttactttcagctgtaacgttatgtacatgtacatacttagggggtgctaaaacgatgtacatgaatccattggtatccattcaattcatctatctatgaatgtaaccgaatccatccacttactatatattaagagatttatatgcaaaataaggattaatggtct

SEQ ID NO: 3659 - DNA, 1869 bp, Glycine max
  unsure (1)..(1869): unsure at all n locations
  Clone ID: GLYMA-23APR03-CLUSTER527_2
aataaatcagagtgtataagatgcanaccatgttatttccatatgtgcatctatttgatggcaatttctgttgtcgctttaacaatttagattgagagttactactagttaaggattttataggttagatggtttaaattttacattgagcagtttggaatatctccttaagccgcctcttattcgcaacagagtgtggaactttattgcagattcagtgtatgcataaatctatttgtgcagatgttttgaattgtttaaagcaggtgcctactcgtgaagattcttaccaggttaagttttggggatttccagtggtgtaaaagaaaagaacttatggaccgactcaatggttctgccaatctaatgatagtgtccgatcttgatttcacaatggtagaccatgatgatccggaaaatcttgctcttctcaggttcaatgcgctatgggaagcttattatcgtcataattctcttctagttttctccactgggagatcgcctactatatatggagagttaagaaaacagaaacctttgttgactcctgatataacaataatgtctgtgggaactgagattacatatggtgaatccatggtacctgatgatggttggaaacagtatctagatcataagtggaatagggacatagttatggaggaaacagccaagtttcctgaactaactttgcagtcagaaacagaacaacggcctcacaaggttagcttttatttggaaaaagggaaagccccgaatgtcacgcaaactctctcaaaacgtttggaaaaccgtggggtaagattatagttcatacacaaacttaatgacagaaattggtctacttcatttgaaagctttacctacaattttttggattggcgtttaagaccctccatcctttctcatctgtaaagactaacaagtatacatagatagctgatcagttagatgtgaaaataatttatagcaatggtatagctttagatgtattaccccaagctgctggaaaaggacaggccctagcttttctacttgaaaaattgaaggctgatgaacaaggaccaatcaacactcttgtttgtggtgattcagggaatgatgctgaactgttcactgtacctgaagttaatggggtcttggtcagtaatgcacaggaagaattgcttcaatggtatgcagaaaatgcaaggggaaatccccgaataattcatgcaactgaaagatgtgcagctgccattgtgcaagccattggtaacttctctctaggtccaaatgtgtccccaagagatattggagatttaatgtccaacaggaaagttcatagtcctagccatgaagtggtgatgttctacatattttatgagagatggaggcgtggtgaagttgagaatcctgagcagtatatacaaaaattaaaatcagtctttcattctacaggaaattttgtccatccttcaggaattgatcaacctatgcaccaaactatagataccttagcaaaggcttttggtgacaagacgggcaaagactttcgagtgtgggttgattgtatatctttagcagaggttagtttgggttcgtggctggtcaaatttgacaagtgggagttatctggtaatgagtcacggggttgttcaacaaaggctctgatgaatgcaaaggttgatgtaccagatgagtatacctggatgcacttacatcatacttggttggacgacgtaggaggacaggatgatgtgtcttggttgttatagtttcgaatcacttctgttaaaaagtactctttgctgtcaaactattcagccaaggcatgaggcacggcaatatgcactcaaaccttacatagcaataaggatttttcatttt

SEQ ID NO: 3660 - DNA, 767 bp, Glycine max
  Clone ID: GLYMA-23APR03-CLUSTER5288_6
ttggacttcaaattcaattgatccgtttcccaacccaaagaaagagagagaatgtggtggtggcggcggcggcgtagatcttgagaacatctccttcttccgatttcattttcacccaaaagcttctcgctttcaacatcaccctcaccaaaacccctcttcaacgagccctactcttcttctttctccatcccaatcgaatggccgagggtgcacgaaccgcgcatgcacccgccccgcacccgatccaacccaaacccgacgataaaaccccgaatccggtgaaggagactccgccgccgccggagaaaccggagcccggcgattgctgcggcagcggatgcgtccgggacgtttactacgacgaactcgaagatacaataagctatacaaacaagacgatcccagccccaaagcttcttcatagtcttcatcatcgcatgggtggaagtgttatgggtcgatgattgttgggttattgtcgtcgtcaatacaccagatgactaggtgaattgctttaaggaaccatgtgctaaaggatgtcgggacacaacgctctgataggatgttacattgtatagggttttatagacggccttgttggagccgaagtgaatttattatttatttaaaaagttatgatgatgttagaagaatgtgagcctgctaccctcttgaagctttaattagtttaaaacttgaattaattaatttttttctaaaatgtacgatttatataatcccgaagattaattcggagatttact

SEQ ID NO: 3661 - DNA, 922 bp, Glycine max
  Clone ID: GLYMA-23APR03-CLUSTER52967_2
accataaacctcaagtctcatactatatatactcttaattgttatatatactttcttcgttcagcatggactcgccgaagcggcaggcgcaaaagtttctggtgacggtgacagcggtggtggcggtggtggcgaagcgggcgagccggctgcagcggaagctggcggcgagggaggagtggaggatcgagcttctgcgatcaccgaagaagcttctgagcaacataagcagcaaaacgctgccgtttaggaagaagaagaggggggaggaggattggggaaagggtggggtgtggcagaaggcgatcctgatgggagacaagtgcgagccgttggatttctcgggagtgatttattacgatagtaacgggaagcaggtgaacgagatgcccctcaggtcgccacgtgccagtcccgtgccgcccgggtactatttcatccaccaccgcgaccgccacctctgagcacctctgaggcacctcggtgtgtttgattgaggaggagatgggagaaattgagaagaaaaaatagtttggacctagatttcacaacttttattctctatattaattcaaaaatttcttttctattttccatattcttaatcaaacacagaatcaatgaataactcattgatgatactgcaccggttacaggtcggggcacgtgcctgcctttgttttcagacgtgtgtcttttttttttttttgtggttattggatgaaaagaaattgtataggacatgtgagagtgggaggctttgctccttgaatgggtgttaattagtgtttggataaataatgtagtttgtgttacagtatgtttagatttgaatttcgatctctttgcttttcttctctttatttgaagggagtatggtgggagaaattgttatatggatagctataaaaaaaagaaaacc

SEQ ID NO: 3662 - DNA, 725 bp, Glycine max
  Clone ID: GLYMA-23APR03-CLUSTER5307_10
catctccatctccaccacctccatatatttataactcaccacctccaccatccccttctcctcctccaccttatgtctataagtcccctccacctccttctccattcccaccacctccatatgtctacaaatctccaccccctccatctccatcacctcctccaccatatgtttataagtcaccaccaccaccttctccatcaccacctacaccatatgtttacaaatcccctcctccaccatctccatcacctcctccgtcatatatttataagtcaccaccacctccttcaccttcaccaccttctccatatgtatataaatctccacctccaccttctccatcgcctcctccactatattactataagtcaccacctsctccatcaccctcacctcctcctccaccatatcatccttacctctataactcacccccacctccggtatattaagtttgcggctaaagcaatttgattttgtttctttttcaataaattatgttcaacattgttgcacttaatttgtaatcacttatgtattaataaaaagggtctacactaaagtgagagccttattttggctgtagtgtagcccatgcgtgtgtattggttttaattgatcaaaagtgtgttttaatctctcttaccatatgaatatcaaaatttgttcttcattggtgttggattccaaaaaaaaaaaacaaaaaaaaaagggggggcccc

SEQ ID NO: 3663 - DNA, 1565 bp, Glycine max
  Clone ID: GLYMA-23APR03-CLUSTER5307_12
atcaataaatcgtctaggatcatacctgatcataaacattggttggaggatactccttctactcatgaccgtcggtagttatgacccccctagaaggggtcatcttggtccacaaatggccattgcattgctcattgttctaatctcctttaatgtgggatccgtagctggtgatgcttacatttactcttcaccaccaccaccaccttacgagtacaagtcccctcctcctccttcaccttcaccgccaccaccatatgagcacaaggatccacattatcaatacaagtctccccctccaccctctccctctcctccaccaccatattattacaagtcacctccaccaccatctccttcacctccacctccttattactacaagtcacctccaccaccatctccctcacctccacctccttactattataaatctcctccaccaccctctccctcacctcctccaccatattattataaatctcccccaccacccgatccctcccctccaccaccatattactacaaatcgcctcctcccccatctccatcacccccacctccttactactacaagagtcctcctccaccatctcccgtttctcatcctccctactactacaaatctcctccacccccaacgtcgtctcccccacctccttatcactacgtgagccctccaccaccaaccaagtctccaccaccaccagtttacatttatgcttcccctccaccacccatctacaagtaagcttggaattaagaagcagcaacaataataagtcatgtaagttagtaatcttaaaatagataaatgtctattttatatgcatttataaactctgagaagtattgaaaacttttattttatttcaggttctagtattcattgtggaataaatttccgttccatttggagcagagttaagcatataatttgttatacaagttctttgaataagagtctgagtgtatcacctctaagctacgatcttcatgactcatatgaggttgcttctatttatttggtggccatttttcaagtgttgttcttactaagttcaaggaagcgacaaatcaaaaagattcaagacaaggaagcaagattagaaatgttgatatcaattcaggctgcttttagagctttcttatttgtttctttgtagattaatatggttgattgtgtatgatttcattcaaattattgtgaaattcttttaataaaaaaaaaaaaaaaaaactcgagactagttctctctctccttggattgactgggaataaggtggagaaactctgtgatctctgcaacattactgttaataagaacgcagtttttggtgatagcagtgccttggcccccggtggagtgcgaattggggcccctgccatgacttctaggggtttggttgaaaaggactttgagcagattggtgagttccttcaccgtgctgtgactctcacactggagatccagaaagagcatggcagacttctcaatgatttccacaagggcctcgtcaacaacaaggccattgaaaatctcaaaactgatgttgagaagttc

SEQ ID NO: 3664 - DNA, 1323 bp, Glycine max
  Clone ID: GLYMA-23APR03-CLUSTER5307_15
atcaataaatcgtctaggatcatacctgatcataaacattggttggaggatactccttctactcatgaccgtcggtagttatgacccccctagaaggggtcatcttggtccacaaatggccattgcattgctcattgttctaatctcctttaatgtgggatccgtagctggtgatgcttacatttactcttcaccaccaccaccaccttacgagtacaagtcccctcctcctccttcaccttcaccgccaccaccatatgagcacaaggatccacattatcactacaagtctccccctcctccatcacadtcgcctcctccaccatattattacaagtcacctccaccaccatctccatcaccaccacctccttattactacaagtcacctcctccaccatcyccatcaccaccacctcattattactacaagtcaccaccaccaccagacccatcaccaccacctccctactattacagatcacccccaccaccatctccatcgcccccaccaccctattactacaagtcacctccacctccatcaccttctccaccacctccttactactataagagtcctcctccaccatctcccgtgtctcatcctccctactactacaaatctcctccaccatcaacgccgtctcccccacctccttaccagtacgtgagtcctccaccaccaaccaaatctcctccaccacctatctacaagtaatcttggaattaagcagaagcagcaacaagtcatgttctagtattcattgtggaataaagtccagttccatttggagcaaagttaagcctttaatttgttgtacaagttctttgaataagagtttgaatatatcgtctctaagctacaatcttcacgactcaaatgaggttgcttcgatttatttggtagccatctttcacatcttgttggtactaagttcaagggagcaacaaaccaaaatgaggaagcaagatttgaaatgttgatgccaatgcaggcttttagagatttcttatttgtttctttgtagattaatatggttgatagtgtatgattgcattcaaattattgtgaaaattcttttaattatatcttcttgtgttgtttgcaataaaattttcaatatttgacataaaaaagcataataatatgcatatacatattatgcataaaaaaaaaaaaaaaaaaaaaaaaaaaaaaaaaaaaaaaaaaaaaaaaaaaaaaaaaaaaaaaaaaggggcggcttaccatccaactagaagggccctggcccatttcatataggggtgggaaaattgcagttttaatagaccaaagttggg

SEQ ID NO: 3665 - DNA, 1293 bp, Glycine max
  Clone ID: GLYMA-23APR03-CLUSTER5313_1
attactcacttttcagttctcaacttctctaacaatggcttcattttctctcttcttcttcttcctcttcaccacattgctactatctttttcttctgctaacgcgcgactcaccttggatttctacaatgacacgtgtccacagttcagccagatcattagggacacagtaaccagcaagcagatcgccagccccaccaccgccgccgccaccctccgcctcttcctccacgactgcctcctccccaacggctgcgacgcctccatcctcctctcctccaccgccttctccaaggccgagcgcgacgccgacatcaacctctccctccccggcgacgccttcgacctcgtcgtccgcgccaagaccgcctttgagctcgcctgccccaacaccgtctcctgcgccgacatcctctccgccgccacccgcgacctcctcaccatgctcggcggccccttcttccccgtcttcctcggccgccgcgacggccgcacctccctcgcctccgccgttcctgaccacctccccacccccgcaatgcccatctcccaaatcacacaaatcttcacccaccgcggcttctcaatcgaagaattcgtggctctcagtggggcccacaccgtcggattctcccactgctcccaattcgtcaccaacctctccaactcctcctacaaccctcgctacgctcaggggcttcaaaaggcttgtgcagattacaaaactaaccctaccctctccgtcttcaacgacatcatgacgcccaacaagttcgacaatgcttacttccagaaccttccgaagggtttgggtgttctgaaatctgaccatggtttgtatagtgaccccactacgagaccctttgtggagacttttgcgaaggatcaaaatagattctttcaggtttttgctagggccatgcagaagttgagtctcttgaatgtgcagactgggaggaagggagagatcaggcgcaggtgtgatcagattaattgattttatttatttattttttgttgtttgaatttgataatgagatgagattttataatttataatgatgagaatgatacctctgttgttgatgaattggatggtttttgaggttgattatttaacatacatagtgtttatgaggttgtaagagaatgggggcattggggtattgaggagttactattgttgttcttcgccctcttgttctttggatagatgagtctgagtatgtttttccaatgtaatattataagataagatttaattaataaaatttctcattttgagctcccaaa

SEQ ID NO: 3666 - DNA, 809 bp, Glycine max
  Clone ID: GLYMA-23APR03-CLUSTER5319_2
aattaacaccaaaatcagaaacacaatcgtctccatcaccattcaaaacatggccaccacgatatcttgtgatttctcttcagtggaatctattcaacactatcttcttgagcttgaacacgatttcaacacactcatgaacgcttccaatcacgaaatttgctattctccaacgtacaattcattcccaagctctactacgttccgcttggaaggtgtccatgatgcagaagggtcgttagcatgcaaaagagaacaccctaaggtggagcgtgaatttcacgcgccaccagcatggaagcgttaccggggcgtgaggcgtagaccttggggcaagttcgcggcggaaataagagatccaaagaagaatggtgctaggatatggcttgggacttacgaaactgaagaagaagcgggtttagcttatgatagagctgcttttaagatgcgtggcagcaaagctaagttaaattttcctcacctcattggttctcacgcgcctctgaagccgataagagtattgacaaagactttgaagcaaaatttgttagagtctgatttgtcatactcatcggctccacagacgcaagagtcaaagaagagaaaaaatttgaccgacttgttgaacaggttggccaagaataggaaacaagtggaggtgtttgaaatgagtttacatgcatcaaatgatgtcaatgttgatcaatggtggagtaattaagttgaatgattgtgtccgggtgtaatgcatgtggtgcccataaggttctagtgttttccaaggactgtatacagttgtttgtttccct

SEQ ID NO: 3667 - DNA, 1151 bp, Glycine max
  Clone ID: GLYMA-23APR03-CLUSTER53244_1
atacttcatttcccatttttatcaccaaaatgtctgacccagcctccaaacccagcggaaacggcgcggccgccactaacggcaatcccggacccgtcaagtctcaactctacaaccccaaccgtcaagtttaccgcccgcaatcacactaccaccgtcgcggccaacgctcccaccgtaacctctgctgctgctgctgcttctggaccatcctcaccctcctcgcggtggccctcctcgctgccattgtcggcgccgcactctacgtactctaccgccctcaccgtcccgaattctccgtcacaaacctccgcattgcgaagatgaacctcacaacctccgcggactcaccttcacacctcactacgctcttcaacctcactctcatcgccaagaaccctaacaaccacctcgtcttcttctacgacccgttctccgtgacggtgctctcgaactctgtccccgttgggaacggttccgttacggcgtttacctccgacaagaacaaccaaacgagcctccgcgcggtgctgtcggggtcgcaagatctggacacggactcgttgactagcctgagatcggggctgaagatgaagagagggttccccgttgagattcagatggacaccaaggtgaagatgaagatggattggctcaagagcaagaaagtcggaattagagtcacctgcgacggaatcagaggaaccgttccctccggcaaaactccggcggtggcctccgtcgtcgactccgagtgtaaggtggatcttcgaatcaagatctggaagttctccttttaataataattaatgtcttttttgattgattgattgattgttataatcattgcgaaaattcgttattatctatcgacatcaatttcaataatcaataaaataatccatcgatcccttttctctacttttttttttttatttttggttttcataattgccttgggggatggatggattatggttacgtacttttcatgaaacgtgcacaaggtcaaatttgtatggagaaatgaattttgagcttgtaatatgagatttagggcggaaatgtaatttgtttcaaagttcttattcttatagtaatgcaactgaaaattatatttggggtggttaaaaaaaaaaaaaagggcggcc

SEQ ID NO: 3668 - DNA, 1333 bp, Glycine max
  unsure (1)..(1333): unsure at all n locations
  Clone ID: GLYMA-23APR03-CLUSTER533138_1
aggtgnctcgtttatcagctacgtaggcccccccccccgttgttgctgccttagtcgtcattgtcattttggtgactgtctatatctgcttgatgcgtgttaaaagatttatgaggcaaacatctgaggttgcttcttctatgccatctcccactgttgagataggaagagtcaacaacgcacatgttaatgctttctctccacattatacgcataacacaagacagttaacaattttggaagtagaacaagcaacacgaaatttcagtcatagtaatattattggtgaaggtggatttggttttgtatacaagggcttacttcaagatggatccatagtggctataaaaaggcgtctatttgttctgacacaggattttgtccttaaggtgaaacagatagctcatattcaccacaatcatcttgtgaagctcataggctattacgaagatagctatcaacaattacttgtatatgaatatctccctaacggcaatgtagggagtcacctatatgacagtgaaggtttacctattggaaggttggatttgtggcgaaggatatctattgcttcaggcgcgtccaaaggtgtggaacatcttcatagtttggtccctcctttgattcacacaaattttagaactagcaatgttctgttagatgaaaattacacggccaaggtttctgattatggattctgcaattcgaaaacacaagttgataatgttggctcatcttcaaatgtagactgttttctagacccagagctgagctttccacaaaactatacggagaagagtgatgtatacagtttcggggtcttcttactagagttgatttgtggttgtgaagcacaaaacaaaagcatgtcaaacccagatgaaaatatagtgtttcaggcaaaaaatagcgttgacttggacaagtttgttgacataacgctgggggagcaagaaaagcatggtgctagaagagtgatgaaattggcattgctctgtgtggatgtgactagtagaaggccatcaatggctcaaattgtgcatgagctggagcagattcaaagagaaattgctccaatgtattctcaattcaacgaggagattggtgccgtgactctagggagtgagctctttcagtaagccttgcgaattgcgatgccactttagaaacctttatttttccccctgtttgttgcgtaactattattattgttatggttattgacttttgtaggtatgttggtcctggaaggatattattcatttgtaattatttcaaagtaaataaaatgttgaaaataagtagaattagattggaaaaaaaaaaaaaaaaa

SEQ ID NO: 3669 - DNA, 1243 bp, Glycine max
  Clone ID: GLYMA-23APR03-CLUSTER533552_1
tcagctacgtaggccccccccccccaatgtgatcatttggattttaatttcttttaccttaagctattaacaacttgttcgctctcaagcaaaatgtccttaatagcagaagcacccaactttcttaaactttattctgatggttctgtgaaacgctttgaccctgaaattgttccagcctctttagaatcaaccaagggatacaagtccaaggatgtgatcatagactcatcaaaacctatcacaggaagaatcttccttcctgattatcctacttcctctaagaaacttcctctcttagtctatttccatggtggaggcttttgcattggctccaccacatggcttggctaccataactttcttggtgacttctctgtcacatctcaatcgattatcctttcggttgattatcgtttggctccggagcatcgcctccctattgcttatgaagactgttacacctcacttgagtggcttggtgatcaagtttcttgtgaacccttgttgcaacaaattgacctaactagagtgtttctctctggagacagtgctggaggtaacattgcacatcatgttgctgtgaaggcaattcaaaacaatgaatgccctttgaagattaaagggttaatgctcatacacccttattttggtagtgagaagaggactaagaatgagatggctgatgaaagtataaaggatgtggccatgaatgatatgttttggagactaagtattccagaaggcttaaatcgtgactattttggttgtaattttgagaaaacggacctatctacaagtgtatggtctaaattcccagcaattggggtttatgttgctggtaaggattttttgaaggaaaggggagtcaggtatgcagaatttttaaagaagaaaggtgtaaaagaggtggagcttgtggaggcaaaggaagagactcacgtatttcatgtatattatcctgaatcctgtgcaactcgcttgctccaaaaccaaatgagtctattcatggagaaatattagcatcaactatggctataaaaggactatgtttcttaatatcaataagacaatcaattgaagtagtatagattaagatgctttgtcatgcttttgctagtcttcaatagatgcacaagagctatctagctagaagctataaattattagattgccattgatggcgttccctaaaataaaatccttttacctttacaggtagtacaaaaaaaaaaaaaaaaaa

SEQ ID NO: 3670 - DNA, 1445 bp, Glycine max
  Clone ID: GLYMA-23APR03-CLUSTER534572_1
tcagctacgtaggcccccccccgataatagtcaaaagtcagctaccctaaaatggagggaaacagtggcagaggagtaaggggaacgaagaagatcgcaattctgccatgggaattgataattgaaatcttgttgaggttgccggtgaaatctcttgttcgtttcaaatgcgtatgcaagtcatggctatgtctcctatctgatccacactttgcaacatcgcattttgaacaaccctccacacgcacgcacagactcatcttcatcgtagcaccttcttctcctcaaatccgatccattgatttccctctacgatgattcagcttgggctgcattaaacctcaactttctgcgtcccaatacgtatcacaatgttcagatcttaggttcctgcagaggctttctgcttctgaacggctgtcaaagtctctgggcgtggaatccatccacaggggtctacaaaaaactatcttcctcgcctattgggtccaatttgatgcgatccgtgttttatacgtttctctatggttttggatatgactcttcaactgatgattacttggtggtcaaggcttcttacagcccaatctcgcgttataacgccaccacccgattcgagtttctctcgctgagagctaatgcgtggacagatattgaggctgcccatttgtcttacatgaactcctctcagggtatcggagcaggattgtttttgaatggtgctattcattggttagttttttgttgtgatgtatcactcgatgtcgttgttgcctttgatttgactgaaaggagtttctcggaaatacctctgccggttgattttttggaggaggatgatgactttgattcttgcgaattggggttgggggtgctcggagaattgcttagtataagtgctgtgggacggaaccactcagtacaagtatgggtaatgaaggaatacaaagtgcactcgtcttggactaagactattgttgtgtcttctgaaaacattcttttgtttcccctatgctctacaaaaggtggtgatattgttgggacatatggtggaactggattggcaaaatgtaatgacaagggacaggtgcaagagcatagatcctattccaatcatccatatccatcccaagtggctgtgtatatagagtctctactttcactccccatgtgacaccgagctagctggagatgacgactaacaatagcaacaagaacgattaggttgtcaaatattttctgctacttttactactgttttctttatactcaccttgtattgtgatttatgaatccctctgtagtgtttaaagcatggaaagtattacgtggaatgatgaaactgctataccattatgttctgttctatgtttatttcatcatgatgctattactgcgttgttatttgcaaaaaaaaaaaaaaaaataaaaaaaaaaaaaaaaaa

SEQ ID NO: 3671 - DNA, 797 bp, Glycine max
  Clone ID: GLYMA-23APR03-CLUSTER535291_1
tcgagtcagctacgtagggccccccccccttgctcgctgcgccgccgcctccgacatcgtcccttcgtccccacgagcaaccgataatccgccggcgttgagatgtttggtttatcaggatctcctatctggcgacgagctcctgtcggattcattcacctacaaggagctcgagaacggcgtcctgtgggaggtcgagggaaagtgggtcacccaaggtcctgttgatgtggacattggtgccaatccatccgccgagggtggtgaggacgaaagcgttgatgacacagctgtgaaggtggttgatattgttgacacattccgtctacaggagcaacctccttttgacaagaaatcatttgtgtcttacatcaaaaaatacatcaagaatctcactgctgtgttggagccagagaaagcggatgagttcaaaaagggtgtcgagggtgcaaccaagtttctccttagcaagctgaaggacctccaattttttgttggtgagtccatgaaggatgatgcgtctgtggtattcgcctattacaaggatggtgccactaatccgacattcctctatttctctcatggtcttaaggagatcaagtgctaggcgtgcggcgaaattagttacccatgttgggtactatctatgtactattattatatccaaaactatagttgtcctggctgaattgaactcaaaagggtttgtttgagaaaaaattgtcccaagattggattgcttgttaaagctcaatattgttattgaagtgttattgcttaaaaaaaaaaaaaaaaaa

SEQ ID NO: 3672 - DNA, 1761 bp, Glycine max
  Clone ID: GLYMA-23APR03-CLUSTER535461_1
ggcaccacttaactttccaaattgcatccccattgctactataccaagagtaacctcactcctccacaaaacaaaacaaaaacttactaaactaacatggctttggggaacaacagtcaccagcttctgtcgaaaattgcaaccaacgacaagcatggagaaaattccccatactttgatggatggaaggcctatgattcaaacccattccaccccacaaaaaatcctcagggtgtcatccagatgggtcttgcagaaaatcagctgtgctttgatatgattcaagagtggataaggaacaatcctaaggcctccatttgcactgctgaaggagtgaaccagttcaaatatattgcaaactttcaagactatcatggattgccagagttcagaaatgctgtggcaaatttcatgtcaaaagtgagaggtgggagagtgagatttgatcctgaccgtatattgatgagtggaggggccacaggagcaaacgagctaataatgttctgtttggctgatgctggagatgcttttctggttcctagcccttattatccagcatttgtccgcgacttgtgttggagaacaagggcacaactaattcctgtggagtgtcacagctccaacaacttcaagataacaagagaggctcttgaagaatcatataggaaagcaaaagagggtaacatcaacgtaaaagggttgatcataacaaacccttcaaaccctttaggaaccaccatagacaaggaaacacttaagagcattgtggggttcatcaatgaaaagaacatccatttggtgtgtgatgaaatctatgcagcaacggtgttcagagcccctagctttgtgagtgtctctgaagtaatgcaagacatggagcattgcaaaaaagacttaattcacattatttatagtttgtctaaggacttggggcttccagggttcagagttggcatagtttattcatacaatgatgaagtggtgaacagtgggaggaaaatgtctagctttggattggtatcatctcagacacagcattttcttgctgcattgctttccgacgacgagttcgtggagaggtttttggcagagagtgcaagaaggttggctgcaaggcacagccacttcacaaaggggcttgaaaaggtgaacattacttgcttgccaagtaatgcagggcttttcttttggatgaacttgaagggtttgctgaaggagaaaacgtttgagggtgaaatgatgctgtggcgtgtgatcatcaatgaggtgaagctcaatgtgtcaccagggtcagctttcaattgtcctgagcctggttggtatagggtgtgctttgcaaacatggatgatgaaactgtggatgttgcactcatgagaatcagggcttttgttggcaaagagacagggaagccaccaaaggaactcaaacgttggaaaagtaaccttagactcagcttctccaactctagaagatttgatgagaatcttatgtcacctcacatgatgtcaccccattcaccaatgcctcactcaccccttgtcagagccacttaattggaccagcaagcataccttcattaccttgaaagattcatatgtattaagagttaattacaaaaatgttctttaatctttctatcatgttatttagttatgtttcaactgttgtcctgtttatgtgacagctaactctattgtagttaggtaactcaaatgatttgttcaattcaagtgttttataatattaattatgaatttatg

SEQ ID NO: 3673 - DNA, 1593 bp, Glycine max
  Clone ID: GLYMA-23APR03-CLUSTER535904_1
tcgagtcagctacgtaggccccccccctcccaaaagtgagcattgcaatttgcaacgtggcactgtcttctttattctgaaaagaaaaacgcgagtctacgcctcttgacggattgcgaaaatgaaatatagggtttcgcacaagttccctgtgcttcctcgccacactcgtccctttaaccacactcgctacttcacttccttcgccaagaagttccaaacacctcaacctcgggcttctatcaatgccggaggaagtggaaattctcaagggaattcttttgttgtacctggagcaacagttgctaccatacttatgcttggtgttctccatgcccgccgactctacgaggacaagaagactgaacagatgaaggagaagggaatcgaaatagaattccaacctgatgcaaaggctacatttttgagattactgcctctgcgttcaatttctagatgttggggatacttgacaagcatggaaatacctgtttggctaaggccccatatctataaagcgtgggctcgagcattccattcaaatttagaagaagctgctttacctctagacaaatatgcctctttaagggatttttttgttcgcactttgaaagaaggttccaggcctattgatgttgatccacagtgtctggttagtcctgtggacggtacagttttaagatttggggagttgaagggagctggagcaatgattgaacaaattaaagggttttcatattcagttttttctcttcttggtgcaagccctttccttccaacaacagatgtgcaagaggagcatagtgaatcaataacaactactgtgaagagcaagaagtcatggtggagagtttcattggcttctccaaaagtgtggaacccaacatcatcacgcccaaagaaaggccttttttactgtgtggtttacttgaagcctggagattaccatcggatacactccccagctgattggaacattcttgcacgcaggcatttttctggtcgtctttatcccttgaatgaacgtgctacaagaacaattagaaacctctatattgagaacgagagggttattcttgaaggtctatggcaggaagggtttatggcacttgctgcaattggtgccacaaatattggctcaattgagcttttcattgagcccgaacttcatacaaacaggccaaggaagaagtttcttcattcagagcctcctgaagaacggatttatggatgtgaaggtgtaggcagaatgctcaagaaaggggatgagttaggtgctttcaacatgggatcaacagttgtgcttgttttccaagccccaatttcaaaactccctgagggcgattcatctcaagagttcaggttctgcgtcggccgtggggatagaattcgtgttggtgaggctctaggaaggtggcatagttcgtgacagacatatttgtgaatatacgcttcccctgactgttggtgaaacttgaaagcattttcgatattttatatagggaatctttaatacctctaactgaaaactgtgattagtaattgatattaatggtgcattggatattttgagtcaaaaaaaaaaaaaaaaaa

SEQ ID NO: 3674 - DNA, 1400 bp, Glycine max
  unsure (1)..(1400): unsure at all n locations
  Clone ID: GLYMA-23APR03-CLUSTER536101_1
tcgagtcagctacgtagggccccccccnttcaaaactctctgctttttaagccttcagctacgtaggcccccccccccgttttcctctgccatagcttctgtctttgaattttagatggctgcaacagaaacaataacagcggaacctcacgaagccgaagaacaacaacatcaacaacaccacgtatacgtagaagcagaacctctctcatacaagaccgtcgtgttgagagtctccatccactgccaaggctgcaaaaggaaagtccagaaaattcttcaagccgttcacggtgttcacactatagacattgatttgaggcagcacaaagtggtagtaacggggaacgttaacagcgagacgttgatttggaaattgactaaggcagggaagcatgctgagttatggcctcaattaaaagcagattccaaaaagaaaaagcaacccaaaccagaaagcagccaaggaattaaccaaaccgataaacaagctgttaacgttgttgctcaaggcactaacgctaacgttagcaaacccggcgaaggatgcgcgaccggtaaagccggtgttcagattcaagagccgaagccggaggtgatcaggcagaccgtggtactaccaccggccggtccggtaactgagaaggtcagcatcgcagttcaagttcctaacgacaatgaagcaaccgggaatgagaatataaccggcggtaccggtggcggtggtgcagggaaaaagaagaaaaagaaggcgagcgtgaaagggagtactaataacaacgccaacgaaggtgctggtgctgctactgttactgttgaacacgctaaagcaaacgatggttccggaccttcttccggtaaccagtcacatggtcaaggtcatgtacatgttcatgggccatggcttccattttcaagcccagccaatgagagtccaccacgtcatcataacatttaccgtcagtacccaccgcattactatgctcctcctcctcctcctcctcctccttctactacccctgctgttcatacggtcatgagttatcacacggcgcatcctagcagcagctacggtacagcgtattacacctctccgcaaccgtattcgtacgcccacgtggtgcgtccagggaacgaaatggagcctccaccaccgtacacgtacgaaagggaatcgtatgcttcatcgcagccgtcggattccttcgagctcttcagcgatgaaaatccaaatgcgtgctcggtcatgtaaatgtaagtgtgtgtgatgcatcattacgcgcaattatttctttgaactgctttaccacatacgacttgtacgagcatggagtaattttgtaatgcttgtagagttggagatatacaagaatattattatcaaaaaaaaaaaaaaaaaa

SEQ ID NO: 3675 - DNA, 1780 bp, Glycine max
  Clone ID: GLYMA-23APR03-CLUSTER53643_1
tcagctacgtaggcccccccccccccagattccaagtgaggatcagctgaagtctaagctggaagtgaaaccataagaacccgatcgagaacttgttacatatgcatatctgatatcaacatctcagtaacagtgagtggcataaagtctatatataaatggagggcaaaattgcattgaaaaaattgctggaagttcaggaaaaggcatacgttaatgatacagatgcaatcaactggactgaggaaccgtccattaaaaatactctaggatctagtcttctcagtttgagtctgaataacttggagcctccccaaaatcatgagcaacagaacctgaatcaattgggcttgctgcaaattgagttagaggaggtgaagaaggagaatcagaatttaaggtcaatgctaaatgagatctctgaacactacgctgctcttcagaatcagttattgttggcgatgcagcagaagaaactatcttcatcacctcgaaataatgaggacatgcagaaggacagccagcagaataacatggagaaaccagcgttaccctcctgcaggcagttcttaaatactggtaaaatcaataacagggtaatattacaagaagcaaaaatcgtagaagagcaagcatttgaggcttcttgcaagaaagctagagtgtccgtaagagcgcgatcagaatcatctttgatgggtgatgggtgtcaatggagaaaatatggacaaaagatatcaaagggcaatccttgtcctcgggcctattatcgctgcaacatgggaactgcatgtccagttcgcaagcaggttcaaaggtgtgctgaagatgagagtgttgtcatcacaacctatgaggggaatcataatcattcactcccaccagcagccaggtccatggcgtgcacaacatcagcagcactgaaaatgttcctttctggctcaaccactagttcacatggaagcacttattcttattcaaattcagacctcttctctccactatgcacttctacctactatccatctgcagcaccatcatgtccaactataactttggacttaacccaaacctctaagaacaacatgaaattcccaagtgctatttcttcaaaccatttgcaaccttttccactttcattgcatggtcaacctcaacaatctgagggaatattaccttcagagaaaaaccttgccttggtggatgttgtcagtgctgccataaccaacgatccttctcttaaggcagcattagaagcagctgtttcctcaatcattggagactctcagaaatcactgccaactttgtaggagtgataatgacccctcttctaagatgtctgcagtatcacagcctcggctgtgcagcactacggatcaattgatttagagttgataataattgtcaagaaattagtaaattaagcaagcaagtcagctagtttgacttgcctgccagaagaggagatatgcataagcatgttttatatatagtaagtttaatatcaacatggtgagatgtagttggcatataaatgctccttaatatgtagtcaggagcttaatccgcaagtctatgtttattgaagaatatctgttcggaaaggtcagttccttgaatcaatcttctacttcgagagattagtatcttctggccagaaaatatcctggacacccaaaatatatgcctgtttgtatagcaagtgtaatgagaattgagagaatccatgttcataaaataatatatgaattggtccttgaacaaaaaaaaaaaaaaaaaa

SEQ ID NO: 3676 - DNA, 598 bp, Glycine max
  Clone ID: GLYMA-23APR03-CLUSTER536518_1
tccagctacgtacgcccccccccccccagccaagcaaataagacgacttgtttcattgattcttgaagagatcgagcttcttttgcaccacaaggtcgaggatgtcttgcaactgcggatcaagctgcggctgcggctcaagctgcaagtgcggcaagaagtaccctgacctggaggagacgagcaccgccgcgcaggccaccgtcgtcctcggcgtggccccggagaagaaggccgcgcccgagttcgtcgaggccgcggcggagtccggcgaggccgcccacgcctgcggctgcggtagcagctgcaagtgcgacccctgcaactgctgatcacatcgatcgacgaccatggatatgattattatctatctagcttgtggtggtggttgaacaataataagcgaggccgagctggctgccatacataggtattgtgtggtgtgtgagagagagagagaaacagagttcttcagtttgctatctctctctctgcatgtttggcgtcagtctttgtgctcatgtacgtgtgtctacatgcatgttggttgatccgattgcgtctgctgtaaccatatattaattggtcaaagatgaaa

SEQ ID NO: 3677 - DNA, 556 bp, Glycine max
  Clone ID: GLYMA-23APR03-CLUSTER536572_1
tcagctacgtaggccccccccccccccaactaaaaaaaaaagatttgagcactagaagtttagcacatctcaaatggcctcaattttcaagcttctcttcctgattctttttcttggtttagtttttcaaggtgttgcagcaaattgtcccattgaggggagatttagcattagccaatcacaaacaccagactgggcacatggcatgccacaatggaaagtgaaagtcactaacaaatgtgcgtgtgctcaatcacaagtgaagttgaactgcagtggatttcaaacaaactttgttgagaacccatcaattttgaacatttctggcaatgtgtgtcttctaaaaaacggtcttcccattggtataggtgaaactgtagagtttttgtatgcatggcttcctaagtttccatttcaacccatttcttctataggagattgcaactaattgatcttaagtaggaggattgcagatattatttatttggtcatgtaaaagtttaattaatgaaagctacaaatgaaataatttgttatcaaaaaaaaaaaaaaaaaa

SEQ ID NO: 3678 - DNA, 1450 bp, Glycine max
  Clone ID: GLYMA-23APR03-CLUSTER536691_1
tcagctacgtaggcccccccccctttttttatagactgaattttatactactgtaccataaatttttacatgtaaaagttaatttgtttgtgccttttgtaagtgaaatttctgccacagtcagcagctttggggaaccccaagttgattccgggatacgaatccccctgacccatgaacatcctttcagtaaacttgagtattagacaccttaatggaaaattatgacatgaaatagagtatcataaaatgaagaaggataagatgtgaaattgtaatctccactataaggagtgtgaaataaggtcaagtgacccttcacttattgcatagattaaaatgtgtcatgattaatgagaagtagaaagggagacacatgtaaaaacttatattttatagtatttttgaaagacatgaaaatatgaacatggataaaggacttatcgtgtgtctggattggtgttatgtcagtgtgatccgcgtccttttgaagcaaacttttgtagcttccacattaacttggcatacttgacgtgaatttggttttggatgtggttggaaaatgcaaatccaacatgctataaagttgtcaatttaaatgctaacatgggttctagttctactgcttgcaaaattggtacttgtcattggatttggtcaacttgaataaaaaacttgattttaaagtgcttgataaatgatgtgaattgaggcaatgctatgaagtcattcattgaaatattctcattctgtgataactttcttaaattcctcttcttccctggccacttcacttttcaataattgcagcctggagctgtgtatgtatctcaaaacttgaattttaagttcccggtctatattggagatcagattattggtgaagtgcaagcaactaatctgagagaaaataaaaatcgatatcttgcaaagtttaagacaaggtgtttcaagaatggtgaccttcttgtgattgatggtgaggctgtggctttgttaccaaccttgactgtagaacagattcaacacgagaagtgttaaaagatattcactgttcttggctgttaatcgcaaataccttttcaaaggtaatgttggtcttgaaatatgtttgttgctttctttctaatggaagtcattgggggttctaaattctgatccgctacgctgaacacggacaaacagcagacaccaaaaaagtttttgttctctttgttattccgatattgttgccgaacagttatgcttgactttttgtgttctttttttatcatatcacgcaaaagctcacttcattgcactgagcttcaaatcaaacggcacaaagagatatcttattgataatttttttggtcttttgtgccatctaaaaaaaaaaaaaaaaaaaaaaaaaaaaaaaaaaaaaaaaaaaaaaaaaaaaaaaaaaaaaaaaaaaaaaaaaaaaaaaaaa

SEQ ID NO: 3679 - DNA, 1773 bp, Glycine max
  Clone ID: GLYMA-23APR03-CLUSTER536885_1
tcagctacgtaggccccccccccccatgacgcagcagattgaaccttgtcctggaaatcttatccccagcatagcaaacgtcaaactcctaccaagataaacaaaatgggtataggcaatgatactgaacgcctcagaacaatttggacacctgagatggatcgatttttcattaatcttatgttagagcaggttgcccagggccgtaaatttgaggatcatttgtttagcaaaagagcttggaagcatatgtctttaaagttcaatgctaagttcaattttcagtatgaaaaagatgttctcaagaaccgccacaaaacgttacggaatttgtacaggggcattaagaaccttcttgcccaaccggggtttagctgggacgaaaagcgaaatatggttattgctgataatcatgtttgggatgaatatctcacggtagatgcgaatgtgcggtcatacagagtaaaaagcattccctatttcgaagatttgtgtactgtttatggacatgtgatggaaggaaaaggtgatactgcaccagaagaatcatctaattcaggcgaatatggagcaattacaccctttctatctaaggatgtctgtgaggatgatgatgagcttctttgtgatgttaggactgatgaagactgtggaatctctaccgtggaaaatgcaactgatgactgtgagcaaagggcaaagaaaacagcatcctcttctggtacccggacccggacttattggcagccaccaatggatcgttacttcattaacttgatgcttgcccatctgcacaaagggaaccaatttgatggggtcttcagcaaacaagcatgggtggaaatgatttcatcattcaataaaaaatttggctttgagtatagtttggagattcttaagaataggcacaaaactctgagaaggcaatacaatttaattaaaagtctccttcagttgcatggctttgactgggatgaaacacgccagatggttattgccgatgattgtttctggcaagattatataaaggttcatcctgatgcacgacaatatatgacccgacctttgccatactataaagatttgtgtgccatatttgatccaaattttgacgaaaaagaatctctgcttcaagataagcttcaaaatgcagttgattttcagaccgagtgtcctcagacatctaaaactggtcagtctccaattacacccaattccaatgaagaacaatttagcagtgtcaatgagttagcaaatatatgtcagaagcaaaagcgtcaactagagaagggttctaattttactagtcctaaaaaatcaaggaatgatgaacaaggcatggctgttgctctctgtgagatggcagctgtagtttcaactgtgtctgcaaaaaagatcgatacctcaatatcaatagagaatgtcatagaagcagtgcaagcattgcctgatatggatgatgagctggttttggatgcttgcgatttcttggaggatgaaagaaaagctaaaacatttcttgcattggatgccaagcttaggaagaaatggttgattaggaaacttcgcatacagatgtagcctatgcccactttcatttttctttaatttcttattggttattggttttgatccatattattttagaaagattagctgattagatttatatgggtgggggattctaagcagatttgtgcaactaatcattctgaggatggaattagtattttggaaggcacagtaaacttatacaaaaaaaaaaaaaaaaaa

SEQ ID NO: 3680 - DNA, 1692 bp, Glycine max
  Clone ID: GLYMA-23APR03-CLUSTER536941_1
tcgagtcagctacgtaggcccccccccgactttcaaaaacctaattaactcctgtgtgagagagagctaacaaacatgtcatcagtaacctacaaaggctgctacaccgtaaggcctatggaaccaacaaagtgtgaacgcgtacctttatctgaatgggatcaaataggcaccataactcacgttcccacaatctacttctaccgtcccacctcacaagacaaagacaacgttaacaccgttgcttccaccttgaaagacgcattaagcagagccctagtgccgttttatccactagttggtcgtttacattggataaacaagggtcgtttagagcttgattgcaacgccatgggggttcatttcattgaagctgaatcctcactaaccctagaaaatctcggtgacttttcaccctcttcagaatacaacaaccttgtccccaacgtagactacaccctcccaattcacgagctacccgtggttctcattcaactaactaacttcaagtgtggtggttttagcattagcttaaatacttcacatgctgttgcggatggaccaagtgcattgcacttcttgtgtgagtgggcaaggctttcacgcggtgagcttcttcaaacggcgccgttattcgaccggaccgtgtttcgtgccggagagcctcctctgatgccactaacggagtgtcgcgttcacaaggatcagttcattcaccctccgttgttgctcggccaaaccaacaacacagaagaaaggaagaaaaaaaccacagtggttattctcaaactgaccaaaacacaagttgagacactgaaaaagacagcgaatgagagtaacagtggtcatgcacgttgttacactcgttatgagagtgtgactggtcatgtgtggagaactgcatgcaaggcaagagggcacaaagaggaccaaccaaccgcgctaggtgtttgtgttgactcgaggagtcgcatggaacctcctttgccaaaaggatattttgggaatgcaactttggacactgttgctactagccttgctggtgatttggtgtcaaagccattagggtatgcgtgtagtagaataagagaggcgattgagagggttactgatgagtacgttaggacggggattgagttcttgaagaatcaagaggatttgagtaggtttcaagatctatatgcaatagggagtgagaagggtcctttctatgggaaccctaatcttggtgtggttagttggttaacgttgcctatctatggcgttgattttgggtgggggaaggaggtttatatgggtccggggacacatgacttcgatggagattctttgcttcttcctggtccagatggggaggggtctgtgctgcttgctttgtgtcttcaagtgccgcatatggatacgtttaagaagcatttttatcaagacattaatgtgtcagaatcatgccaagattgataaattggagaaagacacttgcatgcatgcagcaagcagatacaatttgcaacacgtacagcttctcgatcaacttaaaataaccaagctaaataagatgaggagaaactaatttaatcacatatgaaggttattgcttatttcttaaccattatttgtgttatcgtgtagtggtttttacctataacaataataaaaagatagatatccttgtttaaaaaaaaaaaaaaaaaa

SEQ ID NO: 3681 - DNA, 878 bp, Glycine max
  Clone ID: GLYMA-23APR03-CLUSTER537209_1
tcagctacgtaggccccccccccgaaagaaaagaactaagaagctgaaaaacaagagagagaaaaagaatagcacactcaaccatagttatctagaaccaaatcatgtctcacatagccgtcgagaggaacaggagaagacagatgaatgaacatctcaaagttttaagatctttgaccccatgtttctatatcaaaaggggagatcaagcatctataatagggggtgttatagaattcatcaaggagctacaccaagttcttcaagctttggagtcccagaaaagaagaaagagtttgagccctagccctggcccgagcccacgaacacttcagccaatgtttcatcaacttgatagcccctccatgattgggaccaattctttcaaggaactaggagcaagctgcaactctcctgttgcggatgttgaagtgaaaatctcgggttcatatgtgatcttgaaagtcatttgccacagaattccaggtcaagttgcaaagatcataactgttttggagagtctttcgtttgaagttcttcatctgaatatcagcagcatggaggagactgtcctttaccaatttgttgtcaagatagagctgggatgccaactaagtctggaggaactagcaatggaagtgcaacaaagcttctgcttagatgctataattgcgctgtgaagatgtagtatttctaaagagacccaatttcgaatcgtttgttaataaaagaatggcatgtgatagacatgcataaaaactatttcttcagtaattacttgctacaaactaggcttattatatcattactgttgtcataaacttgatgacaaggaaaatatgctgttgcttaatatttggaaaaaaaaaaaaaaaaaa

SEQ ID NO: 3682 - DNA, 895 bp, Glycine max
  Clone ID: GLYMA-23APR03-CLUSTER53765_1
tcgatcagctacgtaggccccccccccgaacacacgcaaaccaaatcaagtaagagcgagagtgtgatagagagataatgcgttcttatggcttaaccgtaccgggaagcgaccaccgcttctgcgtgcccaccgtatctcaggtgttctttaggcccaacaggcccattaaccgaatcgcgtttcccaaggccaccctcaagaacgacggcttcgtggtggacctgagcttctacgaccttctgggaataccggaatccggttcggtaacggagatcaagaacgcctacaagcaactcgcccgaaagtaccacccggacgtgtcgcctccgggtcgggtcgaggagtacacaaagaggtttattcaggtgcaggaggcctacgaaaccctgtctgatccttccagaagagctatgtacgacaaggacatggccaagggcattaacttcgccttcaacgcccgcagacgctataattaccacgatcaggtagttgaacaaaaaagtgaatggaaagctaggtggaaatctcaactgtcagagctgaagagaaaaagtaacggcaaggatgctggagggaatatgtcatgggcggcacgaatgcgccaacagagggatgaattgtcaaatgaatcatgactaggattttccttagttctctctacgtaactagttgtatatatagataatgggtacatcttcgtactctagatcacaaattaaatataaaattaatgttgagaaaacgtgccattggcctattgctctacttagagtttttcagtgtgccaaccacatatttaaaaaaaaaaacgtctgtaagccattaaggtgttttcgttttaatttgcaaaattcgttttgaagtaaagtgatttatagttaaaaaaaaaaaa

SEQ ID NO: 3683 - DNA, 1762 bp, Glycine max
  unsure (1)..(1762): unsure at all n locations
  Clone ID: GLYMA-23APR03-CLUSTER537685_1
gtcgtgcgcttagtttaataaataagtttaaagaaattgacccattgacttgtggcacactggctggatggatagtgttatatgatcctcagctggtttaattggtttctagagcaaaactcaatctggtcctttggtcgctgaaaaattgcgcattggttttgaaaaaagtcacccaataatatttcaacattacaacggtagaacgattaagcgacttattctttcaattatttttcttttatttttagtacttaaattagtctttaaaaaagtaaatcatatatgaatttagtgcctgatggaatactattctaaattttcccttgttgaaaatattaactgaagcggatggaaaaagttagtgtcttcactgtcttgcgtttgtaattttgaacaattatttgttgattctttcttttaagattaaatcaaatccaagtgtttttctttagtgatttaattgagttccttaaattatcaaacaatcgttgatgaaactgtttttcgtacctgaatgcaaatttttcgtacctctgtgaccaccaccattgtcatgaaactcatgatcacaagggagttggacacgaccaccctcaatccaattcgtgtcatgcaagacccttatcctggtgtgacacaaatccacacgtgcatctttgtgccactagccccaactatcgtgagagaagggatattagatcaacaaatttggtttgatggtggtggttggatttagttgcgtggtggtgggttgggtttagttgtacaatgatcggtggtggttgggtttggttgtgcagtggtcaatggtggtggtggtggttgggtttggttgtgtggtggttggtggtggttttatgtagtgaacttagattgttctatggcaaggccatggggtantgagaactgatgtagaataatgttttnttcattntttataataatatntgatgtanaaannaaangttgaaaaaaaactagccctctcctcattaacatgtgtaggctcgaattaggttcaggttattcgtcagaaataacacattttaattttgcgattttgtagaaatgaattttgaacattttgatatttataagaacaaaaaatatattttagtcttatattaatttaaaaataaaaataaataaaaatacataccgtaaaatggtaaagggttaacacacggatatgttgtgcgtttagggtttcttggcagagcaaaccattctgccatctgacatggcagcaatgagaattacatgtatctcggcacttggaataagatattggacgtcggatgcggacacacaacaaatgagaattacagccatatcattcaatgcacaagtacagatagcatgagtctggctttggaatctcgaaatggtgttgttggcagttgtgacctgacaggcctgtgggtgttcaaatctcacgatggaaatgtggttaaagaaaattgaaaagctgaggttgaaaatggagaagaaaagaaacaaaatttgctgctaataatgttgctgatgtcgtggattggttttgaagtttatgcaatgagtaaaatgtagcagtggatttagtgtcttttttttgttaatgaagtggtaaatccatttgccaattgtaatgactggctgaatatagattgtgtaatccttttgactttcaatgaatgaaagtttgtggataaaatcccctaaaaatgtgaaaatgcgtttttttataaacacccattttaagtttctaattttgtattat

SEQ ID NO: 3684 - DNA, 656 bp, Glycine max
  Clone ID: GLYMA-23APR03-CLUSTER5382_4
acagcatatatatcaataatctattttatactatacctacattttgataattttctttgtagttgatagccatggctacccgtggaaagcttgaggttgacattgatctcaagtccaacgcagacaagtactggcaaacccttaggaattctactgaaatattccctaaggccttcccacatgattacaaaagcattgaggttcttgagggtgatggcaagtctcctggttctatccgccacataagttatggtgaaggttcaccacttgtgaaatcatcctttgagaagattgaggctgttgatgaggaaaagaaggtagtgtcgtacactatcattgatggggaactcctccagcactacaaaacattcaagggagacatttcagtgactccaattggcgatggatgcgaggtgaagtggagtgctgcgtacgaaaaggttagccatgatatttctgatccaacccttgcaaagattttgcagtcaagaattcctagaggtcgatgcctatgttcaagccaacgcataggagttctattctatgctgcctcttaataataatggtatgttttaatctgggcatgattatggacattataaataatatggtgactgtccttgtatccaaaaaaaaaaaaaaaaaaaaacgaccgc

SEQ ID NO: 3685 - DNA, 1211 bp, Glycine max
  Clone ID: GLYMA-23APR03-CLUSTER538416_1
attttcaaaggacacgaataacggtctctgtaactacttgctcgtagcatccaatacaagaacgccacgttcaaatcccgccaaatctcgagagcttcatcaatggcgtcctcactcccgctcctcctcctcctcctccccttcggcctcttctctttcggccgcgctcttcctcgcgaagccattttcgacgcctccgacgttctctctgattcagggtacgtttccatggcactgacgctcgaaattgttgccgaaacccttcttgagcagtccccttccgccaccgtcttcgccccctccgactctgccttcaagaaatccggccagccctccctcgacctcctccgcttccacctcgccccgctccctctccctccggcgagcctccgtctcctcaccgccggctccaggatccggacgatgctccctggccagactctcaccgtcaccacctcctcctccgacggcgtaacctcattcaacaacatcaagctcaccggatctcccatctacgacgacggtattctcttagtctacggaatcgatacgttcttcgaccctaactttcagtttaacattcaaggacctagtgataagtccgattcctcttgttccgcgaagaaccacaccgcgactgcctccgattccttcgaccaagccatccaaaccctaaaaaccgggggatactccgccgtggcctcgtttctcggaatgcagctctccggcgtggcggaccagagcgggatcacggtgttcgctccggcggacgacatggtgatgaaccgcatcggcgatttcggcgagtatccttcgttctttcgccgccacgtcgtgccgtgcaggctccttggaacgatctggtggatttcggcgacggatcggagctgcctacgttcttggagggattcgcaatcaacatcaccagatctgacggcgttttgattctcaacggagttcgggttttcttccccgacgtgttcttcaacgacagggtggttgttcacggcgttagtgatgttctggctgcacaggacaacgcgcttcgcattgatgttgatgatgaagaaatcctgtttgacccttctgaattttgaggctatgtaaatttttagttcttgtagattcggatttcgttttccgtgtgtgtgattttcgaacagggatttggtttattcacattttcttcatgaggaaaaaaaaaaaaaaaa

SEQ ID NO: 3686 - DNA, 1018 bp, Glycine max
  Clone ID: GLYMA-23APR03-CLUSTER538520_1
tcagctacgtaggccccccccccatagttaggtgaaggagaaagatggagtattacaaaatccagttagtggtcatagtgtcactgatgattgtgcttccaaacacacaagggtggggagaagatgggcatgccataatttgtaggattgctcagtctcgcctcagcgattcagccgcaaatgctgtgaaaaacctgctaccagaatatgcacaaaacgacttaggaaatgtgtgctcatgggctgatcgtgtcaggttttatttgcactggtctgctccattgcactttgctgatacacctgacaacctttgcaattatcagtatgacagggattgcaaggatcaggatggagtgaagggaagatgtgtagtgggagcgattaagaactacactgatcagctcctcgactatggcaaaaacactcaaaataacctcacacaggctcttatgttcctttctcattttatgggagatgtccatcagcctctacatgtgggctttacctcagacaggggagcaaattcaattaatgttcactggtacacaaggaaacaaaatcttcaccatgtttgggatgttaacataattgagacagcagaagaaagattctatgactccaacatagacgagttcaccaatgccattcaagagaatattacgaaaacatggtccgatcaagtactaggatgggaaacctgcgattctaaggagactgcatgccctgatatatacgcgtctgaaggagttcaagcagcctgtcaatgggcatataaaggtgctcccgaaggttcagtgctagaagacgattacttcctatcacgtttgccagtggtcagcttgcgattagctcaaggaggagttcgactggctgcaactctcaatcgtatttttggttgatgtaatgtgatttgttggactgtgaaatacgaaatgtctctaactctgtcgtatatttggctgaatgaggtttattaaaagagaataaattaagttcttgcaaaaaaaaaaaaaaaaaa

SEQ ID NO: 3687 - DNA, 922 bp, Glycine max
  Clone ID: GLYMA-23APR03-CLUSTER53989_3
aattcaatttatttctctctcttctatcgatggcgttcaggaaagctctcgctcaaggactccttaacatcaccaaagtgtcatcacaatccctcaccaattgtcggatttcctcttcctccgtcatcggaaaagtttccccacgcgccgccgagcccgttgatcccggagaaaatggccgcttccgttcgccgcaactcgccggaagaaacctcctcgacaagctcaggacgatgggtgttgcccacaaccggatccggttggatgggttgacgccgccgcagattaaaatggtggacacagtgaccatcgaggatgccagaaaattgctaaaggtggcgcaggtggaaatgttgaaagcgaaactaagacagacccgaaagagttgcataacgttctcggagttcattgcgatctgcgctgagcattgttcggatcaggatcaagcggtggagattgcaaagatgttggatgattctgcggctgtgattgtgttgggagatgtcgtgtttctcagacccgaacaggaaattgaaactatgttgtttcgcacgtttgaggtggttaattagggctataaaggactgcaaaagcccatcagctttcatccatcaccatcattcattccatatcatcatttatctgggggcttcctatggaaaatttgggatttttttggaaaaaaaaaacaaaaaaagaaaattcaagagtttggttcaattgtaatctgcttgaatgtgtctttgcccctactatccccaaattattttgaaaacaaagactaaaatggtatacaattattagctgccattaagtgaaaaattgggggttagattatgtctggaagtattgaaagttgggggtctagtttcaaatattgtcactagcaatcccggcttggtataaaatttttttttttaat

SEQ ID NO: 3688 - DNA, 1152 bp, Glycine max
  Clone ID: GLYMA-23APR03-CLUSTER540543_1
acgactcagagtctaaatctgcattatattgaaggactcggttaacagttcccagggacttgacaatggaatcgcaccttctagtgggacccatctccgccgcacgctatggttgcgccgccaattccagccactttcactccgccgcatcctccacctgggccaactctcctcgccggcggtctccactcgtcatggcctcctcgtcgtctgccgccgtcaacggcggccagaactactacgccgttctcggtgtcgcccgcactgccaccaccgtccaaatcaaacgcgcttatcgcctcctcgcccgcaagtatcatcctgatgttagcaaggatccacacgctgctgaattattcaagagcatccatcatgcatatgaagtcctatctaatgaagcaacgagagttcagtatgatcaagaacttcaatttggtcacaagccttacagggaaaaatggagttacagcactgaatttgaagatcaggcaagattctataggtgggaccgcatgaggaaaaaaatggatagggaaagatactgggagaattacaatgtcaatgaggactactacaccagtgaaacagatgaggaagaagatgaagtagtagatttagatgaagagaggggttcttttgttgaagtgcttagatcagcattcatgtcattatttttgcttcagacgcttggatcccgtttctcactcacattcagcagtctgatggcattgtttgataagaaattagacaccggctataaaatgggctatgtaatagcatggattttgggtgggaggggtggcatattgctaacactatgcttgtcatttgcaagttgggtttgcgggaaaaccagtagtagtgttgtcgcactagttgtggtggccttgtgggttggctcataccttgcaaggtatgcaccacttccccaaggtgctctattagctcttctctacatgtccattaagctacagtctgacctaatataaagacattctcgcattgcaactagcatttctctgaatctgtagttctgactatattctttttatggtgtttgtacattataatatactctggtaaatgtaaataactgttatttttttattataactaaagtacataaacggttgatgaaaaaaaaaaaaaaaa

SEQ ID NO: 3689 - DNA, 581 bp, Glycine max
  Clone ID: GLYMA-23APR03-CLUSTER540738_1
accaatctgtcaacctacgttcaacattacttccctccttcacttctctaattgtcgctgcagcagtttacaacgttgtcttcaacttggttctgcctcgagtaaagattgattgtcagtgatggagcttgggtcatattctgatcagagtaaatcaaccttttctctggtggatgaggatcacacatttgcaaactctgtccggttcactctaaatcaagatccaagagtgacattttgtgggtacagcattcctcatccttcagataatcgagttaatatcagagtgcagacaacaggggatccagcaagagaagtgttgaaagatggatgccaggatctgatgctaatgtgccagcatgttaggagcacttttgataatgctatgactgattttaaaaggacccaaactaatactgaacaggaaatggataccaaataaagtctgctctagacttctatttatagtgttgatattgatttgggtgtgtattgttggttttaatagtatactgtgtaagcattggcaaatgttggaggttaaggaaataaaatttatatcagcaaaacaaaaaaaaaaa

SEQ ID NO: 3690 - DNA, 1050 bp, Glycine max
  Clone ID: GLYMA-23APR03-CLUSTER54078_1
gtagcacacaagaggtgcatagcgcgtagggagcgagagataggagaagaatctaaggtccctaagaaacatttaaattttatttgtttctttagcaaaacaaagttaaataaaaaaaggtgtgatcgatcttttgcattgacacactcatcttcttcttcttctttttggtttttctctctcagactctcatcaaagtcattaccaatggactccatttccccaaaacctcaagagaataataataataataataataatattccgaagcccatgacgagatcagaacccgcgaactcgtacccaacaacgttcgtccaagcggacacaacctcgttcaagcaagtagtccaaatgctaaccggttcctcggagacagcaaagcaagccgccgccgccgccgccgccgcctcctcctcctcctcctcctcgaaacctgcgaacccgatcccacccatgaaatccatacccaacaagaagcagcagccgcatttttctaagctctacgagcgcagaacaaactccctcaacctcaggaacagtctccacatcaaccccctcacctcgtttttctcgaaccacactaattccccgcgaaaagccgacatcctctcccccagcatccttgacttccccgcactcgtcctcagccccgtcacgcctctcatacccgaccctttcgaccgatccaacgctgccattgattccgaagctgaagtcaaagccatcaaagagaaaggtttcttcttgcatccttctcccagagacaaagctcaacccctcttgctccctctcttccccacaacttctcccagagcctcctcaggtccttcttcttccgctcctccttcttagaattgttttttttaattattatttgctttcccattttgtgtaagattcttaattcatatatatataatttatgttttaattaattactgccattcatgccgattagaggggtgaggagtttcagaaaatttgtaatggttggttaattatcaagagaatggaataatcttaattgcttcaaaaaaaaaaaaaaaa

SEQ ID NO: 3691 - DNA, 1619 bp, Glycine max
  Clone ID: GLYMA-23APR03-CLUSTER54102_1
gcagccacgtgggcccccccccccctgatgacattagctttgggaaggaatcagttccagtgatttgtgtagtagatcaagaacttacgcattctcttcatatgaatgggtgtaatggacaaaatataagctcttctatgccttgggagaccattacctatgttacaaagccaatgcttgatcaatcccttagtcttgattcagagagtctgcaattgggatgtgcctgctcatacactagttgctgtcctgaaacttgcgatcatgtatacctttttggcaatgactatgatgatgcaaaagacatatttgggaaaccaatgcgtggcaggttcccatatgatgagaatggtcgaataatcttggaggaaggttatcttgtctatgagtgtaatcatatgtgcagatgcaataaatcctgtccaaacagagtattgcagaatggagtacgagtcaaattggaagtctttaaaacagagaaaaagggatgggccgtaagggctggtgaagctattctacgtggcacaattttgtgtgcatacattgcagaagcctggggtgggctcgccgcgcctgtgcggcgcctgggagtgcgcgcggcgccttgttgttatttgtatgacatcgatgctcgtgttaatgatatgggcagattggctcgagaacaagctcaatatgtaattgatgctactaagtttggaaatgtctcaagattcatcaatcatagctgctcaccaaatcttgtcaatcaccaagttcttgtagagagcatggattgtgaacgtgcacatattggtttttatgcaagtcgagatattgctttgggtgaagagctaacatatgactatcagtacgagcttatgcctggagaaggatctccttgtctttgcgaatccttgaagtgcaggggacgcctttattagaacctaaatctgtgtgttgttgcaaccatattttctgattttcaatttggaacacaaatgatctgctcaacattaaaagattccaacatggaatggcccaactctgaaggattccattagccttgatgtcttccaacagatgataacaaatcaatcacatgaggcaggcaacttgtgagggagtcagctgtaatttgttggctgtctggtaaattcactggattcaagtgatttggattgtttgccatgtacaatctgccgttatccccatctggtagagtaggcatgttttttgcagcttactgcacaaatgttctcctttctcttttgctttattctccaatttttcactttagtgcctgatgtcatgaaataatttggcaatcccccactccttttcttccgccttcacccttccacccactaccaaagaaagaaatccccaagagaagttcagcaaaaaaacatatatgcaattaaagctgtctggattagcaattgttacgattttccaaaattttttttcctccggatcatggttctcaatttctttcgccagtgtttcgggaatgtaaatatgttaagttttaacttattcgttcctccttttctatgttaagtaacttattcatagaaatagcttccttgtaaattgtgtcatttaaagatgagtgcagcttttgctccttttaattt

SEQ ID NO: 3692 - DNA, 815 bp, Glycine max
  Clone ID: GLYMA-23APR03-CLUSTER541226_1
ggagaaccaaagtcatttagctaataactctctgttccttaaatttcatccgatgaggtttcaccaagtttctctcctctctttccttgaacccacttaacacatgcatctatataaaccattccccatctaccatcacaaaacatattcacattctaaagagtaaaatctacaactttttggtttaagggattggatggctgggattggcaagggtgttgagtttgaggatttgttaccggtgatcgccggtaaactggggggtgagggtttgataaaggagctttgtaaggggtttcggttattgatggataaggagaaaggggtgataacgttggagagtttgaggagtaactctgctatgatgggtttgcaggatttgaaggaggaggagcttgtgagcatgatgagggaaggggatctcgacggcgacggggcactctcggaaatggagttctgcgttttgatgttcagattgagccctcagttgatgaaggactcgtggttttggctccaacaggcactgcaacatgaactcatcaacaataacgtttcttccgtatgaagtactcttgtttttttcttatcagcagcaaatgttagtattttttttcttaatgggaagaattgaacctaccacttttttcttttacttccaaaccaactttataactccatttgatgtactttggtgtttgttgttggattggaaatgactccgctttgaacatttgaagggatgtcttgttcttgcttgtttcagactttcagttgcttcaaatataagtcatccttctgcaaaaaaaaaaaaaaaa

SEQ ID NO: 3693 - DNA, 655 bp, Glycine max
  Clone ID: GLYMA-23APR03-CLUSTER541227_1
atattgcataatttgcaccctacaatcaaacctagattcaaaacaatctagaaatcaatagaggcaattttattgtgcaaattaataatgggtcatgcaaatgcaagcaacagcaccaccatggctttggcaccaagtgctagtttaaaaagctttacctctccaattccctatctctttggtggcctagccctcatgcttgcactcataggattggcattacttatcctagcttgctcttatagtaaaaattattcattggatggtaatgaagacaaagcgaagagggcaacgggaatggaggttgattcagagcccaagattgttgttataatggctggagatagcaaccccacttacatggccaagcccgtgccatccacacaccatactgaagaagcagattagagaggtatttcgtgatttgagtcatccaatgcatggagagaaaacaaagaataaagagaaaaagaaataaaaaatcctcctcctcttgatgtttcttgtttatccgtttaccttgctcattggcatttatgtatatacctttttgtacaattctttaaaattaacatgattttgagaaaggatgtaaatcgaagagtagaaataatatactactattatttaggttttgttaaaaaaaaaaaaaaaa

SEQ ID NO: 3694 - DNA, 1013 bp, Glycine max
  Clone ID: GLYMA-23APR03-CLUSTER541345_1
atcccaacaacaacaacaaaaaaccctaactccacacctcttctcctccctcaacttgttggatgtggaatcctagggaccaatatcatcatcaggaccaagatcaagatgagtcgtgggaagtcagagccttcgcagaagacaccagtaacatcatgggcaccacctggcctcctaggtcctactcctgcaccttctgtagaaaggagttccgttcagcacaagccctcggcggccacatgaacgttcaccgccgcgaccgcgcccgcctccaccaagcctcagtaccccacaacaacccctctttttctcccacaccctcttttcttaacatctctcatcaggagccttttgttgcaaatgggggtttgtgcctcttgtacccctttccaagccctaataacaatgctccattttcctctctaggccacaacaataatgcatgtggtgactcaccttccactgctttttcagtttcttcttctcattcccttcagtaccctccaatgagggtgcctagttgctcagcttctacttcctttgatttctctgtggctcagcctgctcctcctgctgtagggaggaataataatggtttctcttcttcttattctgggaaagtggaacaagaaccacccacaaacgactcttcaacccatcatggtcatggccgccaccaccatgatgaggagcttgatctagagctccgcttgggaaataaatcaacatcaacgtgatgtgaaaatatgatttgtttatttgtttattgttttttgaaaacccccatatgaggtgtctgtgaggaaagatcaaagtccaaactccaaagaaaagagaagagaactactttgctgtactctcttatgatagagtactactgtaatttattgttgtttgaaaaggccttgtataactctcacatattatagctgaagaagctgatggaatttttttgtttttcccttttcatcaacaaaaattaattgttagaatgttagtttttactgataaag

SEQ ID NO: 3695 - DNA, 1864 bp, Glycine max
  Clone ID: GLYMA-23APR03-CLUSTER5437_2
acttattactactctctttgttcatcacatattcaatggcttcctctcttctctctccatcattcacttccttcccccgcataaagaaggatgtctctctctctgctttcacttctcagcgatgcttcaaagcgcttccaaggagaataatccgttgtgctgtggcggcgcctcagcgccaaccttccaccactggatcagtgaggactgcaatgaccatgactgagaagatactggccagagcttctgagaaggtacagctgacccctggcgataatgtttgggtcaatgttgatattttgatgacacatgatgtgtgtggccctggttctattgggattttcaagagggagtttggtgacgatgccaaggtttgggaccgtgaaaagcttgtaataatacccgaccattatatattcacaagtgatgaacgtgccaatcgcaatgtagacatattaagagatttctgccatgagcagaatatcaagtacttttatgatattaaggatctcagtaattttaaggtaaatccagactataagggtgtttgccatgttgcccttgctcaggaaggtcattgtaggcctggagaggttctcttaggtactgattctcacacttgtactgctggagcatttggccaatttgctacagggattggtaatactgatgctggctttgtgctgggaactgggaaacttctgcttaaggtgcccccaactttgagatttgtaatggatggagaaatgcctgattatttgctttctaaggatttgattctgcaaattattggtgaaataactgtggctggtgcaacatataaatcgatggagtttgtcggtacaactgttgaaagtttaactatggaagaacggatgacattgtgcaacatggttgttgaagctggtggaaagaatggtgttgttcctgctgacagcactacatttaaatatcttgagggcaagacatctctgccatatgaacctgtttatagtgacgatcaagcaagatttcttgctgagtatagatttgatgtctcaaaattggagccagtggtggccaagcctcattctccagataatcgtgctttggcaagggagtgcaaggatgtaaaaattgacagagtatacataggatcttgtacaggtggcaaaacggaggatttcatggctgctgcaaaagtttttctggcatcaggtaaacaggtcaaagttcctacatttcttgtgcctgcaacacaaaaggtttggatggacttatactcccttccagtccctggatctggtggtaagacgtgctcccagatatttgaagaagctgggtgtgacacaccagctagtcctagttgcggtgcttgtttgggtggcccgaaagatacttacgcacgcatgaatgaacctaaggtttgtgtttcaactacgaacaggaacttcccgggccgaatgggacacaaggaaggtcaaatctatttggcttccccatatacagctgctgcatctgcattgaccggttatgttactgatcctaaagagttcttgcagtagaatgttgttacagtcatcccattggtgttgtacacgttgttggttagttgtgtattctctagccataagttaaaactgatagctatttaagccgaccaatcttttggtattttttgtctgaagaaattttcggtgactattattcaattgacacagttttggttgttaaaaaagattggttcatttagtacttgttgagtatgacttggtcgttgctgttacagttgcaagtatgatttcatatggattttcttgtcaacccgtgttttattaactttgctttttgtttgttttaagttgatctttagaatcattccttc

SEQ ID NO: 3696 - DNA, 917 bp, Glycine max
  Clone ID: GLYMA-23APR03-CLUSTER544_2
aattaaaaaagataaacagaggagaggagaggagaaggcgatgcaacccacatccggcggcggcgggctggcaaggttccgttcagctccggcgagctggttagaatcagttctgttgaaggaagaggaagaagaagaagaccccttaagcttcactcaactgctttccactatcgatgatgctccctctcattctcaacaccaactctatggtgccgctctctcaaacaaggataaaacacctgaaatcttcatgttagaagattccgttccttgcagagtgagggctaagcgtggctgtgctactcatcccaggagtattgctgaaagggtaactccactcactcttttctctctacttaactaactcctttactttctgttatcttttctcttttcgccttaggttcgcaggactcgtatcagtgaccgcatcagaaagctgcaagaacttgtgccaaacatggattagcaaacaaatactgcagatatgttagatgaggctgtagcgtatgtcaagtttctacaaaagcaaattgaggaactgtcagagcaccaacggaggtgtaaatgcgtggttcaagagtaaattgctgattgttccatgcagtgcttggctttttacgatttacttatgaattattatcagaatttttttatgttctgatgaagatcaaccataccacactctggatgctaattaaatttaatatctcctgataacttaaaagatgcatatattatacatgttaggggtgacattgccaagttcgagacgaataaattacaaatagaattttaccctagagtgttataattgtgttgtagtgttgtacaactcttaagatacacaaatctgccaagttaatagctacttggacttaagatatatacataaccatatgtgttattttatt

SEQ ID NO: 3697 - DNA, 1608 bp, Glycine max
  Clone ID: GLYMA-23APR03-CLUSTER54585_1
ggaaatttttctcagctacgtaggccccccccccggattaggggagagcgaagctcagcaagtttcaaatccacacgcataacagatttcaaccactgaagaaatggcgctgccccattccatcattctgcccttctcgtccatcatttcaccatgttgtcttcccaaacataaacctaccaatttcacccttccctttaagctgaatggtgatagctgtagatcaataagaatcccaagcagagttcaagcactcaaatctgatggtggtaaatggaagaagagagggcaagaagcatctagtgacactgatgacgacgatgacgatgacgatgcacctcagcggtttaataaaaatgacccttaccttatgagtcctgaggagagactggaatggaggaggaacataagacaggtgttggataggaaacctgatgttgaagaggagttagaccctctggaaaagaagaaaaaactggagaagcttttggaggattaccctcttgttgtggacgaggatgatcctgattggccagaagatgctgatggttggggattcagcttgggccagtttttcgacaagattaccattaagaacaagaaaaaggatgatgatgatgatgacgacaacgatgatgttgatcgtccagaaatcatgtggcaagatgataattacattcgtcccatcaaagacataaagactgccgaatgggaggagactgtattcaaagacataagtcccttgattattctcgtgcacaatcgatataaaaggccaaaggagaatgaaaaaattcgggatgaactagagaaggctgtgcatatcatatggaactgcaggttgccctcaccaagatgtgttgcgattgatgctgttgttgagactgaactggttgctgcacttcaagtatcaatattcccagaaattatctttactaaagcaggcaagattttgttccgtgataaagccattcgcagtgcagaagagtggtcaaaagtcatggcttacttttactatggtgcagcaaaaccatcctgtttgaatagtttgacatattctcaagaaaatattccttctattgtcactgacaatccagtgtcctgaaaaattcagggtccaaattttgaatccatccatgctgctgaaatatttccatataaagatgcctctcgcattctgcctttgtataataaaatgcaaggagaatgtatagctctattgactgcatataatgtgataaaataacttgcataaaagatgcaacataattgctagagttggcttgtttgatttgtgtccatggaagccatcagaggaaatgggcatcagacttggcttttgggatgaaagaaaaattgaacgtggaagatgaaacttggtgaccagattgctaatttgctactagaagtcaaaactcgacttgatgtatcattgaggcaatgtgtatatttagaacttagaaggtacaatgagtcacctttttctagaaatgaaaggttatttgtaatagacattagaacgtggtatgcgaatgaagtaaagtagtattggcaatggcataaaatactataaaaaaaaaaaaaaaaaataaaaaaaaaaaaaaaaaa

SEQ ID NO: 3698 - DNA, 1070 bp, Glycine max
  Clone ID: GLYMA-23APR03-CLUSTER547_8
ttttattgttttttttttcttttttttttatatttaaacacactcattgcacatagtaatgcgctttatttaagtgaataaaatattacatactagttcacaaatgcaaaaggacactcatcaaccagatatttgagattcttacagttctcaagaagtcgcgtcagcatagggttagtggcattagaactcagaatttcattcttaacgccaaaaagaacagccagtaaagctactggaaaaggatcaactctagtaagaaaaacaattttcttacctttcccaagtgctgtgcgaatccttttgttgatatctgaggagcgattgttaactgcagaactaatccaagcagtggtgggtaaaccaccacgtccactaccacatgtaacatttacaacgacagcttctgaaggtaattgacttacaggataaagacaattcacaaaaattggtaaccaagaatccactggaaaatttccatcaaagaattcttgtgtgttagccaacacaagcttatcattaaaaacaatcttgtttggaaaagctttacctgctccttgtaaacccaacaaatcaatgctcaacagtagatcaatattatcatttgaatcaggagcattcatcatcctctgcatcgaatggaactcttcaatctgtgctatggtaggcacatcagctttttgcagccattcaatacgagagagagctttccttctcgtattggcgagcttcctctggactgtgcaaatacaattctcgtaacacatttacgagattgacaagataagcttcttgcatttccagattattgcacgaaacataatgaagttgtgaccataaactcgccttgtcctcaggagccacccataaaacattagacatctgcttaaagtttctcttgagaaaatcacaatctgctaactttctaaattgcaaagttgcactagttttgtcaataccatcagtaatggtgatattatgaccagctagaaagcttttcaatttagaaccactaaagtaaggcttgacatattcatgaacactaattaaggtatcatcaccatacacac

SEQ ID NO: 3699 - DNA, 584 bp, Glycine max
  Clone ID: GLYMA-23APR03-CLUSTER54811_1
atatacttgctttagttaaagtttagtagcatatagatctgattctgttcgatgacgattcataccgatccatctgctacatacagatgcaaaaactgccaaaaccctgttgctttccgcgctgaactactttccaaaaactatctggcaaaaactgggcgagcatttatgttctctcatgcaaggaacatcgttttggggccaaaacaagagagaagtctcatgactggtgtgtacactattgctggtatcttttgcagcaactgtggtgaggaattgggatggaagtacctacaagcttatgaggcaagacagaagttcaaggaaggaaagttcataattgaaacggcaaagattgccaaggactactactagcttgtatattgaaggctacaaacactaattaaggtgttgagttgataagtttctcaataaatatttgtatgagaaaaaagatagagagataaaataaattaagtttcacacaagaatattttttaaaaaacaaaaaaaaaaggaagggactaggactaaacaatgtggagaacatgataaaggagtcctaactaaaaaaaaaaccatgg

SEQ ID NO: 3700 - DNA, 868 bp, Glycine max
  Clone ID: GLYMA-23APR03-CLUSTER54846_2
atgacggcgtagttttgcatagtcgaaagtcaaaaccctgcacccgaaggctgaagcgagtgggagaggcagcaagaagagaaaaaggggaatggcatggttgcagttgcagagaatcatcaccaataccaagggaggtgctaatttgatctcaccgctcccacgattcttctcgaaatgttccccctatgttttgaaagttggaataccagagtttctaaacgggattgggaagggggttgagtcccacgttcctaagcttgaatctgaaatcggtgatttccagaaacttctcgtcattcgaacccttaaactcaagaagctcggtattccttgcaaacataggaagttaatattgaaatacacacacaagtacaggctgggattatggaggccacgtgctgagttcatcactgcctgattggtttctaagtagtaagtagtcgctgtttgttagaccatattgcaaatgtttagccgcagcagaatgacaatgctctacttgaaaagatcaagtcgcactgtctttggagaccacccatcttttccatcacattcatctcttgtggacaaagtttggtttttgcaccagttatgtaatgtacaatggacttgtcttaattgacagtttgtgtttgttatttcataattcatatcccgtgacatcattgcatattatgtaatgtatcacttgtttttagccaaaagaatatttcgggcttaggagtccgcaatgctttcatttacttcatgatagctgcggttcaatccaaagatgctgttgcagtttttttgcatcccttattagttgttccatgattgaccggatactctgttgtgcatgataagactagacattatttatctt

SEQ ID NO: 3701 - DNA, 679 bp, Glycine max
  Clone ID: GLYMA-23APR03-CLUSTER55040_2
aacaaacaacaatctctctcctacctttctcgtgtctcttttattcttgtaacacaccttctcttttctcctagaaattctgagagggtgagtggtttttttgagttttgatagagagcaatagaatagctacatggggaagctcgtcgagattcttgaccaaggggtcaggattgctgcaaggtttcactctaattgcccccaaacgggccgcaagtactaccaccctccatccctctccgacaaccacggccaccactaccacgctggtgccaccaccaccagcgccggcggagtcaaagaggccgtggcggctaggagcattgacataattctttattctgtttgacagaaccatattttttttgtattttttgttcgattcgatcattgcgaggccattcatacatgtaattttgagctcaagttgataccaattttaaattttacaaacacttttctatgttatatggattgcttatttatacatgttgattttaattccgtatcaaaaacattagtcgaacgttcctaccagatctctatagatatgtagattttacgcgtatgaaaaaaatcaatgagaactttgttgactagatgtcttcgtggcctaacttctgctgggaaaagcaataggggtttacgtggcagaggacatctttaccacaaaaatcgt

SEQ ID NO: 3702 - DNA, 904 bp, Glycine max
  Clone ID: GLYMA-23APR03-CLUSTER556228_1
tctgctgcgtcggccccccccccatatgatttgaatgcactcttgatgtggaaaggttcagaacgaatattcaaaactaatgtgttactacttgtaaaaagcattgatctctcaagcaatcacttttctggagaaattccacaggaaatagagaatttatttggattggtttcattgaatttatcaagaaacaatttgatagggaaaattccctcaaaagttggaaagctaacatcacttgaatctcttgatttgtcaagaaaccagttggctggttcaattcctccgagtcttacacaaatttatggcctcggcgtgttagatttgtcacataaccatctaactggaaaaattccagccagcacacagttacagagtttcaatgcctcgagttatgaagataatcttgatctttgtggacagccacttgagaaattttgtattgatgggagacctacacaaaaaccaaatgttgaagttcaagatgacgaattttcacttttcaatcgtgaattttacatgagtatgacatttggatttgttataagcttttggatggtgtttggctcaatcttattcaagctttcatagagacagttttatttcaagttcttgaacaatctatcagacaatatttatgtcaaggtagcaatatttgctaataaaatatcaaaggtgcatggctgaagcttaactagtaccttgaagacactagccctcttggatcggaaaactccaatgtctaagcttgttaatgcttggaaaaggcaattagttggaagttatgattgctttagattttttcactgtcaattgagatacttataccatgttttgataatttgaaaaagactagtttaattagtgttgtgctattgaaatgaaatataacttatcatgtatt

SEQ ID NO: 3703 - DNA, 1338 bp, Glycine max
  unsure (1)..(1338): unsure at all n locations
  Clone ID: GLYMA-23APR03-CLUSTER556570_1
agctacgtaggcccccccccccttagcttcacctagatcgaatagacaggccaaatcaactcggtcttcattagtatgcttactcattgctgtgaaaccaatggtgaggattggtcacataggtgacctacagctgggcatatacactaaaaacctaaaaaacaacgactggaaacactccattcatcatggtgtatggtgctgaagctatcattccccggtcaccagtctacgattggcagtaccgcatcgattgggagacatagaaagcgatcgtttacacaaattgatccatcccgaataagatggcaaccgcctgtgctagagcaacagcgtcaagcttggcatgataggcagttacgtcataaacctattttcaaaggctaccagacttggggttagctacacggagcatctctttcttacccttcgggtagtcacagggaagctctctaatagatcactttagacaaaggaaatgaactacaacaaaggacttcaacttaagaacaaggataaccaggaatcagagcagaattcacccagcagctctgttctcagtaggaaagtcgcgtgggttcaaagtcctaagctaggaggaagaccggcatctgagaactcctctaatgctgctaaggaaggacttggccggctaggaatccgcctgacctaacgaccttccttgtgcggtaacaagtcggtggcgaaggtagtaatccccggcactccttctcttctgagaatttgagttattcgctgcttccttactctgattttgactctggttagccaaagggcgaatacgatgtcggagctttccaatctctttcttacaaagaaagacatccatacgtagggtgtggtcgaagatcagtgactgcttcctttgctgatcagcgatcatgccccttattctagcggaggaacagcttcacatcggattcatttccacaagagtgctctaatggcaaagagcagtatccacttgaaactcggcattacttacttatcatacaaacctagcccgttatggggcactttcagccggtggtaggagtccctaacttggagcttaggccactagaacgcttcttttatctagtttaggaaggcactcatctcagtctcagggacatgcccagaagaaactgctggtgtcaggttttcgggaattgaatcaggattgtcttgtgccagaactgattgcactaggagaagaaagccagttgtttattcccattccctttaagtcagggattcgtttaaagcctttcgctagcattacaaaaaaaaaaaaaaaggacggccgctctaaagaatccaagcntacgtacgcgt

SEQ ID NO: 3704 - DNA, 1383 bp, Glycine max
  Clone ID: GLYMA-23APR03-CLUSTER55708_1
cagctacgtaggcgcccccccccgatcccaccaactactcacaacttccattctaattctcagttaagctatcttcttcgaattgctaggaagaaaaacctgaagaaaactctcccctatctgtttatagaattaatctgcacattacttctcaacgatattttttcttcatgaagcatccttctgtagtgtctcttctgcttttatcactcatcctggctaaaaactcaagggattcgtctggagaaagtgtgtcttcagcagttcagcaacagaaacaacatgtatgggtgatcattactttgtagctttatctattcatcacttatgaaaaacttcaatctaaattcatgcctttcatattactctggatgctaatgtaaaagttcacttctaccttctcgaatggacaaactatttcctagaaaagaagtgacactggtgctgaggaagcttctatcggcaatgctaaacaaattgagcacagttagcaagaagaaacaagacgatgtagtatacagaaaatcaaacaatcagttaccaaacattcatgaagattactatggacctagacggcataggcctagacaccactagttttaaagaccattagttcattctttttcctttgtttctcctgataatacaatcatgattcacagtcttacaaagtagactaagtattatacttagtgcaagttgtcccataaacacttgatgacttcaaattttgttgttatgcataaaaattatgcaaggcttcattcttgttcacttcgtttctggtttaattaaaacatagcaaaatataacaaatttaattagtaccaacccttatttttatatatataaatcttggtattcagaatatctttgaatgttcttatgtttgctgcaggaaacataaagaataggaaactcgttaccattcccgtttctgcaacccaatccctctccaagaatgtggaagagtccaaggttgacccctcggtaaatggcaattctagaaatgtggatacattgagcacttcgaagcacaaagatgtccctgaggagcactaccatgaccttgtagagataactgagatggactattctccagcaaagagaaagcctcctatacacaactgagtctagggatgatcaactagaaaaaaaactgacaaagttccgtatattaggatcaataaaatatagacagagatgttggacagcattgcagaaaatgctgcagtttttttggcttagaatatgatttgtacattattatcctgtcaccttttattgattataatatatattttgaactgggaggggggaaagtgagttaattaaaaaaaaacaaaaaaaagaaaaataaagaggaaaaaaaaaaaaaaaaag

SEQ ID NO: 3705 - DNA, 619 bp, Glycine max
  Clone ID: GLYMA-23APR03-CLUSTER55792_2
ttctgtcagtttagaccttattggcatagtcttcctacatttttgttcagtttaagacttttttcgcctttaaacagcttctgcttttcgttacggatctctatattctcaattggagctcttccctcagaaagcaggagatgatagcagcagcgtgaagaaaataatttcagcatgtgatgtggaggctttaaaaaagtgtttggaagagaataagggagactatgtcaaatgtcattcacagattgaggctttcaaatcatcatgctcactcaagaaaccaaacccctctcttgattccgcttcacgttagattaaattagatggtttgattttgaattgtcatttctggcttttccatctttggcttaaggggacacactatctaatgatattcataagttgtatcaatacttaataatcattgtgaatgaataatatattctcaagttgtggctttctacaattataaatttcaggagttctcattcaaaaaagaaaaaaaaaaaaaaaaaaatcaaccctgtgcagaaggattctgatgctgttgccacacttttgtggcattgaagtttccatctgctttgttcccctgcaactgaaattataatcttttcaa

SEQ ID NO: 3706 - DNA, 655 bp, Glycine max
  Clone ID: GLYMA-23APR03-CLUSTER56011_2
atcacaccttcactagcaattaattcctcaaacacacttcccagatcaagaagtgagcatcaaagacacaacatggagacagttcaatcatgggtttcaaagcacaagctcgccagcattggggcactctgggcctctggaattggagcaacacttgtggcttattcatgcaaaaagtctccaatgaagccaagtctcaggcttatccatgctaggatgcatgctcaggctctaactttagcagtgctatcaggtgcagctgtttatcatttttatgagaaacgtgatgttcagccaaaaccagtggcagattatactattcctgctcccaatgtcactcagatggttgaatatgaacttcaatgtcctttctaaattaaaaattaaactataggggtcatgttattaagatgaggagatattcccatctaggatcctgtcaccgagttagcttttgcctaaaaagaatattgtttgtgtattttatgaatgattggactccagaacaagtgggaaaagctattgctatgcaatgttgcaatgcatctctatctatgttctgagggtgcactatcttaattttctaatgtatacatacaagttttatgacaagtttcagcttgaattgcattgtttttctaataaagtttattgg

SEQ ID NO: 3707 - DNA, 1853 bp, Glycine max
  Clone ID: GLYMA-23APR03-CLUSTER5661_2
ctatcatagctagctttttattatattatatggtttaagggcatagccattagccaccaatctcatccagacatccagtgtttgaatcacaacatattttcacttctcaaccttattctagaacaacacaccacacacatgatagacttatatatatccaaccttcccaacaacaacaacaacaacaacatgaacaacatagagtcctaccctccggttctccgccacctagaccagcagcaacccccaccaaaccctgacccggattataaagacccgacccaagaagatccggatactatacccatcatagatctctcatgcttagaccatgacaccaacaagttggaggaagcttgcaaggattggggtttgtttcgtttggtcaaccatggggttccattgacccttttgaatgagcttcaagagatggccaaagaactcttctctttgtcctttgaggtgaaagaaggtgcatgcagtggctgcccagtgacatacttttggggcaccccttgccctaacgccatctgggaggacactaacaacgagaagcccccaaaacatcaattgggttgaaggctttgatgtagcgttgagtcaactcccacacttcagcgtccctcagcttcccacacttgagtccatcaggtaagaacaaattttttccaaccaatataaactcttgcattattattgatttgtcttcttccacatttttctatgcattttgtttccttttggtttattgcgttttatttttttgtttctttcatgtgtacaggccatcgggtctatctttttggattgtgtgtgcatgtatttgtgttggaaaattataatgtttttaaatctttttataataatatatattattactccttaattataagaaataattgattaatttatatttattgtaaatatttgttaacttagttatcaatattaaatttatttatgattacaatattttttaaaatttatctttaaccttaccggaatctatttatttttgtataggagaaaaaaagagataatttatgatattttgataaaaaaataattaatgaaatattataaaatggtattttattttctaaaactataatgtcttagaaataataaagacaggagaagtatgtataagtcattggattacaaacataatatatagttcattgattttcataataatttttttaaaaattataaaaaattacaagtaaaacaatttaaataaaaaaatttataattttattttttgtgtttatcttttttcattatgacttgaaagagataaataaataaaatatttttacaaattattatatctatatcacatatcaaaattatgtggttaacaatttctaattggtttaatattaaccctttttttttcaaaaatgcaagtcattaaatacaaaaaagtactgacaatgtatggtaatttatatattatttggagattgggtgatagagtaaatatttttatgttttagagatttgttgttggtttggatgttttcgagatgttgaattgatgtatcgtataaaattaaatattactaaataatttttttttatataaaataatagggaaatattattaaaatataacccagtgttgaaaatagggatcgatggatcttggccattgcctcatggttttggttgtggggtaccccgtacccgtcacctttttgagattatgacattgatggcactgcatgaacggggtgtttcgaccaattgaattgtgttattgcatatatggagaaagattatcagatttgatagtcgcgtttaacgtataatttccttaattagatatgaaagaccaacaaaactag

SEQ ID NO: 3708 - DNA, 1373 bp, Glycine max
  Clone ID: GLYMA-23APR03-CLUSTER571_2
atacgacacgaggagcaaagagagatgggaaccgttagtaacattggcttcccttcagtattcagagttcctctagattcacaacaagcactatcaaagcagatgaagaataaatcatcgtgcgattttatggttccttctaatcataactattctgttaggctgagtccaatatgttgtaataaactatcagaaagtgggattgaggagaaccccacgaccacgagcacgggcgagaggccctctaagaacaaggacaggatggaggagtacaatatagctatgaagaaaatgatgaggaacccttatgagtatcaccatgatctgggtatgaattatactcttataacggacaacttgattgtgggctctcaaccacagaaacctgaagacatagatcacctcaaaaaggaagagggcgtggcatacattttaaacttacaacaagataaggatgttgagtattggggagtagacttgcagtcaataataagaaggtgtcgtgaacttgaaattagccacacgaggagaccggcaaaagactttgacccagattccttgcgaaatggactacctaaagcagtctcgtccttagactgggcattttctgagtgaaaaggaagagtttatgtacattgtacagctggacttggaagagctccagcggcggcaattgcttatttgttctggttttgtgacatgaatctaaataaagcatatgatatgctaacttcaaagagaccttgtggaccaaataaaagagcaatacgtggagctacttacgatttggctaagaatgatccgtggaaggagccatttgagaatcttccagaatatgcatttgaggatatagcagattgggaaaggaacttgattcaagatcgtgtccgctcccttcgtggaacttgataacttcggtttctacatattagagattcctacatagattaccacccttgctgggatggcgccagttgccatgatactgctcaagactggagattttttcaagcagattcatgctaatatgaacatatagtttataataacgtgtacgaaatattcagtatagtatagactatagagtggtaaataatcaattttgcgaataatgcaccatatttgtagacgtcctaataatatctgagtatgcaaaatgatattggtctgtcaattctaaatagtgtcaaaatgatgtatataagtaggataacctttatttttattttatgagtaacttttggggttgagttaacataaacccaaattaggtttaattcgatttaatttatttcttatttagtgcagagaccaaattgaattaatcttgtaaattatttagtgctagagtgaagttgagacttttgaatgac

SEQ ID NO: 3709 - DNA, 882 bp, Glycine max
  Clone ID: GLYMA-23APR03-CLUSTER57262_1
tcagctacgtaggcccccccccctgttttattttttgtttgcgtatatattcgtttcagcatgtttcctgtctgatgaaacaaaggcagttggcagcattattgagagcattttgcaatgtgcactcgatttccggtcttgtattacagttggttcttgggattctggaagtgatccagaagatttgctaggcaaactttctaaaatcaatatatcttaggtgctttctataaagcagaagtttgatagaagtctaaaagaactgcacatatgttatattaagggacctaaacatgggaattttgggctttctcgtttctgggattatctaaactataatgaatattattcaaatgtcagcaatgagatggggtactatgccgtctgaaatttgccagctttgacgatgaattacataatgcacagctaagggctaggaatcaagctttggcaatgaattagggcataatgcacagccaagggctaggaagccagcttttacaggtcaacattgctgtgactgggtattgttgatgagaacatgttaattttagaagaacaattgaaatgtggtagaagtgtctctgagcggttttgccaattcatgactgtttggaatatctcaatcgattgtgtatctttaatgagggaaaaaggacaaacaaagaaagtcgctgtatctgtgtttcccatggatacaattttatttgtttgtgtatccaagttatttcaagcagtcttcgtggaagaaatttatgttttcattttttattcattaagagtctacgataattcatacatattctcaatcagttgtaaaagacatttcttttatgctaacgttatttttattataataaaaaaaaaaaaaaaaaactcgag

SEQ ID NO: 3710 - DNA, 1955 bp, Glycine max
  Clone ID: GLYMA-23APR03-CLUSTER57289_1
tcagctacgtaggcccccccccccttttttttttggagctgggatggctttctgttgactgttacaacatcactttgtgtcatctatataactcacgactcttccactgttgtctaagactaattttactcattacattaatatgaatagcaagcttcctttccttatcacaagctacaatagctatagtcgccaaactcttcactacagagtccctcaagggttttaaattccgcctaaaaatccatttcaaggatgttggtctaggtacacaagctatctttcatctcctttatttttgttctttgacttctccttttaataattcttatgtcttcttcaaaagaataaagacaatgctatcctctatgatcataacctagataatgaactttttaaggattcaaaggatattttattaatgcaaaagtttagcatacttctaacaatgatctagggaatgcattttacttgagcaatgtttgataattccttcacttcaacagggctttaggcaactgttagatgctctcatgatgtttattactgttagatttgagaataattactacatcatattgaataccctttttcctgggtttatacatatttgctgatgttctgtaatcttagcaatgatgacaaaatcaaatcagttagaaattccgtctcatttgcatgtgcatttaatcacacaagagatgcgttttagtgcttccaatttgtggcaactacagcttggcatgctaaggaaacagtagacttgtcatgttagtatttctagtcttggcacttgggtatgcttgtactcattcacctctctttgacataaaaaattggaaccatttatatttgtaaaagctaatatcatgtttcatagccttgcacaggtttcatcagcttcctgagtttgatcaaggaaaaagaagttgccgcaggcgactagctggccataatgaacgtcggagaaagcccccacccagctccctcttgacctctcgctatgctagactttcttcatctgcttttgatcatagtggcagaggtggcaactttctgatggaattggcttcatacccaaaacttagtctgagaaattcacttccaactcctaggtcatccgagctagcgcctggaaatcaaacctccaccctcagctggcacgggaactcggagacatcatctgaccttttcttgcaaggttcggtgggtgggacaagcttcgccggcccgggacatcctccaggggaaagttacactggggtcaccacctcgagctgtgctctctctcttctgtcaaatcaaacatggggttctagaaacccagcaccaagtcttgggttgaataacatggtaaatttccacgggacgcccatgacacagcctgctgcatcatctcatggtgcatcaatccatcaacttccaaataccccgtggtgtttcaagggcattgattctggtaactgttcgcccgagggggtccctgatctaggtctcggtcagatttcgcagcctctcagtagccaacttcacggtgagctggacctgtcccaacaaggcaggagacattatatggatctagaacagtccagggcatatgaatctgctcattggtcactttaatgcacttgtttttgtttttgtttttttgtcaggtttgtaataaaatgtagcacaaacctgtgcctacttggttactgaccagattgatgataactatttcttgttttggtttgttcaaactgataagcaaggtgggtagccttgcctcatttgtggaactttctggcggcgaatgaaatcacccgactgtgttttgttagtgtcttaaaaaaaaaaaaaaaaaataaaaaaaaaaaaaaaaaaggtacggtgtcttctgccattgctgtcacctctttgctgtttgctacccctgctccaagttatttgatattatcttttgactatctgtc

SEQ ID NO: 3711 - DNA, 1755 bp, Glycine max
  Clone ID: GLYMA-23APR03-CLUSTER573_22
tcagctacgtaggccccccccccatattttctgctttctataatgcatgaaacaccttagaattttgatttttctatagcagcaattttgcaaactgatggaggaacaggtagctgggagtcctagctcttatagttccatccaattttggagtattgacgcttaaaccctcaacagaagatgatatcatttgttgacggggaagcattaccgttgatttactgaatataagtagtagcagtgaagcaccattttcatttagtgcatgaactatgccatttatgataccctttttttatagttttatttggtctgtttttaacaaattcatgaattgactcaatatggtcataatttcttcttacaattagatcaggcatgagacaactaatcatataagcttaatttgttgtgggagtatttactgtactgtttgacgttcttgtttaacaatgcagatttaatacttcagaggtttttgttgagcatgtatattgatgttcaactattgttgctttaactcttcctagtgctaacttttaatgaaaatttcttcttaaacaggttaatattagactcttaaagtctcataactgaacagttcaatgcagaaaacttctggaaatattataggccattttcttggaggtttatattattatctaagaagatgcatgtttgccattttatctgtgggtcctgtgccaagtcatattgctttcatcatggatgggaatcgaaggtatgcaaagaagagaaacatggaagaaggtgatggccataaggctggatttactgctctcatgtccatccttagatactgttatgaattgggagtgaagtatgtcactgtctatgcattcagcattgataacttcaaaaggaagcctaacgaggttcagtccttgatggaattgatgcgggaaaagattgaagagttacttctacaagaaagtcttatcaatgaatacggtgttagattacatttcattggagacttgcaactattgactgagcctgtcagggcttctgtggaaaaagcaatgagagttactgctcacaacaaccagagagttcttttgatttgcgtagcctatacttctcgtcacgagattgtgcatgccgttcaagaatgctgcaaggaaaaatggaatgaagttcaagcatcaaaagaagcaaagctaacaaatggtgcatttgcaagaattgatcagggcctgaaaggaaatggttttgatttgctttttcaagattcaagtaaagactatcaaaatgtaaccaaagcttgtagcagtgtacctaaaggagtgcaaggtgctggagagaaagatggcatgttggagcataccgtagagaaacatagcgaaaacaatagtgaagctgaaatcacattatgcaatgaactgtttgaaatgactgaagagaggaagtataagcagggtgatgttcctttaataaaactggtggatattgagaagcacatgtacatggcagtggcacctgacccagacatcttgatccgaacttctggagaggctcgactcagcaattttcttctttggcagactagtacctgccctttgtatgcgccaactgcactttggcctgaaataggcctaagacacttggtctgggcagtattgaattttcagagacaccatttttatttggaaaagaaaaagaaacagttttaattgtatccttattggccaaaattttgagtgtagttcatgtgatgacaatttctttttcttt

SEQ ID NO: 3712 - DNA, 1256 bp, Glycine max
  Clone ID: GLYMA-23APR03-CLUSTER57760_1
tctcctattttctgtgtgaagtgtgaactcaaaaaaccctcaccggctcaagcatcaaagaggcaccgtcgcgaacccctgactcccttagaatcaaagcacatgataatggctgtgttgggtaaggtaaaagaagctggacttccattgatgaagctggtgaagttgagagggatgcctattttgcagcaattgcatttagaggaacggctgcttcgaaccagttcagataattggtgccttattaacgatggaaccagttcccctgccattgtaatgggtttgtctgggaaactttcagaactcgttgaagccaagcctgtgttgcaagatcgtatatccatcatcagaaggtttactgggggaggaactgttgttgtagaccaaaacactatatttgttacgttgatatgcaataaagatgctgtttcaaatgtgcaaccctttccccgcagtatcatgtcatggagtggtttattatacagtgaagtttttgaagggcttgctggttttcatctccgtgagaatgattatgtttttgatgatcgcaaatttggtggtaatgctcaatctataaccaagcaccggtggatacaccacacatcttttttatgggattatgaggtcaagaacatgtcttatctcaagttacctgcaaaggctcctgagtaccgattaacaagaagtcacatggattttgtttgtcgaatgaaggagtatgtgccgagatcagaatttatagagaaaactattaaggctattggaggccaattttctgtgaaatccattagcttggagtccatagacattccctctgtttctgaatatgttcataccactaggcttctcacagagcaggaaattcaagaggcttgcactattcaaacttgaaaaaatagttacaaaaggcttggcaataatttataagctatagtatgtgagagagaattcatcaatgggggaattgaggatgctgctgtggacataattttttcttttgaccataatttcttctgaccaaattgtctttatcttttggttagaatatttcagatgcttttagtgaaagatattttctttattttgttcttaagtttcaattaccatactactttttctgtataactttaaccctgggttatctttttgttatacaacttttagatttggcagtgttgatgtttgttcaaacgcaaatttctatcttggtggaatcatgccttggcctaataaattggcacttgtacttgagtaga

SEQ ID NO: 3713 - DNA, 560 bp, Glycine max
  unsure (1)..(560): unsure at all n locations
  Clone ID: GLYMA-23APR03-CLUSTER57793_4
ttttcttttcattttctgaattgggtttttggtcttttgttgcagtggttgttcatctcagagccaccggcgatgctcctattctcaagcaatccaaattcaagatagcaggaactgataaattcgctaaagtgatagactttcttcgccgacagctccacagggaaacattgtttgtatacatcaatagtgctttttcaccaaaccctgatgaattggtcattgatttgtttaataattttggttttgatggcaaactggtggtcaactacgcttgttctatggcatggggctaaccctgaatgatggctgcaggttacaaaagctccatattgtgaatacattgtttcctttcagaaattcgggacttgcatataatcacagtacacgatttcttttgaacttgaagattctcaccggatggaagtgcggtaagacatttaaagcaaactggagtcacccgtttgggtgtgttcgtgtgatagttatggatgattatggtttgtgctgcttgttaaaatgctaatccttcagtaattcatcatgacattttttnnaat

SEQ ID NO: 3714 - DNA, 1925 bp, Glycine max
  Clone ID: GLYMA-23APR03-CLUSTER5795_1
tcgcggctcctccccttccgtcgccacctgcccctactacccccccctctccgacctcttcagcttcttccccgaggcctctgtccgcagctcgtgcaaccccgacgttcacgcttcgacctgaccgaccacacccctggaagccgactagcacgacaatcggccaaaggctccattgtgggaggatatatcagcaggaatgctgaggctcgggtacaacaggagtgccaagagatgcaaagagaaatgggagaacatcaacaagtacttcaaaaaggtcaaggcgcgcaacgagcaaaggcgcgacgatggtaaggcaagtcccaattgtaaacaacaacaagttgtccacgaaagatcaaccgccgcagccaaaaatgctgcagttattgcttttttgcaacagttatctggtcatcaccaaaattccactgcaacacaagcagcagccaatttccctccacaatcacctccacaaaaagttacaaaagtacaaccaccaccacaacaagctccacaaccacaagctccattggtgttgtcaaatagtgacaacatggagattcagaaaatgaataatggtcacagtgttgttactgctactgttactgctactgctactcctactcctactactactttcgttgctgctgctactgctattactactactccttcttcattgagttctttatcttcttctaggtggccaaagacagaagttcatgctttgataagactgaggacaagtcttgaaaccaagtaccaagaaaatggaccaaaggctccattgtgggaggatatatcagcaggaatgctgaggctcgggtacaacaggagtgccaagagatgcaaagagaaatgggagaacatcaacaagtacttcaagaaggtcaaggagagcaacaagcaaaggcgcgaggatagtaagacatgtccctattttaatgaacttgaagctatatacaaagaatggggcaagactcagaacccctttggcacttcgtggcaccacatgaagccacatgaaatgatggaagagttcgttgagcaaccctagcaaaaaacagttcacatgggtcagcaaggcagaggcatagctaaagtgggtgtaaatgtttaagcgaacataaaattaggtgtaaaaggagattaaaagatgagagagagagagagagaaaaaaagaatacgaggtcccatagcagtttaatgaaatgaaataaaataaaaaagtcacatgcatgatcaaactaactttcttcagtggacaccgttgaatgagacaagataaggaagtttctgattggatggagagttttaattttaattttaattttaattttaattttaatatatatttttttcttcttctgggggatggatttttaattattatgtaagttgattttaatttttccaaaattggggttaggagatgtcactgaaagggcatgatgatggcacaaacaccggcactataaaattcaattctttaataatgaatgacccatctaaaagcatggtggtgcagaagcagaagcagaagcagaagcacaaggtacctatctgacacactttctgatcatgggccagcttaaaagcagatcattggagctgtgggtcacattccggccgccatgaactgggatcagagatcgttaattaacactaagaaacaacagttcacatgggccagcaaagcagaagcatagctatagtgggtgtacatgtttttgcgctcataaatttatgtgtaaagtgtaaattgaagatgagagagagagagagaaaaaaaaagaatacgaggtcccatagcagtttaatgaaatgaaataaaataaaaaagtcacatgcatgatgcaactcttgtaattttcctttactttcattatatatcacggaaccactgtgtggtactgctttc

SEQ ID NO: 3715 - DNA, 1783 bp, Glycine max
  Clone ID: GLYMA-23APR03-CLUSTER5842_1
ggtgtcaactcgaactacaatggatccaacttgagctaaaaatacaaacaaattttgcagttgactcaaaaaataaatttggcccatgctgatccgagttaacccacctaaacaattacataacaaagccttaagtaacctaattttatttttttaagagtggctctctcgtctctccctctccgtcacggcgtcagcgtcattcactcactcactctcgagctcgacgccgcgacccactcaggcacagcgccacaaagatccactctccgccgcgagcccgcaacccactcacaaacacagctcgccgccgcgaccccgtgccactgcttttccgcgaccctgcgccgccgcgaacgctcaccctccatctttcctcaccgtgttattgtgactgaaagtgaacgattgctgctctcttttgggttgcattgaaagaatttggtagctgagaagtaaacatttaactggttctgccaccttggcccccacgacgccatctctcaaacccaaaccagagcatagatccactctcaccggaaatagaggggatccgcttccgtaaccctattgtgtcgccgtcgtgggtttggtcgcatcttcgtcgttgcattgtggtcctttgtctgaacttgcttatttgcagtggtaggtcttgcggctggcagagagcacgccctcatgctctttggagatattctccataaaatttgaggtctaggttttatttgaatatttggttgtcgtcttcattatcaatctatcacatttgcacgtgcaatatgcttattctgctttacattctccacatcatcttgaatggcccaactctctgctttgggaataagtgagtgtataaaaatcatcaattatgcaatagcattcatcttatttcttaggactccccaaatcataagtctccttgttagtaacttggttatagtgctcacctgcttgctgtggtagggttgaggacaaaattttgaaagttggagaagagctatggagagaaactttgccattacatggtggctcttgcttttatcaattacagggtctaaaaccccacacgtggtatgaagtgaagatatcatatccagcttctgtatgtataatcatgtccttaccactcaggttgaggacatcagctgtggcgctggacaacagctggagagtgcgcaacactgaaaagctaatttttaagaccaatagcaatcaggatgaattcctgttagtattagtaactgtggagccagaggggtttcctgcaaaactgcatgtagcagagaggcaatttattatcttcaatatagtatgtgatgaactattattaggcataccccacaaagcttggtgggtagtggcactggctttactctgtctaggaattgctttcatcgtgccttcttttcttccattgcatttgctaccaaagaaccaagtcttgaggacagatgattatgtttctaaaatttcttgataagcctccaagaagacatatttttttaaggcaaatgttagttgttaattgttagttttatgaacctccaagaagataaagtgattgtataattgtttgtctcaaatgcggtgaggcatgcttgcatatgacgttggctttgtcaatagaattttggaagctaccatgtggctgctaattttccaagttttctaatagcatgtttggttttgcgtttcggatgtgattttcaggaaccaatagcttctacattccatatgtgattctttcgtctttaatgagtttccaaacacgcattaattc

SEQ ID NO: 3716 - DNA, 1366 bp, Glycine max
  Clone ID: GLYMA-23APR03-CLUSTER5867_2
aagtgacaaggaattaaggaagcgggtgtcacaaattggaacgatgttgttcgatcgtttggccttctgctgttcaaagcacacaagttcatctcaaagaaaatatccaacagtaatagaagagctgtgccaccaattttctctggccaatcttaagaaatcaaccaacaattttgatgaaaatggagtaattggatatggaagatttggtaaagtatacaaaggttgtcttcaacataatgatggttctgattattcagtcacattaaaacgattgggcgtgaaagatagtcgaggattggaacagttcaagaatgaaatagagttgctctgccagcttcgccaccctaattgtgtctctcttataggattttgcaaccacaaaaaagagaagattcttgtgtacgagtacatgtctaatggatctctacatcaacacctacgaggtggcctattgtcatggaagaaaaggctagagatttgtatagaagcagcgcatggactacactaccttcacactggagctaaacgcaccatcattcaccgtaacatcaaccctagcaacattcttttggataacaacatgaagtcaaaacttactgatttccgccttagcatacagggaccacgttatgggtcaaagccaaaaccaattaaagtatatgttattgagggtaagattttattttatgaggctttgatttttaacatgctgaatgatgttgtgtgattcatgtgaccttacttagtaggataagctttgttgttgtaaaccatactaatactttcacttataggtagtttgggctacatgcctatggagtatatcgttgatggtaccatcacagataaatttgatgttttttcatttggtatggttttactagaagttgtgtgtggaagaaactgtttaataattccaacagaaacagaagttctggagaagcctgttgaggagaatattgaccagaatatcaaaggaaagattgcaccagagtgttggcaagtctttatagatatcataataagatgcttgaagtatgaaccggatgagcgaccaacgatgggggaagtagaagtgcaacttgagcatgctctttcaatgcaggaacaagcagatatcacaaacaccaacagtgattataccttattttccaccaccactattcacctaggactggaactggaatccaacccagaagaaagtgatacttaataaatgtatcttattcataggtgattaggtaatatcaaattcaggttagtattttgtgtaagagcagtgacaggaattaagatacttgcagcttttgttgtgatactgtttctagcattttgattttatgagaagctgtcattttaatcc

SEQ ID NO: 3717 - DNA, 676 bp, Glycine max
  Clone ID: GLYMA-23APR03-CLUSTER5888_3
catgtgaaaatttatcataagaatcttcttttgcttttgkgtaattgtgttatgtaaatttcmctaatccgtgttttctttattytacttgttatgcagctgcaaratgtacccagacttgagctacmccgagtcaaccmccmccgagaccttggtcatgggagtggcmccagttaaggctcaattcgagagtgctgaaatgggtgttcccsctgagaacgatggctgcaaatgtggagctaactgcmcctgcaacccctgcacttgcaagtkaggtgttggaragctaaagcttcaagcaraaatggcccttagaaataatgataaaaactatatgtagtttcaaaacttcaaaattatgtagtatgtattatgttgcmctctggtgttttgtgtctaaacaaacmcccttagaataaagtggtcatttyttgcccttgagcaagttcaagtgttttggacttgtgatgggtgtgttaaggtcatggttgccttttttatatatatatatatatataaatgtttggtaattggtcgcttctgtataaagttcggctagttaatytgaattatgaatctctgcttataatattaaactagtactattgctggaaaaaaaaaaaaaaaaattaaaaaaaaaaaaaaaaaaaaaaaaaaaataaaaaaaaaaaataaa

SEQ ID NO: 3718 - DNA, 1986 bp, Glycine max
  Clone ID: GLYMA-23APR03-CLUSTER58994_1
tcagctacgtaggccccccccccaacgtaagactttgtctctcagtctctctcgcctcaggctctcactctctcgagtctcgtctctctctctctctctctctctctctctatattcatatatatatatatatcaatatatatagatacctgtgaagtggaccctaggttcctaaatctcttattccctatcaaggtgtaggaggcagcatcaaatccttaatcttttccaattgcgccctgcccacaaatgctacgtttcgcaccgacactgcctttcgcacgacttggtgactggtgctctgctctgaacgaacacgttgaaggatgaaggctgcagatgcaggagttcattttcttctctctggcaattgatttttaatttattgccctgatggaatattatgcatgaaaaagggagaaaaaaattgttctgaattgatttgcatataacttttggatgaatcttacttgcccagatggattatttgtggctttggttcatttctgctcgagtcactttcttgggactgattcagcaactgttagacatacttcattgaaactgaactgtgtttttgtttttcatttttcatttttgtttggttaagtttattttctgaggtatgtttcagttgttgtgtttgtcttttgttattagagtactgaggttttgggtaactctgactgaaagataattttagaaatcaagtttctaataattgaaatcaagttcatagtcagataacagaaggtaatctgacgagggtaatttcatttgtattttgcctcttaatctaacttgcattttcttttggctaacattttgaactgctgcatgttataattaccatgttttcttatacatggtaaatgcatgttattaattatcattaagttaacttttaaatgcatgttattaattctgatttggagtttgatcaactgcacgtaattggtcttgaaggatgagtgaacttctttttgatgacattttcaaggtcgagaaggtagaccctgatggtaaaaagtatgacaaggtttctcggattgtggcacggagtgagaagtgtgacatgaacatgcttctagatgtaaataccgagatttatccaatgggggaaaaagaaagattcttgatggctttgtctccttcacttgttttgaatactaaggatggttcagtgtcaattcaagacaagtttgaatacatcatgcacgggaggttatataacattacgaaacctcagctcgaaaaaaaaaaaaagaaagagaaacgttcagaatctcagcctgaagagaatgaggaatgttcaaaacctcagcttgaagtggaggtatatgcatcgtttggtgggcttcagttgatgctgaaaggacatgcttcccactgtgttaagtttgcagtcgatcagaagttgtttttacttataaggaaggttgaaagttgatgttggtgatgggcctgaaaagaaaaacatgctagcattaagttttaagtaatctgtataaaataaattgatttttcagaagaatgatttttgtgttttgaaagtttctctgaagttagttttttggtacattagataatttttaggcattctcttatatttattaaactgaaatatttttgccatatatatataaggaatcaacttacattaagaataactcttttagagtttcttttcattctcttcattcatttttaaaaatctaatgattgtaatgtcattaattttatctgttagattacaagaaaatgaagataaggatgaagtgtagctctaaaagagttagttagtgtaagttgatccccctttctctattttttaattggtaggaatctaaaatggtatcaaaagggttataatagtcgtatatcattttcaattaattaagttagacccttctctatatgtgttattaggaatctgtaatttatattttcattatagacatttatttcctttataaaaaaaaaaaa

SEQ ID NO: 3719 - DNA, 1239 bp, Glycine max
  Clone ID: GLYMA-23APR03-CLUSTER59005_1
tcagctacgtaggccccccccccaattccgatgtgtgagctttactttggacaaagataagagaaaaaaaaatgtggtggttgggaagaaaagggccttctggattctcagcttcctctactgctgaggaagttactcagggaattgatggctctgacctcactgccattgttacaggggcaacaagtggtattggtgttgaaactgcacgtgcacttgcattgcgtggtgtccatgttgtcatggggatcagaaatatgacagctggtggggagatcaaggaaacaatattaagatataacccgattgcaaaaattgacatgatggagctggacctaagttcaatggaatcagtgaggacatttgcatcgcaattcaattctcgcggtcttcctctgaatatacttgttaataatgcaggaatcatggcaacaccattcaagctttcaaaagacaaaatagaattacagtttgcaacaaaccacataggtcatttccttttgacaaacttattgcttgaaacaatgaaacggactgctattgaacagaggaaggagggaagggttgtaaatgtctcatcaagacgtcataaattatcatatcctgaagggattagatttgataaaatcaatgataaatcagggtataacagtttgtctgcatatgggcagtcaaagcttgctaatgtgttgcataccaatgagctcgcaagacggctaaagcaggaggagggcacaaacataactgcaaactcagttagcccgggaccaattgccaccaatctatttcgttatcacagtttaatggaggtgtttgttggtatacttggtaaatatgcgatgaaaaatatacagcagggagcagcaaccacatgttatgttgcattgcatccacaagttaaagggttgactggctgctactttgcggatagtaacttagctgaagcaagttcacaagcatccgatccagaggtggcaaggaaactgtgggagtatagctctgatttggttaaattttgatattatgttacctaaggagtagggactaatatctagtgaaagttttcaaacatattaatgatccattaaacattcacttgacctttacctttttcccttgtacagaggaatatatgcttagtttacaatcacaaatttagagatacttgtaatctgattttgtctctaaataaactgcacttctattagatgacctaaggataaaaaaaaaaaaaaaaaa

SEQ ID NO: 3720 - DNA, 762 bp, Glycine max
  Clone ID: GLYMA-23APR03-CLUSTER59038_4
acagcgtgccaccatcacgctacactaagagtgcaggaacatcctgtatgggttggaaagcagctgagaaactcattaggcactggaaaattctcagaggagataatgttatgataacaaggggcaaagataagggtgagaccgggattctaaagcgtgtcattcgctctcaaaatcgtgtcattgtagagagtaaaaacctggtaaagaagcatataaagcaagggcaaggtcatgaagggggcatctttacagtggaagccccactgcatgcctccaatgtgcaagttcttgacccagtgacaggcgagccttgcaaggttggagttaaatatcttgaagatggtactaaagtcagagtgtccagaggaataggaacctcagggtccatagtccctcgtcctgagattttaaagataagaactaccccaagacctgcagtccttaagtatctaacaagcttaattatgctttttcatgtatgagttgttgacaaaacatggccagagccaatagagaatcgagaaaaagtgagacggaaaatgaacttgaattatgagaaaggtgtgtgaaacaaacaagccaataatgtggcttatataatatataatatatagatatagaccagagtgagtaacgaatcactaactaattacatgtgtatatctacctaattagatgactcatcaaacaaagcgaactattgtgatagagactttatttttctcaattaattcaaagatgtactgcttatctcccagg

SEQ ID NO: 3721 - DNA, 899 bp, Glycine max
  Clone ID: GLYMA-23APR03-CLUSTER590_2
acctcaatcacaaactagttttctctaaccaaccatacagtactcctcactagctataccctggttaatccatggagaaagaagctgttggccttgaaatcactactgagctaaggttgggccttcccggtggggaattacctgacaagaacgagaagataaagaagagggtgttctccgagattcaagctcatgatgatgatgaaaacagttcctccgaacaagaccgcaaaatccaaaccaagaatcaagtggtggggtggcctccggtgtgttcgtaccgcaagaagaacaccgtcaatgaaaccaaaatgtacgtcaaagttagcatggacggggctcctttcttgcgtaaaattgatttagctatgcacaagggatattcggagctggtcttggccttggagaagttcttcggttgctatggaattcgcgaagcgttgaaggatgcggagaatgctgaacacgttcccatatacgaggacaaagatggtgactggatgctcgttggagatgtcccttgggagatgtttattgagtcatgcaagaggttgaggattatgaagagatcagatgcaaagggcttcgatctgcaaccaaaagggtctttaaaaggatttatagaaggcgtaacaaaatgaaaaatatagatgaagcaaaaaagattggcttctaatcaatgtcgtacacgttttgaagacatccaatttcatgttgtcgttttattatatttgaggaagaagaaacattttatagtatggtgcatgaatcagatttctgtctatgttaagacctaagaatgaaggaaatatacagaagtcagtttaattaaatatagggaaacctcatcgttttagtaaatggtttgtcatatttgttgatatgctgcacatttcagc

SEQ ID NO: 3722 - DNA, 1856 bp, Glycine max
  Clone ID: GLYMA-23APR03-CLUSTER5915_1
tcagctacgtaggccccccccccccggctttcaagtgagggtgttgtggtaatgggtaggtgttggttagttggggtcataattgtggtggggtgtgctagttttctgggcactgttggagtagtagaagggtatccagctgaggatttggtggtgaaattgcctggccaacccaaggttgggtttaagcaatttgctggatatgttgatgtagatgccaagcatggaaggagcctcttcgactattttgtggaggctgagcaagaccctcacaagaagcccctcacactttggctcaatggaggtcctggatgttcctccattggaggaggtgcttttactgaattgggacccttttatcctaaaggtgatggacgtggtctccgaagaaattcgatgtcttggaataaagcatccaaccttctttttgtggagtctccagctggagttggttggtcatactcaaatacaacttcagattataattctggagatgcctccactgccaatgatatgtatttgttcatgctgaaatggtacgagaagtttccatcatacataacaagggagctgttcccttactggagaaagctatgcaggacactatatacctcaattaactaatgttttattggaccataatgctcgttcaactggttccaaattcaatattaaaggagttgctattggaaacccacttttgagacttgaccgggatgcacctgcaatttatgaatacttctggtcacatggaatgatttctgatgaaattggccttgccattatgaatgattgtgattttgatgattatgtctatgcaagtcctcacaatgtttctcaattgtgcaacaatgccatatatgaagcaaatctcattgttggtgattatataaacaactatgatgtaattctagatgtttgttatacatccattacggaacaagaactcagattgaaaaggatggcaactagaataagtgttagtgtagatgtgtgtatgactctagaaagacgtttttacttcaatctccctgaggtccaaaaggctcttcatgcaaaccgtacaaatcttccttatagctggtccatgtgtagtcatgttctaaactacagagacaccgatggtaacatcaacatccttccaattctcaaaagaatagtccaaaaccatatcccagtatgggttttcagcggagaccaagattctgttgtgccactattgggatctcgaacactcattcgtgaactagctcatgaattgcaattcaagattacagtcccatatggggcttggttccacaaaggacaggttggaggttgggtaactgagtatggaaatttgttgacctttgccactgtaagaggagctgctcacatggtaccttatgcacaaccttcaagagcacttcatctattcagttcttttgtgcgtggcaggaggttgcccaacacaacacgtccttcaattgatgaataaggatgatagttatgccagttgtgtaacaaaaaagtggcatgctctgatgacttttctaaagcctaaaaggccatagaaaaggaaatgtgaaaggaaaaaaaagactgtttcgttataagtaaccagcgattgtatggaaaggaaaattaacgtggaaaaaaatttgcattccatcgtacttctacttcatttggtagcacagatttctttggcttcattgctaggcgcctttgggattctagtgaaaaatttaagcaactttatttttgtcagttatccttatcgcaacaaatgcttgttttgaaagttatgtatcagcataaggtttggattattggttaaaatgaacattaattgaagagaatttagtagcaaaacc

SEQ ID NO: 3723 - DNA, 898 bp, Glycine max
  Clone ID: GLYMA-23APR03-CLUSTER5999_2
accctagtgtccccgattatattctacttccagacaccccctgtgccgccttcccacctctcacgccgaacctctaccgttcttcaatctcgtcttactcaccttcaacgagcttcaagcattagctctgctttaccaatggctgatgactctgctaaaggaattgaaaatgcttctttgaactcaacacgactagagaaccctcagattgagcccataagactgccctcggtagaggaaatccgtggtcaagacatttggaacaattgtgcagtgcgcagtgttgtcagtggagtcatgggtggcgggcttggcatcttcatgggtttatttcttggagcactggacaacccattgatgcaggaggaaatgactggcagacaacagcttatatatcaagcaaaacagatggggcgaaggagttggagttcagccaaagcatttgctgttatgggtttcatattctcagctgccgagtgtgttgttgagaaggctcgagcaaaacatgacataacaaataccgttgttgctggatgtgcaactggaggtgcaatatcagcaaaaggtggcccaaaagcagcgtgtgctggttgtgctggctttgcggcattctcagtcgtaatagagaagtttttggagagacatcaataagggaattgacgttagcctaacacatttttgagttcttggttaagtcttttgcccatttgatgcgggacgtgattgggggagcacacatattgcagtatttattttacatcaatacgatgtcatttgcaaatgcatttctaatctggagaaaggtgatgtaatgatttgatttagtattaaataattaaaatggttgttttctttgtgcattcgtatgtctgaataattctatggtatattcgccgct

SEQ ID NO: 3724 - DNA, 1682 bp, Glycine max
  Clone ID: GLYMA-23APR03-CLUSTER60161_1
aagtatcagctacgtaggccccccccccgggctgaaggcagtgtcacacgttgtaagactcagactgtgttctgttctattctgtgttccactttgggttattcgttaaatctttatttaattaagttaagatggttcagtgattcaaccaacgtgagacccttcttctatccttcgacgccacgcacgctcttgttgtctccttcattcgcaatattgttatggcaaatgccaagttcggttcctccttttcatgttcagcggcttctctttcttcttctcctttccaacgcaccagaactgcccagttgaacttatctcaagggttgtttgtcaaccaactaactggtgctcagttgcaaatgtacactaaagacaaatcatgccagcttaagtttattcatggaatgccaaacttaaaaggaaggctacagaaacagcattatgctctttttgttgtctctgaggatcagtcacaatactgtgagctcgaaacaactgctttagtgctagaaaacagcaatacagttgcagaagacatctctcctgcaagcaactcatattttcatttatcaggtagtgatggaaaaccaggtttactatcattttataaccgtccatacagaagagatagtaagatcctcttaccaaattcagagagaagtcaaaacagcatattgtggtttttgggccctgcagtcctcgttgcgtccttcatttttccttcactctatttacgcaaagtgctatccatcatttttgaggactctttgttaactgatttcctcatattattcttcacagaagcaattttctattgtggtgttggggtattcctttatctactagaccatgtaagaagacccttgctagtggatatcgctgcaaacaatagtgatactctacccccacaattgggacagagagtctcttctgttgctaccctggtgcttagtcttgtaattccaatggtgactatgggtttggtctggccgtggactggccctgcagcctccgcaactcttgctccataccttgttggtatagttgtccaatttgcatttgagcaatatgccagatatcgaaagtctccttcatggtctgctattccattaatctttcaagtgtatagattgcaccaactaaatagagcagcacaactggtgacagctttatcatttactgttagaggagctgaaatgacctcacacaacatggctataaacagctctttgggtacccttctaaatgtcctacaattccttggtgtgatttgcatttggtccctatccagcttcctcatgagatttatcccttatgcttcaacaactaagcagtaaagaatttcttgtaaagtttgttaaccatgtcatctcacacatcagaacacccccagttcatcttcgtgcagaatatgtagatctacatgggtttattttttggtggtttaaaactgttaaatctaattggaattttggacactaatcctctgattcatctagaattaaaaaaaatggtggtttcaagaatttgaaactgaggattttggataccgattaaacaaaggaatatttgtagttttacttgtaaggcatttgtttaaaatgttatttgcacgaaatgaagggaaaacgtggcaattagaccactaaattacaaaaaaaaaaaaaaaaaaagaaccc

SEQ ID NO: 3725 - DNA, 1719 bp, Glycine max
  Clone ID: GLYMA-23APR03-CLUSTER601_2
acttcactccattccactcccaatcaaaaacaacaactcatcttcccaaattcaaatcacacacacttttctctctctgtctctcagattagggttggggttagggtttggttcgatcatggcttcgtcttcctccgatccgggaaagtccgcggagacgtcggaggccgcggcgttggcggtggcgaacgaccagctcttgctctacagaggattgaagaaggccaagaaggaaagaggttgcacggcgaaagagcgcatcagcaaaatgcctccgtgcgccgccggcaaacgcagctccatatatcgcggcgtcacgaggcataggtggactggtcgttatgaagcgcatctttgggataagagtacgtggaaccaaaatcagaataagaagggaaagcaagtttatttgggggcgtatgatgacgaggaagcggcggccagagcatatgatcttgctgctctcaaatattggggtcctgggactctcattaactttcctgtgacggattatgcaagagatcttgaagaaatgcagaatgtgtcgagagaagagtaccttgcatctttacggcggaagagcagtggtttttcaagaggactagcaaaatatcgtggactctccagtcgatgggatcctacatatggccgtatgtctggatctgattacttcaatagcatgcattatggtgcaggggatgattctgcagcagaaagtgaatatgtaagtggcttctgcttagacagaaagattgatttaacaagtcacatcaaatggtggggatctaataagagtagacattctgatgctgggacaagattatcagaagaaaagaaacttggttctgctggagatgtttgcagcgaacttaagcaattggagcagaaagttcaacctatggaaccttaccagatgccacagttaggcaggctacacaatgagaagaagcatagaagttcttcactctctgccttaagtatcttgtcacaatctgctgcttacaagagcttgcaagagaaagcatcaaagagacaggaaaatagtactgataatgatgagaatgaaaacaaaaatacaatcaacaagttggatcatggcaaggcagttgagaaaccatcaaatcatgatgggggcaatgatcggctcaacattgcaatgggaatgagtggaacaatgtctcttcaaagaaatgcttacccattgactccattcttgtccgcaccacttttaacagcctacaatactgttgatccattggtagatcctgttctctggacatctcttgttcccatgcttcctgctggcctttctcgtacagctgaggttacaaagaccgagaccagtttggagaccagttcaacgtacactatgtttcagccagaggaatgaatgattggaaattttaatttccaattgaagaagaaatgctcaaagaacagaatataggtttgaagtgctcaaccaggtctaatagaatgctcccatggctttttttgcaagattacatgggttatagaggtcagagaaaagaaaatatttacatcgatgataaatatagaattagcacgaatcttttcatttcaagtcagatatgtatcagttgacatctctttcatgtatatgcagtcagagttatagataaattttgaatttacgtggaatattctgtacagaataagaggtggaattatgcaaggacgtggtaattaatttaaaaa

SEQ ID NO: 3726 - DNA, 773 bp, Glycine max
  Clone ID: GLYMA-23APR03-CLUSTER6060_11
gcttcttctgggttcttcccagattatagaacatatgaaaaacaccactcttacagagccaaggttcatagaaccatatataggagaagagtagaaatccttcgaatggttaatgcctatgttcctgaattgactttctgagagaaggcttgttcaacattctcaagggatgcaaagatggagaagaaaagaaagattgtgcagtatagggagaggctggataggactcttgcctcgcctgatcttgcaaatgatgagatgctcaaaaagcttgtcggaagtcaactcccaccttcttcagaacctgaagtagaaggatttagagataaattagtagaaaccaagactgcggaggtgtctcactttcttgatatgttgaggagtgcttcttcagatgatagcggaagatcttatacatcacacactgattggaaattaaaacaagatggtgacgagtttcgtgttatgtatcgtgaaggaccagaaggaactcccaagaaatgcgttttgcagcagttgactttatacgtttgatataaggtggtcctgaatgttgttgtccttgtatgccttagtaatgtttttgaaactaagtaatatatcattataaaaatgtatttgataaatgcacctgacacccttttcacaattttcatttaggtggcctcagtctactattcccactttcaaaatcttatcagctgaatgtttgcaaaagacccggattggggaacaattatcactagtgaggtttgtccagcctgcaccaagta

SEQ ID NO: 3727 - DNA, 889 bp, Glycine max
  Clone ID: GLYMA-23APR03-CLUSTER6068_1
agagatgatgggaagtaagaatgatgtgaaactattgagttttttgttgagtccagttggtcacagagttgaatgggctctgaagctaaagggtgttgaattcgagtatgtagaagaagatatcttcaacaaaagcaatctccttctggaactgaacccggttcacaaaaaggttccggttcttgttcatcaccagaaaccaatcgctgagtcactcatcatcgttgaatacatcgaccaaacatggaagcagcatccactgttgcctcaacatccttatcaacgagctcttgctcggttttggggtaccgttgctgataagcttgtgaagacatcatatgttgcaatgtgtagcagtggcgatgaacaagaaaagagtgtgaaggaagccaaagaagtaatggataaaatagaagaagagattattaaggggaagaaattctttggaggggacaatattgggtaccttgaccttgcatttggatggatcccttactggcttcccatttgggaggaagttgggtcaatgcaaatagttgacccattgaaacattgtgccatctctgcatggaacaccaattttctcagccaccctatcatcaaggattgcttgcccccaagagacaagatgctcgtttattcccaccgtcgcaaaaatgagttttcttctactcttcgtcgttgattcatgttttttcctctatgtctaattcaatatgttataggcagagggaaaaacctattagagtcaattatattccaagatatagggattgactcaactgtattaatgcagattatatacgtttatcttgggttgttaatcatctctgctgttaaataaattatatataagccttatgagaggatttcagagaaaaaaaaaaaa

SEQ ID NO: 3728 - DNA, 2023 bp, Glycine max
  Clone ID: GLYMA-23APR03-CLUSTER6079_15
ccccacccctcgcccggccccggcgcaacaccccgcccgaccgccccgcccgcggcgacccccacagccgcggccgccggacaccccgcgcccccagcccgcccccccggcgcggcgccgcggccgcggcggccccacccgcggagggcctggtgcgcgcggggcgcctgacccccgcccaccgccgccgccgggccaccgccgcggcgaacagacggtccgggggcgcgcccgccgcccgcacacgccgacccgccgcgcggcccgtctccaggggcctagggggttcccccggcggcggcccggccgctggtgcgcatcggcggcaccgcgcgccggccagcacgcccgggccggcgcgctcaaaatatatattgccattccgtttgggtctgtaacagaagcagcgaagcataaaaacaatgcatccaaattaaaacccacaacggtactggtacatctgaacatcaaacacaacaacagaaaaagaccacaagaacaagaatctgaagtagattctagtagtcttcgtcctcatcctggccctcaccagactcagcacccacttcttcataatccttctcgagggctgcaagatcctcacgggcttctgaaaattcaccttcttccataccctcacccacgtaccaatggacgaaggcacgcttggcatacatgagatcaaacttgtggtcaatgcgaccaaacacctcagccacactggtggagtttgaaatcatgcaaactgccctctgcaccttggcaagatcacctccaggaacaacagtagggggctggtagttaataccacacttgaaaccagtagggcaccaatccacaaactgaattgtcctcttggtcttgatggtggcaacagcagcattcacatctttgggcacaacgtcaccacggtacatcaggcaacatgccatgtactttccgtggcgagggtcacacttggccatcatggacgatggctcgaaagcactgttggtaatttcagccactgaaagctgttcatggtaggccttctcagcagagataactggagcataggaggaaagcatgaaatggattctgggatatgggaccaagttggtctggaattcagtcacatccacattcagggccccatcaaacctcagggaagcagtcaaagaagaaatcacctgagaaacaagacggttgaggttggtgtaggtaggacgttcaatgtcaagggagcgcctacagatgtcatagatggcttcattatccaaaaggacagcaacatcggtgtgctccaagagagagtgggtggagaggacactgttgtatggctcaacaacggaggtggagacctgaggggaggggtagacagtgaaaccaagcttggatttcttgccataatcaacggagagacgctccaacagaagggaaccaagtccagaaccagttcctccaccaacggcattgaatactaagaacccttggagtccagtgcagttgtcagcaagctttctgatgcggtccaagcacagatcaacgatctctttcccaatggtataatgaccacgggcaaagttgttggcggcatcttctttgccgctgatgagctgctctgggtggaaaagctggcggtaagttccggtcctcacttcatcaataacagtgggctcaagatctacaaagacggcacgtggcacgtgctttccagcaccagtctcactgaagaaagtattgaaagcatcatcacctccgccaactgttttgtcacttggcatttgcccatcgggcccgatgccgtgctcaagacagtagagctcccagcaagcatttccgacctggataccagcctgaccaatgtggatcgagatgcactctctcattttcagagatgaaaaatcgaattccgggaaggaaacggaaacggagaagaaaggcgtttatgaagacgccttctttgaattctgcaagtgaccccttctgtcgtcttctcgcagccgtacgcacgcgtggccggacgcgtgggcggacgcgtggg

SEQ ID NO: 3729 - DNA, 927 bp, Glycine max
  unsure (1)..(927): unsure at all n locations
  Clone ID: GLYMA-23APR03-CLUSTER6084_3
aagaattgggtcccacgcgcctgcgacgtcagcatcattacaccgtactctctctctctctctccattgtccccctttatatataagcctcaccagatctcttcgccaccacaacccaccgtgtcaactctccttcaaacaccagcgattaaacttgtctctctttaatctcttaataccaaaacgctaccgttttgctcttttatttctctctctctctatggattgcaagaagcgagttcgggatgactcggacgaatcaattctggaatcgcccgaggcgaaacgactcagggacgatttactcgagttcttcgacgacnccgatgatgcagcttccactcaggaccttgactccgtcatgaagagcttgcaggaggagatttccggcgtgacgtcagattacggcgagtctcaggcgcagatcggatacctcctggaggcctccgacgacgatcttgggcttcctcccgccggaaactcgtcggcgccacaggagaagaacgtggaggccgagttggttcgagtcgcgtctgactcgtccggaatcggcgagttgtgggagtttgaggaccagattccgagatacgactcgttcgatttgggaatggggttcggttatgagtgcgatgctaccgaatacgctgcgtttggtgaacttttcgatcattctgatgtgtattatgactcgtggcggcaatagagatttaatgaaaactaaatggaaaaaagggttttagagatgtaaatgtttcttctcagcttttttattcttttagatgaagggaattactgaagaaagattataaagaaggacttgggatacaaaaaagaaaaaaaaaaaaaaacgttacatttttttatattttagtaagggaatgcttctggctccacacaatttctgcctatggtacttgaaaaattact

SEQ ID NO: 3730 - DNA, 1931 bp, Glycine max
  Clone ID: GLYMA-23APR03-CLUSTER6110_1
actttcgatatgctacgccaagaactgtgatgttcaacatgttgcaaactcatcacctccagtttctagcgattctctttctatatacgctgacatgctctgaaaccgcaaccacttccatcccacaagagcttcacataggcttctctgtgacgccagagtcttggacgacgccgtttcaagcagttctgagcgatcatagtggcaacttctctctaggcttcctccgcgtgaaccaaaaccagctggcactggcggtcctccacgtggcatcctcggagccattctgggtggccaacccatcccacgcgccatcatggtccgacaacacgcgcctcttcttcaacggcagcctcgtcctgtccgaccccgaaacgctcgttttgtggtcaaccgccacaaacggagaccgcgtggtgctcctcaacagctccaatttacaagttcaccacaatggcattcccctatgggagagttttcactttcccaaaaatactctcgtccaggaccagaatttcacctccaacatgactcttttgtcctccaacggcatttattccatgaggttaggcaacgatttcatggggttatacgaaaaccatgtccaattatattggaaacgcacgccactgggagcaaaagcggaagtaaaggaagggcagggaccgatttacgcccgagtcaacccggagggttacctcgggatgtatcagacaaccgacgagaagcccacggatgttcaaaagttcaacacgttccaacaaacgtcgtcgtttttgttcgtgcggttggaaccggacgggaatctgaagggttactactgggacggttccacgtggcagctcaactaccaggctattactgaagcctgcgacctcccccgctcctgcggttcgtacggtttgtgcactccgggagggtctgggtgctcctgtttagaaaaccgaacccggttcgaaccggatgggtgttttaaagatgttggtggagagtcgtctggggacttgtgtagtagtgaagggattggtggaagtaaaagcagttactgggtgctgagaagaacgggagtggaagcaccgcataaggagctagtaaggcacctaacgacgtcgtcttgggcggattgtgagggattgtgccagaacaactgtagctgctggggggcgctgtatagcaacgcaaccgggttttgttatatgttggactatccgatccagacaatggtgggtactggggatgggtcaaaagtgggttacttcaaggttaaaaaagaggaacgaggaaagaaccgggtttggatacgggttggggttgtggttacggttttggttggggttggggttattattattggaaccggattttgcgtgacgagatggagaaagaggagaggggtgaaggaagaggaatggggttcgcccggcccgtataagaatcttggatccgcaagttttagattcatagaaatgagcaatgcccatgacgcaaggggtgacgcatgtgctcaaagttgacattgttgtttatgttattatggcagaatcagaatgcatttggattggtggggtccatctaatctaacaaaaattttataaaaagatcttcccacttgcaaacaatgatagtggttggcgcacctccgcatgtgatgtgactctccttatttatacaaagcaaatgcatgggttgagttccggtgaaaaggttgaccaacgcaagtgccggtttggagtgcggaatgaaacctttcaaaaacatgtcaccaatcagcatcatagactcaacttaaactaaataaattctttgtctagttttgctgtcggacgtgtcttttttatattgcaatttgacttcaaactctcatttgaagtgagcctgcattagttaacttcaaattccttgctcacagatatgaatgaatattgtaatgc

SEQ ID NO: 3731 - DNA, 1342 bp, Glycine max
  Clone ID: GLYMA-23APR03-CLUSTER6112_2
gattattcttgaaaaaagggggaaaaacaacggttggcggtttcgtaacgattctgtgggtcatctcaatccgctaacttgatcatcttcattcttctagggtttcttgaattcccccaaatcaatcaacccgtttctgaatgaatctctgaacgacgcagtataggatcgcgattcttccatattccctccactgcaccgcatcgttccacagggtaataggtgactggaggtggaaatcaagagatttctcaatcaaaagggtagtgttgcaatgttggcttctgaagatattttgtcattcaaatcttaccagaaccgggctaatttgtttgtcaaggaatatttactagccgactctctgattccatatacttctgttattagtggcatgttagcttgcaagatggtctatgagcttactcagcatattggttctaattactttaagatctattccaacttctccaaaatccaacgtattgagtggaacaaccgtgctatatcaactatacatgccattttcataacatctatgtcgttgtacatggtgttttgctcaaatctattttctgactaccagtctactgaacttattactgagcgaagctcttcattgtcaacttttgcactgggggtttctgttggttacttcattgctgatctagggacaatattatggttttttcctgctcttggtggatatgagtatgtgattcatcatctgttttctttggtagcagtagcatatgcaatgttgactggggaaggacagctttacacattcatggtcctgatctctgagacaactactccagggatcaatttgagatggtaatctttctcttatagtcgaattctactatgtcatagaatatttttctttgttaatgttgtggtgtttgtgaaggtatcttgatgtagctggaatgaaaaagtccaaagcttatctcatcaatggggttgtaatatttatttcttggctggttgccagaatacttctgttcatatacatgttttaccatgtctacttgcactttgatgaggttgagcagatgcacacctttgggcagatattagttattgttgtgccattggtgctatcagttatgaacttggtttggtttgctaagattatcaaaggcttgaggaagacattggcaaagaggcagtaaataattctgcatagtgaaacctttttgaagaaaatgtataggttacccctacccatgtcgatatcaacctcacctagttccacgtgaatctgaatttttttgtataattttttcttttttaatgcttatatatataaacacgagagaagatttacttactccataaa

SEQ ID NO: 3732 - DNA, 767 bp, Glycine max
  Clone ID: GLYMA-23APR03-CLUSTER6126_48
gcaatgaaattccctggccgatgcaataccggggaaaagaacttagatgaatttgcataaatataatgccttatggctacagttcaataatcaattatgactgactgatacaaatatttctcaacaaatggcagtataattggctgatttgaataatagtctttaaaaaatcatccaaatatcgtgagcatagttgaagtttctttagtgatcaaccacaccagccaaccgttttgttgacagtgaaacctatttcagagggctgagactgtgattgctgaggaggtctaggctctcttggtttggcaggatcaacaaatataacccatccatccaaaaatttagcgttcattccttctcttgccctttcagcttcttctatggttgtataagttacaaaagcgaatccctttgatcttccagaggctctatcagttatcaccttagcttcaaccagctgcccaaaagaagaaaatgcttccttaaggttttcatcttttgtcagtctagaaagaccgcttacgaaaagtttgggggaagtgagagttgagctgagacgaatggaagcatagtgggaatgaacaagtggggtgtggcgaagcagacgctgagctccatacaaaaaagccatttgatgaaacgatgatagaatcgaatctcacccaacaaaacacaaaccttggaagaggttttggaggatccttaaaaccctctcgttgtcgttgcactccaaataggatccctaaaccccaaaataagagttccgt

SEQ ID NO: 3733 - DNA, 1909 bp, Glycine max
  Clone ID: GLYMA-23APR03-CLUSTER6126_59
tataaatcaccacccccaccttcaccatcccctcctcctccttactattataaatctcccccaccaccttcaccatccccaccaccaccttattattatcattccccacctccacctaaagagcatgtacaccctccctactactaccactcaccaccaccaccatccccatctccaccacctccttattattataaatcccctccaccaccatccccttctcctcctcccccctactactatcactctccaccaccaccatctccttctcctcctcctccctactactaccactctccaccaccaccatccccatcaccgccgtctccatattattacaaatcccctccacctccatctccatctccaccacctccttactactataaaagtcctcctccaccatctcccacttctcatcctccctattactacaaatcccctccaccaccaacgtcatatcctccacctccttaccactacgtgagccctccaccaccttctccatctcctcccccaccataccattacacatcaccacctcctccttccccagctcctgctcccaagtacatttacaaatcacctccacctccggtttatatctatgcttccccacctccacctatctacaagtaagctcaaattgtgaaagcaccattcatgatgaatcatgttctagttttcatcgaggaataaaggcaagctctattttgagccaagtgaaacatctatcttcctgtctaagttctttgaataaaagtctgaatgtgtcatctctatgctacaatgtttatgattcagatcaggttgattctatttgtttgatggccatcttgcacgtcctgatcttattgtgttcaagtgacggacaaatccaaacaggaaagagagatttgaaatgtaaatgccaagtaaatgtgaaaagtacagtccatttttagtgatctctttaatttatttgttcatagattaatatggtcgtgtatgattgcttttctatttattgtggcatttttgtgttgtaccctgttgttgtgtttgcaataattattagtaataaagcagcaaattcaatttgtgttcaaaaaaaaaaaaaaaaactcgagactagttctctcctaacctcaattcacttcttcttgacaattcaataagggtcaaggctgaaagaattcctgatgcaagctcccagactaatctcttccctgagcattatgggcaggaggatctaatgagtgcacttctaaaacagcaagaaggcatgggaccatctgagaatgagtttgactttgatggatattctctggacaacattcctgtctagaacaaacccttcccgattgaagttgccagtgtaaatagtttgttacacaagcacatgatcatcctgcagttagctattttggaactgagtcaaaatttggttgatgtcaaatattcagacttctgggagtagtagtgtattgtaatggtttagtctggatgctcaacatgaatcagcttcaaacctcaactgcatatattcacaaagcatgtgcaaattttgactgctatttatagcaaaattgctagcaagcttctaattttagggtgttcttgaaggtgttggcttagggcagaattgcagaagcaaggttttgatacatctgcaaagttgtcctaggagcatttctaacttgaataacaaattatgaaatttttttcttctgttccttttgtaatttatgtcattgaaagcaagtaacgacttccgtaagcatgtaaatattgcatttggtagctttagacatctggtctggtcattcttttatggttgattctgtactttccgatagatatgcgctgttttttatgttccctgtgtcttgcattctttgtacatgaacctgattatgtgatttgtgtg

SEQ ID NO: 3734 - DNA, 1964 bp, Glycine max
  Clone ID: GLYMA-23APR03-CLUSTER6148_2
gaaatcgcaactttttcatttttcttacttttcaactctcttttacctttttcgtagttttcactaacactcccctattttagctctcacaaacttcgtacagtgacaatatgaaggtcagtacgtcttccaatttgagactcttaattaattcttcttacatatatatatatatatatatatatatatatatatatatattatattaatacttccaaaagtgagtgttgttaaaagaactagtaccatccatggatagatgtaagctcgagatagcttgcagggaaagcaagagagaaaatgaggaagatgaagttttgattagcataaaataaatcagcttacatgggtttttgttattacaactggttatatagttagttacaagaataaccaactcacaactaactaagctaactctagttacacacaaaggttgatcaagttgagttaatcatgatcaagcctctatctattatgctaagagttgttgagtagtactaacaagtgtttgatttttccttaacagaaagttgtgttgaaggtggaaatacatgatgacaaaatcaagaaaaaagctatgaaggctgtctctggcattttaggtattcaattcaattcaacttctgatgtttctcctctcttcagcttctctgctttcaaaatcaaaataaaaagacaaacaaaaaaacaagaaaaagaaaagattgcaatgagggccaagcttctttctttcactcaattcagatcatataacatcaatggttcattgtcattgatatttagtgatatactaaggttgtatttgaaatattgtttcaggggttgagttagtttctgcagacacgaaagacaagaaattgaccataattggggacattgatccagtaaaagtagtagccaagctaaggaagcagctttgtcacgcagacatagtttttgttggaccaacaaaagaggagaagaaggaagaacctaaaaaagattcagcaaaagaaattgttgtaacaatagcttatggcaaaccgagaaaattattggctgagtcgcggacaatgtcgctttttttaagacgtttcgtggcactgccaaaaattatgcaagcagactatctaccacgaagtccccaggataaaacagcccaaattactgtataagattcccactgcaccgagagaaccttttctagaattacactctcttgtatttgagaagtcactctaaagccacccgaaaatatgacttgaaaaatcactttaacagccaaccaaaaatatgacttgaaaagtcactctaatagccaaccgaaaaatatgacttgaaaagtcactattataaccaatcgaaaatatgacttaaaaagtcactcttatagcccctctcgcggagaacattgtgaaattggctagtcatgttgagaggaggctaacaatggtaaagaaaggatatgagagagtgaaggaaaggtttttggagccacacatgtcacagagaatcgaattggtgctgaaggaagtgttacagaagggtagccaaaagattaaattaaccaggttaggtacttcactgtgttgaaattgtgtatttattccacagggaaaagtgaatggtttggtgagagtgaattgtatacatccaatgtcctttataccatttgctgtataaaaaaaagaaaagcggccgctctagagttacgcaattgggtgatatgtctgatgtcgctatgattatttttgaatttgcgttcaagctggtgcaatttggagagattcaggaaaaagttgtattgaaattttcacaagaggaatttcttacagcttggtcaactaaagtgcgtactgcaacacctctgttggctgatgggtgtccatatttgtatgctctggcgcgtgatagttcagtgtctacatttccatttgatggtgtcattggtgttaaggcgacaaccatgaacaatatgtgtg

SEQ ID NO: 3735 - DNA, 1194 bp, Glycine max
  Clone ID: GLYMA-23APR03-CLUSTER61644_1
tctgccctggtgtctttctcgcggaactttcttcattaattgatatcttcaagttccctcatacgacaaagataacaacggctggacagggtgttaagggagtcattgagagaaacaaacttagataacagcttcagtcacaaacttggcagaaaccaattacatgtatccttaaaatgaaaataggttactcttctttccccatcaaagagaggaggaacttcttgtagtctccagaagtttccttggccactgcatgctcaaggtgaacactgtttctcttgtaatacacctctttgatctccttcaggtccttctcagccctggtgacaatcacacgtgtgagggcatcctcagcagttccaagatgttccatggcattgcgaagaaccttttcgtagtacttcttatgatcattgatgcaactaatggctaaatttgctgccttatgaaattcatcagatccttcatcggacaatttcttagtgatggcaatgccatgatcatccctgtagcgattgaaagtagccacaagttgggtcttgctcctagtagtaaggatcctaataatttcgtcattacttttattcttgttttttaaagcctcatgaagagcatcagcttcagattgtgccaattttgcattaatttcactgcccccatacctaaatgagctaaccaaccctaccaatagctggcgaagatggccactggtattagcggccacatcttcctccaagcaacgcttgtatttgttgtggtaggcacgcctcacagcaaaaagctcttcaggtgaaaggacacaggaaatttccacaatcacttggtagtttttgtcagcactcttaatggctatattggccaacaaagcctcacgttctgcaggttccaatatccaacggtacattgccctctcaaagtcaccagagagctcagactcaaggcgtttgatgagatcctcttggaagagattctggtatgcttctctgattagggtcctttgggtggcatttctatggcctagtattgctatgatggcttttccatcagctccccaacctttgacagccttccggagagattcggcatcttccacaggagagtggttggaaggagcaatcagcgtagccatggttgaattgatgtgttttttttttttttttttttttggggggggggggcctacgtagctga

SEQ ID NO: 3736 - DNA, 752 bp, Glycine max
  unsure (1)..(752): unsure at all n locations
  Clone ID: GLYMA-23APR03-CLUSTER618140_1
gtcctccccaaaccccagacgaaaccctagcctgcctcccaggagcgccgagtccctccgtccccaacagatctacgcgcgcgaggttcggttcggtcttcggagctcgagacatggcggaggagaatgccccagttgaggttgctgctccggttgcggcccctaccccagttcttggagagcccatggacttgatgactgctctgcagcttgtgatgaagaagtcaagcgctcatgatggccttgtcaagggactccgtgaagctgcgaaagcgattgagaagcatgctgctcagatctgtgtgcttgctgaggactgcgaccagcctgattacgtgaagctggtgaaggcactgtgtgctgagcacaacgttcacttggtcactgtgcctagtgccaaaactcttggcgagtgggctgggctttgcaagattgactctgagggcaaggcaagaaaggtggtgggctgctcatgtgtcgttgtgaaggactacggcgaagattccgagggtcttcacatcgtgcaggaatacgtcaagtcgcactagggacgtaacacgtttcagtaatactctacatttggatctgggcttaatattatgcttgcgtcttgcgcttgctaggagattaggacaatttactacaagagcccatgaggatatgagcaatttggaattctaaatgttttggttatggtgctgtcatctggttntaattcaaatcgataagagatgagcatattcttgcttaag

SEQ ID NO: 3737 - DNA, 916 bp, Glycine max
  Clone ID: GLYMA-23APR03-CLUSTER6192_4
agagttgtgcgcagttgcgcatccaatcccttcactgttgttttcccccaattcccagtcccacatagcttagaacttacgatctacaattttacaaatacaaatacccttctccctcgctcaaaacacaaacaagctcgcttcttccttctctcatcaacaacatgcagatcttcgtcaagactttgaccggcaagaccatcaccctcgaggtcgagagcagcgacaccatcgacaacgtcaaggccaagatccaggacaaggaaggtatccctcctgaccagcagaggttgatttttgctggtaagcagctggaagatggtcgcactcttgctgattataacatacaaaaggaatcaacacttcacttggtcttgagtcgagggggaggtaccatgattaaagtgaagactttaactgggaaagaaattgaaattgacattgatccggtcgattgtatcggctggttcaatgaacgtgtagaagaaaaagagggaattccacctgtgcagcagagactcatatatgccggtaagcagcttgctgatgacaaaacagctaaagagtacaacattgagggtggttctgtacttcacttggtgcttgcattgaggggtggtacttattagtgtagatgcatatcagaacccaaagacatgaaaggaagctctatacctgtcccgtctctgaagacatcattgttcttatgtgcttggttgtaattgaggctgctattggtggtcagtaactcagtatctttaagttgtatgctatttgaaaccctaagttggcctttataaagaatatctgaaaaccaatgatttaaaaccatagtttacgtacatattttgctttcttctgcttttcagggagcaccaatgttaaccttcaaacgcttctgtcagtgtcagagaag

SEQ ID NO: 3738 - DNA, 1259 bp, Glycine max
  Clone ID: GLYMA-23APR03-CLUSTER62190_2
attacatcacgtcacgtaacaatactaatatacacgcccgcacctctctcacaagtctcaccaacttccactctcatcaatgactctcaccaatgctttcctcgctccttccttcgccgttcacggtggtagggtttccgatccgcgctccattcctctcttctctcttccctccgacgccttcttccgctccccaacctccctctccagggacaagaactttctaaaagcttctgcttatgatttgaatgcagttggttctgcttcactgcaatctggtgacaatcctgatagtgttcctatgccaatagttctaatagatcaagaatcagattctgaagcaacaattgtgcagcttagctttggggatcgccttggagctcttcttgacacgatgaaagcattaaaagatttgggattggatgtttcaaagggaactgtctccacagagggattagtcaagcaaacaaaatttttcattacacaatcagacactgggcgcaaagttgaagatcctgatatgttagagagaattcggcttaccattattaacaatctgttgaaatatcatcctgagtgcagtgaactactagcgatacctgaagtgtttggcacaagggctccacagaaaaagcttgatgatgatatcaaaaactcgtatacaagttaaggaagggactcccaagaggagcttgctatctctcgagacagcagatagcccgggattgctggttgaaatcatcaaagtcattgcagatgtaaacattgatgttgaatcggctgagattgatacagagggtttggttgctaaggatacatttcatgttagttacggcggggctgcattgaacagttcaatggctcaggttttggtgaattgtctgcgttactacctgcgaacgccagagacagatattgacagttactgaagaaaccacccttgtgaaataagccaatacaatggttctttcttataccaattccccagttagctcgatatcacctgcgaatcatatggtagctttactgctaccacattatggaatgagttatgagtacgtgttgcctatggaatgaatgaatacctgtaactaactatggaatgaatacatgttgcctatggcatggaatctaggataccagaaactcactgatcatccgtcaaatcttatatgaaagctaaaaaatcgaaaatgaattttgcctcatttcctaaaaaaaaaaaagaagttatagaattgatataaatataagagaga

SEQ ID NO: 3739 - DNA, 1338 bp, Glycine max
  Clone ID: GLYMA-23APR03-CLUSTER62404_1
tcgaggtcgacggtatcgatattttttttttttttttttggatggccaaacagttgtaacatctcaatcatgattcacgccctcaaattgaggttgcaaattgcagatagcagcccttgctgccctactgccactagggcattattaatttattacaactcacgaaaaaaacaaccctctcttttctccttaaggtccccaaaaccatatataactaccaaatattataccacaaaaacctttgcatgtgtcctacacgaaatcaaaacaccacattccccacccgtggctgattccatttccccatgtatacgtttatcctattctcacctaataattagactccgccactgcgcctataccttttactctcagtttaaccaaaaaaaaaaaaaaaagccaacatgccatcaaggctttatgcacaacgccgcatcaccaaacccaaaaacctaagagatagagaaatgtaacggcgttattaaccggatccctttccgggtcgggcaaccggcccagccggtgaccgaaaccccaccgtaacggcgtcgtaaacgcaccagtgaaaaccgccgtcagtccccgtcaaacactcctcgcataacattctcattcccatactcagccaataccgttctctttccatttgtaaatccctaacccatttttcgtactcggcccggcccagaacgtggcccgctacggtgtcgtttcggcgaaggagcacaacgttctcccgcggcgcgttgctgttgttacgggaattgcctttgctgcgcgacttgttcttccgactcctgggacgcttcgttctctccacgaagaagaacgaggaagcggcggcgttgtcgcgcgctacggcggcgaagttgacttttccggagattgggattctccggtcggtgccgaaggtggcgaggtagacggaaagcttgtgcggggagattccgatcttctgactgagaaaggagacgaactttttgaaattgaaagacgaatcaacggtgacctcgccgacggtggcctccgtgtggccgtcgaagtagacgacggagatggacgggcctccgccgtcatccatgttgctccgatgagtacgtgaggggattagagggtttttatgtgtacttatataataattaaatgaaaataaacggagaaaaagaagaatgtggaagccgggttttaatttgggggtggttttgggaacacgagaggcggtgatgggtatttatggaaaaggagcttcaaggaaactgtcctcttcatgtcatatttatggaaaaatttaaacttgtcttgaaggttttttaataaaagaaaaaaaaaaaaaaaaaa

SEQ ID NO: 3740 - DNA, 1476 bp, Glycine max
  Clone ID: GLYMA-23APR03-CLUSTER6240_1
tcagctacgtaggcccccccccttacacactcacttgtcctgtgtcctctagtatctctcatagtctgcacaacactttcctttacttcattccatcatcaaccaatcattgatcacacacaacacaacccccaatccacttaaccttaaccttaaccttaaaaaaatggcggcggggtgcatcagcttcactgccacgcgcgaccgctgctttcgcttctccttctccaacgcgggcctcaaatccgtgacgacggacctcggcgatggcaccatcatgcactgctgggcccccaaggcccacaaggactccaagctcaacctcctcctcatccacggcttcggggccaacgcaatgtggcagtggaacgacttcctctcgcccctcacgcgccgcttcaacgtctacgtcccggacctcctcttcttcggagactcccacacgacccgccccgaccgctctgaagccttccaggcccagtgcgtcgcggccctcctccaggcccacggactccagagaaccagcgttgtgggtataagctacggcggcttcgtggcgtacagtctcgcggcgcagttcccggagcgcgtggagaaggtggtgctatgctgcgccggggtgtgcttggaagataaagacttggacgaagggatgttccaggtgaagactgtggatgaggctgcggatattttgctgccgcagacgccggaaaagttgaggcagctcgtgcagctcgcgtttgccaagcctgtcaaaaccatgcccacttgctttctcaatgattacattaacgtgatgtgtactgataaccgccaagagaggaaagaactaatcgaaacattacataaggatagaaaattatctaatcttcctaagataacccagcctacgttaataatctggggagaaaaggacctggtcttccctatggaattagctcataggctacaaagacatttgggagagaacgctcaactagtggtcattaagaatgcagggcatgctctcaatgtagagaagcccaaggagatgtacaagaatttaaaatccttcctcattgatcccgctactccaactccaactgcgcaaaaaaaccacagtaacggtagctaagtggattagcagagaaatggaagagatttatttttcggcattgtttgtgaatatgcttgtgtatctgtttgtttatacgctgctatcagccacgcggtagttttcggcacggataggacgagaagggatagtcgtgaaactggttctttatagagtaaaagaagagcgtatctgctgccaatttaaagtatgcggatgagcatctgaaaataaattttacagatcatccactgtaaactcatatatcaggaaacttggctacggatagaatctgattcagaggaatttgttgctaaggatacaggaattgcatatgaaatatcatgagctggtgtgggtatttcaaaaaaaaaaaaaaaaaa

SEQ ID NO: 3741 - DNA, 1183 bp, Glycine max
  unsure (1)..(1183): unsure at all n locations
  Clone ID: GLYMA-23APR03-CLUSTER62945_2
gatcaagtgtgaccggtgcagcaagttgggaaccgtaaatcgagtcctcttccagtttgacacgtccactctgagagaattgagcatgctttccggggaaaaggatgctgctttgaaatatgtcttgaaagggaaactggggtttattctgtaatgaagaccccagatacttagtaccttgatatgactgaagaatcttgtgctgtttaccagtcacgtaatcaaattggggtttccttcggcgttcattgtgtcctgctagacgcctgcgacaactgcgcttaccatcatcgaactcagctagcaaatgaaacctgctgcactgctgacaaaacctctgttcaattccatttacaataactttagctgttttggagtgagcatcacaaactttatgccttttgtggtaatcttttgaggagctaagatccatgttacaaccataaacttgacatacaggagcctgtgcaggcaagctggaagtgcgagctctcttccaagtgtggtcggatgtatagatgttaaagtgaacccttcttttggggctttatcgcaacatgcacctttacagtgtgctaaatctccctagctcgagatcaatcagtgaacaatcatgagtcttggattcacctagagaactcaaatgctttgaatcgnattcctcttcccccatagaagaatccaaggcaatgacatgtggggaggaattccctcttttactagaattattactatctagttcatagctagatgtctctagaggctggcttccatgaaaagacttttgcaacaagtcagggaatcccaaatccacaaattccatgcttctaactacctctctgtgtgaattaaatccatctttctcaacaaagttggatttgttgtcccattcaaccaatgcttttctacttctcatgaaagcatcaagtgaaaaatccatttcatcagaaaacaaatagcctttctcttcggggacataactccaagattccattagtacaatcccaattgaagtcacagatgtgtgaaataatgaagcagccgctagaagaagaatgcaaaacaagggtgctgacacagattgaagaaaaaaattgaaatgatttggtggccttctactgttccttgattctatattctaaacagtttctcgggaaccaaacaccagaaaaaatggtatctg

SEQ ID NO: 3742 - DNA, 1403 bp, Glycine max
  Clone ID: GLYMA-23APR03-CLUSTER63256_1
tttttttttttttttcttatgcaacaataatagtaatacattaaaatttcaaatgaacagttgaagaagttacccttagccgaaccaagattaccaaatcttagaccttggtctttttatataaccaagaagaagatataaatataatataggaagttgataaataaaattcaaaaaccacagtaagaaacctctttctccctgacaaaagataaacaagaaaaggagacatttatatattatattgtgattgtaataatggggggggggaatatgtgaattatatgatatatgatgccgggaatgaagtgaagttccggtgttatctaccgctgcggtgcatccgaagcagaggatcgaagccgtttatttggcggcccagcgaaattcctatcggaaggtgtgtcgcagctcccacaggtggcggcgtcgagcacgccgacggggctggacggcggcgccggctcggttattctggctttaacggatgcgggacacgtgtccaccacgtactcctccattagttggtgacagcatctcaccatttcatcgtttactctgtcatgaaaactcagcggcaattggccgttggcggagcagagcacggcggcggctgcgacggtggatggcgcaaatcccaagaagttaatcacacgagtggtgctgagaatgaggttggaggaagtggagaaaaagtgattcaaggattgggaagaagaggaagaaggaagcttggagatgaaataatgaagataatcgaagggggtgacagagcggagtctccatttgagattagacataacccagagttccattctctgaatcgttttgggctcgaagacgaacttgggctcaaacaattgcaggtccagtaagaaaggcacatgggactcctccattttcgctgctagagacaaacatgccactgataacagctgaaacgcccacccaccactttgttgcggaagagagcatcgagagaggaaacggtcgaaatagttgacggagagaaacgccgttactggggaaaactcgtagtatgcgtggacctttaagatccagttgacggcgtccaagcgggcggtgacgtcgacggagcggtcgcggcagcggcggaggtagtccttttccggcatgtggtgtggctcggcgtcgaggagtccggcgatggcggcctcatcggcgcagaggaagggagggtccggcgagagaggcattgttgatgaggagggcattgttggtgttgggtcatgttgatgaggagggatttgtgtttgacatattaaagtggtgtctttgctttctgtctcccaagttttcttttttgtctgtttgtttcggttcgcgcgggcccccgtcgctctctctctctctctctcttttgggtttgtgcgtgtgaagtt

SEQ ID NO: 3743 - DNA, 2207 bp, Glycine max
  unsure (1)..(2207): unsure at all n locations
  Clone ID: GLYMA-23APR03-CLUSTER63260_1
cgcagcgcgacggagcgacggacgtcgagaggcgcaaatgagcgggacgcatctgcggccccctcggcccgcccccgagcaagtcctcagcggcaccgggccgcgcgcgcggcggtggcgctgttgtccatcgacacgggagcgacgccgcgccgccgggcaaccgaaaggcttagaccggggctgtgcccagctagggtgccgccgtggctactcgcgcaggggccgggccccccacgggacaaacccacccaccgcggcaaancgaaccccccggcagggcgccgggagcgaaacaaggggaggaaaacaantaggagggggccgcccgcggngnnnccccccgccttccttaggaaaancttaggtgggatcccccccggggcctgcagggaatttcttttttttttttttttttttaaaaaaacaagcagaaatcataagttgttaatgtcaacaagctttcgtacataatataagacaatacatagcaacaatatgtcggtattggacaagtttaaaagcaacatctaaacagaataacttctaatttcaaaaatagctatttctaacttttcaggtgttaagtgaatcgaataaactcattcaaaaacctgaagttatctccactttcataaatacatatgtcatcaagtagcaggtaatccctacaaaagccaaatatttggtagtaggcttcaaaaaaagtgttgaatcccggcccatgttaagcttcatacaagagaactgaaagtctttgttgataattatttggtagcagtgatggttttcaattcttttctctgactttgacaagctgctctcatttgaccagattcttgagacgttgaacaatttgaactatctgtctctctgaagatgtgaaccaggaaggttagtttagttccatgaacgagttcaaagatgcaaacatcaccaactttcaagttattgtccttgacaaatgcgttccatgagagtttaaatcttatagcagtcttttgtttatggatctgatactttgcaggccaaattctcccacttaacacctgaaggctgataagtctccgcttcttgtgcaaatcaaggtgactcctacagaacttcattggtaagttcagactaccgtgagaactgatgtgggttcgatgcatgacggtcaagaagaatggattacaagatttgaaagaacttgctctatcaagagctgtaacttggttatccatagccttcgattttcctttgcattttgtggcagtgtgatgcagagcctgccttggcagtatcatcgtgttctcaactttaacacacttgcgacttctcatttgacattgttgaagaaattcaactgagttaacttttctcttttgacctgatctgtgacactccaaatgttcatcacctggagattcatttccttttctattggaggctgttttaccttttattatttcggtagggtactcaatctctaaggcactcaaatcaaagatgtgtacctgaaaatgagaagttacatcccatctgaaaaccaaaagatggccatgagctagagagtgatactctgcaaactctttccatcccttttgaaaccatattttaccgtcacgttttttcaaaatcattttccattcagcaccatttggagtcttcagaaatagagtattttgtaagcgttttccatatttcttcacaaacttatttgggatcattagctttccttcatgaacattgtgagcggttatgatcttgaaaaagtggattggcttcaccagaagttgttgaggaaatgtagcagccatgtatcagctgaataaacccagaaatagcaacttttgcaaaagtaatggtttttgttttttttttggggggggggggggggggctacgtagctgactcgagggggggggcggcccctttgttgcgggccggcgccccgcgcgcgggtggggggtcttccgcctccgcgggggggaggggggaagaccctggggtcccccagtttggccgtgtgggggggggggggcttttggggggtgggggcattaccgaggaggggggcaggggtggggcgttcggagcgtgttgcnnnnnnnnnnnnnnnnnnnnnnnnnnnnnnnnnnnnnnnnnnnnnnnnnnnnnnnnnnnnnnnnnnnnnnnnnnnnnnnnnnnnnnnnnnnnnnnnnnnnnnnnnnnnnnnnnnnnnn

SEQ ID NO: 3744 - DNA, 1088 bp, Glycine max
  Clone ID: GLYMA-23APR03-CLUSTER63265_1
ttttttttttttttttccaactgtatattttgatttattaaaaaaattcaaactcgatactggtggttggttttcggaaccgaccaaaaacaggtaacgcacaataaatttcatatcttttacccataagtgcctttcatatttagctcacaattttattaatgcaaaagataaaacatgatcatagtaaatagcaaactataattaactaatttctgcctagagtttaagctcgcttcagcattatcaccatcacaaccaacactgccaaccccatgaaagttcctcccatagtgataggatcgatgaagtttgcttttgtgtttcctctagcatcaataaccgcagaagatgtctgaccagataagaacccgaacatattctgaaggtaatttggcactctgctcaacatttcagatacagtgaactttacattttggagaacattcagcgaatcaataaatgcatacactgaatcagaataaggtaagtttcccagtctttgatcatgagtttcctctacttcaaaatcagctgtctgttgtgactggaagaaatcttgtagcgcaggattttgcacgattgcgttccatatattcgggtcacaagcaatcgaagctaccacactctgggcctcaggacattcactaagcaattgaaaagcctgtaaagcacggtttgactctgaaggatttaagatagcctcggtgacacgagatttgttctctaactcagaatgagaaggtgacataacagagacatgaccactgagagaacaaccgtcgcattcggaagaatttgaagataggtatatcttatcaatagcatgtttcagttcagtggtggctgacgtggcctcctgaaagctagggacaccgcccaacaccaccctcggcgtaccctcgccgccgtccgccacttcccagtcgtccacgtcgtcccacgccgctgcctgcagcggcgacacttcagaagccgccgctgtctgcgacgaagctctccgaacagacggcacgcccctgatcccggcggtggcaaacttggccaccgtcctcatggctcctccgccacccatgaataaagtgagt

SEQ ID NO: 3745 - DNA, 648 bp, Glycine max
  Clone ID: GLYMA-23APR03-CLUSTER63286_1
ggattttttttttttttttcagtagcaataagcaattcattaacaggggaatgatattacaatggaattgaaaaatgaataatgaatcttcaataattcatttccagatacttgaactcctttcagcaacaccataaagactgacaaaatactactttgtcataatttaattaacaataaaacaccataaagacaacaacaactcttaaaattagaatcacaatcttttaatgtttaactgtttatgatgatctgcacatgacttcacacaaccttctgcaaccaagtcatcatcactgggaggatcaggatggctccggcccttgtcagaatcaatggtatgtgaaatagcagtctgggccataatcccagttatccttggagaagtctattgttgatgctatctttaatgaggagcttgcagctcttgcgttggcggagagccctattgttgatgttgagcagaatgatataagttaatatggaaccccaataaagatgggtttttttttctgcgttcggcatatcaacaatatataaatatggtgaaggatcatgacagacttgctgttcaacgagagtggaatgaacagtgtgtggaagctaaaggttccaccgcacgtgaggtttcataaaaaagaaatttct

SEQ ID NO: 3746 - DNA, 1189 bp, Glycine max
  Clone ID: GLYMA-23APR03-CLUSTER6328_2
atttatgctctgtttggcagagatgatggaaatagagaggatgcaaatacaagggagattttttaattaaagtatagtgtaggagatgtgggtcccacacaatttcccctctatttctctccccatccaccctatctccctcctaccaaacaaagcattagtgccgttatattatattgtgccagttgaatttatcagaaataatgaatgattctatttttccgtgcaccaaagtttcttgcctgagatcataatcggtataaatttttctcatattttgactgtatgctgatatattatgctatttctgaccccaaatagtggaagctttagaaactgaacagaaaatttggagataaaacttgtgtgtttgaataagggaagccttggctggatactcgacagggagtatatgatttagctatacatgtagaagtacatattatgcacactggcactgcacatattcgtttttggtttttagaatgatggatgagatacaatcttttgtccatatgatattctcaagatcttcttctctagtttattgttctgtgtctatcttttattaccaatatctaattttgcttctgaattttcgttttgcttacaggaacctccacgtcgcagaggtgctgaaacaagcagtgatctttctgaatgtgccaagaaaggaatagcagtgaaaccacgtagaggggacgcacttcttttcttcagtcttcacacaaatgctaccccagacactagcagtctccatgctggatgccctgttatcgaaggtgagaaatggtccgcaacaaagtggattcatgtagactcgtttgataagactgtgggagctggaggtgattgttctgatcatcatgtaagctgtgagagatgggcttcacttggagaatgcactaaaaatcctgagtatatgattggatcttcagacgttcctggctattgtaggaaaagctgcaagtcgtgttagaaattttactgaatgcttcccaagatactacatgttatctctgcctcgggtttcaaatttcaactagttcttgattattttttcttggactgtaaagtaattctgcattattataatggttatggttattttctatgtataaaacgatataacaaatacaaattaattttttattatccccatttcttataataattggaagttatttgt

SEQ ID NO: 3747 - DNA, 1294 bp, Glycine max
  Clone ID: GLYMA-23APR03-CLUSTER6342_2
ggtgtaggcttctaagaggatgaagctgcaccaaaaatcacgtactccctgcatctccgttctgcactgaatcactgatcagagatcgcttacgaactcgaaaaggttaatgaacgagcacgtcattgcgcttctactactcttccactttaccttccttcgcagataaaccgtgttgcatattcgcgctgcttcctctctagggtttcttcaacctcatggcttcccctactcatttcgacgatgacttcgatttcggtgacggatttggcggaaggcattcaggtaataagaggtcatctcctgattacgacgatgaggattatgacaacgatccttttgcaccgaagaagtctaaaacaaaggctgaagaagcttctggtgtaacaacaggaatgatcttgtcacttcgtgagagtctccagaactgtaaggaaacacttgcgacataccaaaatgaacttgaggctgcaaaatctgagattcagagttggcattctacacttaaaaatgagccgtccaaatctgctgggatcactccagagcccaagatgttgattaattatcttcagaccttgaaattctctgaagagtctttaagagagcagcttgaaaaggcaaagaaaaaggaagctgcgttcattgtaacatttgcaaaacgagaacaagagatagcagagttgaagtctgctgtgcgagatctgaaagtgcaactcaagccaccatcaatgcagtctaggaggttgttactagatccagctgttcatgaagagttcacacgtttaaagaacttagttgaggaaaaggataaaaaagtaaaggagttgcaagataacattgctgctgtaagttttactccccaaagcaagatggggaagatgctgatggctaaatgtagaaccctgcaagaggaaaatgaggagattggaaatcaagcttctgaggggaagatgcatgaattagggatgaaacttgcattgcagaagtcccaaaattcacaacttagaagtcaatttgaagggttgcagaagcacatggaaggactgacaaatgatgtggagagatccaatgaaatggtgttcacttctttctccttttctattttttttgttatttaaagatttctgtgcatgttctgttataaaaatgcctcatgggtcattagaaacagatggtgatttttttttttgtttgcggatcctgcaactcaggtgaaaacatttaaggaactcgactattgtgttgggaaaaaggctgactaaaaaaaaagactgctgatatgccttttaatggg

SEQ ID NO: 3748 - DNA, 1452 bp, Glycine max
  Clone ID: GLYMA-23APR03-CLUSTER63448_1
ttttttttttttttttggaagaaggtgagaaataattgagaaagtgcgtaagccacgagacaagggatctccgtatcccccattcatgcacactggtgcaggatcatgtccctcccatccacgtgcttctttatcactctcgaattcatattctaattctagagaaataaaacaagagcaaaataatgtcactctgttatattgcaagtaacaaatcctatgctaagatagaaacgcagatccagcaagttgcttcttcactctctgctcaatcccctgatctcagacaccactccctctgccattccaactgtccctcatcattatcatctccgacgtcagatacagcaggtccgaagcctgcaagtcgctccaccgctgctcgagcccacacggacctgggcctgggcctgggcccgggccctggcccggggagacaataatccggtgctccaacctccgttccacgcttgccctctccgtctcttgcgtcaacaacatcccgtcttttctgggacgcacaaaacaaccaaccccaacgctctcgttcttctttctcgatgtggcgctaatgctatccaatgaccttctaaacgacgtcgtccacctccgactctgctgctgctcctccgttgtttctccttcccccaccccaacggacgaatgcctccgtcgagactccactatctcctgcttctccaggtccaaattcaaacgcacgcgttcctcttccttgttccgttgttgttgatgactctggcggaaaggctttgcgtcctccaccaggagaatgtcctccggatccacgcggtagcggcagagaggacacgtggaatgcgcgtccagccacgtgtccacgcactccacgtggaacgcgtgcttgcatttcggcaacagccggagaacctccgcggcctcgaacttgttcaggcacaccgcgcaatcgagtccttccttttgcccccgcagcgctccgaatctgaagaccggcaacgattccaccacggaccggtcaatgccggagtttttccttccggagaagggcgccaccgtccacggagccgagtttccgcctccgccgtctgggatgccgccgttgcagtgtttgatgtagaggaggaggagcgatgtaagggagattatggttgtcaaaacgcacaccagcaccgctatgccgggtctgaacggcggcgggggagtagggggtggagtttctccgctctctgcttcatatgtaaggaataatagaaggagagtgaggaggagggtgaaggaagaaggtggcatgagcattatgagtgggttagttgaggagggtgagggtgaagctggagcattaatttttaatcatgtggagtggacaggggaagctattttcattttgggagagattctatggtagggattcaggggaaaaccatacaaaaagacaaagacaaatacgtataactt

SEQ ID NO: 3749 - DNA, 1284 bp, Glycine max
  unsure (1)..(1284): unsure at all n locations
  Clone ID: GLYMA-23APR03-CLUSTER63592_2
caaccaaattgtcattgttccttgaaactttagtacaatgtaacaataattaataataataagttccccagaagactataatttgtgtgacttgtatgatccagtgcatctcaaaatttataaagtctaaagcagaggaataaacttttctgtggctacaaggaagtgcattaagattgtctagactcagaaaatctggtcacaggatgcacacagaatttactttctactgttagcaaacatgttataacttataagaaaagctttctgtattcatcggcctcttgactcatatcttcaaggcttctgtctttcctctccttgtccaagtcaagtttttgtttcaattccttctccttctcatctattgcatcatatatctcgtcattcttctcaaaatcaccacttttccgagggataagatgaatgtgaacatgcggtaccatctgtcctgcttggggcccatcttggatagcaagagtaagtnatgaagccttatggtagctctcaagctgcttaccaactttttgtgcagtgagccataaatcagaagtctcatcagcagtgagatcaacgaaacgcttaacttcgcgcttcgaacagatgagcacatgtaaaaactgtaaagccaaacatttacattgccatacgcaatcaagcttacaactttacattgcacaggataaaagaatcttgtgcccaaaactaaagttatctttagtaattaactatgaaagtatgaaacaattataaacacccaagtagagctgtacttccaatactttcaaacaagcacatgcagacacaaatgaattttccctatgcctatatacggtatatcaaacaactaaccacatggataatctatcaatagtttaatgcatttgagtgaccatgatgaaaccataaatcaaaattgacactgataatacaaagaagctctataaatatactcactaagaagtccattgcagtgaaggacaggaaaccccaaaacatattgtgctggactacatggcctttgtagatgtatgtaatgtaatgcagtatcagtatgcaacaaaactcaacacaactatgtttctgcttgtaattgattttccaaccaaaacagtgagcgacaaactatgaacaaggttttaaattgcatggaaaattgcaggtaaatgcggctgcaacagcaatcgcgtgagcccaaaatccttgacgattatagctgaaatcgcggtcgtggaatgttgttttaaaaaaaaaggggggggggccctcgcggcgctgactcga

SEQ ID NO: 3750 - DNA, 1357 bp, Glycine max
  Clone ID: GLYMA-23APR03-CLUSTER635_3
tttttcatctgcataggatttttataattctctcaactaagaaatacaaacgtttctcttccttctgttttcctcctaaattttccatctgaacataccgatatggatattggatgacattgtattagtgtattactctgtctccattatttgtggtcatgatctttcttgtatcacttatcctatgttaattaaattatgttatcgttgtgtcactaatatcaatgtaagttctgtgatgagctgcttatgtctttaaaaaaacatcatctgattatctagtattgataagtaggaatatgctgtgaatatgataagtctttcatgatctcgttacttcactgtgttgtagacaaccacttaagcatagattaacttatttcctttgatgcaccccttgggaaaaaagtaaatcattgcatgtggacatttggttttgttgtctctgatgcaatgtttctcgatcttagtgcaaccatggtcatcatattcactatagagtgttgacatgaacacctcttcattataaacaccctgttaacacttatttttcctattacatcataatacctgtcatacatatacttctctttctttatccctctaggtgtccaatagcatatggatgtctattaatcattttcctgcgctatagtattagagcatggggagactcttattttggtcaatatgttgatgtcttctatgcatactgtactctgattcaattttttccttcagcgacctatcgtaataaatgacctactgatgttgctgtcgaagttgtttgtgcattcttgtttgttgttaaaaagacctgccattgccctttgatccaatttgaagtttttgtttgttttgtttccttaggcaatatgatagagattcatttggtgaggatccagaaagtgaatcatcaaacgaagatccaagcggggcatctctagttactgagttgacttctcaaatggcaaggtcccagttcttgcaagaactaagcacaaagccacctggccttactcaagaggccttggactgtttgcatcaggaagtttttagcagcaatgccagtgagatagggttggattccagggtactgcaggactgcagtatatgtttggagtctttcacagacggagatgagctgatacgtttgccatgtggacataagtttcactctgtttgcttggatccttggattcgctgctgtggagactgtccatactgtcgaagatgtatagttgtaaatactcactcatcattaaacgaggacgagtaattgatttcttgattgactttgttttgttctgtggttgtatgacaggataagaatgctgtaatggagctggttttttgt

SEQ ID NO: 3751 - DNA, 1421 bp, Glycine max
  Clone ID: GLYMA-23APR03-CLUSTER63604_1
ttttttttgttttgaacatttgcaacttatgttccaagttttaaaagcataactattaactttaaaccagtaatccaatgcacattatgttttacagctgcaaagtaatccacaatggatgtgcaagcatcttgcttgtgtttgcaccagttcacttgagaaaacaaaaggaaaatcaagtgaaaaactgacttgcattaagttacatatgaggttgtcatatccatgaccaaaagagtttcttatttgcactggaattttctgatccaaaaagcataacactattaacagtttttcttttttaaataaagaatagtaaatgatctggtcagttgaggctttagcccgaatgataacacaactccccgccaaagatcgatcaagttttgattccccctgcctaggtctttcatttatgtcctcctgttataccagagaaaatcaaatcaaatcaatctgaaataaccatcagctttatgtatcagacatgaaataaacttcaactgcagtatttcactggtattacattgtgctatgagctataaaacatacaagagagtgaaaaattaggggaattgtgaacccaaaatggaaaaatgggtgcacagtagttgaggtttcccatatggtagagagggtggtagcagtcttgtccccaaaagtggagaggctgtttgtaggatttaaacacaatctccattcataagccagcaaccttactgttgcacaccaaaggctcattgcaattagctagtaaactgcaaatttgtctctattgtaagcaaagaccatcaacatagcaagcatccgtttcatttcctcctctattttcttagttaacatgacacaacatggtccctccccccaaaaataaaagctcaccagtctcccaaggcccaccttcccatgctctatagaaagaaaagttcaaatatgaaattgtaactccagattaatgatagaaaatcagaatttgctggcttagagtttgaggaggaccaattactggatccaagtcctagactcctagtaaactagccatcctggaaggcttactccagaaagacccataaggtctgaggaactgctatgtagaacggattttgtagaaagaaaatgctacaacagtaattgtagaaagaaatttctttgcaaagcagttattgtgagaggggtgagttgtgttcctatctagttattttctgtaaatagtcgtaatttcgtaagatgcaagttagttcttagagtagtgaagaactctctgtaggagccttggctccagatttgtatctaaaacagtgtgctgttggattcaataaaattcctcttttaaattcaaattggtgttctattaattaagtttcatgccttctccatccagtaagataaggctttgggggggggcctcgtagctgactcga

SEQ ID NO: 3752 - DNA, 977 bp, Glycine max
  unsure (1)..(977): unsure at all n locations
  Clone ID: GLYMA-23APR03-CLUSTER63604_2
ccacaatggatgtgcaagcatcttgcttgtgtttgcaccagttcacttganaaaacaaaaggaaaatcaagtgaaaaactgacttgcattaagttacatatgaggttgtcatatccatgaccaaaagagtttcttatttgcactggaattttctgatccaaaaagcataacactattaacagtttttcttttttaaataaagaatagtaaatgatctggtcagttgaggctttagcccgaatgataacacaactccccgccaaagatcgatcaagttttgattccccctgcctaggtctttcatttatgtcctccattagttgtatcttgtaagaaactccattggtttactggtactaatgcccattcagtgcctcatccacagtagaaaactggtctctaatacagtgcatggctttcagcatcatatctatagaatctgtagccaacttgaacttcacatcttgctctcccgagtgaaattgaccatcattttgaagcttcaaattgataacagctgcagggtctgctgattctttatcgagatttgccatattccatgtcatcgcctttaatcgaggcacaatattctgatctttcatcacatcttcctgccactctcgctgaaacttgtgcaacaaaagtgtcaacagtttttgcaattcaggcagaacctcactggggaacagcttcggaatatcctccttgctagtgttctcataaacacacctcctgattaacattcggaggcaaaccagaagtgggtcgagatcagattcattttggagctggagcatttcttggatgatgcatcggtcggtagtgccaagaccagtttttcgagttctccaaagggcctgaagaatgtattcaatagattcttttgaatttgcccttaccagcaccggcaaatgaccccatatcgtttgctccatcaaacaccaccaccaccaccgtgtcggagtactcgaaaaatt

SEQ ID NO: 3753 - DNA, 2652 bp, Glycine max
  Clone ID: GLYMA-23APR03-CLUSTER6371_1
tcagctacgtaggccccacacccagcactccttatctcttcttcagaaaaaggctgaaccaacatatccctctgggtatcagataagacattaaactgcactccatctaagttgggtctgcttgaatggggttcatgaaatctgttctgaaaatgctgtagaacttcattcctaatcaaatcagggttttctacccaattaccatccatcatcagccccctcaaggtgtttcttctcctactgaaattaataattttatggaagtaggagctgttgctatctccctcctctgagtatgttgtgtttatatgtgtatgcttgtttgattattagcgggtacaaactacaaatgttggactacagaaaaagtgggtagtcagtttgagagagatactgattttattgactttacagatgaatgaagcagcaatggctgctcttgaagagagattgacctctattgagacaacttgtgatacattgaccatcaagaggaccatcaagaggcaccattttgaggtagcactgagtaaagtgtctccgtctgtgtcagacaggcaaaagcagtattatcagcatttgtcagagggctttaaagcagcatgagcagcatgacattcactttgttatattagcacaagttcgggttcggtttcgaacaggaaggacggaccgaggtttaaggatttgggtgggatgaaggaggttttggaggaactgaagatggaagtgatcgtgcctttgttccacccccaattgccaagacagttgggagtgagaccaatggctggcattttgttgcatggaccacctggctgtgggaagactaaacttgctcatgccatagctcatgagactggtcttcctttctatcagatttcagctactgaggtggtttctggagtttcaggtgcatctgaagaaaatattagagagctttttgctaaagcgtacaggtctgcgcctgctattgtctttattgacgagattgatgcaattgcatctaaaagagagaatttgcagcgtgatgatggagaaacgtattgtgacgcaattaatgacttgcatggatcaatcaaataggcttcttcaaccagcggatgatgtggagagttctggtgatgatcatcatcctggctatgttcttgtaattggagctactaataggcctgatgctgttgaccctgccctaagaaggcccggccggtttgatcgtgagattatcattggcaatcccgatgaatctgccagggaggagatcctttctgtgctcacttgcgatcttagacttgagggtttatttgatctacggaaaatagccagggctacatcaggattcgttggtgctgatttggcggctctggttgacaaggctggtaatcttgctatgaagagaataattgatgaaaggaaacgtgaattatctcaagatctcacgagtgagcatgctgaagactggtggagggaaccttggtcggttgaagaaataaacaagcttgccatcaaaatgtccgatttcgaggaagcagctaataaggtgcaaccttcattaagaagagaagggttctcttccattcctaatgtaaaatgggacgacgttggagggcttgatcttttaagaaaggagtttgaacgttacattgtaagacgtataaaatatcctgaagattatgaggagcttggggtggatctcgagacgggatttttgctttatggacctcctgggtgtggtaaaacactgattgccaaagctgttgccaatgaggcaggggctacttttattcatattaagggacctgaacttttaaataaatatgttggagaaagtgagcttgcagttcgtacaatgtttagccgtgcaaggacatgtgcgccttgcatacttttttttgatgagattgatgctttgacaaccaaacgtggtaaagaaggtggttgggttgttgaacgactattgaaccagttgcttgttgagttagatggcgctgaacaacgaaaaggtgtttttgtgattggtgctacaaataggcctgaggtgatggatcgtgctgtcctacggcccggaaggtttggtaaacttctttatgttccacttccaagcccagatgaacgagttttgatattgaaagctcttgcaaggaagaaggctgttgatgcctctgtggatttgagtgccatagcaaaaatggaagcttgtgaaaacctaagtggcgcagatcttgctgcattgatgaatgaagcagcaatggctgctcttgaagagagattgacctctattgagacaacttgtgatacattgaccatcaagaggaccatcaagaggcaccattttgaggtagcactgagtaaagtgtctccgtctgtgtcagacaggcaaaagcagtattatcagcatttgtcagagggctttaaagcagcatgagcagcatgacattcactttgttattttagcaggtgtcgacattcctttaaagaatggggtgaaagaaatcatttatatgagcgtcaagtatttagagtatttgcttttgtaatgagatgtacatgtttcctgcagtcaggacataatttttggcaaatggttataatttatggttcactttatccaataatattgttccaaattttttgttaacaagaaaaacaaaaaaa

SEQ ID NO: 3754 - DNA, 986 bp, Glycine max
  Clone ID: GLYMA-23APR03-CLUSTER641_17
acaaagtttcaagtatcattctatcaatcaaagaatacacactccccacaattaagccatagtgcacaaagcttttacaagaaattgaaaagtcaatatccaaattcatcaattaattgctaaacttcaattcgcaatcatgcaaaaccaacaaccctccggtatcatcaaccctaagtattgtgctccatataatgtcgacctagcaattgtgagaaaggtcttggcattaactgatagctttaccgtcaccgatgtcaatggccaaattgttttcagccttaaggcctctctcatgaccctccatgaccaccgtgtcttgcttgacgccgccggagaacccgtcgtcacactacgccggaagttaatgtctgctcatgatcggtggcaaattttccgtggtgaaagcacggagccgaaagatttgatctttagtgtgaagcgatcgtcctttttccagctgaagacgaaattagatgtgttcttagccaataatactaaagaagaagtatgtgactttaaggtgaaaggaagttggttcgaacgatcttgtgttgtttatgctggtgaatctctgaacattgttgcccagatgcataagaagcacactgttcaaagcattgtgtttggaaaagataatttcatggttacagtgtatccaaatattgactatgcattcatagtggcactgattctgattcttgacgaaattcacaaagacatgaaaaatcaatgattattgagctttctgtttatgacttcctctgagttctctggttgtcataaaaaagttcatcaaaagttgtacgtgacatagatagtcaacatgcaagttctaatttcttgccgtcctgtatacttcttcagtcctgtaataaatattgtaaagtgtaaggaaaaaaatctgaaaaaaatatcattttaatttttcaatattgtaaacttattttttttttatatctctaataatataaatgatgaatagt

SEQ ID NO: 3755 - DNA, 904 bp, Glycine max
  Clone ID: GLYMA-23APR03-CLUSTER641_28
ccgcaagccatagtgcacaaaactttcacaaaagaaattgaaaggtcaatatccacacctatcaatttctcactaaacttcaaattgcaattatgcaaaaccaacgaccctccggtatcatcaaccctaagtattgtgctccatataatgttgacctagcaattgtgagaaaagtcctaacattatctgatagctttaccgtcaccgatgtcaatggcaaaattgttttcaaccttaagggctctctgatgaccctccatgaccaccgtgtcttgcttgatgccgccggcgaacccattgtcacactacgccggaagattatgtcagctcatgatcagtggcaagttttccgtggtgaaagcacggagctgaaagatttgatctttagtgtaaagaaatcatcagttttccagctaaagacaaaattagatgtgttcttagctaacaatactaaagaagaagtttgtgactttaaggtcaaaggaagttggttcgagcgatcttgtgttgtttatgctggtgaatctctcaccattgctgcccagatgcataagaagcacmctgttcaaagcattgcgttgggtaaagataacttcatagttacagtgtatccaaatattgmctatgcattcatagtggcactgattytgattcttgacgaaattaaccaakacaagaaaaaagattgattattgagtttttttttttawgattttctctgggttgtctcgttttcatytaaatgttcatttaagacaaaaactgtgacatagtactagtgaacggttttaatttcttgccgtcctatatttgcttttaatgttgtgctttacttctttccacccataataaattttgtataagagagaaaaaaaaagagtytaaamcaaaaaaaaaaaaaaaa

SEQ ID NO: 3756 - DNA, 1412 bp, Glycine max
  Clone ID: GLYMA-23APR03-CLUSTER64954_3
gatgtccttcgtcttctcagcaaccccagatattccaaaacccagttacctgtctccgtgggaataggctagcttcagtgttcttaagccaaacccgtcaacgttcactgaaatccgtgagtgaataaatggttcctaattttctcattgcaaggttagctgtatcactcacacaccacagaagtacccatatccaattgggttctctgctgcaacacaaacgcaatgctttccttcttttattcaattcattcacttcaggaacctcttctgattctgaatcagatggaaaccaccaaaaaggtggcacctttactgtgtcttacctcatcaactcatgtggggtgtccccaacactggccaggaaactctccaataaggtcaatttgaaaaccccacatggcccaaatgctgttcttgatcttctcaacaactatgggtttgacaaaatccaggttgcaaaacttgttgagaaacaccctttggtgcttcttgcggatgcagagaatacccttttgcctaaactcaagttcttacgttctattggggtttccaacactgacatgcctaagattttaattgctaaccatagcttgaagaggagcttgaaaaaattcttcatcccaagatatgagatcctcagacgtgtacttggtgatgatcaggaagtcgttagagctataacaagttcccgatttggtattaattatggtgacgcaatgaacttggttccaaacattgaggttttgaggcagtctggtgtgccccaagcttctatctctttcatgatgatccattgtgggactgtagcctactggaagcattccagatttgtggaagctgtcaacactgctaaggaaatcgggtttaatcctttgagaacaaattttattgtggccattgaaatgcttctgattagcagcaaagcagtatgggaatcaaggtttaaggtttatgagaggtggggctggaaccgtgaaatggctcttcaagcatttcgaaagtttcccaatgtaatgaggttgtcagaggaggcatttagcaagaaaatgaatttcctagtgaatgatatgggttggccatcagaagaaatcgctgagtatcctcaagttgtagcatacaacttagagaagaggattatccctagattctcggtaatcaaaatcttgaaatcaaaaggtttgcttgagaataatgtatcctttagttccattatatgcataactgaagaaaaatttctggaaaattttgtgatcagtcttcagaaagatttgcctgtcttaccagacctctatagaggtaagatcaagccttcagatgtaatgtagtgtttgacggcttttgatggtacttatcctaacttccaacttgtctatttcaatgctaaattggactttgattcaatctgcttt

SEQ ID NO: 3757 - DNA, 1835 bp, Glycine max
  Clone ID: GLYMA-23APR03-CLUSTER6497_1
acatattcttttgttttaagggacatctattctcccactagaagaagtctagaactatagctgccactttcagaacgacgtcgaacctcgcttttcgccgatggccggaaactgcttgccgccggtgaagctcaccggcagcggccgcccggtgctcgaacccaacgaaatcgagtgcttcttcctctccggcgttgaccttctcagcgaagacgaccccagcttccctcacctcaaatctggcctcctcatcctcaccacgcaccgcctactctggctcccggactccgccgcatccgccggcggcaccgccgggcgccatccccctcgccgccgtctcccacattttctcccccaagatgtccctgcggaaggtgttcgcctcgccgcgggtccggttccaggtgtcactgtcgccggagggaagggtctccgcggcgggttcgcgatcggtggtggcgacggcggtggtgagagggaagggggattgcgacgcgtttttggcgaagtttacggagaattgccgcgccagggcgtggcaggaggcggagagtgggtccagttcggggtcgaattcggcagtgatggcggcaacagcgacatcatcatcgtcgggcgggatttattcgagcgacggaacggtgaggatggtgggagtgtctgggatactgaggaaggagcaggaaatgtgggagagtactgataggagcttgcaggaggcttttcaggatttgaatgctctcatgagcaaggctaaagagatggtgatgctagcagagaaaatgaggctaaaacttttgtctggctcaaattctcaaaccaatgcaactaatgatgaggagatgggttcgaaggaagaaatgcaagattggttattgagtgttggtattatatcccctgttacgaaagagtctgcgggtgctttgtatcatcaacaactttctcgtcagttggcagattttgttaaagttccacttgagaaagctgggggaattatcaatcttattgatatatattgtctcttcaaccgtgctcgtggcacagaattgatctcacctgatgatttgttgcaagcatgttctctgtgggagaagtttgatgtccaagtggttctgcgcaagtttgatagtggagtcatggtaatacagacgaagtcccacagtgatgaggaggttttcaataaagtcaagatgcttgttttgaaacctgacgcccttcgagctggaataagtgctagtgatgctgcaaggacactaggggttgctccagcaatggcaaaggagcatctcttgtctgcagagagcaaaggtttactatgcagagatatcagccctgatggatttcgcttttatattaacttgtttgtggaaattgaccgagattatatgtatttagtgaaagatcagggaatttatgcctcgtgggtacaggctaacgatactcatgcttgagagtcccaagcatgtttaattcaaggtatgcataaattttaaattgataaagcgatgataagcaggaagggaaaaatgtacacacacacgcatacagttttactgtgcttcaatcaatgtgagattttcattgtagaggacacttcacataatcattctgtagaaggattataaatacttgaaaagactcgaagcaaaacttatatgtatcatgtcatatcattccaaaagctattgttactcttagcctagctttccatacatgatgtatgatgatgttgaggattactctgatatccatcccccttttttattatgataccaatactcaacgtgagttcttaaaaaaaaaaaaaaaaaaaaaagggcggccgccgactagga

SEQ ID NO: 3758 - DNA, 1574 bp, Glycine max
  unsure (1)..(1574): unsure at all n locations
  Clone ID: GLYMA-23APR03-CLUSTER652_2
agagtttcagtttagtttccagacaagaaaggcacagagaaaagagagagaaacgaaaaacaaaaagaagaaaaagttgaagtctttggttcattcgaagtggatggttggcggtagaaatggagagggagcaggagagcaagcaccgccaccctcgacggcggcgcgtcacggaaccactctccggccacgcgtctccacggagagcgttttcagctgcaggtatggtggcctcggtcccatgactctgctttcgagcttcttcggcgacggcgatgagtgcaagtcgttctcggagctcctcggcggcgccatggtggaccccaccgcaccctcgcccatgcccaccaccccgttcacccttccacatgggttcatcgattcaccttctcctcaaggtcaatttggaatgacacaccagcagatgctagcacagatcacatctcaggctgtgccagcccacttcaatgtgcaaattcactctgaacatccattctctatatcagcantgtctgctacctctttgacacagtttcctacaggatccagtactagggtgaaagaatcccttcattattctcactctgaacaaaaattgcagtcttcttctgtgaatgctgataagcctaatgatgatggctacaattggaggaagtatgggcaaaaacatgtgaaaggtagagacttctcaagaagttattacaaatgcacacatccaaattgtcctgtcaagaaaaaacttgagcgttctcttgaaggtcatgtgactgcaattatctataaaggagagcacaatcatcaacgtcctcatcccaataagatcacgaaagaaacacagacttcgaatataaattcagtgtctaagatggatctagaatctagtcaggcaacaggtgaacatgggtcaggaacaagtgatagtgaggaagtaggtgatcatgaaagtgaagaagatgagaaaaatgatgaacctgatgccaagagaagaaacacagaagtcaggctccaggatccagcctctttacatagaactgtagcagagactagaatcattgtgcaaacaacaagtgaagtggatctcttagatgatggatatcgatggcgcaaatatgggcagaaagttgtcaaaggcaacccatatccaaggagctattacaaatgtgcaacccaaggttgcaatgttcggaagcatgttgagagggcttcaatggatcctaaagctgtcctaacaacatacgaaggaaaacacaatcatgatgtgccggtagctaagactaatagccacacacttgccaacaatagtgcatcacagctaaaagcacaaaatattgccatacccgacgacaagcatagtttcagcagtaggggtgttcgggggaatgaacagcgacctttgggaagtctaagattgaaggaagagcagataacatagttttcttagttcatagtctaatctatctttttctcataattcgacatatatacaataggcaagattgtaaaattggtcccccactttatctccaattacggatttggtccccctataatttaattcacaaatttggtctctc

SEQ ID NO: 3759 - DNA, 1663 bp, Glycine max
  Clone ID: GLYMA-23APR03-CLUSTER6575_1
gaagaaactaaacaagcgtgtaattagcgtgacactatcactgcgtctctatcctctctcactcactcactcactcattcactgagtcaaattcaaacgaaaacgaaactcgctcgcactcatagttagttacgcatcgcaagcacactgccaaaaatggcggggcgcaagcacgcgccctcctccttcacgcgcctcgacgacgcgcgtcttgcgcattcctcctcctcctccgccgccgtggtccgcgccctcgaggagcgcgtcgaggcgcgccaccgcgagatccaggccctgctcagcgacaaccagcgcctcgccggcatccacgtggcgctcaagcaggacctcgccgccactcaggaggagctccgccgcctctccgccactgccgccgaggtcaaggccgagcgcgacgccgaggtgcgcgagatctacgagaagtcactcaaggtcgacgccgaggtccgcgccgtcgccgccatgagctccgagctggatcgcgtgcgggcggacgtgcaggagctcgtggcggagcggaaggagctcgcggcgcaactgcatgccgtggagagcgagcttgcaaaggcgcgtgcggaggcgcagtttgtgccggcgattaaagccgatatagaggccatgcgccatgagattcaacgaggaaggaatgctattgagtttgagaagaagacacatgctagtaaccttgagcacagacggactatggacaacaatatgattattatggaccgcgaggttgaaaagttacgtgctgagttggctaatgcagaaaaaagggctagggctgcgatggctgcagatgcaaaaacaaatcctggatatcctgctaactatgacaatcctgagatgggatatggaggaattacatgtcctcctgattcttatagcatgcatcagctgcaagctgtggttgacactcattctccacatgaagctggagcatcattacattatccgaatgacctgcaacatacacaagtgcctagatagtctttgggatgctttagtttttaaagagaatgtagcattgccatctccttcccctcccccaaaatgattttaaattcttaagcttgtatatatgctttactatttattttcgattgtaacatattcaggtagtttgcgcaggttcaattttcctgtatctcctttaattctttcatgagacttgttcaaatttagaaagctagtttttgtttcgtaaaaagcataaaaagtttcttagattctattctggcaagttgtggttaagttccgatgagttgtgatcgagttcctggtcttcgtagaatctttgatctcctactccagtgttggggaggtacttacaaaaaggactctgacgatcaagtcagttgagcccaaggtgtttgtgtatttgtgtatgggatgataaaaaaacgtatcttgttgtgttttctttgggtctatatgtacacgttcaaccttgagaagattacattgactaattgattctttaggcattgtgcatgatcgtggggagctagtggtcaccattagttgttaactccttgacaagtgtatcaatttattatagtaatactaaacagtaagatcgagtatcgagttcacatgaattttgattgtgctcaaagtttatatataccgaattctaatc

SEQ ID NO: 3760 - DNA, 1003 bp, Glycine max
  Clone ID: GLYMA-23APR03-CLUSTER66166_2
taagatcagaatgcgtgcgcgtcactccgattccgattccaagcgatgccattctagattcgattcagaccccaacaagagatatagaagggatgaatatggaaaagaagacagagagagagtgtcaagtagcactgatgttcaaaatgaagctcttttcgctaagcacaacaaaccaaatgatcctatccaacttccaacatctctctcttattttcagcacaatgaacaaggtggcactgggcaggttggccgaagctctggtcaaaggaaggagcgtggacggtggaaggacacaaagaaacggtttaatattaatgaaagggaagagaaaaatcatggtagagagcagagaaatgagaaatcacaagctaaactggatgataatactttccagagaagagatggttttaccggaaggtcgagaaaaagagcttcatttagagagaagaagattgtagcggattcaggtgatgctaatgtggctgcagtaaagtcaggccagaaggaggaaagaaacagcaatccacagcatttggatagacctgagaagcattttgcagatgacaagggtgaagctaggaggggaagaaggtatggaggcaatgacagttacaagggaagagataaatttaatggaagacgaggttatcgtcctgagaagtggaagcatgatttgtatcaagaggtaaataaggatcccattccacagaatgaggatgaccagattgcaaagctggaagcactcttggcttcataatagctaacagcagccaatatcatgcatgtgtaatttattataagcatgcactgctctaagttgctgagttcgtctcttacaatatatcaagttatcaccattttcaacatgccagggatgttgagcagaacaactgtcagttttagaagatgcaaactggattcaattgaggcaggcaggttttaaaattggaatggaggacagagcaatttgcaattgcaataaagcatttttgcttgtttt

SEQ ID NO: 3761 - DNA, 747 bp, Glycine max
  Clone ID: GLYMA-23APR03-CLUSTER6616_17
aacaaaatcgattgggagaaaggcaaaggggatcgctgaaatcaattagtctggttgtagtgggaaaagaaaagaaaatgaaaatgggtggtgggtgcaagtgtttggtatcgttggtgttggctttggtgttgatgaggagtttggcggaggcgcaatcgggcagcagcaccacctgcgcccaggagctaattccatgtgtgaactttctgaatgggacaaccaccccaccaagctcttgctgtgaccctctcaaacaaaccgtggaaaaccaactggattgcctctgcaacatcttcttcagccccggcttgcttcaaagcttcaacgtctctgttgatcaggctctcgctctcagtcgccgctgcggcgtcaccaatggtatcaccagctgcacaaacgggtcagctccagctccgggttcagggccaccaccaggtaagacgcctctcaacatccccaaatttaatcaagcttcatttatgcagtgatagatcatagtaacagagatttcatttgatagactttcatcacctgtccaaaatctcatgaataacatttccaataatctgactaaagaatgttttattattttttcagataagtttatttaatttcttttaataatttttcgaagaattttagtctattacaaaaaaaataaaaaattcaaggttaaatttcagaacaaaattttcatatcatatgcttccattaaattaaaagtatctctattttattgaaaat

SEQ ID NO: 3762 - DNA, 594 bp, Glycine max
  Clone ID: GLYMA-23APR03-CLUSTER66329_1
ttttttatttatataaagcctaataagccgtcagataatttcattatggaaaagcaaaattctcaaaaaaagaaagcactcatcttcagtagtcacattctgtgctcacacaaaaccacaagaatatgaaaattgagaaggaagaaaagtgtagagcaaaattttgttgaacttggcatgttgataattggttagtcttcactcgggtgttgaggttgatgaagggtttggttcacttggttgagccccacacgtgcagaaaattgaagaagtgattggttttgcaaggtatgtggggttgtgatcaccagccattatgacaagaacctcaggttctgagtttgtctctaaattgttggccattgcttgtgatttcacgtcttcattaacttcagatgatgactgagaatcacgttttctgtatgagcaaacaaggatcaccaatgccatagatatgatagccagcatcacagctaagcctccaaacaagtaaggaattggagacttccatatattaaccccactggcacgcattggtgatgatggtgatacactgtttattggcctcatttctctctctctctagatggaagt

SEQ ID NO: 3763 - DNA, 1391 bp, Glycine max
  Clone ID: GLYMA-23APR03-CLUSTER6692_1
gggaaactccgtcaccactttccctctcccgcgttttatatcatccgccacgtacgcccccccccggtccgcacttaaaaaaaacgatctccaacggtcatgaacggcggcgctgaggcctccgtcaatcacaggcgcagacaccaagcagcttccgctaacggcgttaagatagcaaacggggccatggcgaagccgtcctcgacgctctgctacgacgcctcgttcatgaaatggaccgtggcggatgctgtccacgtggcgacgcatcattggatgccgtgcttattcgcattagggcttctcttcttcatggccgtggaatacacgctcctcatggttccgccgtcgtcgccgcctttcgatctgggcttcattgccacgcgttccctccacgcactcctcgagtcatcgccgaatctcaacacgctcttcgccgggctcaatacggtgtttgtggggatgcaaacgagttatatcttatggacgtggctgattgaaggacgccccagagccacgatttcagcattgttcatgttcacatgccgtggaattttagggtactccacccagctcccattgcctcagggatttttgggctcgggtgtggatttcccagttgggaacgtgtcgtttttcttgtttttttcggggcatgttgcgggttcagtgattgcttccttggacatgaggaggatgcagaggtgggaactggcttggacttttgatgtgctcaatgttttgcaagctgtgaggttgctgggtacaagaggacattacactattgatttggccgtaggggttggtgctggaattctctttgattctttagctggcaagtacgaagatagcaaaaggaatgctgctctatccacaacccacagagcacaatttgattgcgtcaacaatgtggatatagctaaaaaaattaacaaatgatcatggaaaagtacacatggagtgtaaaagtacaagggtgagtgagagggcaagagtctgaattgtaaaaaagataagaaaaggtcagagagtgatatatatcattattaggagtagtcttaaatcttaattaccgcgtaattttaaatctgatttattttagtttttataacctgttattatagtggagtctaggttggaattcggttgccatgatcccatgattgattgctctgggtgttgttcccactttgtggacggcagtgcgtgttaaaggatgttgattgtaacatcaaattttaagattttattttagttgattcatagtcattggagaactatgactgcattaactatgatcccatgattgattgctctaggtgggtgttgttcccactttgtggtcattagtgtgttaaaggaggttgattttaatatcggaggatggttct

SEQ ID NO: 3764 - DNA, 1407 bp, Glycine max
  Clone ID: GLYMA-23APR03-CLUSTER66938_1
tcagctacgtaggcccccccccccgaagaccctcttttgaaccatattttctccacccacttactttctctgtttgctcttccttcgctgtgactcaaccacgagcacggttaaggttttgcaaacatgagcggaaaagcctccgtctccaaggagctccatgccaagcacaccaagatattagagggacttgttaagctacctgacaacagggaatgtgcagactgcaggaccaaggcaccacgatgggcaagtgtgaacttagggatattcatttgcatgcaatgttcaggaattcaccggagtcttggagtgcatatatcaaaggtgcggtccacaactttggatacatggttgccagatcaagtttcttttatgcaattaattggtaatgcagagtcaaataagcactgggaggcagaattaccgccaaattttgacagaaatggatatggagttgagaaattcattcgttccaagtatgtggagaaaagatgggcttcaaaaggtggactacagccagcttcaaagtcagctgaaataatctttaactcgaatgaatcaccagctgctagggccaagagtgccactcagaggaataggagattgtctcttgaggaaagcattcttgtgaaacatgtggcacaaattcggcctccagtcacgagatatcatgagggctcctcagattttcaaaagaattcaccaccaccaccattaaggaagccatctgcatcatttgattttgactacactaggggaaagaacaatggtattgttgatcattttgacttgttttccatccatgatgataaacaggatttctcaactacacctcctagctggacaacatttgattgtaagatgacaatacttgagaaggcttatgaggtgtatgtttgaagattgttgagctagcccttcgcgtagatgtcccaacattgtagttgcagatgatcttgcaatgttgaatgaactttgagcggcactggtatggtttagggacaaagatttcaaccaacacacgttgctgcaggatataaatttggagcacatctgcaccgctttggcgttgatgtatcacacagcctgagattgttcatagaatggtttgatttgcactgtagctcctattacacccattgattgagattaacaaaagggattaagggaattaaatttcagtgtcaattaaagattctgtgactgatcaagatgttgttatatgccccagcctaagtttttgttctttttctagtgcacccttttcttttattcatcagtcaaaacacagagaatcttaactttcttcagtggattttgagttgcttaacaaaggttgacatgatcagaaattttatcttaagcttctaaaaaaaaaaaaaaaagaaaagaaaaaaaaaaaaa

SEQ ID NO: 3765 - DNA, 901 bp, Glycine max
  unsure (1)..(901): unsure at all n locations
  Clone ID: GLYMA-23APR03-CLUSTER67217_1
aaagggggaagtttcattatgaagccgctcanaaaagctatgatatacgagtaattaaataattcactaggatactcttnttatatactaataattaacgatcgatntagatncggagtaggaataatatttgnggagcacncaaatatttggnggggtgccatttctgaatggngcatgctttatttattctactttatctcactgcaccgacaagactcctcccacggttgatttttccttccgcatgaggaactccgttagctacgtagttctatgcagcatcttttccaagacataggatggcttgtgttcagtgtctggaattatagctgttacgaaaacaccaactgcaaccttttctgggaacttctccattgcaagtgctatgttcagccctccaaggctgtgaccaactagaactaacttctcatttgagggaattgtggccattagctgcaacaaaggcgcagaatactctgagaaagtatcaacatcttcaattttcttcatgttggttccagaagctgcaaggtcaagtactgtgaccttatggcctgcagattccaagcgtggcttgagcttataccaacaccaagctccatggcatgccccatgcaccagaacatagtgcttcctatccatacaattttttgaacccattatcatgatgatttcttcttcttagggttgtagtgattctgtgaaaaagtgtcaacatcttcaattttcttcatgttggctccagaagctgcaacgtcaagcactgtgaccttgtggccagcagattccaagcgtcgcttgagcttattccgacaccatgctccatggcatcccccatgcaccaccacaaagtgcgtcttatctatacaattttctgaacccatgatatggttccttc

SEQ ID NO: 3766 - DNA, 1725 bp, Glycine max
  Clone ID: GLYMA-23APR03-CLUSTER67344_1
gtcatttattccaaccctgaaaaaaactttcttctttttgttgtctcaaaatgatgagtgcaagtgcaggtgcaagaaataggtctccgttcacacaaactcagtggcaagagcttgagcaacaagctcttgtttttaagtacatggttacaggaacacctatcccaccagatctcatctactctattaaaagaagtctagacacttcaatttcttcaaggctcttcccacatcatccaagtaagtgctttttcagtttagctagcatattactaatatttttttttctaaggccatggatacttttctgttttttttaataaaatactctagtggttattattatatatgtcttacttttttatgagggacaaataaaatttagagcctggtttgttgtcataactctctctggctgcagttgggtggggatgttttgaaatgggatttggcagaaaagtagacccagagccagggaggtgcagaagaacagatggcaagaaatggagatgttcaaaggaggcatatccagactcaaagtactgtgaaagacacatgcacagaggcagaaaccgttcaagaaagcctgtggaagtttcttcagcaacaagcaccgccacaaacacctcccaaacaatcccatcatcttataccagaaacctttccttgaccaataacagtaaccccaacataacaccaccaccaccaccctcttctttccctttctctcatttgccctcttctatgcctattgatcagtcccaacccttttcccaatcctaccaaaactcttctctcaatcccttcttctactcccaatcaacctcctctagacccccagatgctgattttccaccccaagatgccaccacccaccacctattcatggactctgctggctcttattctcatgatgaaaagaattataggcatgttcatggaataagggaagatgtggatgagagagctttcttcccagaagcatcaggatcagctaggagctatacagactcgtaccaacaactatcaatgagctcctacaagtcctattcaaactccaactttcagaacattaataatgatgccaccaccaacccaagacagcaagagcagcaactacaacaacaacaacactgttttgttttagggacagacttcaaatcaacaaggccaagcaaagagaaagaagctgagacaacaacaggtcagagaccccttcaccgtttctttggggagtggccaccaaagaacacaacaacagattcctggctagatcttgcttccaactccagaatccaaaccgatgaatgatgttttttttctagttattattatgagctggtgcatacggccaagagagagagagagagagacttgttgttgataaagatcatcagtgttttgtggctggggtgattttcttttgcaaaaggtgtgatgttattgcgttatgtaggggaccacagtaggatttgtgcctttgcttttctagatatttatatttatatatttattatatatatgtttcttttctttcttccccttgaagaaatgttcaacaacaaaaaaaaaaaaaacatgtctcagatttgcacactatgtttgtttgactggaaagcatattaagttgctctgcagtctgctttataatgggtggtagcaaggacaatgcaaataagttctctgaaaaaaaaaaaaaaaagatatttatatttatatatttat

SEQ ID NO: 3767 - DNA, 927 bp, Glycine max
  Clone ID: GLYMA-23APR03-CLUSTER67408_1
ccaaaaaagacattgttgcttttcattttggcatcacagagtatcagagagaaagagagagagagcggttttgcagaaaaaatccaagtaaatttaaggagccaccactgttccaatcagcccctttcattttgcagtgcccgtttattttttcgtgtttgcattcaccgttccacagaaggaaaaaagagtgctttgttccatctctttctgtggtgtgtctcaagataaaaagctcactcactcacagcagcaacaacccttttaccttaactcttgaaactttgttcagagtttgattattaagagagcatgatcagatgaaggagtgtggaggctctcttgggggagagggcaaggaagaagaggactactcaaaacaagtgttgtctttctgaaccccaagaaaacgtttctttttttggttttgttgttatggcactttgtatgcagagagattcagcatcaaacaagcaacagctcatggattgtggcaagtatgtgaggtacacacctgaacaggtggaggctttggagagggtttatattgaatgtccaaagcctagttcttccagaaggcaacaaatcattagggagtgtccactccttgctaacattgaaacaaagcagatcaaagtgtggttccagaatcgcaggtagagagagcaagagaaccaaaacatgcatagcattgtttggtttcaagactgccacattataaaaaaattgtttttgtcatgtttgtgtgtgtttgtgttctatggttgagaatgctcaaagggtgtttctgagcttctttctctttgtaaagttgagttttttggtgtagtatattcgttattcagtgtttattttttttcctgtttttttcttcttttaaaaaatggaatgtcataaagtgttgtttcatcaaaaaaaaaaaaaaaa

SEQ ID NO: 3768 - DNA, 1258 bp, Glycine max
  unsure (1)..(1258): unsure at all n locations
  Clone ID: GLYMA-23APR03-CLUSTER67511_3
atgttctttaatttatgaggatatgctgttatggaaacttggaaaagagacttagactaacggattttaatgaatattgtgggccattgtatatttgtattgcaagctttcactttttagtttctcgttgtgacaattggtttcatttcccttacctactctgttagctgtgtggtttcacttcccagtgaacgttagccaagaagcagaccaaaagttccattagttatattggtgtgaaatgttatacagattgtgaatagaaattaaattctttgaatatcatatgaatgtagctctatgttctatggaggctaccttttggatttcttcccactacatctctacttgcttggtggtgttgttattcaanaaactaanaaagttcctggacttggggaatcaaataacattaaaaattaanagttgttgtaaaaattaagactgatttactacaaaatttttactggcccttacaaaaatcatatttccacgtgcaacaatattcaatctctgtaacctcttatttgtaggtacactttaaaggatatccaagtaatatattacttccctttgaagctgaagatagtgtaaagtggagctttattaactcactgaaagaggtcaattatgtgatttcttctttgtgtgtgcatgtatttatgatggtacttgtttgatatatattatgatgtcttatgcttgttcaacttttcaacaagatgcttataaactcaaacatatgcatttactggtattttgcttatatgaatctttaaacgaatcccctaattccattacatggtttattggaataggatagtaaggaaacattgatgtcaagggctagggttatgatcttggatggataagagttggggaacttggttaaattgaagacttattgaggatatattaaggtaatggtggtttgctggacagaagggaagcttatggaccaagtcagtgtgatgtttgtctgctataaaatgagctttaataataaaagttaatggattgatgggttttgtggaatatcctagctagaacccactgctgctttcaaataaggagttctcaaatggaatctatgctgttatattggtgtggtagttctctaaagaatggcatgcacaagtagtaattggaaaataaataaattggattgccttaaaacattggtattcaacggatagagatcttttaaggggccaatagaataaattataatgccgggctttaaaaaagctgatatagg

SEQ ID NO: 3769 - DNA, 1849 bp, Glycine max
  unsure (1)..(1849): unsure at all n locations
  Clone ID: GLYMA-23APR03-CLUSTER6779_1
ttttttgccatatttcccaaataaaattccccgattaaccttcgtgctacccacgaaatctatttttcttcccatttttttctgagcatttagctgtcgcttctttttgtttgtttttgtcatcctcggcagatcaggttttgtttttgcttctgctccagctttggaagatccacaatctctctctgagtggatggtttagtgtatatttttaagatactgatataaaagtatgggaagcagtgagatggataaaactacaaaagagaaggagtcaaagacgccgccaccacctacatcacaggagcagtcttcgaccaccggcactggaacaattaatcctggattacctgcatctcatgcatatgctcctatacctccacatggtttcttggcatcaagtccccgggctcacccttatatgtgtggtgcccagaaaatcatgactccctatggtactccaccacatccctatgttgcaatgtatccccctggtggcatttatgctcatccatccatgcctccgggatcttatccttttaatccttttgccatgccttctcctaatggcattgctgaggcttcaggaaacactcctggcagcatggaagctgatggcaagccttctgaggtgaaggaaaaattgccaatcaaaagatcaaaaggaagtttgggtagtttgaatatgatcacagggaaaaataatgaacatggtaaaacactggggacatctgctaatggaattcattcaaagagtggtgagagtgctagtgaaggtgaaggtaccagtgaaggaagtgatgcaaattctcaaaatgactctcaattaaaatcagggggccggcaggattcttttgaagatgaaccctctcaaaatggcagttcagcatatactcctcaaaatgggggactaaatatacctcatacagtggtcaatcaaaccatgtctatcatacctatctctgcaggtggtgctcctggagctgttcctggtcccacgacaaacttaaatataggaatggattattggggtacaccaggttcatccaacattcctggacttggcagaaaggttccatctactgcagttgctggagggatggttactgttggatcacgggatagtgctcagtcacaactctggctacaggatgaaagagagcttaaaaggcaaaggcggaagcagtctaacagggaatctgctcgcaggtccaggttgcgcaagcaggccgagtgtgatgagttagctcagcgtgctgaggctttgaaggaagaaaatgcttctctccggtcagaagtaaatcgaatcaggagtgattatgagcagctactctccgagaatgcagctctcaaggagagacttggggaactacctccgaatgatgatcatcatcataggtctggcaggaatgatcagcatgtgggtaatgacactcaacagagtgggcagacagaggccgtgcagggtggtcattagcaccaaccaaccacttcatgctgcctttcagggagataatctaacttaaatagcaagagcaagatcttgtttcggataggttgtagttcaaattgtattaatgctgaccatttatcgtcttaagatctgtttaatgttatgtgatccttcattcctaatttaccttttttttaactcattcaaaacgacctggattgtatgtagtgtgtgaattctgtgtcataccttatctgcagcttcaaagttagtgttctcattaagtaagcaatatagttaacgaacctgggtgttgtccattatatcatttcctgtacaaataatttatcgggaaaataaataaaagagaaaatntntaaaaaanaaaaaaaannn

SEQ ID NO: 3770 - DNA, 1123 bp, Glycine max
  unsure (1)..(1123): unsure at all n locations
  Clone ID: GLYMA-23APR03-CLUSTER6781_1
cttaacatttccctaaacataactcacacacccctcttctctagggtttcaatttcaccatgtttccctttctcaaattagggttccggcgagcatggccgacggtccggcgagtccaggcggcggtagccacgagagcggcgagcacagccctcgctctaacgtgcgcgagcaggacaggtacctccccatcgctaacataagccgcatcatgaagaaggcactacctgcgaacggtaaaatcgccaaggacgccaaagagaccgttcaggaatgcgtatccgagttcatcagtttcatcaccagcgaggcctctgataagtgtcagagggaaaagagaaagactattaacggtgatgatttgctctgggccatggccactcttggttttgaggattatatcgatcctcttaaaatttacctcactagatacagagagatggagggtgatacgaagggttcagccaagggcggagactcatctgctaagagagatgttcagccaagtcctaatgctcagcttgctcatcaaggttctttctcacaaaatgttacttacccgaattctcagggtcgacatatgatggttccaatgcaaggcccggagtaggtatcaagtttattattgaccctcttgttgtaacgtatgttttctacgccagttaccaagtgctcacggcatattgaatgtctttttatgttatgtgaatactgacaggagatgtggttcttgtgtcctttttttttttaaaaaaaataaggtttgtatattatctttggagtcgaattattatttgaaagttattatattgtaaatcctagagccctgttgtctgaatccatcaggcggcttggcaaagaccgagattttaggactgattgtaagcataaacccgaatattcttttcctaatttctttgtgcaataatgtatgaaaaaggctcgagcttctttttaaaaaaaaaaaaaaaaaaaaaaaaaaaaaaaaaaaaaaaaaaaaaaaaaaaaaaaaaaaaaaaaaaaaaaaaaaaaaaaaaaaaaaaaaaaaaaaaaaaaaaaaaaaaaaaaaaaaaaaaaaaaaaaaaaaaaaaaaaaaaaaaaanttttttttnccccccccccc

SEQ ID NO: 3771 - DNA, 574 bp, Glycine max
  unsure (1)..(574): unsure at all n locations
  Clone ID: GLYMA-23APR03-CLUSTER6805_5
agcacacgcactacctcaaaaacaanactacaatagcataacccttcgaagtcggcggttatctctcctcgttngcatcttcaccctttccctgtctctcagaaagatgaaggtggtcgctgcgtatctgctcgccgtcctcggtggcaacaacaccccctccgccgatgacatcaaggaaatcctcggctccggatatgggtttcagtctcttcgattaattggtgtagtctattcagctttttttagtccagaacatattctcaattaacactagagcattgagtttgtcaaagttttgttctaaggagtaatttagtctgtttttatatcaatgaccaaacaagttggatgaatttggttttatattttagtatctttaaagttatggaatttcattttggtaaatctcagtcaagcttattccttgttttaccttttgactatggttattacgttaagtggcaaattattaggaaaagaatgagaaggtaaaacgtatccaacatttcttgcaagttaaattaaattaattttgaagttaagtgaagctgcttttaaaacagtattgtag

SEQ ID NO: 3772 - DNA, 2010 bp, Glycine max
  Clone ID: GLYMA-23APR03-CLUSTER6814_43
cagctacgtaggccccccccccaaaactgaaggctgtgctttgctctgcttctgaatgaagaaaatgaagacacatagtcgttaccaggacaatttggattctgattcaaagagtaagagatcatgcttctgtggaatcgttccagcggtttctttactttgtgttgtcttgcttttctcgactttattctttgcacaacgctacaacgagaaactattaaggtggaaaatgaacatcaagaaattgaaaaatgacaattgcaagaaccagtgcaggactggtggaagtcatgcattacctgaaggcataatctccaacacttctgatttggaaatgcggcatttgtgggatcttcctatgactaagacaatagagaataaggaaaatgcatcaaccaatttgtttgcaatggcagttgggataaagcagaaagatcttgtgaacaaattggtcaaaaagtttctatcaagcaatttcgttgtaatgctcttccactacgatggtattgttgacgaatggaatgactttgaatggaataatcatgtcattcatgtggctgtagccaatcaaagtaaatggtggtttgcaaagcgtttcttacaccctgacatagttgcagaatatggttatattttcctatgggatgaggatcttggagttgaacacttccacccggataggtatgtttctattataaaaagtgaaggactggaaatatcacaaccagcacttgatagtaacaaatcagaggtacatcatcagattactgcacgtgggaggaggtcgaatgtgcacagaaggatttacaaaactggtggtagtggcaaacgttgtgatgaaagtagcactgctcctccttgcacagggtgggttgaaatgatggcctttgttttctcaagagctgcatggcgttgcgtttggtatatgatccagaatgacttgatccatgcatggggtctagatatgcagctaggctactgtgctcagggtgatcgaacaaaaaatgttggtgttgtggatgctgaatacatagtccactacggtcatcctactcttggaggcttagatgtgaatgaggtttcatctcggacaaaggatcatagagttgatgtgaggagactgtcttaccgtgaattacaagtttttagaaaacgatggcagaaggcagttgaggaggatgaatttttgactattagtatttgttattgaaatggatcgacccaacattcatcctcctcaactgcctcaaactattagcaatttagcaccttctactactttgtaatcgttcaagagttgtgaactgtgaagaatgagttcaacaagccgtgcttggacttggagcgtggcagcaagtgttggagtggtggaggccttgaaggaccagggtatatgcaggtggaacagtgtgatgagatcagcacaacaacatgctaaacataatatgaggtctttgtctcaaaccaagaagttttcttttcaatcatctgcgatggcttctgccaaattgaaagatgagaaagctaagcagtcagaggagtctttgagaacagttatgtacttgagttgctggggtcccaactaaacaaagatgctaagacttcatgcaattttggatttccctttttttttcgctcggaatatgatgaggaatgaaagagccagaaggtgcaccaatcacagaagtgtctcaactcccaactaacatgttatgttacatgcatgctgttgatttgatccgatcgaatcagaagcttaattaattgagaaatgagtctgaagcatgcattttgctgccttggagagacatgaaatggatttggaagaggggtcatcattggaatgatgaaatttcagacagaaattgctattatgtataggattttttatatgatgacaccaaggttatgtattatgctgaataactgtaagatgtaatttataaagctaaacaagtcttgagaaattacttttctctatcaaggggggggggggggggggggcgggga

SEQ ID NO: 3773 - DNA, 1716 bp, Glycine max
  Clone ID: GLYMA-23APR03-CLUSTER68248_1
atttttgttgcacggtttgagtcctgaatcctagtggccgatctacgttgttccaacttgcaactccttctcctattcccactgtcatttttttcttcccaacacaacacaacagacgcagtacataacaacttttgtttccttggcgccgccacaccaacatgtcagccttcactatttccaacaacgccgccgccgccacgtggccaattccccaattcaacacttgccactttcctcactctccatccatcgttcttcaccattccctcctcaacacccgcgctttcaggatccactgtgtccctcaagaacctctccccccattacaacaacccaaacacgatcaactttctcccggaggcggcggaggccacggtgacgctgacggcgatggtggcggcggcggcggaggcggaggcggagacggaggtgaaggaggaggagacgaagagttcggacccttgttgaagtttgaagcggttatgagagaatcggaagctcgtggtgttaagttgcctccggatatggtagaggctgcgaggatcaccggcattcgggaaatgtttcttcttcgttacatggagttgcagggttcgtcttggccagtgtcttttctgatccagcattgtgctatgctgagaaatcgaatgctagctgacccttcttttcttttcaaagttggaaccgagattgttatagactcttgttgtgcaacccttgcggaggttcagaagagaggcaagaatttctgggctgaatttgagttgtacgctgctgatcttcttgttggagtggttgttgacattgctttggtgggtctgttggcaccatatgctcgaattggcaagccttctttgtcaaaaggtttgcttggacaaattcagcatgcttgtgctgctcttcctagcagtgtgtttgaagctgaaaggccgggatgtaaattctctgtgatgcagcgcgtatctacatacttctacaagggtgcattgtatggatcagttggctttggatgtggtattattggtcaaggaattgcaaatatgatcatgaatgccaaaaggagctttaagaaatctgaagcatgacatacctgtgcctcctcttctgcaaagtgctgctctttggggattctttcttgctgtgtcatccaacacaccgttatcaaataatcaacggactagaaagccttgttgaagcatctcccgtggcaaagagggtcccacttgttgcaatggcattcactgtgggtgtgagatttggcaacaacatctatggtggcatgcagttcgtagactgggccaaatggagtggcgtacaatgagtgaagctaggcaatttcgccttttttgaaagttttattacccaaagttggctaggctattcttgtccctttctttctcaaatcaaggagtgaagctccccaccaatttttcatatgtagggcatctttcttgtgattaaaattggaccatgcccccctttactcttgattcctcctgctttttcttttcttcaatctttttcacatttttattttcattgttatcctatgttatactataacttagttgtgtcagatatgttcaagggaagttaaggtttttataactaggcatggtagtattaaagttaagctgaccatgtttttgtttgggtaccgatctaagcatcggaaaatataattttgcatttacttcaaaaaaaaaaaaaaaa

SEQ ID NO: 3774 - DNA, 2023 bp, Glycine max
  Clone ID: GLYMA-23APR03-CLUSTER6859_1
tccgggatgtactacacccgcaactttttagatgcaaaaggctaagaagttttccacctatcaagttgacttctcttgataaacaaaacttaacatattttgttagagtcttgagatgtgtatgttttatattttataggaaagatacaagagaactttgtttgtcacactcttccataacagaattgccattttcatttcaaaatcatgctgggcttcaaggattagaaaagagccctgaaagtcctcatgcaatttttaaggtgcaaagttgctttgacctgatagcacatctgactgcaagattcttgggaagtttaacaaggtgcaagtgttcaaaaaatgtaacaaatgatggaaaaacagaggaaaacttcatttgcaagatactcccataagctgtaactatagattagttgaccaagtgatggtattagttagtgatttcataatacaagaactgaacaatcaaatagtttttgaattgatagtagacacattggctttataaaatgttgagtggtcgtcactataatatggttaaattttaattccagagtttacttcgatttctatcattgctcggcaaacaattaatatttagtgcgatgagttccatagagttttgtcattgttcaacaatagagaagatctagaatgattccatacgtcatccataataaaattaaatatattcatgttttaacgaaaagtctaggtggtagaaatatttgataattagtgttaaaatgggaatccatatatttaaacaggaatatgccatggaggatggtcgatttactgatccttttatagcaagagaaaatcagacgatgatctagaaagtttggaatctcaaaccaccagttgctaaaagagggcaggtttgtggacatggaactttcatagacagtatttgtgcaacagcaacaatgtatagttttatgctcacatccactgtgctgggcagtggaaattgtatgatactgtgaagttggattaaatttaatggattcgaagtatagaaggggcacaattattgtcaaagccaacctactggttgagcttccgtgtgaatgtccttcccccaggttatacttgagagttttccaaaaatatcagaaaagatggaaaatgtaagggaacttcatttgcaccaagtagcattgtcctgatgccagaactgactgaaatcttcgccgtgggattgaaagggtggcaatggctaaaacaggaagagggtgaagaaaaaacggggtcaacagtatcttcaaaggaactgcatgaagctggaaacagtgttttgtttgccaagagataggattcctgagtggttcgatcagcaaagcaggggaccttcaatttctttctgatttcgtaataagttccctgacatggttctttgtcttattgttgcacctattcaagacaaattttttcgtcccatggtgttcatcaatggcaaccaatgttccccttatagttgccatttccggacaggaatgcaccatgcatatctttgtgatctacaagagataaaatccagaaatagtccgtatgagatgcctttcgaaaatggatggaaccatgtgaatgttacatgtccacgttgtatagatacctatatccaccctgttaaaatgggaatccatatatttaaacaggaatatgccatggaggatgttcgatttactgatccttttatagcaagagaaaatcagacgatgatctagaaagtttggaatctcaaaccaccagttgctaaaagagggcaggtttgtggatatggaactttcatagacagtatttgtgcaacagcaacaatgtatagttttatgatcacatccactgtgctgggcagtggaaattgtatgatactgtgaagttggattaaatttaatggattcgaagtatagaaggggcacaattattgtcaaaggtaaattaatgttagagaaactgaatgaatgtcattaaccgtgaattactagtagtaagaaactactatcataaattttgcttt

SEQ ID NO: 3775 - DNA, 2149 bp, Glycine max
  unsure (1)..(2149): unsure at all n locations
  Clone ID: GLYMA-23APR03-CLUSTER6884_1
gccggtctcccgaacccgatattttccaaccgttaactctttcttctctctctagtctctcccctcgcacagataccagtgacagtgtgagtgaacaacaccaagcttcatgttcgttgctctcacataatgttgttaaattacagaccacttcattttgttttcctgctcacatttttcttgtccgcttcctgtctcttgtcacaccaggcttcagggacagaaaacgagggaaaaaacgttgttggcctttctcggttgtatgtatttgctgctgctccgttcgagagctcgccctttcccttagctgctgagagaacacgaagaaaagaccctcttgatggcttcaataagtacatttatggatggaatatcactagcagtgattattgggcttctgtggcatataccgcagctcctttgttcagtattgcagcagtctggttcttgggctttggcttatgcttagtgatcatcggtgtttgttacttctgtcataaaagagagccatatggttattcaccaacatgctatgccctttcccttattctcctgatattattcacatttacagcattgattggatgtgcagttctctacattggccaaggaagttttcatcatagcatgacacatacattgcagtatgtggtacatcaagctgattctactgtggataagcttaggaacgtgtcagattatcttgctcaagctaagcaggttggagtcgatcgagtttttctccccacaaatgttcaaactgatattgatcaagcagaaacagatatcaataactctgctagcacccttgctgataagacaaaggagaactcagacaacatacaagatctcttagattctgcgaggctagcacttatcataatagctgctgtcatgctagtcttgacatttcttggatttttattctcgatttttggcatacagctccttgtgtacatcttggtaatcgcaggatgggttcttgttactggcacccttatattatgtggcctgttccttgttctccataatgcgacagcagacagttgtatagctgtgaatgagtggatccagtatccgactgcacatacggctatggacgatattctgccctgtgtggacaatgccactgcacaagaaacattgtcacgaagcaaagaagtaacttctgaactagtcaatttggtcaaccaagttatcaccaatgtctccaacttaaattttgcccccaatttcactccactctactacaatcaatctggtcccctcatgccactcctctgtaatcccttccatcctgacatgacggatagacaatgtgatgctggtgaagtcaccctaagcaatgcaacacaggtgtatggcaattttgtgtgccaggtttcaccatctgagatatgcatgacacaggggcgtttgacccctaccttctacaaccaaatatctgctggaataaacgtgggcaacgccttgtatgattatgctccgtccctcattgagctacaagattgcaccttcgttcgagaaactctaagcgacatatccagggaccattgtcctggtttacagcgttatagtagatggatctatattggattggtaatggtctcttttgccgtcatgttctcattgatcttctggatcgtgtatgggagagagaggagacatcgtctatatagaaaagagtcaaaggacttcactcctacacatgcaccagcaccagcaccaggacaagcattagcattggcccagatccctgaaggataattaagcaaaaactaattgataatgatgttgctagttggtggatgaacatgtgtgaactaagtttagccttttttcggtgttgggtgtataatgttgtagcttcttttgtatgacacactagttttttttttataatgaaatatcattattttacgtaaaaaaaaaaaaaaatcagacagaagacaaggcacaaacagaaggatagggagcttcttgtctgttcttctgtggggggaaaatcattagaccagcctggcaggtcttagatgttggacagtgtttggagtttggaggtaagtgtaacctacatgttcctgaaaatgtgtgaaaagcctgatcagaatgtanggaataggaacccatcttgactgcattttgtgca

SEQ ID NO: 3776 - DNA, 1238 bp, Glycine max
  Clone ID: GLYMA-23APR03-CLUSTER69374_1
tttttttttttttttttttttttttgtaattttcaacactccttccttcgattagcaaaacaaatatactatttacatttgtatgggaaattcaaaagcacaaatctccattttagcaaaagaaaacaaaattagtcacagatttgggttttctggaagggtagtgtagcatctttacaagtgtcttatatttcaacacagcaccccgattggacaaacccagagaaaccctcaggcacatttatctttgtcaatttacggttgtccaccaaatagaacccatgcggtgcaccttcgtaatcggatccactcaacacaaccctggacccaaccgcaaccccacataccccaaccctcagccccggatcccaacctctccaattcaccaatctcccatctttccctaccccaacacatgaccgaggacactgaccctcttcccaaaacccgttttcttccctccacccacccgacccgatatccaacacctccgccgacccatcgaacatcccttgcctctccgtggaataaccactcacaacccaaaactcgtccccaatcaccaccccctcgcactcgtccctctctcggcccatcgggtccaacccggcccattcatcactcctcgggtcataagcccacgccgtactcagcgcgttcttattctcatcatgccctcccgctacataaacccggcccacccccgccccgatggcgaaaaaagaccgcttctccggcatgtccttcccccgccgccactcgctcgtgcgaaaatcgtacacaaacactgccgtcagaggctcgtaacttgcggggtcccaccctcccatcagcacaagcttcccgtcgcagctcgccagctggcagaacagcggcagcccggacgggtaatccggaaccgggtcgacccggtcccatgtcatgctctccgggtcgaacacgcttatcccgtaaaccgacgcaaccgaagcgttgtttttctcctgaagcggttgatcctcacgcgcctgaacgaggcacgtgacttttcgggtgtggccggttttcttcctgtgggagtaaaacgcgtcgctttggaggaggcagtgccactggctgcagactcggagggcgactcggtgcgctgagtggggcaaacgagtgaggcactcgagtccgagttcgctcggtaacttgggtatcaaatcgttgaactggatcaagtcggagatagtattattatccatcactgtgagttt

SEQ ID NO: 3777 - DNA, 895 bp, Glycine max
  Clone ID: GLYMA-23APR03-CLUSTER6941_4
aatccttaataaatcacattttattactataaatacattaattaacaagtggataagtgaagccaatgatgataaaataaacataatttcgggaaacatagataattatgtgcctctgttgagatcccatcacaaatctcaattcccaaaacactgtttctttctcccacaccaccaccaccttttccctcgtgatcatcgacatggcgagaggcgcctctcaatctcaatccacagcgtcccacgccaccacgcgaccgggcgtgatggctcctcgcggcaccgctgccgccactgccggcatgcgccgtcgccgcctcggcggaggaaccagctccgcctcggtcagcggcggctccggcgccggcggaagcaatatgctgcggttctacaccgacgacgcccccggcctcaagatctcgccgacggtggtgctcgtcatgagcctctgcttcatcggcttcgtcaccgcgctccacgtgttcggcaagctctaccgctatcgttcctccggcgccactgtttgattccacttcacgatcacagagaatctgatctggatcacgaaattcggtattcgaaacctacgttttttgttttttgttttttttttctaatttacgttatttatttttaattttgtaaattttcctagggcttgaataggcttcctgtttctctagctgtgaaatgattggatcttcttcttgctgttgaaggaagtcgcatttggcctttccctgaaaatcgatgactgcattcatttattattttattcattcattatattattacacttttttgcttaaatttcctaaacaaacaacggttgcatttcagcaatttctattatcacattgcgttcgtttctgtaatcacgtttatttagttatga

SEQ ID NO: 3778 - DNA, 622 bp, Glycine max
  Clone ID: GLYMA-23APR03-CLUSTER6956_13
gaaaaaggaaggatgagcaagtagtggtcaaagttaaagttgggccaagttgtgtcttgtttaagaagaagctaaggtttgagaaaattgtggtggtggctaaacagtgggagcacgcaatcttgcataaatacagagaagaagagaagagtgaagagacgaaggatggggaaggcaaaagaagcggcggtggtggcgggagccctagcattcgcgtggctcgctatagagctcgctctcaaacccttccttaccaaggcacgtgcttccatcgacaagtccgacccggcacgtgaccccgacgacgatgctcttcctaaaaccaccgccgacgacgttcccgaagcctccgctgacgacgtgcctgtcgctgctgataccaaaaccaccgacgacgcctgaacttatctcattcatgttattttgaatgtcctgaaaattactgtccaaatgaaataatgttgctagcctctttgtgtttctgttaattttgtgtatattgtgttgtcagtatttttgttctgttttgtttggttttaggattgaaaaaataccaggttgttctgttctgtttgtttcccttgtcatggtcacatataaacggacaattggtattttggta

SEQ ID NO: 3779 - DNA, 586 bp, Glycine max
  unsure (1)..(586): unsure at all n locations
  Clone ID: GLYMA-23APR03-CLUSTER6956_14
aaaggaagaatgagcgagtggtcaaagttaaagttgccccaagttgtgtgtcttgtttaagaagaagctaaggtttacgaaattgtggtggtggctaaacagtgggagcacgcaatctttgcataaatacagagaagagataagagaagacaagagtttcaaaatggggaaggcaaaagaagcggcggtggtggcgggagccctagcattcgcgtggctcgctatagagctcgctctcaaacccttccttgccaaggcacgtgcttcgattgacaactccgacccgccacgtgaccccgacgacgatgctcttcctaaaaccaccactgacgacgttcccgacgccgccgattctaaacccgccggcgacgtgcctcccgctgctgatactataaccaccgacgccgtctngaagtggtctctcattcatgttattttgaatttcgtcatatctcaaaactactgtccaaatgaaataatattgttagcctcgtgtgcttctgttaaatatgtatattgtgttgtcggtaaatgctcctgttggtttgatttggttttaggattgaaaaaaatatcaagcgtgtct

SEQ ID NO: 3780 - DNA, 1588 bp, Glycine max
  unsure (1)..(1588): unsure at all n locations
  Clone ID: GLYMA-23APR03-CLUSTER6958_8
tgccaacactttctcgcattttccctcttctttctctctcacgttttccgcttcagttttctcgggaaaatcatggtgaaaggtccaggcctctactctgacattggcaagagagctcgcgatcttctgttcaaggattatcagaatgaccacaagttcaccatcaccacttacacttccaccggagtggaaatcacttcaactggagtcaggaaaggtgagatatatttggccgatgtcagcactaaggtgaagaacaagaacatcacaactgatgtcaaagtggacactaactcaaatctgcgtacaatcattactgtggatgaacctgcccctggactcaagacaatttttagctttaattttccagatcagaaatctggcaaggtagaactccagtaccagcatgagtatgctggaatcagcaccagcattggattgacagcaaatcctgttgttaacttctctggtgtggttggaaataatttggttgccgttgggacagatctttcatttgatactacctctggcaactttaccaaatacaatgcagggttgaacattactcatgctgacctcattgcatctctaacactaaatgacaaaggtgacaacccttactgcctcatattaccacattgtaaacccgctgactaattcggctgttggtgcggagctttcacatagcttttctggcaatgaaaatatactcacctttggtacacagcatgctctggacccgctaacgctgttgaaagctcgggtgaacaactatggtcgtgcaagtgctctgatccagcacgactggactccaagaactcgattttcgcttgttggtgaggtggatactggggccatcgaaaagagtgcaaaggttggtcttgctgtggccttgaaaccatagaccaagtcgttttgtgagtgatatatgggatgcttctcgtggtggaggataataagttgttgtagactttcactttcccaatgaacatctagtgcttcattttggagctatatcaatttcttcatatcttggtggacttgagtgtaaaatcaataagcacaaaaagaatttgaatttgtacttattcaacagatccacccgaaagccattgatttaggtgcatctttgagtaagctttttgagcatggaaggtgattgcccagcaatttggttgttttagggtgtatatcgaagctttgatttagatgcctagtaaatatttggtaataaaaaaaaaaaaaaaaaaaaaaaaaaaaaactcgagtttttttcttcttcttcggctttgggttgtaattaaacattttctacatagctggattagtagtacttgtgaaaaacttgtaacgtgaaattggagaggctaagcagaaatgcttctgcttgatgttaagtgttctcctgtgaatgttaattatgcacgaaatcnagagggaaggacgacggtaaaaaatactgatgaggttaagatcactatgaaaggtaatggcaggaaattggattgaggccattggagattttaatttattcattttattaagtttgattctacataaacgctgatttgctgcagtacagaaaata

SEQ ID NO: 3781 - DNA, 931 bp, Glycine max
  unsure (1)..(931): unsure at all n locations
  Clone ID: GLYMA-23APR03-CLUSTER696_2
acttngtcccctgcaagccacaccctcaagaaggtaaacacccacatttcacnaaaaccctaatccttcacaaacagaaaaccctactttaagtgttgcacaagacacactgattccttctacttcttctacttcaactccagctccagctcctccccagaaccctagttcttgttctctaaatagccagaataataatcatattaataataatattccagtagagaaaaattcgattttgaataaggggtcctcatcaaatgagaaagacgatgttgggagaaggtggccaaaggatgaagtgttggcactcataaacctgaggtgcaccagtgtgaacaacaacaacaacaatgaggagaaggaagggaacaacaaggtccctctgtgggagagaatctcacaagggatgtcggagttgagatacaagaggagtgcaaagaggtgcaaagagaagtgggagaacataaacaagtacttcaggaaaaccaaggatattactaagaagaggtcccttgactcaagaacttgtccctactttcatcagttgagcagtctctacaatcaaggaaaactcgttctacaatctgaaagccacttgaataatactccacctgatcagaatcccgagcaagtaaaaccagatcaaacaacccaagctcatgagtcttcttcgcaggtggggtctggtagtggtttcagtgttcagcaacagcaggtaccttctttggattttgatcagttttaattcattgattcccataataagaagtgtaccccctcttttttgtatttttgttttttggttgatgctggctatctttaatatagcatataaattgattgtgtatatttgaaagaacttagaatttggcgagccccgacagctatagctagtttgaggaatgagaactattaatatttctattcc

SEQ ID NO: 3782 - DNA, 1063 bp, Glycine max
  Clone ID: GLYMA-23APR03-CLUSTER700_2
agcacgagtagtaagtagaatccaaacattaagtactgttccttaacaaaaaaaaaaaacagaatggctgagctacctagctcagaagcatcgtcatcatccgcttccagtcggaagcactcgtcttcggaggcccatttacccgccccggatcagaaaaggcccaagcaggcccgagatagcagcagcaagcaccccgtctacagaggggtccgaatgcgggcctggggaaagtgggtatccgaaatacgcgagcccagaaagaagaaccggatctggctcggaacctttgccaccgccgagatggccgcacgtgcgcacgacgtggcggcgctcgccatcaaaggcaactccgccattctcaacttcccagaactcgcggcctcccttccccgacccgactccaactcgccaagagacgttcaggccgccgccgccaaagccgccgccatggaggttaacgatgttccgacgacgccttcgtcttcgtcgtcgtcggcgtctctgtcgctatcgcaatcgtcatcttggtcttcattggcggtttcttcttcctccggcgatggcccgtcgacgccggaggagctgggggagatagtggagctgccgagtctggggacgagtttcgaaatacccgacccgagtggggagttggtgtatttggacccgtggccgtattctcaggcgtggagtcacggcatttatgatgagagtgaggggtattttattggggactctgagactgagagcatgatactttgtggcttcgagggttcattgtggcagcattaatgcttgtgctttccttttttttctttttttgtcttattgactttccaatgtgtgagagccctttcccaatttttcacttcaagggctgctaaatacattactactactactactactactactgttgtttcccccccttaggtttttcaatgtcatcctccttctccttccgcgtgttgcacaacacgacaggtatgcctgccatcctcctcaatattcaatgtcttgtttcatgtaatcaatgtaatgcaaatgatttatgctcaattcc

SEQ ID NO: 3783 - DNA, 1240 bp, Glycine max
  unsure (1)..(1240): unsure at all n locations
  Clone ID: GLYMA-23APR03-CLUSTER70223_1
tcgagtcagctacgtaggccncccccccgaacttctcaatctcaagtttctctggcaagatgaacgacctttcagttagcaaatgagtcttcttctctactttccttatctcctaaatttatcctcccagaagatgaaagaccacaactttcagaggttacttctctggactcaattcccataattgatttgagtgatcacagttatgatggtaataatcattcatcctcattggtggttcagaagatttcacaagcttgtgaggaatatggattctttcagatagtgaaccatggtattcctgaacaagtttgcaacaaaatgatgacagcaattactgacatctttaatctgcctccagagcaaacaggacagctctacacaacagatcataccaagaacacaaaactttacaactattaccttaatgtggagggtggagagaaggtgaaaatgtggagtgaatgtttcagtcattattggtaccctattgaggatatcattcatcttctgccacaagaaatagggactcaatatggggaggctttcagtgaatatgcaagggagattggttcattggtgagaaggcttctaggtttgttatcaatagggcttggaatagaagaggatttcttactgaaaatatttggggatcagcctagactaagagcacaagcaaatttctatccaccatgtccagatccagagttgaccttaggtcttcctgtgcatactgatttcaatgctctcacaattgttttgcagtcacaagtttctggtctccaagtgatcaaagatgggaaaaggattgcattaccttttattcccaatgcatttgttatcaacctgggagatcaaattcaggttcttagcaacggaagattcaaaagtgtacatcacagggctgttactaacaaattgagtccacgggtgtcgatggcaatgttttatgggccaaacgtggacactacaattggcccaatccaggacttgatagatgaagaacaccctcccagataccgaaattatcgcttctctgagtttcttgaagaattcttcaaacaagaaggcacgaggaggatggttaaagaagtctttgagttgccatgttagagattaaataattctctacacccatttatggtcctaatatcaatccacttgtcacgtgactagcgactggactatcatgctatgaaggatagaagtgtcgtacgcacagaatgataatctaccctgc

SEQ ID NO: 3784 - DNA, 1287 bp, Glycine max
  Clone ID: GLYMA-23APR03-CLUSTER7024_5
tcaaaccaccaaagcctacggctactacattacattctttttttctttcccaaatgggttccatcttttcacccttaaccagtatcttgctcctactcatactactttggggtggcgaggcacgtgacccttttgcttgtgaccctaagaacaccgccacaaaaaacttaccattttgcaaggcttggttggcaacaggggcaagggtgaaggatctaattggaaggttaacactgcaagaaaaagttaacttgctagtgaacaatgccgcggcagtgccacggcttggtatcaaagggtatgagtggtggtcggaggcactacatggggtctcaaatgtgggccccggaacaaagttcggtggccagttccctgccgccactagcttccctcaagtcatcaccaccgctgcttctttcaatgcttctttgtgggaagcaatcggacgggtcagcttttttcttttgtttttaaaatgtttgttagttaagaattttttaaaaatctattaatatttcactataatagttcattaattcacacaccatattctaattttgaataaaaatactattttatcgctcagccccacctgcgggtaatggccattgggctccacacaagcaattagtggcttttgagaaagtccatattcccgccaaggcccaacaacgggtgagagtcaaaattcatgtttgtaagctcttgagcgtggttgaccggtctgggactaggagaattccaatgggtttgcacagtcttcacattggtgatgttaaacactccgtgtcacttcaggcagaaacacttggaattatcaagtcctaaatttttcgaacgttacattccattactcacacaccaccaatcgcctttttcagcaaaatatacatatatagtacctgctaaataacctcaatctctacgtaagtgtataatagacagattaatagtgtgcttattgtcagggacattttaagttttacctctaaacttcctacatggtgctttggttctaaggaaccattgattcaaaccgtaaattgtttatatgtcataacctccaagacaggacgtgctagatttgattcatcaatcacagccaataaagtaatagggttggttgcgatttttggagaagagattaggaaaatgtattgttctctctcccattcatttctactttctttgccattctttttgcttgtacttttatcaatacaagacattagtatttttttttaaaatgtaattgtaaggttggtaataagaatgagctttttcacc

SEQ ID NO: 3785 - DNA, 1244 bp, Glycine max
  Clone ID: GLYMA-23APR03-CLUSTER70902_1
aggtcagaacaaaattctctctaatatcgtgatgctccggtggaccccaccatctcttttttcactttgcttctcactcctccttttctctctctctacgtttccatggagcctccgaggctaacaacagagaatagaatatttatcactttttcactttgcttctctctctacacttccatggagcctccaccttcctattcctattccccattcccattctcacttgagcgccacacacagatacaaatgcacgatcccattctcttcttcctcttcttcgcgtccctctcctcccttctcttcctctctttctctctcttcaaacgcttctcgacaaaaaaggaacaccaccaccatactcaaaaagttcccagcttgttgggagaggaacagagacccaagaagaagagaaagaagcccaagaagaagagaacccaaggtgacgacgccgccaattcgggttcgggttccgactcggggctccgacttgaatccacgtgccagtatccgtttacgtcttccagtagcgttatgcagagaaagatcaaacagcagtatgatgagctcgtcagatgcaaccacttgaagaaactcacgctgccccaggttgtgcagtttgctaatagtttggttgatgctagaaatgagctacaacacaaagctgatgtgattcaacgtaagtttgtaataacgaaggctttactatgtaaggcagatagatcttcttttgaccgccttcatcaacagatatacaagctagaattagagcaaaaacgtttagaagaggatgtttttgtttataactcgcttcaacaacagcttaaactgtcaccagcctaccagaagatgcttgaacttggagcttgcatggagaaggaaaaatcaagtgaactgggagagaacagagatgatgattttgctgaaattacttttgaggaattgttagcacaggagaagaaagattcattttggcaaaaaaatgggaaatcaagactaagctcaagctaataacactactagcttggttgactgtaacctcctgagttagtttagtatgtacatccaatacctgtagttgtgtattgtcacaggaatgttctttttggttctttgcctgtgccaattttggttgttaatggaatatagatgatacaactttgagtttattttagaaatttataaatggaagccagttaaattgaaattaatgcgaaaaaaaaaaaaaaaaaatcaaatgaaaa

SEQ ID NO: 3786 - DNA, 1737 bp, Glycine max
  Clone ID: GLYMA-23APR03-CLUSTER7096_15
aattttagatttttccggtagatgaccggagtaattaattttactatactaggtcagcgaggaaagcagccctattatatagcagtgttacgaaatcagtttccttcctctaacctaataatcaaaatcatcaatccctcttctcaaaccaattcccacttttcctctcttcccctcaccaaactcaaaccaattttcacaatcaccccacgccgtcaccctcaaacgattcccttccgctagcaaaacgactgcggtttggtcgtcgaggcatgctattcgctgctcactgcctttactcttcatcatcgtaaaaatcacacccaatagattagagacattgactttgtgctttttttctgggaggggaacaaatggaccaagctcttgtggacgacataatcaaccgccttctcgaagttcgcggccgcccgggcaagcaggtgcaactgtcggagtcggagatccgccagctctgtgccgcttccagagagattttcctgcagcaacctaatttgttggagcttgaagcacccattaagatttgcggtgatgtacatggtcaatattctgatcttttaaggctttttgagtatggcggactacctcctgaggccaactacttatttttgggggattatgtggatcgagggaagcagagtttggaaacaatatgccttctcctagcatataaaataaaatatcccgagaattttttccttttgaggggtaaccatgaatgtgcttctattaaccgtatatatggattttatgatgagtgtaaacgaaggttcaatgtaaggttatggaagacatttacagaatgcttcaattgccttcctgtggcagcactgattgatgaaaagattttgtgcatgcatgggggtctttctcctgacttgcttaatttggatcagattagaaatctacaacggcccactgatgtgcctgatacaggtttgctttgtgatctcctctggtcagacccaagcaaagaggtccaaggttggggaatgaatgacaggggagtttcatatacatttggtgctgataaggtctcagagtttcttcaaaaacatgatttggatcttatttgtcgtgctcatcaggtggtggaagatgggtatgagttctttgctaaccggcagcttgtaacaatattttcagcacctaattattgtggagagtttgacaatgctggcgctatgatgagtgtcgatgagacactaatgtgctctttccaaatattaaagccagctgataaaaaagtaaagctcaacttcggaagtactactactactaagccaggaaactctccagcaggcgtaaagtccttcctgggtacaaaagtatgaagttaagtttaagcttggtcttgaagttgtaatacttgcaagaaaaggaaagtagagttccatttggtctcctatgatattttggaattgtaaaaacgaagggaaacaccatcatgaactatgtagaccgttgttttcaactggtacaaatttgcattttgaggtggacagcctctccttgttttcttttgtacactaatagctggtatatgtcgttctgacttctaaggttctcaagcattgatggatacatctgcatgtgttctgaaaactaattaaaaatgctcttacaattggtgtatgaatggcagttaagccagtaaaaaactaaaaatggatatggtcctcaaaataaaagatcactttacacctaaaaaggact

SEQ ID NO: 3787 - DNA, 1143 bp, Glycine max
  Clone ID: GLYMA-23APR03-CLUSTER7112_2
gtctcgtctcgtcacgttcatttcatttcatatcttatctgaatttacaaggaactcaactaacatggaagcatgctttctctcccacaattcctttaccaaaaccaccgatcaactcatcccgcacaataagaaacgggtctctaccacaccataagcgatcttctcaacatcttcagtgtataaaagctagaattccacttcccatatcataatttgtgatgtgatcataggctgccacatgtcatcaccatcaccgtttggtgatgatgacaaacctaccctaagtagtgattggcgatctttccgtgcaaaattggtggcaggagaacaattaacaaggcatgttgaggaggtgaatgatctagacactgttgtggatcatcctccactgatcaccattggtgacaaatgggcacacgtaatccacgagcccgaaaatgggtgcttactaattgccaccgaaaagcttgatggggtccatattttcgaacggacggtcatccttctcctatcaactgggcccttaggcccatcagggatcatcttgaatcgtccatcgttgatgtccatcaaggagactagatcaacggctctggatgtggagggcacgttttccaatagtcccttgttctttggggggcccttggaggaagggatttttttgttgagtccaaaagagggtaatggtggtgatggggtggggaagagtggggtgtttgaggaagtgatgaagggtttgtattatggggcaaaggaaagtgttggttgtgctgctgaaatggtgaagaggaatgcgattgggcttggggattttaggttctttgatgggtattgtgggtgggagaaggagcaattgagagatgagataagggctgggtattggactgtggctgcgtgtagcccaagtgtggttgggctggggagtgtgggaagtattgggctttgggatgaggttcttgggcttatgtccagaaggaaggtcatgtgaggtgatatagaaatagtttccaacaagaaagtgagctttggacctgttgttataaggatctgacaatttctaggcataagaaaagaaacagaattgtctgattcggttgaattcttacgtgctgtaagccttgtaaattataattattttcc

SEQ ID NO: 3788 - DNA, 1332 bp, Glycine max
  Clone ID: GLYMA-23APR03-CLUSTER7174_1
tcgagtcagctacgtaggccccccccatcactgctcttgaataatggatctccccgttatagatctttctccctccctctccggcgagtgggacccacttctctgcgccgaggtcagccgcagcctcagggaaaccggcgcgctcctcgtcaaggaccctcgctgcaccgtcgaggacaacgatcgcttcatcgacatgatggagcgctacttctcaaaaccccgcgacttcaaacaccgccatgagagaccccacttgcattaccaggttggggttacaccagagaaagtagaagttccaagaagcttggttgatgaagaaatgcaggagaaactgaaagcgatgccaaaagaaaaccagccaaacactcctgttggacctgatctcaaatggagatacttttggaggatcggtcctcgaccgtcaaatactcgttttcaggaacttaatgctgagccagtaatacctgaaggtttccctgaatggaaagaaactatggattcctggggatacaaaatgatagcagcaattgaagtggttgctgaaatggcagctattgggtttggtcttccaaaggatgcattcacttctcttatgaagctgggcccgcatctgttagcaccaacagggagtgaccttcaaaaatatggtcaggagggaactatctttgcaggatatcactatgaccttaacttcctaacaattcatggtagaagtagatttcctggtttaaacatctggttaagaaatggacagaaagttgaagtgaaggttccaataggatgtcttcttattcagacaggaaagcagatagagtggttaactggaggggactgcatagctggcatgcatgaggttgttgccacaaagaggacacttgatgcaataagtttagcacaagagcagaatcgtagcttatggagagtctcttcaacgttgtttgcacacatagcatcagatgcagttctgaagccattgggacattttgcagaatcaccccttgcaagcaaatatccacctatgtgtgcaggagagtatgttgaacaagagctttcagtaatcaatctcaagggaaagaagtgagaactttcattgttgacaattataataaaaagttggatacatttttctttcactggatcacagtcacactgccttacaagctattgagaaaaaaccattagggcaagaaactgaaaattatggtttcatttttgtcccaagaaatggaacaattgtgagcttccaattgaacactgattaatttcaatacatataaatgtctacatgcttcagcgttttaaaaaaaaaagaaaaaaaaaaaaaaaaaa

SEQ ID NO: 3789 - DNA, 529 bp, Glycine max
  Clone ID: GLYMA-23APR03-CLUSTER72081_1
attcagaccacatacacacacaggtttagtttccaattaattataagtcctgagaataacatcacagttcacacaaattaacaaaagcaaatggcagctaatatattctctgttaggggttcaaagattcggtcatgggagaggtgttcaaaacaagttcggcagcagaggacaaggctttacataatctggagatgcactgtgttactattgtgctcgcacgagtgaattatcattaatcagagcttggtcttgggtggtgccagtgtgccacactatgctcaagcagaatttggggttcgtttttgctgaaaaccatgctgagagagaagagataattgtaccctcagggaacttttggggtgtcagtacagtaaaagagtcaaaagtggcatagtttatgttagggatagggtaggtaggtaattaaaggggctatatgaagcaggtgttcctgctgaacatgtatattacaaattagcctttttataattcaagttgaagatacaactcaaaaaaaaaaaaaaaa

SEQ ID NO: 3790 - DNA, 1245 bp, Glycine max
  Clone ID: GLYMA-23APR03-CLUSTER720_5
ggaaggaaacaaatttattcatctcatgcgcttgtctcgagtcggtcgagactctggaggagccttatcccgatccgcgagagcacgcaaacaccgataaattatttatctttcatttaatttaatcatatccaaataaccctaagctcaccgttgtgtttcaattgcaataattgaaggctagatggcgagtgcatcagagttcgacccagcgcttgcgctttctcacaaattccctgatactacgtactcttataccgaaagggatgcagcactttatgccctaggcgttggggtgtgtttgtcagacgctgttgacggtgatgagcttaaatatgtctaccatgaaaatggtcaggggtctatcaaggtcttgcctacgtttgctactctacttgtacttagatctggggcgagtggttataatctcccaggtttggaatatgatccacgccttctacttcatggacaacaatacatagaattatacaaaccacttccttcaagctgtcatatacacaatatagtaagccttgccggattacatgataaaggtaaagcagcaattttggagattgaaacaaaaagctacgagaaagaatctggtgatttattgtgcatgaacaggacaactgtctttctccgtggtgctggtggcttctcaaaatcatctaagccattttcttatacaaattaccctatgaatcagaatccagctgtgaaaattcctgaaagtaaacctttttcagtgtttgaggatcgtacccaaccatctcaggcattgctctataggctatctggtgattacaatcctctgcattcagatcccatggttgcaaaggttgctggattctcgcagccaatattgcatggtctgtgcacattaggatttgcagttagggcaatcatcaaatgcatatgcagaggagatccagacttgataaaaagcgtagcgggcagatttcttctacatgtctaccccggtgaaactctagttactgagatgtggcttgaaggctcaagggtaatatatcggactaaggtgaaagagcgaaagcggacagttctttctggctacgttggtctgcgtggtttgacttcgtcactgtgaaagaattcaattacatgtaggctgtaggtcgataatatttgcagatggcttaccattaattatgtgttcaatttcaataaatcagtaatgcctatatgatctggagataattttaaaacgtaattaagtgtgtg

SEQ ID NO: 3791 - DNA, 1513 bp, Glycine max
  unsure (1)..(1513): unsure at all n locations
  Clone ID: GLYMA-23APR03-CLUSTER7237_2
aaaaaatttccctactccgggtaacatttacatcctaaatatttacttacatgatcacaaaaaaattgatgncaccataaaataaancaataagtgccntcatcaatttctttcttcaaaaactaatcatgatgctgcacctaaccaccttgcatgggtcgtttccctcgccggtccactacttctgcagtagtattggagcttcttgttgttggtgttgttgcagaagtagtagtgttagtgccatagttgcttgaagaatcaaaagtttgcgaattaacagaggagtcatcatcaacttccccagaagttgttgcagagggtctgcgaccgcgagatactcttcttctgtatctcgaaccggctattcctggccttgttggttcttccatgtggcatggtggtttctttgacagaatcaccatcacacgacccatgcttggacgcaggtcttgattcccttgagtgcagagtagacccagttgaatgcacatttctgcttgttctgctaccactgatgaggccagtgttgggtccacgatttctaaggccctccctttcttgtatagcctgtatgcccagtcgacgagattctgtgcactcacgtccatatcaaaggatgaatttcgctggccactgaccaattccaacaccaaaaccccatagctaaatacgtcagccttcagggttaaatgtccatgcattagatactccggaagccaaatagccattggttccagccacacgtgtgttgacatgggtttggtcttcggggaagagtcgtgcgaggccgaaatctgcaatcttgggcacccaattttcatcgagtaagatgttacttgcctttatgtcgcgatgtataatgcagttgtgagagtcttcgtgtagataaagcaaccctcttgccaccccattgattatgtcaaacctacgtttccaatctagctgttctttcttatgggatttgaagagaagcttgtcgaggctctcgcgacggacatactcgtaaacaagaagcttttcgaagccatgggtacaataaccgaacaaattcaccacattacggtgctgcacacgtgccaacaactttgcctcgttgacgaactgcgtcttcccttgattcgatctatgcgataacttcttcaccgcaatctctctcccatcattcaatttccccttatagacgggtccaaatcctccttcacctagcttgttaagaatatgaaatttgttggtagcagcaaccaatgtttcgtaggggaagatcttctgctcctgtgcagctaagttctgtatttcgttttcttcggtttgtccctctttgctggagctgaatttgaagggcttgattagattgtgaaagaaagtgttgggtttggtcatggcgtcatggcgctctatggtcccaaaatgagcccatgaaacaaaagtaaaggattgattcttcgagcaagagatgcaaattggatgctgaaaaagaagaacaactgtttcgtatcggacgcgtgaaaaa

SEQ ID NO: 3792 - DNA, 2340 bp, Glycine max
  Clone ID: GLYMA-23APR03-CLUSTER7245_25
cactgtttcaatttcattttcaattttgacattatctatatgtctggactgaattttctaacaaccagaattttccatgaaggtaactagagtttggtctttaccattaaccatttcataactctcaaccaatgaccatatgaaaaaaaaatactatgctacctgtttcaccttttctgaaaagatgaagcagaactgaagtttgtagtgaaatttttttgagtactgaacaatttttgagtactgaagcagctctatggtttcgcctactctagccctttggacattttctccacaaattcatggataaaatatttaagggggagaaaggcaatgacactgttgctaataaggtattgtaagcttgtgatgttgttgtttgttggtttggcctctggctctttcacttatagggatagtattttgcattgtgttatgttctgtaatttgcttggctttggtactagtttctaactaatgctctcatgaatgaaatatactattattaggtgctctcagtcatgggtattttagggatcatttgatgtagctatatgtttaaggacaccctcccaagacccactaaaccttgatgccctataactataccacccagctaactgcattttgatgatgtccatcagtcacctcgtcagacacatgtaggctgaagtagtaacttgtggttttgtggaatcgtgtccccaggattagacctctccagaggagcatttcgaaacaattatttggtctagaaaaggtatattaggcattaaaagcttaatagattgtagaagctgctcaaagaacagttcctgtcactactacaaaacttgcttattacgacgcgctaacaacgtcggtcgatatacccctgtctttgaaaataatggaatgacacgctcgtaattaaattataaatttaaggacggtcattgaaaagaccgtcgtggtgcttctctatacaaagacgatcttatcccaccgtctttgaatgattatatttttattattttttctctctcttatttcgctagcaactgcagagacctatgacccttcatttctttccttagtctcgcttctctctctctctcgggcgaagaactcttttgaggatcagaacccctcaatcccttccttttcccctcaaattccacacctccttctccttcaagtcttcgacctcaaccatccgcgccttctctgacgcgaggaggacgaagaagacgatgaagaagaagaccaagatccactgaatgtttcaggcgaatgccgagggagatttcgacgagcttgtagatccactgaaggtggaggacaagatcggtgttgtgcctcatggcctttcaaccaattcagatgttgtcaagagttttggttgcgggaaaaatttgcaaatggaagaaatgaaggttgatttagacttgttggtgggtgaccctgcttcactggagaagaaaattgatgcaattcgtttcggtggtccctagaagcttcagggatcatgatctgaatctgatagcaacacaaagcttcctttttctgcttgggccttcttgagcactattctgtttggaaatattgtgatattttatgctgacagtattgcagaggacagattacacatggttttctcctcgccaaggcatttagcagcagctggtgcgtgcatggaattattttagaaagcagtttttgaaaccaaaaaggatacatgaagcaacttcattggagcacaatagaaaagattctatccgaaattcagatttatccaatggagaatttgatgatgagcaatctcagagctgaagattatatgatttcaaagatatcataattttctgtagtttcttttcttctactaggagtggagtatggccagctaattgctggaaacttcatatgtctgtcaactttttagtgcttaatagtagaaattttttgttatgcaactgagggcttcaaatcatggttgttggacacatgataaggatatgaagctgatcttagatattttttgggaatttgaatagcttatatgccaaggaaatgttaccgtttctgatagcaacctggactatgaggaacatggagaacataacaacaaagtggaccacaacaggcccaataggaccatcagaaagcctacatgcttcagggattttatttgaagccactatcccattccgcaataaaggaatgttttcattctgttatgataattctgttattagtgattagccctacacggccaaagttaattttatctttgtataggagttagaatataaatttaatagagtgagaatgaaatagacacaaaaaatattcagtttt

SEQ ID NO: 3793 - DNA, 711 bp, Glycine max
  unsure (1)..(711): unsure at all n locations
  Clone ID: GLYMA-23APR03-CLUSTER72617_2
ctatttctcgtcactcctaaatttccgcgttgaagtgcgattagaacttagaagcatcaattcaagctccaatcttcgactctgttcagtttctatgaaggagaacgtctcaccaatttgctccaatcaatccgtagggggatccaatctgcaagacatttggatggaagttccttgccagagaagatatggttaaagcaacaattttctattggggtcaatgatgtaactcgtgtccttgagcgcatgaaaccttgcacggagttagaaagctctactgaactcatctctttgagaagcaaccatacagcatcttcagttaagcttcaggctgtgcttgtagcttctgactgtaacccacgttggctgacgaaacatctcctaagtttggcttcatcaaggaatgtgcccctggtatttgttagagatactaaacaaggttctttgagactaggtgaacttgtgcaattaaaaacggccattgctatcggaattaaggttaaaggaagcaccataaataaaattattcagcaagttattcaaggcgatagatttgaactttcacctgaagggcaaaattcagcaagaatatttgatgcgcanagtaactttcaggaccctgacanaaaaatgctatcaaatgtaatttaatcaatatttcttggttataaaattattgaccttgcatttctaggtgcagttccttttttt

SEQ ID NO: 3794 - DNA, 2332 bp, Glycine max
  Clone ID: GLYMA-23APR03-CLUSTER7273_31
cagctacgtaggccccccccccgacacactatcctcttaacaaaacacaaaccagtgttcagtgttcagtgttcagtgttcagtgttacacttcacacagacaagaatccaagacaacaagggaaaccagacacatcattaacacacgacacaaacatcctcactactcttccatcttcattaagttaagtccttgtgggtcagggagcattcaagcagtgaggcccaactaattaacctgtttctctttactggatataaggcaattaaaccatgcaaacaccaaagacaagaaatggatcctctgatgtgcctcagaaggtgtctccacgtgctgtacgccaactcaagcctactactctggacattgattctgcatcttctttaagtcaggctactaaatcatcaaaagaaagaagccccaaagtcactgaccgcagatcacccagaagcccagttattgagaggaagcgccctagcaaaatatctgagttggaatctcaaatttctcaactccaaaatgatttgaagaaggtgagggaccagtttatcttgtccgaatcatgcaagaagcaagctcagcaagaagctgaggagtccaaggagcaactattggccctatctgcaaaacctgaagagtcacaaaaacaagttctggatctttgtgctactggagaagctcgtgttcttgagctccagaaaattgtagaagaacgtgatatggcatgccgatctgagcttgaggcctccaaaaagcagctctcagttgagtctgcttccctggcatctgcagcgaatgaaattcagttgctcaaggcgcaacttgaattggttgctaattgtgagagcgtgcaatctcaacatgcagaatcagcagacatggagctactaaaccttaagcagaacttgtcagaaactctttctcttgtggacgccttgaaaaaccaagtaagggattgcaaagagtctgaagctcaggcccaagcattggtcaatgaaactacggtgcaacttgaggccgcaaaaggaactgttgagttcctaagggctgatgttgcaagagctgttgatggctacaactccgttgctttagagttagaccagtctaaagctcgggtgaactcactagaggcacttgttagcaaaattgagaaagaccccatcaataataaatgcatcccttctgaaaatgttgcagatgaccataaatctgagcaccaacctgaaatattgaaagagggagaggatcctaatcagctggaagcagaagttgtttttttgaagtccgaggttgaacaattgagatctgctatagagactgctgagactaaataccaagaggaacagattcgaagcatggtgcagatcaggaatgcatatgagttagtagagcagataaaatctgaatcaggtaagagggaatgtgagctagaggctgagttgaaaaagaagaaagctgatattgaagagttgaaggctaacctaatggacaaggaaactgagttgcaaggcattgtggaggagaatgacaacttgaacctaaagcttgaagagagcatgtcatccaaaaatgagcacaaactcaaaagggaaattaaaagactatcagaatgtgtggcagaactgaaggcggatatgatggacaaggagacaacactgcaaagcatatctgaagagaacgaaatgctgaaatcggaaatcaacaacagtggcaaagcgagagaggaagttgctgctgaagtagagggagccaaggcggcagaacacgaggctctcatgaaacttgggattgtgatggaggaagcagataagagcaacaagaaggctgcaagagtggccgagcagctggaagcggcacaagctgcaaacttggaaatggaagctgaactgagaagactgaaggtgcagtctgatcagtggaggaaggctgcagaggcagctgctgctatgatttcaacagggaacaacaatgggaggctcacagagagaactgtgtctttggataacaacaactatatgtgctcaccctatgctgaagacatggatgatgatttccagaggaagaaaaatggcaacatgctgaagaagattggagtcttgtggaagaagcctcaaaaatagttgtgatgatgtctgatttatgaagtgttctgaaattgtagtccaataaatagtgtgttcatgtcatgtttattactatgtcttttgcaattgtctgacccctacattaccctctgcactgcactgtaaatcctgcccctatctgaaactgtttgtgaactgtacttgaaacattggcgtttaattattgaacaaaaaaaaaaaaaagaaa

SEQ ID NO: 3795 - DNA, 1146 bp, Glycine max
  Clone ID: GLYMA-23APR03-CLUSTER73269_1
catagtcacgtctcagtgtgtgtatttacatgtttttgtttcatcctgtaaaagctaaatccatgatgatttcttccagtctccttcactcacgctcctctttcaaattcaatccttggcttaaactgaatcatccttctcatgctgcaattggacttagactcagactcaaaccctacccaaccaatttcacctgcaaggcagttttctccgacgatgccccctttgccgccgcaatcggtgcttgcatgttcacttctttgcttttaccagtctctacttcctccgaagacgacgatgccgactccgccgtcaccacaaccgacgcaaggctcgccgtcatggggattctcagtttcatcccttatttcaattggctcacttgggttttcgcctggctcgataccggcaaacgccgttatgctgtctacgcacttgtttatttggctccttatctcaggtcaaatctatctctgtcgccagaagaaagttggctgcctattgctagcattctgttctgcattgttcacattcagctggaagcaagcattagaaatggagatattcaggggtttcaactattcaggaatgtcgcagatcagctatcatcaaataataggaagaaagatcatttaaatctgcatcaagaaatgtctgaggagggaatcaagaaagaaaagaagaacctgccacatgcccaggaacaatcaagggatattggaggttgggaagattcacagaggcctttacaaccccggcagcacttgaatgaagacttagatgatgacaaagaaagaaacaagcactaaacatggaaaactcactcaagtttcatgcccgatgctggtaccactcagctgcatgatgattagttttgaatcgttttaatggaactattgcgttgtcttaatgttgctcagttcctatgttaccatcttggattcttttcatggctggtgtttatctcatacttgtttactagatgatattgaaggtgccatagtataaaaacagagatatgcatacacctactctacggtctctacctctacctttcttccacctcattttttttcctctgtatcttttacttctcttttcctttcattatatatctggtcatatcttttaaaaaaaaaaaaaaaa

SEQ ID NO: 3796 - DNA, 1577 bp, Glycine max
  Clone ID: GLYMA-23APR03-CLUSTER73803_5
gcgactcagctacgtaggccccccccccccgaagataaatgggggctactgaaggacatgtaaaactgaaatctcaaaaccaccagccccactgacgacacatccaaccccaacagccagtgtgacagcgatatgaccctaccagttggaggcaattctcgctgctgactactgtcaagggaaaaaaaaaggttccaaggatagtaaaataagcctaggagaccaaaaccccaatttaaaaccgtgattactattcatgtgaaaagaaaacatgagatgaaataaaatgtataattgaacaaaagataaaacactaaatatatacttgaattttttttctcaggagtgcatttgttcccgactgaaatatatatatatatatatatataaagacattacagaccttggaaagcataaggaatgcctcgaacaggtagcaaaatcaaataataatacgaaacaaagaaacccgaacataagtgactccttgtaaagattaaaaacatgtgaaagataagaacagagtgcctttataacaacttgtcatacatataagaataacttcttgtaagtcacttttacacgtctcttacttgcttgatttgtatattgttcattcttcttttcaatattggttcgaaccttaacatgcaactccctaataaaatccgtcttatgttttccatccaaattagtaaactcattgattgaaaaaggcaagatatttaaagaagtcaaagattaaaatcatacacaactccaaaaggaaaattcgaagtaatagaataaacaatcctgttataaacaaattcaacatgtgacaaacatttctcccactatttcaaattctatgaatgatatcacacaacaaaatagtaaatattctattgaaaatttcaatttgtccattcgtttaaggatgtccatttcaatttgtctttaaatttatgcacatattcatcttgcacaattgcagacagtttaattacaacaagctattcatatatatctctatttatctatctagttatctaactatctgtgatgcagtgccacgatgacaaaattggttaaactgaaatctatctatgatgcagtggcacaataatagagttggctaaactaaaaaaagtttgctggctagaagtgcgtgggaaatttgacattagaaagcttttaccaggaattctatatcaagtgtcatttctaataatgttggaagattcatctgaaggttgggaagttccaataaatgttagacttgtccttcctggaggaaagagacaacagcacaaggtaaatttaaacgagaagttaagggagaattggatggagattctagtaggtgagtttgtggcatctgaaaaagatggtggtgagatggatatctctatgtatgaatatgaaggtggcatgtggaagagtgggctagtcatccaaggtgttgtcatccacccaaagagctaagtattaaaatagatgtattatgaagtcgatgccataaatgataatttgtattactagtaataaagcttttggattgatgaagtgtgctaatatcatctcttaaataggat

SEQ ID NO: 3797 - DNA, 1431 bp, Glycine max
  Clone ID: GLYMA-23APR03-CLUSTER73803_6
gaagaaaaatgggggcttctgaatcacatgaaaaactgcaatctcaacagcctcagccacagtcacaacatgtacagcaccaacagccacagccacagctacatgaacccaccagaagaagggaatcatcgttgctgcctcctatcaagggaacacaaaagcttccaaggatagaacaaaggcagtagtagataataatgccactatgatgccagtgaaatctttgaaaggactaccgatcccacacaactatgaacatatactgaaaagtaatgcagattcaccagttgataaatctctgttggataagctatatgctggggtgttcttagaccacaaaacaaaggcaagtttaaattcgttcatgatcagtttcaagagtagtttctttaatttcttacctcaccctttctccctaggttgacaattgaaagattcttgagagccattgaaatttgttctttaaattatgattatttcctgctaccagagtttgagctaataattcgatttaagagttctgttcatggttttaaattgtggtctgcaatagtaattatggctgcaacgcaaaggttttttgaatcaccacaattgcatcacaaccatattagttgcatttttttgcaattgctcataaggtaaagattttttgactcactgcaaccgcgatcccctaactgcaatttaagagtttatttaattacagattgaacaattttcatagtgattatcattatttgtaacacagaaatattgggtagagaagaagtccaacggcaactgtttcatgctgtacgcaagagcactctcaatcacctgggcagaaaatccaaactattggaaatgggtacagcacaaagaagaaagtggctcaatgatagagttggctaaactgaaaatggtatgctggctagaagtgaatggaaaatttggcactggaatgctttcacctggaattctatatcaagtgtcatttattgtaatgttgaaagattcggctcaggggtgggaacttccaataaatgttagacttgtccttcctggaggaaagaaacaacaacacaaggaaaatttaatggagaagtctagggagagctggatagagattctagtaggtgagtttgtggcatctgagaaagatgttggtgagatggagatatctatgtatgaacatgaaggtggcatgtggaagacagggcttgtcattgaaggtgttgccatcaaaccaaagaactaggaaatagaatataagctatgaaactctctctctctaccatgtgcacagaagtatctcattctcattatcatttttatctctctaaatagaatagagcaacatggtgtgcgtcaaaattaataataataataaaaaataaagaagttagacttatgttaaaaataataaaaaaatacaatcatttgattaat

SEQ ID NO: 3798 - DNA, 1676 bp, Glycine max
  Clone ID: GLYMA-23APR03-CLUSTER7389_2
gaaaaggaagaaaatcttcatccgctcaatcgaagaataataatagtagtcacctttaatgcttgtctgagaaatacaccagttggggcactcttctaaatccttggtacacaagttggctacgcagctttcaaactcacagccacactctttgccgccctagccacgacctatgcgagcagagttcccttcatttgtgctgtttctgcatcaccatgccctcctccgactaatggcctgatagctacagcacttgaaagtgaaaagatttaaaagcaaagacgaacgctacaccaaacccctcaccattgagatagaatgccaattctaagagatcggtggtttccctcttacgcgaggtgtgaaggccttaaaaccctaattcgacgccttctcatctctcttcccttgcatgttagaatattatgcgcatgcttgcttcctatttcacatctagcaaaaattaaaaggggagaaaagacaaatatatataacttttggaactccctttgttcatgcgatacgtccagccaagtagtttagcccttttgtggaaataaggcgggttcatcaaggctttaatggagattatgggaattgattgtctaactcgccataacattgcaagtcaccttcaaaaatatagatctcataggaagcatttgctagctcgtgaagctgaagcagcaaggtggagtcaaagggaagcaattgttggcagagggaagagagaggggagtccatggttagcacagagaagtgaacccttggcttacaccaaccatgggtttccctcccatgaccacaatgcaccattttagacctttacatgtatgggggcatatgtccatggagcagtggcctaagcaaaattcaccaccactctcatggccgccgccggctgcaccgccacaagagccttcattttggcaccaactggctcctaacgcactaatcccaggaacagcttgttttccacaacttctgacaccaacgagatttggaagtccccctgtgcccggcatcccaccccatgccatgtacaaagcagatcacgacattggcctccctggtccccttttcgacttttatccgtcaaaggagtgcatagatgcagctattggagatgttttatcaaagccttggctgcctctacctattggacttaaggctccagcgcttgatagtgtgatgagtgaattacaaagacaaggaattccaaacattccaccctctagtgcttgaaaccaacccttcatggaagaggttcttccctttcatatggtgtcctttaaaggccacttaaccctaattcgacgacttctcatccattagatgttgcatgcattgcgtatatgttgcatctaagctactatgtcagtgattcatatctttcttcttttgctttgccagtaaaaggaaaagaagaaaaaacttttaagccttttttctaattttcatgtgctataatgtattagttaatggtttcaagtagtggtcattatagccattttgtatatgtacggttgtaaaggcagttattttgtaatagctgtataagctgaggaaatcctaataaaggactttgataaaataaatatttttcgggtaattatcctaatatgttggggcacactcttgagttgtgtaagtgaaaaaaaaaaaaaaaaaaaaaa

SEQ ID NO: 3799 - DNA, 823 bp, Glycine max
  Clone ID: GLYMA-23APR03-CLUSTER7395_2
cggccagaaagaaatataattaatgtatatatcagtgtacaaattgatgttatgtgtgtgtggagtacttctaattaatcgatcaaggaaattgaactacatagtaaacatttccacgggcttttctttttctttccactctaatcctatgaatctgcatggcgaaaacctaatcttgtattctgaaatggtttcaagcttaggagaccacacctgatccttagacttcacaagctgttcatagtgcttttgcaactcaggagtactacacagaaaactagaggggctaccaggggttgctccaacaccattatttttgttgtgatctccaccacttatgagcctagtgatgaactctggcatgaccttaatagcaacccttccatcagaacccttcaagtactgaaaagggcatgcaccaaacttgataggggacttgttagggcaagatccaagggcagaaatggaagccacggtgaggttgttgcatgcaaagagatcaatggggagaacaaagtaggtttggccgggcatgagtttatcatctatggagagaacaggaattggttgtccaatgaagaaagagtctgcatgacaaaccatcatttcagggaactcaaacatgatctcaccagctatgtgtttccctttaagggatctcgatgttccttcccaaaatatgagcttcacggattttgatgatgatgatgaattggtgttgagttgaaagcatggagtcttcaatgcgtttcccatttgaataggagagaataatagagagagaagtggtgctagttagctgcttagacaagaatatgatgaa

SEQ ID NO: 3800 - DNA, 1027 bp, Glycine max
  Clone ID: GLYMA-23APR03-CLUSTER7422_2
actgttttctcttaccataatcatcaatggcttccttatccctctcctctcccccatctctctcttccgcacaccacaacgcctccacgcgccttattctacgcacccctaactcccttaaactgcgcactccaccccactccctccccgccatccgcgccatcaccctcacccaggacgacctcaagagactcgccgccgacaaggccgtggagtccgtcaagagcggcatggtcctcggcctaggcaccggctccactgctgccttcgtcgtcctggcgggtgagggtgatggcgcggaatgcacggagtacgtgaaggagtacatgaccgggaaggggtacgcggtcgacctcgaaatggtctccaaagaggcggaggagttcgcgaggagtgtgcctctcggcggcgacgggaaggacgcgtggattttcgacatcgacgagactctcctctccaatctcccctattatgccgcacacggatacgggcttgaggtctttgaccacgagaagtttaacaattgggtggagaagggtgtagctccagccattgaacccagtttaaagctctatgaagatgttttgaatctgggattcaaggttattctactgacaggacggagtgaaaggcacaggagtgtcactgttgataatttgatcaatgctgggtttaaggaatgggaccagctcatactaagaaactcagatgatcaagggaaacgagctgtactctacaaatcagagaagaggagtgagatggagaaagatggatacaggattcttggaaattctggtgaccagtggagcgatttattaggttcttcagtatctgttcggtccttcaagcttccaaatcccatgtattacattccatagtaaatgtctcattcatttgcaaataattgctgtttgaattgtacataacgaaagtggatcaattcgtatactgaatatcatttgcaaataattcataaactgaatgtcattgaaattctaatacataccgactaattaaacttgtgtta

SEQ ID NO: 3801 - DNA, 2187 bp, Glycine max
  Clone ID: GLYMA-23APR03-CLUSTER7454_1
ttcattccgcatttgatggcagaggaggaggaggaggagaaggaggagaaggaggaacccaccaacccacctcgtaattcttcccattttctttgatcctaccttcgttcttcgtcatttctcttcactaacctctctctaaaacctctgcaatttatttatgattttgattcctggctttctcattcttttttgaattattcctcttttccttactctcctctttgttctttttctttaacacgcgcacacacacacaaacacgcctaaaaaaaatttaaacccgaatccactatagaaattatataacttccgtataaacaaaatatcccgcactccgccccaaaaaccacacctatttccttcaatttagcctcgattcttccgccctttgttcaaaggagaatattctatttatttatttatttattttcttcttctgagtatgaagttatagcgaatttgagtgagtgaatgggttggctcagcagaatttttaaaggctcagaccataataagctttcggaagggcattactataaagaggatgcgggttattacttgccatccacttcgggggtaacaaatgatgcttggaaccagaaccagaaccagaacgagaatgaagatattgatcgtgctattgcgttgtctctggtggaagagagtcggagagcaaacaacaatgtaaatgactacagatcacaattagaagaagatgaacaacttgctagagctatagaacaaagtctaaatttggagtctcctcccagatatggaaacgaaaatatgtatcaaccaccaattcagtatttccccttggggtccaggatttgtgctggctgctatactgagattggttttggacgatatctaaattgcttgaatgcattctggcatcctgaatgcttccgctgccgtgcttgcaacctaccaatctctgattacgagttctccacatctgggaattacccttaccataaatcatgctataaggaaagctaccatccaaaatgtgatgtctgcaagcacttcattccaacaaatcctgctggtcttattgaatatagggcacatccattctggatccagaaatattgccctactcatgaacatgatggtactccacgctgttgcagctgtgagcgaatggagtcacaagaggcaggatatattgctcttaaggatggccggaagctctgcttagagtgtctagattcttctatcatggatactaatgaatgccaaccccttcatgccgatatacaaagattttatgatagcctaaatatgaaactggaccagcaaattccacttctattggttgaaagacaagcactgaatgaagcaagagagggagagaagaatggccactatcacatgccggaaaccagaggactctgcctctcagaggagctcagcactttctcgagacgacctagacttgggacagcaatggacatgagagcgcagccgtacagaccgactacacgctgcgatgtgaccgcaattctcgttttatatggtcttccaaggttgcttactggatcaatcctagctcatgagatgatgcatgcatggctgcggcttaaaggttatcggactctaagtcaagatgttgaagaaggtatctgtcaggttttggctcatatgtggttggaatctgaactttcttctgcatcaggcagcaactttgtatcagcctcatcctcatctgcatcacatacatctagaaaaggtaaaagacctcagtttgagaggaagcttggggagttcttcaagcaccagattgaatcagacatttcccctgtttatggagatgggtttagggcaggtcaaaaagcagtgcgtaaatatggtctacaaaggacccttcaccatatcaggatgacagggacttttccatattaagtacagagattccccatttaacagattgtttctcattctttctagatataaagcctggcctgttactattagagaaaccgaggccaaggtgcttaggcattatagcttcgacgaattggtgattttttgtacttgtaattattgataccgttgcggatatattgattacattcacatttttttttaatgtatcacactgctactttttggcattaaatacacaccgaaagaaaggtaaataatgaaacttagcaggcgcgtgtcaggatagcagca

SEQ ID NO: 3802 - DNA, 866 bp, Glycine max
  Clone ID: GLYMA-23APR03-CLUSTER7483_2
gctacaaacgccacacttcacacactgtacagtgcctcctttcaactctgcttcaattagggttttcccttctccgagatcaacgccaacaacaacatgaacatcttcaagaagaaaacctcacccaaagaggctctgcggacaagtaagagggaaatggctgttgcaaccagaggaattgaaagagagataacatcgcttcagatggaggaaaaaaaactggtggcagagattaaaagagaagcaaaaacaggaaatgaggctgccaccagaatcttagctcgtcaacttgttaggttacgtcaacagataaccaatttgcagggaagtcgtgctcagatcaggggtgtagcaactcacacacaggcattatatgcaagcacttcaatctctacgggaatgaagggtgcaactaaagcaatggtggcaatgaataagcaaatggcaccggcaaaacaggttaaagtgatcaaagaattccaaaagcaatcagcacaattggacatgacgattgagatgatgtcagaatctattgatgaaactttagacaaagatgaagctgaggaagaaacagaagagctcactaaccaggttcttgatgagattggagtagatattgcatcccagttatcttctgctccaaaagggcgtattgcttcaataaatactgaaaatgttgctccaagaccagcagaatcccaagatgttgaagatcttgaaaagagattggcttctcttcgaagaatataaatatctgatcatctatatgttaatgtacaaatcattatgtatactatagcaatggagacattgtattattggcacctcatataattaccaattttatgctaaatgtgtgtttggat

SEQ ID NO: 3803 - DNA, 1392 bp, Glycine max
  Clone ID: GLYMA-23APR03-CLUSTER74_3
atcacaaatccgcgcttattcccaaagccccaatccaatccattccaattcccattgttttcttttctcttccatccatggattctctgagttccatcaacggcgatttcggcttcgacggcggcacggatcgcagattcgcgttttcgcgccaagcctccttccaacaacctcacacgccgatagacattccggcgcacggccactacgaccaccaccactactggtccccgcgtgacgataaaccctccgccgcctctctccaaatatcctctctctcctccttcgttttctccgttttccgaagcgttaggtccggccacagttacatgaagaggctctttctcatgatctcgctcaatgtcgcgtactccaccgccgaattgctcactggactcttcaccggtcgcgtaggtttggtgtctgatgcggttcacttgacttttggttgtggtcttcttacattttcgttatttgttatggctgcgtctaggaagaaagccgatagagagtatacttatgggtataaaaggctagaagtcttgtctgcatttacaaatgccctgtttcttttgtttatgtcattctccctagcagttgaggcacttcatgcattcatacaagatgaatcagagcacaagcattacttgattgtttctgcagtgaccaatttatttgtgaatcttgttggtgtatggttcttcagaaactatgctcggattaatctcacttacagaaatgcagaagatatgaataatcactctgttttcctgcatgttgttgcagattccattcgcagtgcaggtctgatattggcatcctggttattgtcaattggggttcagaatgcagaagtcttgtgtttaggacttgtttcagttgcagtttttatgcttgttctgcctctctttagggcaactggtggtatcttgctccaaatggcacctcctagcatcccaactactgcattgaacaaatgcttgagacagatttctgctcgggaagatgtaatggaagtctcccaggctcgtttttgggaattactgcctggtcatgtgtttggttcacttatagtacaggtaaagaaagggaccaacgatcggccaatactagaatttgtgcatggtctattccatgatttgggtgtacaggacctcacggtgcagactgatgatgcatgagactttcttaacacttttatttacgccaacagttattactaaggattgtatacacattaatgtcattgtttattactggtggaaaggatggttaacgtggtttctcatttagaagggattattgatttttaaccaaccggcattgtttttcctgccaaaattaaccagtttactttagtcactatgtaaatatttatttatgcccctttac

SEQ ID NO: 3804 - DNA, 943 bp, Glycine max
  Clone ID: GLYMA-23APR03-CLUSTER7503_2
aatttattctaaataaagtaataagagaagccctagtgtagcaggtggttgcaacgcaacgcatcccataaacccttcctattggctatgcattcccatatcgagagaatcctatggagcgaggaccaaatttctcgccgtgtctccgagctcgccgccgaaatctccgccgacttcggcggacaatctccggctcccgtggtcgtcggcgtggccaccggtgcattcctcttcttggctgacctcgttcgcaaaatagatctgtccatcgccgttgatttcgtccgagttgaatcctacggtttcggaaccgtttccaatggcgcacccaccatttccttcgatttgaaggtcgacgtcaacgcccgtcacgtcatcgtggttgaagacattgtagatactggacataccttatctaaagtcattgggcacttgaaatcaaagggagtatcctctgtttctgtatgcactttccttgataaacctgcaaggagaaaagttcattttcagttgctgggtgaagggaaatactaccggggatttgagtgtccagactatttcgttgtaggttatggactggatttcgctgaactctatagaaatttgccttacattggtgttttgaagcctgaactttacaagtgatcttatatttcctagtgaaacctgtcacacgtggaatcttaaagcattaaacatggttctacaagtttgtctgccacacattcttccaagagtagcatagaaactagaagaaaatgaataacagggccttgctgtgtgctttccatggctatcacgaaataaattgtttcagagctttacaatttcatttacactattatcttattaaagcaatgtgacagcgtgttacttgtactaattatcagacaaggaaatgtttgtcaatacaagatcaaatcaacgggcctcgttttttgtg

SEQ ID NO: 3805 - DNA, 1007 bp, Glycine max
  unsure (1)..(1007): unsure at all n locations
  Clone ID: GLYMA-23APR03-CLUSTER75330_1
acaattccaagaatattttgaagaattccattttgaatatcaaatttctgaaattacacgcaattatgaagtcttctgatacctctccacagcacgatgactatttactacacaaaagcatttctgttgatggctatacttacaccaacacagataaagaaattaccgcgaagggcacaggaaaaagcagcaattttacacataggattcataaccatgtaaaaatgggtcctaatctgtctgagattctgaagggtaagttgagtttgggggcaaggattatacaagaaggaggaagagggaacatcttcaagagtgtttttgggatgcaagaaaaagagcaattgcttgaaggcctctcagtgttatttatataccacagctggtcctattgctggaattctctttgtctcaactgcaaaggttgcattttacagtgaaaggcccataaccttctcttctgtgacaggagagttagtcagggcaccttacaaggttttgataccaatagggagaataaaagaggtcaatgaaagccagaatgtgagcaaggcagaacagaagtatatagagatagtgactgaggatgattttgaattttggtttgtggggtttttgcggtatgataaagctgtcaagcatatcaataaggctatttccatggcctataaattttgaaaggagaaaattatcgttaagttcctatatattttgagatattaatgtgaatattganatgtnttgcaatgtgaggttttaagtttttgcttgttgcctgtcctgcaatagtttcatcccttatntnttggggattaanagcttttagtgacttagctacatgccncanaaaaagacatcagtgttgtccatcgtgggagtgggtgaatgcaacatggcatagaaccgtgtcaaatagggnccaaatgtanaaaatcagaatacaacagctagtngttaatgaaggcccaaaaaaaaaaaaaaaaaaaacacccaaaaaaaaaaaaaaa

SEQ ID NO: 3806 - DNA, 1270 bp, Glycine max
  Clone ID: GLYMA-23APR03-CLUSTER7550_3
ttttttttttttttttcgattacaatgctttcatgcgtgtctaaattcatgttatgggtttcttttcccatgtagcaaaaaaaaattcaagttatagagagttggaaagcattttacagcatgcttgatgcttcaaaataattgctcgaggagattataaataatctatttgtgttgtattctgaaaaaataagagaccgaacatattcctacacacaatcactcttcatgcatgtggtatcatttcccctccgtttttcactttcggtgaagattacatagtagtattgcacttttctgttctatcattcacggtgatgatgaagattaccctgctgagacttccgctctctcttaaaagctttaaggagatcaatgccaagaccaatgttgagcaaattcatcccagccatgcccaacagagccagtggtagctccatacccttttcaaatttgtatgcatccttgatgagcttggctgtgatgagaacgtgaggtacagatcttgccacaaagaaggtaacccaattcaaaaaccattctaacttaacaagaatgctctttgcatcccgaataccggccattcttctcacttttctcaaatgaagaaagatggaatgcagctcacagataagagtgagaataaggtagttgatggtaacatttcgatacaaagcaagagtgaagcaaataaggagaaccagatgatgcacaaggatagaggggatccaaccattatacaatcggtaatgaagcatatcccactgatcatatgcaaagtaaccacaagaaaagctcaacgcttcaaatgcccatgaccaagcatcttcgaccaactgtgagtggtcagacattccacttggcccattacttaacaactctctgaacaagatgaagatcactgaggaggaggtgaggagagagtggagaagagagacggaggtgttaacgaagagagcgtctttgtctttatgtggggagaagaatcggatgaggcagttagatgtctggtagaagatagaacccgcgatgacagagagaagctcccagcgcttgttcaacaaaatctggaaacaaagggaagcgaaccagagaattagagtggctaagaagaatgtctccaccgtgttccgctttccaccacccattgcttcttctcgcgccactcgcatcccttttattttgcttctcttctccgattctcaatcgcaataaatttatcaattgcttcacttcaaggaaatggtatcaaacaaaaatcaaatctatc

SEQ ID NO: 3807 - DNA, 1345 bp, Glycine max
  Clone ID: GLYMA-23APR03-CLUSTER7550_5
tttttttttaagaatgaaaaatatatttaagccatgctaataaataacaccaaacaagcaggtaatttgcaagagtaaccatgaaaggctgtagagtctagatcattgtaagtaaatgctgatatagatcaagcaattgttgtacactgtatacatttcacataacacattccattatagtcacagcagtgcactcagcatctcattccaaatatcaggcaccccagggaggcaccaatggctgcaatcagaggaatggccttttcctggtttctgcttctcatcttggcttattaccctcctatataccgagggatgcccgtctctgcgcaacgcggtcattgttgtgatgtcttgcagatatactggaaatctcattctcttcaacactccttgtagcactgccaaaggttcaggaacatgtaggtggctggaaaatggtagaggctgcttctgattgtagcatttccaaccattttccctgttatgcctaggagacatgcttctaaaaatgacttcagttctcctagggtttagattttgatccacccaccttgcccatgtactgagtcctttctggtaagcaaccatgggattcatattcctggtgagattgtttccctccaggtagtaatcccacgagctggtttgatctgggtgagtccaccaatgggctgaatcaaatacaaggatatcaactcctctccaataccttgcattttcttcaatcaaatcaagatgtaaaattctcttattttctgaacctttcttcagttctaccaacaggggtgcccagaaaaactcaattgaggtctcaaaatccatggcatggaaggccattccaggtccgttataagtcaccctttttcgaccagttggaataactccttgcactaagcaaacaagagattcccactgatttctcattattgaatcgcccaccagcattattctctttcttctcattcttcctagaaaccttagtgcatcaaatcttggcatggtacaaccacttggcttccacttccacttctcatagtcagaatcaggtctcccattcctttgacaagtaactgcagagctgagatatggacaactagagtcatagagagggtaagagtcatcataaacccattttccaacagaaatgtcacatctcttcctagaatctctgttgctttgggccatgctaacatcatcatcagcttgcaccagaatgccaaccccatcctcagggttcagaagggacaatgtgcagtggaacaagctcaggaaggtaccacacaacaagaaagacgaaacaagcaagtgaatctttggtgttgccatggaaaagaaagagtgt

SEQ ID NO: 3808 - DNA, 1168 bp, Glycine max
  Clone ID: GLYMA-23APR03-CLUSTER75515_1
atcgtttgaaaataaaaaagaacacaaataacagaaagacaaggtgcaagatggtgcaggttcagtccattaccttgaagcatctctccctaccaacccatactttcgttcctccaaagttcaacattcctttgaaccgcaatttgtctttcacgcctaaattcacattctcaacatcactctccgtcagatgctaccaccctaaccttgtccaacccaagccattcccaccactgccacaacgccctccagttgcagaattgccacagcaaagggtgtacgtgggttactccgtttacacgaggaagggcgtgctcaccgtgactcctagacctccggaatttgaatcgaaaagttctggggcgttcaaagtgtccaaggaaggttatgttgtgctccagtttgctccctcagttggtgctgatgagcccatatatgattggaaccaaaagcagatattctcactatcagtgagtgaaatgggaactctaattacccttggtgcaagggattcttgggaattttctcatgagactgttaagttgaaaagcaatgaaactgaagttagaaaagttttgaaggtggagccacttctggatgctactggccacttatttagcttaagcgttcaaaagaagcctgtgaacatggagggaattcagaaaaacatctctctccctgttacaagggcagagctagcagttttaagggtgcttttcaattatatcatgccataccttctaggttggaatgcctttggaaactccataaagccagaggtatatagtcaagtgaataataccaagtccagatatggagcagacaatgaatggaacagatagggatcactcttgcaattactttcaaaactgcaggcagttacacagccctgtgctaccttctcaactttaaaatgtgttgaatctcttcatctggtagcatagaattgtttgagaaattgagtatcattattagaacactcatatttaattgaattatttacttatttgttaaaataaattatttactcctttcctttgtttttatgtggctattacttttcctttttgtttttgaatgtagttagcgtgtattgacagggtaaaagtgttttggtacaaaaaaacctccaattgttatgtatgggaagatcgttgaattttgtatt

SEQ ID NO: 3809 - DNA, 1625 bp, Glycine max
  unsure (1)..(1625): unsure at all n locations
  Clone ID: GLYMA-23APR03-CLUSTER76005_1
anncggggntgcaaggaatttggcnnggagggcaaccctagcaccccaggatcattcgttcccccctgttgccccaaccctagcacccccttccctggcggcgccaccgcagctgcgcccttccctgccggagtgagcctcaaaccccgctgcagcaaagcccttccctaattgtgcggcgcaaattgagaccccctcagttcccgcccccattgtgcgacgccggcgacgaaggaagtgagaacataagcattaagcatcaaaatggaattagcagacagagctgttggatttctgttatcctttatcagcttatcaatatttacctattatactttctgggttatcatcctgccatttgtggatgatgatcactttgtgcacaagtacttcttaccccaagagtatagccatactgataccagtttcagctggtgtggcacttctttgcctcttgtgcatatttattggattcgtgatgctcaaatccaatgactggtaaccctagcaccccaacctcattcgttcccccctgttgccccaaccctagcacccccttccctggcggcgccaccgcagctgcgcccttccctgccggagtgagcctcaaaccccgctgcagcaaagcccttccctaattgtgcggcgcaaattgagaccccctcagttcccgcccccattgtgcgacgccggcgacgaagggaaagtatttggtggtttgtgatgtgaatttgagagcctccagtgttcagcaagtcaaaatttgggcctcaaggatcttattgtttgcagagttggacagacagggtctgaaaaagaagtgagaacataagcattaagcatcaaaatggaattagcagacagagctgttggatttctgttatcctttatcagcttatcaatatttacctattatactttctgggttatcatcctgccatttgtggatgatgatcactttgtgcacaagtacttcttaccccaagagtatgccatactgataccagtttcagctggtgtggcacttctttgcctcttgtgcatatttattggattcgtgatgctcaaatccaaaaagaagaaggcctaatggctaatactgtcaatttgttgcacaatttgttctaatttttgaaacagtgaatttattaaatgcattttcgatcatttcgttcgaaaaaaaaaaaaaaaaaagcttatcgataccgtccgaccctctcgaggggggggcccgggtccaaaacccaaactctccccaagtggcgggcggcgtaactcaccgccctctgccccccgttcttaatctacacgcccccaccccgataaatttctcgacattttttctccaccctctctctccctttcatatctctaccactctaccttctccacgtccacatcattgacatgatacactccccccctcttatccctactctttccacaccctccagaacccggatccctcaatccgtaactcctcaattcctatcccctcatcccgactccctatccccctacccccccccacctctttcccctttctccctcctttgctactcctccctttctttaccatatctacactaactccaattcccctctcctcccaccacacccatcct

SEQ ID NO: 3810 - DNA, 895 bp, Glycine max
  Clone ID: GLYMA-23APR03-CLUSTER76005_2
gggggggggggtagcgagttgcgacagatgtggtggagtggaaggagggtaagagtgtgggtatagtgcagggcgaccggtaggatgctagtaggtgggaaagctgatgggttcgaggaggtccacttgggtctgcggtgtggaacaggatgtgtgtgggtggagcgggagtagtggcgacggtgaggggcgagagtggggggggtgcgcgggtggtcctgggtagggtgtggggggagcggtggacggtgggggggagtggggcgggtcggcggtcgggtggcgtccagaggtgtgaccggctgagttgggggctggctttttggggtcgcgggggccagcgcgaaagtattgcgcgtttgtgaggggaattgaggaggcttcagtgttcagcataggcgaaatttgggccctcaaggatcttattgtttgcagagtgggacagacaggctccccccccccccgtgagaacataagcattaaacatcaaaatggaattagcagacagagctgttggatttctgttatcctttatcagcttatcaatatttacctattatactttctgggttatcatcctgccatttgtggatgatgatcactttgtgcacaagtacttcttaccccaagagtatgccatactgataccagtttcagctggtgtggcacttctttccctcttgtgcatatttattggattcgtgatgctcaaatccaaaaagaagaaggcctaatggctaatactgtcaatttgttgcacaatttgttctaatttttgaaacagggaatttattaaatgcattttcgatcatttcgttcgaattattagtagccactttttgtttgtcttcgcatggaaatacatggatgagttaagtgaggcatgcttcaaaaa

SEQ ID NO: 3811 - DNA, 2010 bp, Glycine max
  Clone ID: GLYMA-23APR03-CLUSTER7627_42
agttttatttcaataaactacggaatttttccttttgcactcttgatacaaatatttagtaactatatgctacctctaaaggagttttagtttacgaatttgaaggtttttaatgagttagttgaaacactttacacttgtttgaatcatggatatttaagattattgtagaagtctctgggtgatggctggttcagaacctgtaagtgcagagggagagagtatggctgtggatgctgccccaaggaagccccggattctacttgctgctagtgggagtgttgctgctgtcaaatttgcaaatctttgtcattgtttctctgaatgggcagatgtaagagcagtttcctcaagtggatctttgcatttcattgatagagcatcaatgcccaaggatgtaattctatacacggatgaggatgaatggtctagttggaagaaattaggtgatagtgtgcttcacattgagcttcgcaaatgggcagatatcatggtcatcgctccattatcggcaaacacccttggcaaggtaaacacagatgtatcgttcgagcctgggactacagcaagccattctttgttgcaccagccatgaacactttgatgtggaacaatcctttcactgagcggcatttcatctccattgatgagcttggcatttctctcatcccgcctgttacaaagaggttagcttgtggggattatggcaatggtgccatggctgaaccctctaccatttactcaactgtaaggctcttctatgagtcaaaggctcagcaaggtaatggtgatatctgacaatgttgacaatctgaaacaattatgaatggtgtgctaggacttgtcttgaccccttgttttattgcatttgtatttctcttgcatctagtctgttcataggtggtgtgaattatttaggacaaaatttagatgcagttctttaggtgcttttggtgacgtgctctaatttgaattaaatatcagcatagtttaaaactccaattctaattggagaacaccaccaaaaacacctgaaaaactgcatgcaggttttttcctattatttgttgcagaaggaatgtgctgcagactcctttatgtctcgtagagtgatgcttgtatacctcattaatcactggactagttgtgtaggatcttgtacaccctcggatatgtgcccatgtagcatcatttcatgtgaaactttagaaacatgtaagtattttgccatctgtagaatggcctcaaaatacttgaaaaacattatctgaatggggatagggcattttacaaaatatggcttcagggtcacaaactaaacctgttagtgactaaacagcaagccacaaaatctgaagttgctagcaatcagacagcaaccacaagatgaactttttatgcagaaaaaatcagattatatgcagataatgaccttttaacgctacaaaatgcaaacctgttgaataaccaaacggtaagcatgaaatgaacatgtaaaaaatcttggcaaatcatcttctttgtgcattatgtgaatctcaacttcattttatactactatccatctatatgaactttacctgttgtcataggtagagctgtggtaaccttaaggtgaatgaaggggtagtcctacgcccccattcatggtagtcaatagcactctatagcaggataacggagcgcagcagccctgagttactatggaagtcgaaatcgctgagcgattttcaataaccgctgtagcggctgcaatagtggtctaaatacagcttttcgggtgctacagcgcactgccataatattagacttcaaattctatatttactccagaaacatcattgtttgggtaaaaatttacaaaaaagttacccctgttttgaccctttattcctttacacattacaagattatattttatcctatgttttgttctttctttctttatactttccactcaattcacattttgtcaattttattttatctaatttgttatgttctttttct

SEQ ID NO: 3812 - DNA, 1486 bp, Glycine max
  unsure (1)..(1486): unsure at all n locations
  Clone ID: GLYMA-23APR03-CLUSTER7627_44
atattatatattatagataaccctaaatctgaaactaccttcactccgctctgccacggctgagaaaatagcgacgcggaagcacgctcgtcttcacgatccggcgcggcgtgtcctgcgattccgctctccgacgagtcggcgcagggtaaagaatcgcgcgattcgtctggaaatcgagattctagcacgattcatcccagatatagagattcaaccacgattctggaacaaaaacgaaacaacctccgattcgtatcggtagcagctggaatcgtatcgaatcgtgcgatacgtatcgtgaatcgtacgatactaactaccgtgctaccgggtgctttgctcttcaattctgcagaaattcagattggtcaattaaattaaggggtaatgggtttgttggaacataggcttggcttgagttagatttttgtcacaacttgaacgataagttcttgttgattttcattctttactttcttcatttttttcatccttacctttaaaatctgatattgctggttttggttaggtaactttggttctatatttttctctttgtattgtaatgtatccattcattatttgctcctttatgaatatccaaaatgagaatctaaatctgaaataagaaatkgctggacctagcaattttggtttcaaatcttgaacckgctggtcctaatcttcttttgcgagtgctttccttctttgtgttngtngamtatttcagtactcagaamggttgtaacatgatatgcagctttcttttcactccaatgacgaagaagaattctaaaaagacaacaagccagttacaagagaatacngtkgcagaagaggagagaccttcttctacacccaaaaaagcagttaatgaaattgatgaaatattcgctggaaaaaagaggaagmaatctgaaatggtaaacaccggaaaacctgatgaagtaactaagaagactgacaaaacgaagaagaaaaagaagaatatgaagaggaaaacctatgggtcagatgatggcaagtttgtagaccggccttctcgaccaagaaagaaaacagaggatggacttaccatctacaccgaagaggagttaggtattagtaatgcagatgctggaaatacccctctctgcccatttgattgctcttgttgcttttgatggtagctgtataatgttatatgcacttaattccttgctgtggtgattgacagtgttgtgattgtcacttacagtcttggatttgtaagctagggacatagcttttcctttattacatttatagttgggcctaaaatggcttgagttatcatgtgctaagcttgaattctttagatctagatatgattcatcaggtgatttcaggtagaattttgcagcaattgatctgcctcccatgtaacacaattgtttaagcattacactcatgccagcatttttgagaaatttactgtaaaaggaggaagtgtgcttctgggtgc

SEQ ID NO: 3813 - DNA, 1942 bp, Glycine max
  Clone ID: GLYMA-23APR03-CLUSTER7669_2
gcggtcgcacccggggtgcccctacccatatccccggatcccaccacgcgcgcgtttttgacagagaactggtgacccacattgggcattggggtggcctctttctttgcttcttcttcccaattgattgaagcaaatccatctatcggagtctgcatgattgctttagcattttttaaaaaaattcttctgcaatctgcttaagaattcaagtgaatatctgaggagatttctttttgtagttttaagtatataatccttttatcaatctctacaatactttggttagagagtttttctctctttttttcttttgttttctagtaaaaccaaaaaaatccacatgtttgtgtttgttaaggaattaggaaaacacacaaacatgataacacaagccaacaaaacaacaattaaaacacacccagagagagaggtacagagtgaaaacaccctttaaggctttgctttaactactgagctactacagaagtggccctcctttttttttttcatttctagttttgtaccttcctttctttcttgtttcttctccctaaccattttttctctcgtctctcaagcataataggttattaggtgattgattctgttttcttcatagcaggattttcaataaaccaccatccaatacaatctcactcaagcaactctttctttctttcttcttcctttgttgcctttgaattttctctaatccttgtggccaaaccaaaccatattacaaattgatgtctaatttgtacaatcagatttccttaccttcaccccaaagagccaattcaccaaacataaacatgagaggcaattttgatgttgatagtcagtacttaacacagctgcgagaagaacgacagaagcttggacctttcatgcaagttctacccttatgtaccagactccttaatcaagagattttaagggttaccggaaagaatgaattattgcagaaccaaggatttagtgactttgatagaatgcgattcataaatctgagtcatatggcttctccaaactcaacaccaaacttcactggctggaacagcctgtcacatgaactggtgtgcagggactaaacatggattggcaaacttcaccagttgttccaagttctcccattgtgaagaagatattgcgcttggatattcctaaggatagctatccaaattttaattttgttggccggcttcttggccctaggggcaattcactgaagcgagtggaagctactacaggttgccgtgtatttatcagagggaaaggttcaattaaagacttagacaaggaagaaatgctacgaggaaggcctggctatgagcacctgaatgatccacttcacattctaattgaagctgaactacctgccagtgttgttgatgtaagattgatgcaagcacaagaaatcatacaagagctacttaaaccagtggatgagtcacaggacctttacaaaaggcaacaactaagagaacttgctatgcttaattccaacttcagagaagagagccctcaactgagtggtagtgtctctccattcacttctaatgaaataaaacgggccaaaactgatcaatagtgattatatgttgagaattgttgcattgctttaatgcttcctgtaactaaattttgtaaagctgcaatggaaagaccttgctgatttgatgctgctgctttggagaacaaaaataaaagggagaaaaacatattcattgtcacaatgtcactagacagaaaaaccattaaactatattttgacctatttattactctatttgtaatgcgtatcaatatgatgttgttgggatttttattatttataaactgtttatttatagtataaaatggaaagatgtgtttccatatcagatgaaaaagaaaaggctgaagctgagaaaatactgcaaataaagaaagcggaagg

SEQ ID NO: 3814 - DNA, 1669 bp, Glycine max
  Clone ID: GLYMA-23APR03-CLUSTER7750_1
tcagctacgtaggcccccccccgcaagtgccttacacgaattaacgtgtctctcttcattctttctttctttctcttgtgtgtcctctaagtcatcaatttaaactattttgcagcagtttgtgacgccgccgccgtttgttgtgggggtggcggtgacagcaagatggatatgtgtaacgtagtgcatgcattaaaaccagttatgctaatggtgctggtgcaggttgcaaatgcttgggtcaatgttctctacaagctcgcgcttaacgatggcatgaacttgagtgtcattgttgcttaccgttatgtttttgcaactgctttcattgctccacttgctttcattcttgaaaggaagacgaggacaaagatgacttggaggatactgtttcaggcatttctttgcggcttaattggtggagtattgcctcaaaacttaaacatggaagcgattgctttaacttcagtaacgtttacaaccgccatatccaacctcattccagccatcacttttatcatatccctctccttcggattggagagattaaatttaaaaacaaaaggagggaaagcaaagataattggaacgataactggaattagtggggcaatgatactgacatttattaaaggcccagaagttaagatgttgtctttccatgtaaaccttttcaaccaccaaaacggccatgtcgtacattcacacgcttcttcaggccttatgaccatatttggtgctctcgcctctgtcgcaagcaacgtctcttatgccatgtggcttatcattcaggcaaagatgagtgaaagatacccgtgtccttattcgagcacagcgttgatgtccctaatgggggcactcttatccatttcatttgctttttgtgttgaaagggatttgagtcagtggaggttggattggaatgtcagactattgactgtggcttatgcgggtatagtagtttctggagtgatggtagccgtgatttcgtggtgtgtacgcacgagaggtccactgtttgtctccgtttttagccctctaatgcttgtcgttgtggcctttgctggatccactattttggacgagaaactataccttggaagctttattggatcaatgttaattatttgcggattatacgcggttctttggggtaagagcaaagagatgaagaagaatcaatctgttccgccagaaagcatccataaatctgacacagttgaaataatggtcaaatctcgcgtagaagataaaagcaacaataagagcaataccctcgttaattctgtaaatgcgactgcggataataaagattcatgggaaaatagatgtgaaaacaatgtaacacatatacactgctgcaaggagcgagaagaagaagtaacatctcagaatggctcacgtacctaaacattgcatgcatgtaaggcactaattgcacaatgtagatagcttgccatccttttccaaccgccccaacatgctgtgggcatttttttgtattgttggagaaggtaaggcacgactagaatgtcttcttttctcttggtccttcctatatgttgtaattgggtgcttaaacccaaattgcaaaaacaaaggttgtattcaagttcaacttacaaaaaaaaaaactgagaagaaaaaaaaaaaaaaaaaacccccaaaa

SEQ ID NO: 3815 - DNA, 1056 bp, Glycine max
  Clone ID: GLYMA-23APR03-CLUSTER7756_14
actcaccacttcaaaacactcataacacaaggcagaaagcaagctcatcctagagttttaaaaatggcagcagcctcctccatggctctctcttccccatccttggctggcaaggccgtgaagctgggcccatcagcccccgaagtcgggagggtcagcatgaggaagaccgtcaccaagcaggcctcctccggaagcccatggtacggcccagaccgcgtcaagtacttgggcccattctctggcgagcccccgtcctacctcactggcgagttcccaggtgactacggctgggacactgctgggctttcggccgacccagaaaccttcgccagaaaccgtgagctcgaagtgatccactccaggtgggccatgctcggggccttgggctgcgtcttccccgaactgttgtcccgcaacggggtcaagtttggagaagctgtgtggttcaaggccgggtcccagatcttcagcgagggtgggctggactacttgggcaacccaagccttgtccacgcccagagcatcctcgccatctgggccacccaagttatcctaatgggtgctgttgagggttatcgtattgctggtgggcccctcggtgaggtcactgacccaatctaccctggtggcagctttgacccattgggccttgctgatgacccagaggcttttgctgagcttaaggtgaaggaactcaagaacgggagattggccatgttctctatgtttgggttctttgttcaggccattgtcaccggtaagggtccattggagaaccttgctgatcaccttgcggacccagtcaacaacaatgcctgggcctacgccaccaacttcgtccccggcaagtgagcatgaaagaaaaggatgaattgtggacttttgagagtttttagatttgtgtttggtgaagtatatgttattgcaatgtacttcagataatgtgaattatcttgtgtatcccaatccaacttaatgttacttgctttttacgaaaaaaaaaaaaaaaaaaaaaaaaaaaaaaaaaaaaaaaaaaaaaaaaaaaaaaacaaa

SEQ ID NO: 3816 - DNA, 3771 bp, Glycine max
  Clone ID: GLYMA-23APR03-CLUSTER7765_1
tttgcttttaattaaattaaattttaacagggtcacacagtgttcgtgggagagtaaagcgtgggttagtgttagtgaagttgacgattgcctgccttgtttgccgtgtgtctctgattctgtttcaactctatagaagaagaagaagaagaagaagaagaagaagaagaaacgtagttaaaaaatctcagtccgttccaaaacgctttttgttgttgtgtggtgaggttggttgaatgagctaaagtggaaagttgagttgaaagcaagagaatagatggagatttacctgagtgagaatttcggagatgtgaagccaaagaactcatcggaagaagcgcttcagagatggaggaaggcttgttggctcgttaagaatcacaagaggaggttccgtttcactgctaatctctccaagagattcgaagctgaggctattagacgctccaatcaggagaaattcagagttgcagtgttggtttcacaagctgctattcagtttatccacggtctaaatttgtcgagtgagtacactgtaccagaagaagttaaagcagcaggctttgaaatttgtgctgatgagctgggatcaattgttgagggacgtgattcgaagaagttgaaaagtcatggtggggttgatgctatcacaaacaaactcaatacctcagttgatgatggtatatcaacatctgagcacttggtgaatcagagaaaagaaatttatggagttaataaattcgctgaaagtccagcccgtggattttgggtttatgtatgggaatcccttcaagatacaaccctcatgatacttgctgtctgtgccttggtctctttggtggttggtataataatggaagggtggcccaagggtgcacaggatggaattggtattgttgcaagcatattgcttgtagtgttcgtcactgccacaagtgactacagacaatcactgcagtttaaggatctggataaagagaagaagaaaattacagttcaggtcacgagaaatagttgtaggcagaagctttcaatgtatgatctgcttcctggtgatattgtccatctaaatattggagatcaggtccctgccgatggcctttttgtgtctggtttctctgtgttaataaatgaatcaagcttgacaggagaaagtgaaccggtgaatgtcagtgaacttaatccttttcttctgtctggaaccaaagttcaagatggatcatgcaagatgcttgtgactactgttggaatgaggacccagtggggtaaactaatggctactctaagtgaagggggagatgatgaaacacctttgcaggtaaagctcaatggtgttgctaccattattgggaaaataggcctctttttcgcagttgtgaccttttctgtgttggtccaagggctttttagccgcaagctgcgagagggatcccaatggatgtggtctggtgacgatgcaatgcaaattgtggaattctttgctattgctgttactattgttgttgtggctgttcctgaaggtttacctttagctgtaacattaagccttgcttttgcaatgaaaaagatgatgaatgataaggcacttgttcgtcacttggctgcttgtgagacaatgggatctgccactactatctgcagtgacaagactggcacactaactactaaccatatgactgttgtaaaagcttatatatgtgggaagattaaagaagtaaatggttctaaggtctactctgatttctcatctgatattcatgattctgctctagcaattctacttgaatcaatatttaacaacactggaggagaagttgtcaaaaacaaagatgagaagattgaaattctaggatcaccgactgagactgcactgttggaatttgggctgtcacttggtggtgattttcttaaggaacgacaaaggtcaaaacttgtgaaagttgagccatttaattctataaagaagcgcatgggggtggttctccagcttcctgatggtggtttcagagcacattgcaaaggtgcctctgaaataatcctagcttcatgtgacaaagttgtggactcaagtggcgaggttgttgccctcaatgaagactccataaatcacttgaataatatgattgaaacatttgctggtgaagctctccgaacactttgccttgcttacttggatattcatgatgaattttctgttggaactgctattcctactagaggttacacttgtattggaattgtgggtattaaagatccagttcgccctggtgttcgagagtcagtcgccatttgtaggtcagctggtattgctgttaggatggttactggagacaacataaatacagcaaaggctattgctagagaatgtggaattttaacagatggtatcgcaattgaaggccccgagtttcgtgagaagagtgaggaggagttgcttgatatcattccaaaaattcaggtaatggcccgatcttcaccaatggataagcataccctggtgaaacacttgaggacaacatttcaagaggttgtttcagtaactggtgatggtacaaatgatgctccagcacttcatgaagcagatattggacttgcaatgggcattgctggaactgaggtagcaaaagaaagcgctgatgtaataattctagatgataacttttcgactattgtgactgtagctaaatggggccgctcggtctacgtaaacattcagaaatttgtgcagtttcagctaactgtaaatgttgttgctttgatcgtcaatttctcttctgcttgtttgactggaaatgctcccctcactgcggttcaacttctatgggtcaacatgattatggacactcttggagcacttgcactagccactgaacctcctaacgaggagttgatgaaaagaccacctgttggtaggaaaggaaactttatcagtaatgtgatgtggagaaatatcttggggcagtctatatatcaatttgttgtaatatggttcctccagaccagaggaaaagtaacgtttcatcttgatggaccagattctgatctgatattgaatacacttattttcaacgcgtttgtgttctgccaggttttcaatgagattagttcgagggatatggagaggataaatgtttttgaaggtatactgaagaattatgtcttcgttgctgtcctcacctccactgtcgtcttccaaattattattgttgaattcttgggcacctttgcaaacacatctccacttagtttgaagcagtggtttggtagtgttctctttggagtccttggcatgccaattgcagcagctctaaagatgatccctgtgggatctgtctgaaatcaatgcagacaaattagttagccaggaaaatttgtggatgcctattattttgttggtgaagaccagaagagcaatgcccagaagtagaaagtgcttctattcaatcctaatgcagtggctattgacgaaaagtttggcttctcagagcctaaggtactcaatggatgggagtttattaggtctgttgtaagagaattgcatttgctcttgttcagcacaatgtacattgttctgtgaattgggcagctcccgctagtgtatctggtttaatattttttttcttcggtactcaacattctcagtgatgaggccgttggaacaaaattatttgattgtttgaaatagcaggtcaagattttaatcttgaactaactaaaatacaaagccgttaaaagatttcaacacagctcaaaaaaaaaaaaaaaaaaaag

SEQ ID NO: 3817 - DNA, 1348 bp, Glycine max
  Clone ID: GLYMA-23APR03-CLUSTER7767_1
agtatcatattaactcaaaatgggttccatgcgtctattagtagtggcattgttgtgtgcatttgctatgcatgcaggtttttcagtctcttatgctcagcttactcctacgttctacagagaaacatgtccaaatctgttccctattgtgtttggagtaatcttcgatgcttctttcaccgatccccgaatcggggccagtctcatgaggcttcattttcatgattgctttgttcaaggttgtgatggatcagttttgctgaacaacactgatacaatagaaagcgagcaagatgcacttccaaatatcaactcaataagaggattggacgttgtcaatgacatcaagacagcggtggaaaatagttgtccagacacagtttcttgtgctgatattcttgctattgcagctgaaatagcttctgttctgggaggaggtccaggatggccagttccattaggaagaagggacagcttaacagcaaaccgaacccttgcaaatcaaaaccttccagcacctttcttcaacctcactcaacttaaagcttcctttgctgttcaaggtctcaacacccttgatttagttacactctcaggtggtcatacgtttggaagagctcggtgcagtacattcataaaccgattatacaacttcagcaacactggaaaccctgatccaactctgaacacaacatacttagaagtattgcgtgcaagatgcccccagaatgcaactggggataacctcaccaatttggacctgagcacacctgatcaatttgacaacagatactactccaatcttctgcagctcaatggcttacttcagagtgaccaagaacttttctccactcctggtgctgataccattcccattgtcaatagcttcagcagtaaccagaatactttcttttccaactttagagtttcaatgataaaaatgggtaatattggagtgctgactggggatgaaggagaaattcgcttgcaatgtaattttgtgaatggagactcgtttggattagctagtgtggcgtccaaagatgctaaacaaaagcttgttgctcaatctaaataaaccaataattaatggggatgtgcatgctagctagcatgtaaaggcaaattaggttgtaaacctctttgctagctatattgaaataaaccaaaggagtagtgtgcatgtcaattcgattttgccatgtacctcttggaatattatgtaataattatttgaatctctttaaggtacttaattaatcatatagtccatatttgttggatggctagaaaacaaatgaaattttcttcacaacccgttcaattaagtagttaattaaattcagat

SEQ ID NO: 3818 - DNA, 1022 bp, Glycine max
  Clone ID: GLYMA-23APR03-CLUSTER7769_2
ggcattttgatctgatatagtgaatagaaatggctaaaaacgagttgaggcttttgggtgcttggttcagtccatatgccctgagggtgcagattgcccttaacctcaagggtctagattatgaggttgttgaagagaccttgaatcccaaaagtgatctgcttcttaagtccaaccctgtgcacaagaaaatcccagttctactccatggagataaagtcatatgtgaatctgcaatcatagtagagtacatagatgaggtttggtccaacaatgctctctccatccttccacaaaatgcttatgaccgagctaatgcccgattttgggtttcttacatcgatgacaagtggtatacgtccataaggaatactattttggctgaagcggctgatcaagatgatgaggcaaagaagccacactttgtgagaatggaagaagctcttgagaggatggaagaagtgttcaacaagtgcagtgaaggaagggcttattttggaggagatacaattggaattattgacattgcttttgggagcctttggggttgggtgagagtgatagaggagatgaatggaagaaaagtgtttgatgaagcaaaaaaccctgctttggctaaatgggctgataagttttctgctgatcctgctgtgaagggtgttcttccagagactcaaaagcttattgagtttgccaaaattcgtaagcaaaaatgggctgctgcagctgcaaagtaaatgaaattaattgctagattacttgggcttgaaattgtgaagttttacttttcattttttttcccttgtagactatgtttgttctaactttatgttggcttaaaagttactttaaaaggtctaggttgtctctgctagcaactgagtctctctctcttgtttgtagttcatgtctcctgtttttttatttagcaaaaaggagtaaaaagatgcagcacaaccaaatttattataaaggcaagaaaataaaaataaaaaacttggtggcgaaaaaacaaaagaaaa

SEQ ID NO: 3819 - DNA, 859 bp, Glycine max
  Clone ID: GLYMA-23APR03-CLUSTER7778_4
agaagatgatgggaagtggagatgtgaagctgttgagcttttgggtgagtccatttggtaaaagggttgagtgggctttgaaactgaagggaatagagtatgagtatattgaagaagatatcttcaacaagagcaatctccttctccagttgaacccggttcacaagaaggttccggttcttgttcatgcccacaaaccgattgcagagtcattcatcatccttgaatacattgatgaaacatggaagcagtatccattgttaccttgccatcctcatcaaagagctcttgctcgcttttgggctacttctgttgaacaaaagcttgggaaggctggatgggtagcaatgtctaccagcggggaagaacaggaaaaggctgtgaaggaagccatagaaatgatggagaaaatagaagaagagattaagggaaagaaattttttggaggagacaatattgggtaccttgacattgctcttggatggattgcttacttggttcctgtttgggaggaagttggatcaatgcagataattgacccattgaaatttccagccactactgaatggataaccaattttctcagccaccctttgatcaaggacagtttgcccccaagagataagatgcttgtttactaccacaatcgcaagaacaacttgccttccgtctttcgtaacttggtcaaggattagatttgttcctccatgtgtgtgtggaatcaaattcagtgaagcttcccttttctcacagatgatgtcttaaacaaattatgaattgattaaatttactctagtaacatgtacgtctttaactgaaaaaaaaaaaaaaaaaaaaaaaaaaaaaaaaaaaaaaaaaa

SEQ ID NO: 3820 - DNA, 1465 bp, Glycine max
  Clone ID: GLYMA-23APR03-CLUSTER7786_7
ggcagtccccaaaattaaagggtgtgtatttcagaatttcctccattataaattgatcaaaacagaacataagtttctaaggcactcctcctgttttgagcaattgtacctgatttctaggtctgcaattcgagcaagttcttctgatatatcgattttcaaattacccccacctatatttgtttctttatgattatctgcttcttcaccaccttcaaacagccatgctactgattcctccacccttccttcattcagtatcaatgctactgttgcacgctcatgagaaaaccccattgccacaagctgttgagcaagtgcctcaagtttccttgacataatatatccagtgcaacgatcatgcaactcttgtgcccgcctttccttctgtcgttggtgcttcttttcattcttctggcggattttctcacgtttatcattatcagctcctggtactgcttccagtcgagcaggaggattagaagcagctttgtctttatggtcctctgactcaccagaccaactaccattgttagaaacagaatcatactccacaccagctaccactgagcctgcaggatgttcatctgtctcatctatgttccgaaaacgaccattagaatttacttgagaagtagatgttggtgacgtctccaaagtatgaaatgttcccaataaagggttgtatgcactagctggtacaccagccacagcattaccagatcctgaagacttggcagaagacttttgagcttccttgacggcctttttgtctttggacttagatttggaagcaggagacatctcttcagtagcaaatatgcccctgtggatcgagcagttgaatggtgataaccgttgggaacttagagcggagagagagataggtttttcgaggttgaaaaatgaaattgagggaattagggttttgattcgaagaaacagaagagatccgaaaatttgcgaaaagcgaaacgaaaaaaacaacttcaatcttcaactgtgaaagatctctgtcagctcttcttctgtttatagccaatcctcccggtaatgtctctttgcttacaatcacagcctccaagttctcatctgtaatggaagggccaaatggatctgtgattggcacagcttgcacttccaactccggcttgatagactttatgaaagttttgacattatttatcctttcctcaatgggctgtatcagttcagcaaactgtttttttgccagcataggtccatcgcaaactccaattacaatccggcgccttgccaactccgctgaagcggtgaggaagaggcggtggccgtcgtgcaatcggtcgaaggtgccaccattgacgacggcttcgtaggtgttgggcggagagagtttgggaaccaccatcaccatggtgtcatcgtcaccgtgaaccgccattcgatgtgcaggaatgactttcactggtggcagtctcgagcc

SEQ ID NO: 3821 - DNA, 1621 bp, Glycine max
  Clone ID: GLYMA-23APR03-CLUSTER7787_3
cggctcgagctcgagccggctcgagcggctcgagctactcgaacatttcgaacaataatcaaatgaacactctagcccgcaactccaacgtgccctagctgaaaccccctgtagttaacactctacctcgcgtcgtcaagcactctctccttgaaacctctccgtgaagcagtggagctcaaacccctctctccttgaaacctcgccgtgaagcagtggagctcgcgtcgtgaagactgtctccctcatactgacctcgcgtcgtttgcccgtggaaagcgcgtcttaggtcgtcgtacagcataatcttgttacaaggaccacctgggactggaaagacgtctttatgtaaagcattagctcagaaattatcaattcgattcaattcgagatacccacaggcccagcttgttgaagtgaatgcacattgtttgttcagtaaatggttctctgaaagtggcaagctgattcttacgagtctacgagttgagtctatggagctctcaccgtaaactctcgaatttgataaccagagtgaatggaatagattttgaggatgtcaaagtcgatttatccaaacatcaccagctatctccccaattccgagccattaaccctttaatgaaagtccctgctgttgttgatggaaggttcaagctatttgagagacatagattttgtgcaatggctgaagagagacaagtcatcggcgtccacaccggtgatgcgtggaagggcaactccagaatgcaaaagactccaaaaaactgcactggcagaggaaagacttttgatatgagaaacgatagagagagaacaacagggtgtggaggtgggagtggctcaggaaaggacaaaattgattctcttagtaggctcctgacacgaattttacggcatatggcatatgaattgaatttgaatatgcggagtgatggttatgtaaaagttaatgatttgctaaagctgaatctgaagacatttgctaatattccactgagatcgcacactattgatcatattagggaggctgttcgaaaagataataagcagcggtttagcctcttagaagagaatggggagctactaatacgtgcaaaccaaggccacacagtaaaggtcgttgaaactgaaagtttgttgaaaccaatcctttccgccgaagaatttccagtttgtgtgcatggaacctacagaaagaacctagaatcaattctaggatctggtctgaagcgcatgaagagattgcatgttcatttctcttgtggtttaccaacagatggagaagtaattagtggtatgaggcaggatgtcaatgttctgatctttctggacgttagaaaagcattagaagaaagtatgaagctttacatttctgacaacaaggtgatcttgacggaaggttttgatggtgttgttcctccgaagtattttgaaaggatagaatcatggccgagcagacagcccatttctttttaaagttcttttacaattttgcttttaggttcacaatacgttgaggattatttaaataaaataaaaaatgtctaaaaaattcttaatattataaaataatatataatatcataaaattataaaaaaaaaaaaaaaatacaaacaa

SEQ ID NO: 3822 - DNA, 1023 bp, Glycine max
  Clone ID: GLYMA-23APR03-CLUSTER7789_2
cacgacactgagcatcagcaatggcaagcgcaagtgttggtaaagaactgacgctgtattcgtattggaggagctcttgttcccaccgagtccgaatcgctctcaacctcaaagggcttaaatacgaatacaagcccgtcaatctgctcaagggagaacaatctcgccctgagtttctccagctcaatcctgttggttgtgtccccgttctagtggatgaccacgttgttctctatgactctttcgccattattatgtatttggaagataagtatcctcacaatcctttgctccctcatgatatttacaagagagcaatcaatttccaggctgctagtgttgtttcctcaacaatacaacctcttcataacttgagtttactgaactacattggggagaaagttggccctgatgaaaaacttccttgggcccaaagtataattagaagaggctttaaagcactggaaaagctattgaaagaccacacaggaagatatgcaactggagatgaagttttcctggcagatatatttttagcacctcagttacatgcagcatttaagagattcaacattcacatgaacgagttccctattctagcaagattgcatgagacatataatgagatccctgcattccaggaggctctgccagagaaccagcctgatgcagtacactagttgaaccaataatttgggacagaaatatgagttgatattaagttggagaaattgcagcaggagctacttattcagcatccggatgaattcgttgttaaagtattaaaatatgatactcaatatagcaataaggttgccacatgcaatatttattgcacacatcatgtacaattgaaaaaaaaaaattggtttcgggtgtatgtctataaagccttatgtttattttccatttcatattcttcccagaatcccagtcaatgtagcttgatggatgattcttaatggtgtttatggttgaattggtgtttcaaaaaaaaaaaaaaaaaaaaaaacaatcacaaaa

SEQ ID NO: 3823 - DNA, 980 bp, Glycine max
  unsure (1)..(980): unsure at all n locations
  Clone ID: GLYMA-23APR03-CLUSTER78066_1
agatctttctttcttacttcctaagctaaagcactgcttactctctgcactgcactattcttcttcttcttctaaagtaaataacaccgtcattttcgtctacactgtaaatcttgaattcctctgattaataggttagaagataatgctgtactgctccaaaaaaaaaatggaactaattggtactagttcagatgccgttccccatcagaatcactcttcaaggggctcaagcaatgctggcaacaagaatttaactgagaaagaagtctatgtaaaccatgctgagttagcctggcatcaaatgaggacagaatgggttggtgatcaatcaaaaaaattacggaggtcacctaaaggttcaacattaagcgtcacaaggacttatgaagaggtgcttgcatctagagaaccttttaaacgaccaatactattatctgagatggtaagttttttggttgaaatttggctcgaggatgatctctatgattagattacagacaggtaattctactgtaagtttaagtgagaactcggcagagttttatttgtgcccagatccctcggaagcacattgtttatatttatacaaatcctttatngcgagattggttgaaatcattgaatgacagtttaattggttntnttagcncaggtaggcttcatagcagtttatgtntgcaacnccttggattttttggtcaaattgtggntgctgcagctaaacattcatnggactagttacgtttttttnaactagaatgcattttccatagtgataagtgggcaatntcactcaaatttgtaatgaaatttgaaaanaaaatggcatttgcattgccattgttcaatagctttttaatgcaattttactaggagtgtgcgaaacgatcgaactgcatcgaaacattccataatgaaaccatatatcatttgagtaaaaaaaaaactcaactatttntggaaaaaaaaaaaaaaaa

SEQ ID NO: 3824 - DNA, 1246 bp, Glycine max
  Clone ID: GLYMA-23APR03-CLUSTER7814_17
tcagctacgtaggcccccccccccccccccatcaacaagccctcacttcaaggaccacccttcctttctcatcaccacaccatccccacatcagtcaaacaaattaaaggatggtgatgatgaagcacattccactcttctctctcccccttctaatagtactattttcccattccaccaccactttagcccagtcaccggccgcggcaccgaccgccccggccaccccctccaccgcggccgccccggccccggtaccctcggcacccccgacagacatcataagaatcctcaaaaaggcaggagggttcacaaccctaatccgcctcctccaggccacacaagtctccaaccaaatcaactcccaactcctcaccacaagcggcggcctaaccctatttgcaccaaacgacaacgccttctccagcctcaaaccgggtttcctcaactccctgaacgaccaacagaagaacgagctcatccagttccatttgctccccacgtacgtttccgtgtcgaatttcgacactttaagcaaccctgtgagaacacaggccggtgaaaaccctgataggttggcgctgaacataacaagctccggagggaaccaagtgaacatgacaacgggcgttgttaacgttactttgggtggcaccgtgtacaccgatcaccagctcgccgtgtatcaggtggacaaggtgcttcttcctcgggacttctttgaagctaagcctcctgttccggctccggcgccggaaaaggcgaaagggtctaagaagaaatctgcggacagcactgctactactgcagatgatgctgaatcggatgctatcagtgtgaaacaaaggcatgttatgtgggttgcagttcttgcacttttcattgcagcatttacgtaatgaagcattgaactgaaactataccattggggtggatgaaaggtgaatatgagcaacattttgcagatacatacagtgattttaaataattgttctctctctctctctctctctctctctctctataatgattcaagtttcaggttgtatgtggtggaaattctatttgatttatgaaggctttcttcgttctactagttctcttcgatccccctataagaaaaaacttcatatcttgtgtattacttacgagaaatttgtgtataagttgcaacgaagatatcttaatagaaaaatgatacagaagttttgtttacctttaaaraaagaaaaaaaaaaaaaaaaaa

SEQ ID NO: 3825 - DNA, 2666 bp, Glycine max
  unsure (1)..(2666): unsure at all n locations
  Clone ID: GLYMA-23APR03-CLUSTER7870_4
tagtggtggtggcggcggcgtacagcggtggtggcggcgtaagagtggaaacaacaactggcagcattattgttgctgtatgtcagtggaatattattgcagtgggatttactacgctgagcttgctaaccctctccaatggccacagctcaggaaaaaacgacgccatgttgcgccacccaaaataacaacaaggtcgcactcgcagcacctccaacttcttcttcttctgcgccacaacaacaatcacaatcacaacaacggccctctgttgccaccttcatttccgccatcgattctcctccccaaaaccgcttcctgccaaaggtatcactgtcatggtgagagctcaaaccagccaccctttggatccactaactgctgctgaaatatcagtagctgtagcgaccgttcgagcagctggggcaacacctgaggtgagggatggcatgcgctttattgaagtagacctggtagaaccagaaaagcaagttgttgcattagcagatgcatatttcttccctcctttccaaccatcactgctccctaggacaaaaggtggacctgtgattccaactaaacttcctccaaggaaagcaagactagttgtttacaataaaaagtcgaatgagacaagcacatggattgttgaacttagagaagttcatgcaacaactcgaggtggacaccataggggcaaagtgatttcatctacagttgttcctgatgttcagcctccaatggatgctgtggagtatgctgagtgtgaagctgttgtaaaggactttcctccctttcgtgaagcgaatgaaggaagaggagggattgaggaaatggatctcgtgatggtatgcaagatccctggtgtgctggatatcacagtgaagctgatgctcctagccggagacttgctaaaccactaatcttttgtaggactgaaagtgactgccctatggaaaatggctatgcccgtccagttgaaggaatccatgtacttgttgacatgcaaaatatggttgttcttgaatttgaagaccgtaaacttgtcccccttccacctgctgatccactaagaaattatacttctggtgaaacccggggaggagttgaccgaagtgatgtgaaacccttacagattattcagcctgaaggtccaagttttcgtgtcaatgggcacttcattgaatggcagaagtggaattttcgtattggattcactcctagggagggtttggtaattcattcagtagcctatattgatggaagtcggggacgnagaccngtggcccatagattgagctttgttgagatggtngtcccntatggagatcctaatgatcctcactataggaaaaatgcttttgangctggggaagatggcntgggtaaaaatnctcattctctnaagaagggctgngattgtttaggctatatcaagatactttgatgcgcanttcacaaacttctatggaggtgtngaaacaattganaactgtgtttgtttgcangnagaagatcatggtatttnatggaagcatcaagattggagaacaggntnggctgaagttcgaaggtctagaangctganagtntcttttatatgcactgtggctaactatgagtatggatttntctggcacttttatcaggatggaaaaatanaagcagagntcaagctcacaggaattctcagcttangancantncaaccaggtgaaactcgaaaatatggcacaancatngcacctggactatangcgcctgtccaccaannttttttngttgctcgtatggacatggcagtanattgnaagcctggtgaancatttaatcaggttgttgaaggtgaatgtcaaanttgnaaanccagganacaataatgttcntaacaatgcnttttatgctgaanaaaaaactgcttaaatcanaaatggnagcaatgcnttgattgtgaccctttatctgcncntccctgggattgttnggaacnctaggactnttaaccgaactgggcatctaactggttacaagctagtacctggctcaaattgtttacctttagctggctcagaggccaagtttttgagaagggcagctttcttgaaacacaacctttgggttactccttatgcacgcgatgaaatgcatcctggaggagagttccctaatcaaaatccacgtgttggagagggtttggctacttgggttaagcaaaatcgatcactggaggaagctgatatagttctttggtacgtatttggagtgacacacattcctanattggaagnctggcctgttatgcccgtggaacgcattggtttcatgcttatgccgcatgggtttttcaattgctcgcctgctgttgatgttccaccaaaccaaagtgatttggatgacaaagagaatggcctgccagccaagcctattcagaatgggctaattgccaagctttgaaaggataaaaaatgaggaggatctgcctctttacgtggttatgttcaaattattaaataaaatattcaatacaactgtttgtgctggtttcaacctggctggatatttaagaaacgcctattactgtaatttgtactgtataacttgtatgtacgtttgttgcatggtaatgcttggtaacttaaatgttcatttgatttgatgtggaatct

SEQ ID NO: 3826 - DNA, 1987 bp, Glycine max
  Clone ID: GLYMA-23APR03-CLUSTER7875_2
gcccccacgcgggcccccccccccattactcattactcaatgagtttcactgcttgaatttttctaattttctgcagagaatctgaactctgcatcttgttgtgcaaatgaaatcaggtgtttgggtttgtgaagtatagaatagaattttgattattcaggttcttcaaaggggctgaatagaatagccagtgattgggagacccttttgatctaaatgtgtgctccttacttgagatctattttgaatggtttattcatattagttgaatttcaatatgggggtttcttatgctacttgggaattgattggattatagtcaaacatgttttattgcaaatgagactcacctggctattcctgaagcattggtatttaaccatgccgaatgacgtggtgtggtccatgtagttgacctcacctagcgaaataaggctttgttgttgtttttattgaatgttggtactcacctggctaatcaaaatgcttttattgtgcttgtctttcatgtggaacttatgaattttcatgaagtgggtaaactttgacatatcaaaggatgtagtgcaccactcaagcggaaatatctgaaactaatatgatattgtccttgtgccaaagacatagtaataggatttagtttgaacttttcagggttagatcatatatataaaggtaaatcctattttcttgttctagtacatgtttctgtgaagttgactttatccagaacaggaaatgtttgcctgtggttgtgtgaaggtaacatatcatttactactagttcattttcatttggtttttattcaccattgtcagttcactgagttttgaatttttaactaatgtgccattaggtgtatgcaaaagcaaaggaatgctcagacatactttctgctgaggactttgctattttgcttgctaagcactttgtatcattttacaagaaggttactggtgctattgtgaatattgtggaaaaaccatgggagcgtgtcattgtggatggtcaacctcatgaacatggtttcaaacttgggtctgagaagcatacaacagaggcaatagtacaaaagtctggttcacttcagttgacttctggtattgaaggattgtcagtgttgaagacaacccagtctggttttgtgaatttcataagagacaagtacacagcacttcctgatacccgtgaaaggattctggcaacagaagtaaccgcactgtggaggtattcgtatgaatcacagtatagcctccctcagaagccactttactttacagaaaagtatcaggaagtgaaaaaagttctggctgacactttttttggcccaccaaatgggggagtctatagcccatctgttcaaaacacactctacctgatggcaaaggccacactgaacagatttcctgacatagcttatgtcagtctaaagatgccaaatcttcatttcttacctgtcaatatctcaaacaaggatggtcctattgtgaagtttgaggatgatgtgtacttgccaacggatgagcctcatgggtcaattcaagctagcttgagccgcctttggtcaaagctgtagaaactgcagaagctatggtgctcatcccttctgtggtggattgccagtgcagcctaaaataccgaacctggccttagagatagtgctttccattaatgtgtcttgtaattctggtttttgtcatcgttgtatttgtttcgtggagaactattatgcatgaataacttccaggagggatattctgcaagttacaccaatgttaagtttttgatgtcctaaattccaataaattcctagtgtccttattatggaaactgaattatgtcttactatgacgttgatgcaatgcttttttatggtcatactcatacattatagtcaagatttataaacccagagttgtcaccaaactggtaaacacgtggtttatggtttaatacccagtgaaaaaaatttaatatatattttt

SEQ ID NO: 3827 - DNA, 1409 bp, Glycine max
  unsure (1)..(1409): unsure at all n locations
  Clone ID: GLYMA-23APR03-CLUSTER7877_1
tcatttataattcaaaaacctctctctctctctctctctctctctcaattcttcaggcaccttcaaaatttctctctagagtcacgatgcttgcgacgctcaaatccgaagagtccagtggtcagttacagctcgtcgaacgagaagacatagacgacgatgaagatctcttcgaagccatcgacaaactgattgctcaaggcatcaatgccggagatgtgaagaagcttcaggacgcagggatatatacttgcaatggcttgatgatgcacacgaagaagaatttgactggaatcaaaggtctatccgaggctaaggttgataagatctgcgaggctgctgagaagcttgtgaatttcggttatattaccggaagtgatgctctgctcaaaagaaagtcagtgatccgaattactactggaagtcaagcgcttgatgaattgctaggaggcggggtcgagacatcggcaattacagaggcgtttggagaattccgatctgggaaaacacagctagctcacactctctgtgtttccactcagctgccaactaatatgcgtggaggcaacggaaaagttgcttacattgacacagaaggaactttccgaccagaccgaattgttcccatagctgagagatttggcatggatcctggggctgtactggacaatattatatatgctcgtgcctacacttatgagcatcagtacaacctcctccttggtttggctgcaaaaatgtccgaagaaccattcagacttctgattgtggattcggtgattgctctgtttcgagtggacttctcaggaagaggagagcttgcagatcgccagcaaaaattggcacagatgctttctcgattaataaagatagctgaggaatttaatgttgccgtctatatgacaaatcaggtcatatctgatccaggaggtggcgtgtttgtaactgatccaaagaaaccagcaggagggcatgtgctagcccatgcagccacggtaaggttgatgttcagaaaagggaaaggggaacagcgcatttgcaaagtgtttgacgcccccaacctgccagaggctgaagcagtgttccagataacagcagggggaattgcagacgctaaggactaaagagtcgcttctgagttgtgacttctgggccgaatccacaaaagaaacagtagtggctgaatatttctggtaaccttaatcttccagatatttgctacagtttgtatgaaaagtgttgttccttgaacacttttactattttccagtgatatgatatgagttccccttagttatacttatacacgtttcctttattgtaagttgcgatacattttgcaatttgaacgtttcacaaacattgaaaatcttgctgcaagtttntactttntaaaaaaaaaaaaaaaa

SEQ ID NO: 3828 - DNA, 1535 bp, Glycine max
  unsure (1)..(1535): unsure at all n locations
  Clone ID: GLYMA-23APR03-CLUSTER790_2
gggtatacatactaaagggtttttgagagttcagtctgctttgagatttgtgttttggatgatggaggaagctcagggcagttctagttccctgccacctttcctcaccaagatttatgagatggtggatgatccttcaactaattccattgtttcatggagtgccaccaataggagtttcattgtttggaacccaccagagttttcaagggatttgttacccaaatactttaagnacaacaacttttccagtttcatcaggcagctcaacacttacgtaagcaaattcgatcttcttcatgtttatggatttgataacttgttttcttcttcttctttgttttgttttcttgttttctcatgaatggtttgattgcttgaactgtgacatggttttctgtttgatcagggctttagaaagattgatcctgaacaatgggaatttgcaaatgatgattttgtaagaggtcagccacatcttttgaagaacatccataggcgcaaacctgtccatagccattctttgcagaatatccagggtcaaggggtttcttcgctgactgaatcagaaaggcagagttttaaggatgagatagagaagcttaaacatgaaaaagaacaacttcttcgggagttagagatgcatgaacaggagtggaaaatgtatgaggtacaattacaacactccaatgatcgtttggaaaagttggaaaagaagcaagaaaatttggtttcttctgtctctcaagtgttgcagaaacctgggattgccttaaatctcttgctgttgacagaaaacatggatagaaaacggaggttgccaagaagtggtctctttagtgatgacgctagcattgaagatcatatggaaacttcccaagtattaccaagggaaaatgcagatggtgcttctattttctcatcgagcacagaacggttggatctccttgagtcatccatgacgttttgggagaatattacacatgatgttggtgacgtctttgttcaaagtcatttaaacttggattttgatgcatctacaagttgtgcagatagtccagctatatcttgtgtgcaactagaagttgaagatcagcctaagtcacctggaatcaacatgaattctgagccatctgtagttgctgttcctgatcttgatgcatcaaaagaacaaccagtgggaaaagcccctgtgactactggtgttaatgacatattctgggaacgattcttgacagagaatcctggttcatctgaaatgcaggaagcacagtctgaaagaaaggattctgatggcagaagtaatgccaaattttggtggaacattaggaatgtaaataaccctccagaacagatggggcattcttagtcaagcacagcaaacttagttgcaattgattattacttttagcttgtgatactcctcacttttcatgtaataaatgtaggtatgcatggttttggctctgctatatatacatataccatatttttggttaaatgattgcctcctctatagaatttagtcaattctt

SEQ ID NO: 3829 - DNA, 757 bp, Glycine max
  Clone ID: GLYMA-23APR03-CLUSTER7929_1
ttcacccttgaccggtaaagctgggttggtgggtctgcagggcggcgcggtggggctgttgctgggttccttgcctctgtgccgggtgcgggtgcccgctgcgcgctgggccccgtccctcgtcatcactcatcacgcgtcgaggggtcttcagtcccctgctccgtgctctgctcgcgccctgcccccagcccccctccctccccttgggccgagattcgctcgagtccatgtctctcagcttgtgatcgctggacacttgacaggaaaaacagtaaagatgggtttgaagaacaacatggtggtgctaaaggtgtgtttcttggttcttttccttgtgggggttactaatgcacgcatggaactgaacctcttcaaaagtgatcactcatcaagtgatgatgagtcttcaaaaccatgctgtgatctctgcatgtgcacagcctcaatgccacctcaatgccattgtgcagatattaggttgaattcatgtcactcagcttgtgatcgctgtgcgtgcacacgctcgatgccaggccagtgtcgttgccttgacaccaccgacttctgctacaaaccttgcaagtccagtgatgaagatgatgactaggaattaatcaacaaaagctctctcaaatgaacaaagccctttaggctttctttgtcttttatgtaagggagacaaataaaacatggaataaaaagctcgcagtggccagtaatttgcttttggcaaattttggtcatttttatcaag

SEQ ID NO: 3830 - DNA, 1263 bp, Glycine max
  Clone ID: GLYMA-23APR03-CLUSTER7963_5
aactaatcatgttagatatgacttttagatatttgctatatatatgctaattagtaatttgtgattggacgatatcataaaaattccttgacggtcaatgcataaattatttactctttttgtaattagaagtgaaaactgaaaacatataaaacgttcaaatgaacagctgaacgaaggggtgtggatcctgaaattaattgaatgtgaaaagttgtatatgaacatgttgtctatgtggcttatatgctactgctagtattgtgactgacaaaagcacaatcttctaactaaccacatctctggtataataacgaggcttaaatatttttttttttcatgtaatttagaatttttttatttttatccacgtaaatttgttttagtccttataaaatatgtttgttttgtttttcttatttaaagtgctttaaaaaatgagaaacagtttaaaaaatactttgaacagtgaaaaaacgttatataaaatgttttaatgataaaaaataaaataaacacattttgcatggttgaaaaaaataaatttgcaggaacaaaaatgaaaaaaatgttaatttgtagaagtgaaaaatatatttgcaggttgcatcacaaccaaggagcttggaactgttatgcgttcattggggcaaaacccaactgaggcagaactccaggacatgatcaatgaagtggatgctgatgggaatggtaccattgacttccctgagttcctaaacctcatggctaggaagatgaaggacactgattctgaggaggagctgaaagaggcattccgggttttcgacaaggatcagaatgggttcatctctgctgctgagctccgtcatgtgatgaccaacctcggggagaaactcaccgatgaagaggtcgatgagatgattcgtgaggctgatgttgatggagatggccaaataaactacgaggagttcgttaaggtgatgatggccaagtgagtgatcatcacattatggccacaagaacctaaatgaagaagtgttgattaaaaggaaatgaccaaaaaaacagaggtaaggggaaggacaagggtttgggctgtataacagtgatgtagtagtccttgtcctttcttcttcctacatttatatttgacggtttttgaatccaaccttaaaatgtcaattagtggcaattcctgctactaatggatgtagtggaactgaaccttcttagtttgtctgtaattttttccaagaaataaagggttgtaatgttaatgtc

SEQ ID NO: 3831 - DNA, 938 bp, Glycine max
  Clone ID: GLYMA-23APR03-CLUSTER79835_1
aaaacaagtaaaaacaaaaataaaaataaaaaaagaaaaatgaagatgacattggtaatcttggtccttatggttgccttgagcacaaaggcacttcttggtgcagctggtcctgcacctgagcaagtgatggacacagcagggaagatagttcgcgctcgttcgacttcctccatcgttccggcttcccccgatttagctggccttgatatggcaagcacaggtgctgattgccctcttgatgttctagctgttgattgttaccaaggcccgcctttgatttttacacctgttatttttaacaaaggtgttattcgtgtctccactgacctcaacatctatttccccgttgccacaagttgtccacagaacacagtgtggtaagcttaaggactatgattattcaacatcacagtgggttgtgactactggtggtgatttcggcaaccccggttcgcaaaccgtggcgaattggttcaagattgagaagtatgaggatgcttacaagttggtctactgtccaagtgtgtgcaacgattgcagttatccatgcagtgatattggaatataccaggatgaatatggcaagcgtcttgctctaagttctgaaccatacaaagtgaagttccagcgggcttgattattgaattgataacaaaactaattaaagaataatgaataagtgtaatgaactactttatgcttttgctgcatatatggtaattctcatgttgagttccttgccacggacttgataataaataaacaagttactttctatttttatgttttagttacatagaggatcatatcacgttttattcttagaattcacaaggaatcaatgttttaaatatcggtcgcggtcgtgttgtcatttggtcacattagttgatacagtgagaaatcaaattttgtaaaaaaaaaaaaaaaaaagc

SEQ ID NO: 3832 - DNA, 842 bp, Glycine max
  Clone ID: GLYMA-23APR03-CLUSTER8011_1
tttgcattgcatatctctctcacacttctctcccatattcaattaatcaatatggcttcatgttttccaaatgcatctccatttttggtcatgctcgcaatgtgcctcttaatttccacctctgaagctgaaaaatatgtggttggaggcagtgaaaaatcctggaagtttcctctctcaaaaccagattcactcagccattgggccaactctcaccgatttaaaatcggcgacactctcatatttaaatacgaaaagagaacagagtcagtgcacgaaggtaatgagacggattatgaagggtgcaacacggtggggaaataccacattgtgttcaacggtggcaacaccaaggtgatgcttaccaaacctggattcagacacttcattagtggaaatcagagtcattgccagatggggttaaagctggctgtgcttgtcatatcgtcgaacaaaaccaaaaagaatcttctttccccatctccttcgccttcaccgccaccatcatcgttgctatcaccatcaccttcgccacttccaaataatcaaggtgttactagtagttcaggtgcgggattcatcggggttatgatgtggttgatgttattgctttaaattgagagtattgtgtattcgcaattttgcatgttaatgcctccgtcactaatcactatatatgcaatatatatatttgtggttgtggggttagttattcaggtcaagcatgcattttcgctttcatttttgtaattttttttaaaagtttggacgttttcttttgattgcgcaattgtgcccttaaactcaatgcccgtcttggtaattttgagattgaataagtc

SEQ ID NO: 3833 - DNA, 393 bp, Glycine max
  Clone ID: GLYMA-23APR03-CLUSTER8046_8
atgaacgataacactgaactagctctcacgtttgtgcttgcacttgcacctctccaacgataacaacgacgagcacaagatccagtcattcgtgctgttctggacatttgcattcgacattgtacatatattttgacggaggatcgtgcacaaaatgtctctaaagaaggcaattgttggcttctgacttctgttgctgctttaagaaggcaattgttctttatcttgattcttgacataatgcatgtacttcatcaagttattggatagctctcattatgttgccagtttttaaactttgtaagctctacttgctaatgctataagaccgatcctgaaattttatggaccaaactgaagcaattatattacttagttcaaaaaaaaaaaaaa

SEQ ID NO: 3834 - DNA, 625 bp, Glycine max
  Clone ID: GLYMA-23APR03-CLUSTER8061_6
atgtatttgaaactcgtagactcgagtcctaaaaaattaaaccctagctagagagagagagagggtttaaagcttctttctggcgcaacgcaattcagagcaaagacagagagtgagagagggagatggggagcgacagcgaggcagagaagtcggtgcagaaagagaaggagaagaagaagatgttggccctggctcccattgctaaacctcttgctgggaagaagctttgcaagcgaaccctaaaacttgatcttgcaggcgcaggagcaacaaagaggcctacttgctgtgttctggtacagacaaagcctgcaaagggtgaaatagagcaaggggaacaagagaaactaaagtcagattatgatcaagttgtagcggaagttactgagcttacaacttcactcttttgaattaagcacacatgtatctactgtttgtttcagctggattaacatgtggtattagtgtgccttacaatcaattgatgtatgaattttattatttttctatcttgcttattattttcttgtcatatagtctaccactgccttatcatttgcataatttgcattgtccaccttcatgattttcccatgaggatgcccgaagcaatcttgatttg

SEQ ID NO: 3835 - DNA, 707 bp, Glycine max
  unsure (1)..(707): unsure at all n locations
  Clone ID: GLYMA-23APR03-CLUSTER80733_1
ccacgatttagcaagagagacacgttcttaatttttcttaagaagttatatcaatttggcaacacaatttgattacgcttttgttgtaaaaaaaaaaaacaacaaaagagaggggggagcgatgatgaatggtattggtaacatgaagatgtgcaaatcagagagcgcgttgaaaacgttgttgccggagaaacgaatcaaacgacaagcttcaggggcggaacgtggttgcagtaagggcagcaatggtattgcaacgcaatctaatgtcgatgacaagaggaagatggagaaagctgagaatatcatgcatttgatttgctggggacccacctggtcttagatcttactaaattttatttggggttttattttgtgtagtaatgaggtgtcaggattttataataactcagacacgagctaaatccctttacaaatactatttgggtttgtttgttcattttatttttacctttttaataattattttctgttggttggatttcaaattttgcaatttcacgtatgtgtacatacggaagaagctacgtttatgttcttcaacccctgaatcagtttggagctatttgtttagaggcaaggaagaagaatgtttaagtatatttttagtgtatgtaaatatgaggatttttggttttcagtttgtagctatacgtttatatttcnntatccttaactataagtat

SEQ ID NO: 3836 - DNA, 1069 bp, Glycine max
  Clone ID: GLYMA-23APR03-CLUSTER8081_2
tgaacgttacattacaccttagtttggttttgtagcattattatccctaacccatcaaaaacagcaacaacaactattgttgaattaattgcaccaaatattgtttgttgtaattaatactccaatggggaatgccttggggggaaagaaaaccacaaaggtgatgaagattgatggggaaaccttcaagcttaaaaccccaataaaagtttgtgatgtgctaaaaaaccaccctggtcttgttttattggagtccgaggctgtgaagcattatggtataagagcgaagcctttggaggcccacaaggagttgatgccgaagaggttttacttccttgtggagcttccgaaggaggcgacggtggcgccgaggagggttcgctcggggatcaacatgagcgccaaggacaggctcgagagtctagttctggctcggcggtctgcttcggatcttacgatcatgaagcccgcttgtcgagtgagcccggcagagaatgggggactgaggcttaagatgaggctgccgaaggccgaggtggagaggctgatgagagggtgcgagacagaggctgaggctgcggagaagattatgggactttgcatggtgaatggtgggaatggaaatggggaggtgaaacattggaagggtgttagagccagagctggggaaagtactaaggcacgtgagaaaagggtgagttttatgccaatcattgaaggagggagtccaatagctgtggcttcgtaattacaacatattttacattagctttgaaacacagtgcacccttcagtgttgctgcgagccagggagagttatctcacaaaaggaatgatcttcctggtgcatagtttaatatataagagtgatgttatttacattttcatgctatatatatgttttgaagtcacaaacggtttctataactatatgggtgtttgcaattatattagtttcactagacagtaaaatgtagttcaggtacctttgtagctatgaattactgaacgtacgtatgtttcaataacattatcccacaaattattataaaaaaaaaaaaaaaaaaaa

SEQ ID NO: 3837 - DNA, 2156 bp, Glycine max
  Clone ID: GLYMA-23APR03-CLUSTER8086_1
tggagctctagtaactcagaggtggttgcttcaaacaaaaccacgttagaagaggttttggacattgagaacaacatggctcatcagtgggtgctcaatgctccagagccaccttccatgctgcgtcaggtggtggacaacgtcaaggaaaccctcttaccgcatccaaatccaaacacattctcttatctcaggaaccaacccttttccaaacgtgcctttgccttgttgcaaaatttgtttcccattcttgcttcactccaaaactacaatgcccaaaagctcaagtgcgatttaatggccggtctaacccttgcaatcttcgctattccccagtgtatgggaaatgcgactttggcgcggctaagtcctgaatatggcctatatacaggaattgtcccacctcttatttatgccatgctggcgagttcaagggagatagtgatcggacctggatccgtggattcactgctactttcctcaatgattcaaacattgaaagttcctattcatgattctagtacttacatccaacttgttttcactgtgactttttttgcgggcatttttcaagttgctttcgggctctttaggtttggttttctggtggaacatctttcacaagccacgatcgtggggttcttggcagcagctgccgtgggcattggactacaacaactgaaaggattatttgggatcgataattttaacaataaaactgatttgttttccgtggtgaaatctctttggacatcgttcaaaaaccaatcagcatggcatccctacaatttaattattggattctcatttctctgtttcatcctatttaccagattcttggggaaaaggaacaagaaactgatgtggttgtcacacgttgctcctctcctttctgttattggatcatctgctattgcatacaaaataaactttaatgagcttcaagtgaaggactacaaagttgcagtcttgggaccaattaaaggaggcagcttgaatccaagttcactccatcagttaacatttgatagccaagttgtgggtcatttgatcagaatagggttgacgattgctattatttcactcacgggatccattgctgttggccgatcatttgcatctctaaaaggacacagtattgatcccaatagagaagtggtatcattgggcataatgaacattgttggatccttaacttcttgctatattgcatcagggtctttgtcacgtactgctgtgaactataatgctggatctgaaaccatggtctccatcatagtgatggcacttacggtgctcatgtcacttaaatttttgacggggcttttatatttcactccgaaagcaatccttgcagcaataattctctcggccgtaccgggactgattgaccttaacaaagcacgtgaaatttggaaggttgataaaatggatttccttgcttgcactggagcctttttgggagtcttgtttgcatctgtggaaataggccttgcaattttgcgaggcctatttccacagatgcaaagataattataacctctattcaacctgctatagcggttattggaaggcttccaggaacggctgcattcggcgatgttgaacaatatccaatggctgtcaacattcctggggttttgatagtctctttaaaatcttcttggctttgttttgcaaatgcaaatcttgtagaggaaaggattgagagatgggtgaacaatgcaaaagctaaggatggcaaaggaggagaaaacaccttcatacacgtcattattgatgcctcaagtcttacaaatattgacactgtgggaattgcttctctggtggagctcaacaaaaatttgatttccagtggagtaaagttacgtatcgctaaccctaggtggcatgtaattcacaagctaagattagctaacttcgtgagcaaaattggaggaagggttttcctttctgtaggagaagcagtagatgcatgtgttggcactaaaatggttgctgtataacaaacaacaattgcctttctatggattaattgttttttttttgtatttggagcaaattgtcaaacatttgttagttattaattttatcacaagtatttaaaaatttaataatattaactgacaaatattggctattcatttttaataaaa

SEQ ID NO: 3838 - DNA, 620 bp, Glycine max
  Clone ID: GLYMA-23APR03-CLUSTER8087_3
aatccaaagccacttcagttattcatctgtttactaagatttcttccattcttagcttttgctcaatcaatttttttttttttttttaaagatggccaagagaaatgttgttgctaattcttcttgagaggagtaccttggcttctctggatcaaaagttggccatggccaaacactgttctcatgagggtgtgatggcaggagccaaggcagctgttgttgctactattgccactgccattccaactctcgctagtgtaaggacaataccttgggcaagagccaatctcaatcccactgctcaagctctcataatttccacagtggcaggagctgcatatttcatagtagctgacaagaccgttttggcaactgcaagaaagaactccttcaacccacccaccaatgcatgaattccaaatggataatttgaatgttgcattcggctgcactacattgggatatcttagcattatgacccaatattggaagttatcatatatgtaaatgtatttataataatatagtagaaggctttgggtttcaaagtgagagaacacatatgtaccaattatcagttaattacatgaatgcaaatcattcacctttctttctacaga

SEQ ID NO: 3839 - DNA, 1152 bp, Glycine max
  unsure (1)..(1152): unsure at all n locations
  Clone ID: GLYMA-23APR03-CLUSTER8109_8
attgttaatttaccatgacgccaccaaaatagaagcttgacctccaccctatgcaaacccgccacgtgccgctaatagcgtgtcctcgtcaacgtagcggcaaggaattacaaccatagaagagacccaccgaagaaactacctctccgaatccaaacttccttcgcttgtagnaaattcccccgattttctcgagaaagtgaaacggaattatgagctttcaggacatcgaggccgggcgccccttcggttcgaggcgcgggttgatgaatgggaagcaagaccccacgcaagcggtggctgccggcatattccagatcaacactgccgtctccaccttccagagactcgtcaacaccctcggaacccccaaagacaccctcgacctccgcgaaaagctccacaagacaagactacatattgggcaattggtgaaagatacatcagctaaacttaagcaagccagtgacattgatcaccatgctgaagttaatgcaagcaagaagattgcagatgctaaacttgcgaaagattttcaggcagtgttgaaagagtttcagaaggcacaacgtcttgcagctgagagggaaacagcatacactccttttgttccacaagcagtccttccttcgagctatacagctagcgaagtagatgttggttctgataagtcaccagaacagcgtgccctgcttgtggaatcaaggaggcaggaggttttattcttagataatgagattgccttcaatgaggctattattgaggaaagggagcaaggcattcaagaaatacaacaaaatgttccaatcaaaacctctactaggggtgatggcttttggaagggatgttgtgctggattgtgctgttgctgtgccctggattgttgtctctgattgaagttatggatttgggcttatcctctctgtcctttgtcattttctttactaatttaattttgtacttgtctaataagggtatttgtgtcctccgagacagcaaaattttatttatgtatgtgatggaatttgtatcttgttgatctttttttaactttggatagggaatcaatcccatgggcccttgttgccatttaaaaaaaaaaaaaaaaaaaaaaaaaaaaaaaaaaaaaaaaaaaaaaaaaaaaaacccccc

SEQ ID NO: 3840 - DNA, 816 bp, Glycine max
  Clone ID: GLYMA-23APR03-CLUSTER811785_1
cttcctcgccgtttctccccaacccaacccccgcccggcgcgcccgcccgcccgccccagaaaaatggagacctccttcctcccgaccgcgcggcccctcccggcgttccaaaccctagccgcggccccgcggtgcccccgccctctgcgccgctccaccatccgcgccgccatctcccgcgggcgcaaggaggacacggtcgccgtggtccgcgagcagctggaggggtgctacctcctggccggcatccgctacgagggcctgacggtgaagcagttccagggcatccgcgacgcgctgccggagtcgtgccacctcctggtggcgaagaacacgctggtggggaaggccatcgagggcaccccctgggaggcgctcaagccgtgcatgaagggcatgaacgcctggctcttcgtccacacggaggaggtccccgtcgcgctcaagccctaccgcgccttccagaaggaggagcgcgtcgaggagaccaacgacttcgtcggggccgtctttgagggcaagttttacgggcccggagacttcaaggcgctcgagactatgcccagccgcgccgaggtgtacgccacgctgctcggcgcgctgcagggacccgctacgtcgctcgtcgccacgctgcaggcgccagccaggatgtcgttgcggtgctctccgcgtacgtacgcaagctcgaagaggaggctggagccgcctagtggggttgtgaaatggttgtcatctccctttcactccctactttctgtttgtagaattctgtgtaccttaactggctcccagtcacatttgatttgatcaca

SEQ ID NO: 3841 - DNA, 790 bp, Glycine max
  unsure (1)..(790): unsure at all n locations
  Clone ID: GLYMA-23APR03-CLUSTER813461_1
gataattagtttttaaggccnctcananaanagtgcttccttttcagattcatcncccctggtattttagtcatgaattnttcaattttacacttttntttaaangtatgggngctataanatttttcgnatgttnttntcggtctatatanacccgagtgntagaatatttttgtagaaaaaaaaaaataacaganccatgatatttttgttttagatattagtccatggaatagtaggtccttatccaagcttgccaaacataaccaaataccttagatattttatagtntctgataaatcaatttgtnttagtagttgaatgntaagacattntattcatgacnctttacaaaacatgggaattttattagtaaatatacgataggtactcagaatagtacnccncaaaaccaaaattaatgttggaaaaactttggttatgtggtatttattcttatcttatgcaataaataccttgtaaccaagtggatatcttttgtaaatgttacggcatttctggtgccatacatcaatatatcttttttgccttaaaaaaaaaacaaaattaatggtcctcaaaacaccacagtacgcttccataaaaaacaaacagatttagttaacttttgtagttctggttaattataagttgtatctcactccaagggtggtacctcatggctaggaccctaacactttgattggggaaaggatgttagaaaaaggaagagaataaattagtatgacagaaagtagctttcttgctctgggaggagggggaataggt

SEQ ID NO: 3842 - DNA, 516 bp, Glycine max
  Clone ID: GLYMA-23APR03-CLUSTER813626_1
ctaacctttcctctgcgtccgcctaacactaaccctaaccctaacactaaccccaaccccaaccccaaccccaaccccaaccccaactaattcgaaattcgcttccgtggcttcttccatctcacaaggtcaattcatcttaacccaattcttcactttttctatgtagtctctggttttttccattccttaatttcgtctagttacaaaatttgaattcggtgaacgttagggtttcatattttacaaagctcgcctattcgtttcaaattcaccgattcggttaaagattttcaacaaaatcaaaattttatgggaagcaatgatagtttcggcgacaggattttcaaaacccgttcccatctggcggacgtcacgaatcgtccggcgaaaaggccgttttctttagtttctggcgatggcggggacttgcagttcacaaagctaatttcgcttaggggtagaaaatttagcaaaagagaaaaaccaaatgcaattcggagcacaggctcacct

SEQ ID NO: 3843 - DNA, 1019 bp, Glycine max
  unsure (1)..(1019): unsure at all n locations
  Clone ID: GLYMA-23APR03-CLUSTER81559_2
acatcttggccaactgggtcgcttccaataccttcagattttggtaggatttcgtgcttttgcataattcgttgagtttctgaagctatggaggcttataagagatgggtgaggcagaacaaagagtttgtgcactccatggagtctttggccaatggattgacatagcttcttcctgaacggttttctgaatcagagattggaccagaagcagtaacaactattctgggaatcatcacagctctcaatgaacatataattgatacagctcctaagcaaaatattacaggctctgtcgagccttattcatttccttatccattatgcttatctgcattaaaggatttggaaacattagttgaagttgtggcacaacaatactatgtgtttaaacagaaaaaagtcttaaactgaacaaaattttgcaaactatgacaataaagggatttctcacagcaaagcttgttgagcttataattggagctcaaacacgatacacttacatgtcaggatcatgacataaaatccagaacaaaggcctaattgccctccaagactttgggaagatagatatccttactcttctgccacactatctcctgttacaaatttttcaaatgatgaagagatatcaaacctgctactattatgattgaaaaataacaaaccatgcaagcttgaacatttcttttgcttgacaattcccaacataggtgttaagctgcaacccatgtgtggtacaaattgtttgcaaggatggctacacgatcaacaactcaatataaattggaatatttctttgggaggttttgttctacttctattcacaaaatagaggtgggtgagaattacacttgtagttctgagcatcaattggcaagttagaatgtgattattgaactcagaaaattatattatattcaaacttgttaacagttataactcttaagcctatcttccatcagcatccatgtgtgatcaaanntgtatattgaattatgctctattttttttatcac

SEQ ID NO: 3844 - DNA, 1787 bp, Glycine max
  Clone ID: GLYMA-23APR03-CLUSTER8169_1
aagcactatccctcccaccatgacaagccacattgacgacaacctctggataatagccctgacctcgaaatgcacccaagaaaaccttgcatgggtccttttgatcatgggctcactctggttaaccatgactttctattactggtcacaccccggtggtcctgcctggggcaagtactacacctactctccccccctttcaatcattcccggtcccaaaggcttccctcttattggaagcatgggcctcatgacttccctggcccatcaccgtatcgcagccgcggccgccacatgcagagccaagcgcctcatggcctttagtctcggcgacacacgtgtcatcgtcacgtgccaccccgacgtggccaaggagattctcaacagctccgtcttcgccgatcgtcccgtcaaagaatccgcatacagcctcatgtttaaccgcgccatcggcttcgcctcttacggagtttactggcgaagcctcaggagaatcgcctctaatcacctcttctgcccccgccagataaaagcctctgagctccaacgctctcaaatcgccgcccaaatggttcacatcctaaataacaagcgccaccgcagcttacgtgttcgccaagtgctgaaaaaggcttcgctcagtaacatgatgtgctccgtgtttggacaagagtataagctgcacgacccaaacagcggaatggaagaccttggaatattagtggaccaaggttatgacctgttgggcctgtttaattgggccgaccaccttccttttcttgcacatttcgacgcccaaaatatccggttcaggtgctccaacctcgtccccatggtgaaccgtttcgtcggcacaatcatcgctgaacaccgagctagtaaaaccgaaaccaatcgtgattttgttgacgtcttgctctctctcccggaacctgatcaattatcagactccgacatgatcgctgtactttgggaaatgatattcagaggaacggacacggtagcggttttgatagagtggatactcgcgaggatggcgcttcatcctcatgtgcagtccaaagttcaagaggagctagatgcagttgtcggaaaagcacgcgccgtcgcagaggatgacgtggcagtgatgacgtacctaccagcggtggtgaaggaggtgctgcggctgcacccgccgggcccacttctatcatgggcccgcttgtccatcaatgatacgaccattgatgggtatcacgtacctgcggggaccactgctatggtcaacacgtgggctatttgcagggacccacacgtgtggaaggacccactcgaatttatgcccgagaggtttgtcactgcgggtggagatgccgaattttcgatactcgggtcggatccaagacttgctccatttgggtcgggtaggagagcgtgcccagggaagactcttggatgggctacggtgaacttttgggtggcgtcgctcttgcatgagttcgaatgggtaccgtctgatgagaagggtgttgatctgacggaggtgctgaagctctctagtgaaatggctaaccctctcaccgtcaaagtgcgccccaggcgtggataagagagagttgaagcttttattaaaaagggaacaagaaaaaaagaaaatgaaatatatagaaataaaacagacaagaaagtaaagtaaagattatgcatgttgctgcatgtaggttggtggttggtggcaggtgtgcagccacacaatggtgatatggtggaagggatgggttaggctctctttttttcgtttaggg

SEQ ID NO: 3845 - DNA, 1818 bp, Glycine max
  Clone ID: GLYMA-23APR03-CLUSTER8176_2
tagttcactacctagctagctagctaaaatggaattagttctacatttcctaaacaccacaacaattggagttgtttctctaatcttcctcttgtgtttgtttttgtatggtcccttaaaaaaagttcacggtagcagcaaagaggctcccacagttggtggtgcatggccaatatttggccacctcccattgttgattggttctaagtcacctcataaagccttgggtgctttggctgagaagcatggacccttgttcaccatcaagctcggtgccaagaaggctttggtagttagcgactgggaaatggctagggaatgcttcacaacgaacgacgttgcagtttccgctcgccccaagcttctcgtcgctgagctcatgtgctacaacaacgccatgttgctcgtggcgccctacggtccctattggcgcgaactaaggaagatcattgtgacggagatcctctcctcgagccgtgtagagcaactacaagatgttcgtgtgtccgaagttcaaaattcgatcgtagaactctacgacgtttggcgtagccaaaagaacgagtctgactatgcatccgtggagttgaagcaatggtttgctcagcccatattcaacatggttctacgaatggtcgtcgggaagcggtttctgagtgccacggcgaccgacgagaaggcagagaagtgtgtaaaggctgtggatgagttcatgcgtctggcgggcgtgttcaccgtcggagacgctattccgtatttgagatggcttgattttggtggctatgagaaggccatgaaagaaactgccaaggaattggatgtgatgataagtgagtggttagaggagcatcgacaaaagagggctttgggtgagggagttgatggagctcaagacttcatgaacgtgatgctttcctcgcttgatggaaaaactattgacggaatcgatgcagatacccttatcaaatctactgtattgacaataattcaagcaggaactgaagcaagcattagtactattatttgggcaatgtgtttgatattgaaaaatcctcttatactagaaaataaagcagaactagacatccaagttggaaaagacagatgcatatgtgaatctgatataagtaacttagtatatcttcaagctgtagtcaaagaaactttaagattgtatgctccaggtcccctctcatcacctcgtgaattcgcagaggattgcactttaggtggctaccatgtcaaaaagggaactcgtctaattacaaacatttggaagattcacacggatcctaatgtttggtcagatccatttgagtttaaaccagacaggtttcttaccactcataaagatattgacgttaagggtcatcattttcagctattaccatttggaagtggtagaagggtttgccctggaatatcctttggccttcaaacagttcatttggcacttgctagtttcttgcattcctttgaaatcttaaatccgtcaactgaacctcttgatatgactgaagcctttggagtaaccaacactaaagccactccacttgaggttcttgttaaaccatgtttatctccaagttgttacaaaagtatgtgatatttaattatatgttagttgtgtgtattgttgattgttaaactatatgtaatatgttttggtgtaataaggtttgccttgcaaactattcgaaaactatttattttgttgctttcattttaatcatcacgaaggaagagatgtatttgaagaattttgttatggattatttggtcataatagtatttgggttaaggtcaaaattatacttt

SEQ ID NO: 3846 - DNA, 560 bp, Glycine max
  Clone ID: GLYMA-23APR03-CLUSTER81775_1
acgaggtaacaggtaagattctcctaatgaaatgtataaaaaaataataagaaagttgttttagtgatctatgtcgccatagctaaagggatcatagtgacaactgtgggtgagacgaaggtatgggagacgtattctacggcaacgatgaccaccgagaaatgaacgatgattgtatgtataaggaggatgtagtgatggagagcatcagaagccaacgggaaatcaaagacctcaagcgcagacaaaacaacaacaactgctgctacttctacttccttcgatgctttcactttctcacgcttctccctgctttcgtcaacttctgatgtaacctactatttgtgttatgttatcaattaactcttgaaagtttttattcccaatctagatcaaatactgtgttgcagtattcatttttattttctttggtctcaaccctctgtttttcattgatttgatataggcgcaataatgataagagtttaattcttttttgttatcatgccgagcttaataccactttgagtaacaatttattgacaaaaaaaaaaaaaaaa

SEQ ID NO: 3847 - DNA, 799 bp, Glycine max
  Clone ID: GLYMA-23APR03-CLUSTER8197_12
agttttggatctctctcttccctcacaccaatcttcagtgatttgaaaaatggcagattccaaagctggattgagtgaagccagtgtttaccaaggttgatcagcttcgcccggggaccagcgggcacactttaactgtgaaggtggtcaatgctaagatggtgatgcagaaaggtcgttctgatggtcctcaatcccgtcagatgcgaattgctgaatgtttggttggcgatgagactggaatgatcatattcactgccagaaatgatcaagtggatatgatgaaagaggctgctactgtgatcctgcgcaatgccaaaattgacatgttcaaaggatcaatgaggtttgctgtggacaagtggggccgtgtggaagtcacagaacctgctagttttactgtgaaggaagataataacttgtctctcattgagtatgaactggtgaatgttgttgtggaatgacttattgggacctcttggaatttctaatgagaaaaaaactcatcatgctcatcacagttcacctgagtttaggaatagagatttgagaagccagtagtaccaacagttgcttcttactgttgcaacagactatgtggatcttgtagcttaaccactgaacagatggtggattgaagtgcaagaaaatgggaattggcttccagatcatgctttttgttatgctctctgttgacattttagattatgtgtttcttcatctactacggattgcatgtatcagaatattaatatatggcagatggttgtttatatttgagaaaaaaaaaaaaaaaaaa

SEQ ID NO: 3848 - DNA, 1381 bp, Glycine max
  unsure (1)..(1381): unsure at all n locations
  Clone ID: GLYMA-23APR03-CLUSTER8197_16
atcattttgagtggnagtgtgcaatctacaaggctctnactcgttacacccactgcgtgtcacaccgcacaanaaacccaaaatcgccgtcaacggccgaaaaccaccgcaacttgngacgccngatgaccganagagacaaatttaaaatgtcgcttgtcgattacgcttnctcttcagacgacgacgttccggaacccactgaagaagaacaccgtnaaaaggangagccccaatcncctcctcttcgttccaagactaaatctggatcttnatctaaccagcagctnnaaaataaaccacattcatctccgccttcagtggagaaacttcctgangcttctcttcttttggatgcacccactgtctcatctaatctaatgagtgctagtgaccacttctctcgagttgccgctgctcaagctgaaaatgcttcacggaagcgagactcaaatggaatggcatcctctactgttcgaagtaaagttcccagagcaaacttgccccattcaaggaatgttccagaaacttctggtagtatgctagttccacctcagatcagtggaaggaaaaatgttgttacagaagacataagcaagctctttgtaaaaaaacaacactaacattcatataacgttagaagtttgcatattaaaattaatgatgggtaagaaatgtaaacccgaagatgtggcacttctcctgcttgaaagtgcttgctatcgtagaaagtgtacttgtttaacttttaagtttgtttacccgtaagtagtacttcgtctagttgatcatattacgttgttaacttacagcttagccaagtaaaaaaaaatggagcagaaacccgacgggtgatttgcttcaccgcatatttattggatttgcagttacgatttaggattcttgagaatactatgaaagatattttcaaaaaaaaaaaaaaaaaattcctgcggccgcgaattcttcctccgcagcaatggtgaacgttccgaagacaaagaagacctactgcaagagcaaggagtgcaggaagcacacgctccacaaggtcacccaatacaagaagggcaaggacagcatcgccgctcagggaaaacgccgttatgaccgcaaacagtccggttacggtggccagactaagcctgttttccacaaaaaggccaaaaccaccaagaaaattgtgttgaggctccagtgtcagggatgcaagcatgtctcgcagcacgctatcaagaggtgcaagcattttgagatcggtggtgacaagaagggaaaaggaacctctctgttctagatggaatattagaatttgcaatttcgctttgtttaagcactgattatagtattaattactagtttctcttcctttccttaaaaa

SEQ ID NO: 3849 - DNA, 1299 bp, Glycine max
  Clone ID: GLYMA-23APR03-CLUSTER8198_13
ttttttttttttttttggataaaggatttcattaactagaataaacacaaacagatttaagagatcttgaaacaaggggatacatatcttttggcctgctgagtttccatattaaacatgtgataaacattatcctcttcaaagagttccactttccctgaagagtaggtgatccttaccggcaacagtaagaagcatcttagaacagccaatggggttatacatttggatcaacagaagatgatggctgaaggtgattatatatttaatgaactcttgtctccccacacttatctctgaattggatcaatggcgaagaaggaagagaaggagatagtgaaagagctccttcctctaattcgagtgtacaaggatggcagcgtggagcgtcttccctgaagatccccaaactggagtctcatccaaagacatagtgatcgcagacaacccctacgtctccgctcgcattttccttcccaaatcccaccacactaacaacaaactccccatcttcctctacttccacggtggcgccttttgcgtcgaatccgccttctcctttttcgtccaccgctatctcaacatcttagcctcagaagccaacataatagccatctccgttgacttcagactcctcccacaccaccctatccctgctgcctaccaagacggttggaccaccctccaatggattgcttcccacgccaacaacaccaacaacaccaatccggagccatggctactcaaccacgccgacttcaccaaagtctacgtaggaggtgaaaccagcggtgctaacatcgcacacaacttgcttttgcgtgcaggtaacgaatccctccccggggatctgaaaatattgggtggattactatgctgccccttcttctggggctcgaagccaattgggtcggaggctgttgaggggcacgagcagagtttggccatgaaggtctggaactttgcctgccccgatgcccccggtggaattgacaacccctgtgttcctggggcaccctctttggccactcttgcctgctctaagttgctcgttactatcactggcaaagacgagttcagagacagagatattctctaccaccacaccgttaagaaaagtggctggctaggtgaacttcaactctttgatgctggcgatgaggagcatgctttccagctcttcaagcctgagactcatcttgctaaagccatgatcaaacgcttggcttcttttctagtttgatttcaggattcatcccaggcaataatggcattaattggttacgttacgagagattg

SEQ ID NO: 3850 - DNA, 1762 bp, Glycine max
  Clone ID: GLYMA-23APR03-CLUSTER8245_2
gagaagcagatcctacgataaacaatcttcacaactatccaaaatggagtttgttctaaattacctaaatgccactgccattggagttctttctctaatcctcttctgtatgttcttgtataatcctttcaaaattgcattaggtaaacaagatgctcccacagttgcaggtgcatggccaatacttggtcaccttccactattgagtggttcagagacaccccatagggttttgggtgctttggctgataagtatggacccatattcaccatcaagattggtgtcaaaaaggctttggtaattagcaactgggaaatagctaaggaatgcttcaccacaaacgacattgtcgtttcgtctcgccccaagcttgttgccattgaactcatgtgctacaaccaagccatgtttgggtttgcaccctatggtccttattggcgccaactaagaaagattgtaaacttagaaatcctctccaatcgccgagtagagcaactacagcacgttcatgtctcagaagttcaaagttcaatcaaagagctcttcaatgtttggtcaagcaaaaagaatgagtctggctatgcgttggtggagttgaatcaatggttttctcatttgacattcaacacggttcttcgagtggtcgttggaaagcgacttttcggtgctacaactatgaatgatgaggaggctcagagatgtctgaaggctgtggaagagttcatgcgtctgttgggggtgttcacggtggcagatgccattcctttcttgagatggtttgattttggcggccatgagagggctatgaaagaaactgccaaagatttggacaagatttttggtgagtggttagaggagcacaaacgaaaaagggcttttggtgagaacgttgatggaattcaagacttcatggacgtgatgctttccttgtttgatggaaaaacaattgatggcatacatgcggataccatcatcaaatccactttactgtcagtaatttcaggaggaactgaaacaaacactactactcttacatgggcaatatgtttgatattgagaaatcctattgtattggaaaacattaaagccgaacttaacttccaagttggaaaagagagatgtataagtgaatctgatgtagcgaagctagcataccttcaggctgtggtcaaagaaacttttagattgtacccagcaggtcctctctcagcacctcgtgaattcataggggattgcactttaggcggctataatgtcaaaaaaggaactcgtctaattacaaatctttggaagattcacacagatcctagtgtttggtcaaattcattagagttcaaaccagaaaggtttcttaccacccataaagacattgatgttaggggacatcattttgaactattaccatttggtggtggtagaagagtgtgtcctggaatatcttttagccttcaattggttcatttcactcttgccaatctttttcattcttttgaattcttaaatccatcaaatgaacccattgatatgactgaaacccttggattaaccaacactaaagccactccacttgagattcttattaaacctcgattatctcctagttgttatgtatgaaagcatgtgattcttgtgtgttagcggtgtgtttaaagtccattgttaaactatatgtgatcttctttacttaaataaggtttgggtaatagaccattatcttctttaattgtctcttacatttatttcaaccatgcattgttgagg

SEQ ID NO: 3851 - DNA, 1991 bp, Glycine max
  Clone ID: GLYMA-23APR03-CLUSTER8262_2
tcgaagccgaagtggcggaggtgcaagcatggtggaactctgagaggttcaggctaacaaaaaggccatacacagcaagagatgtagtgtccctccgaggcaacctcagacaaacctatgcctcgaacgagatggcgaaaaagctatggcgcctcctgaagaaccaccaagctaatggaacagcctcgaggacttttggtgcacttgatcctgttcaggtcacccaaatggccaagcacttggatacgatctatgtctcagggtggcagtgttcagccacacacaccacgagcaacgagcccggtcctgaccttgctgattacccttatgacactgtcccaaacaaggttgagcacctcttctttgctcagcagtaccatgacaggaagcaaaaagaggagaggatgagaatgagcagggaagagagggcaaggacaccttatgttgattacttgaggccaatcatagctgatggtgacactggctttggtggcaccacagcaactgtcaagctatgcaagctctttgttgagagaggtgctgctggaatccacattgaggaccagtcttcagtgaccaaaaaatgtggtcacatggctgggaaagtgcttgttgccatcagtgaacacatcaacaggcttgtggctgcaaggcttcagtttgatgtcatgggggtggaaactgttctggtggcaagaacagatgcagaagctgctaatttgattcaatcaaacattgacacaagggaccatcaatttatcttgggagtgaccaaccccaaccttaaggggaagagcttagcaactcttatgcaacaaggcatggctgctggaaaaaatggagctgagcttcaggctttggaggatgagtggctctcaaaggcacagttgaagactctctcagaagcagttgtggaggcaattgagaggcagaacaacattggagaggaagaaaaaagaaggaagctaaatgagtggatgcaccattcaagctatgaaaggtgcctttctaatgaggaaggtagggaaattgctgaaaagttaggagtgagaaacctcttttgggattgggacttgcctaggactagagaaggtttttataggttcaaaggttcagtgactgcatcagttgttagaggttgtgctttttctccacatgctgatgttatatggatggagactgcaagcccaaatgtggttgagtgcacagagttttccgagggggttaggtcaaagcaccctcagatgatgcttggatacaacctctctccatctttcaactgggatgcttctggaatgagtgatgaacaaatgaaggatttcattccaaagattgcaaagttggggtatgtgtggcagttcatcactgtgggaggtcttcattccaatgcactcataacttcaacatttgcaagggattttgccaataggggaatgctggcttatgtggagaggattcagagagaggagaggaacaatggggttgacacactagctcaccaaaaatgggctggtgctaattactatgataggtacctcaagactgtccagggaggtgtggcttcaactgctgcaatgggaaaaggagtaactgaagagcagtttaaagaatcatggactagatcaggagctgtaaacattgatagaggcagtattgtggttgctaaggccagaatgtgaaagtgctacttctgccgaactatgctgcatgctgagagtggaacttaatggaaaattcaccaatttctgtgttggattggaataaatgtcctcaataatataaacaggccattgaatcattctgctattttttcctgcataatttgttacatttcttactagttcagactctttagccatgtgggcaaggagaacaaggaaaacttgtttctgtgttttgtaatttgttttactcctactgttaaacatattttacttatagtgtgtatttggacatgcaattgtggacaaggagcacgaaatcttgtttta

SEQ ID NO: 3852 - DNA, 2587 bp, Glycine max
  Clone ID: GLYMA-23APR03-CLUSTER8270_1
tttttccccaagcatctatggtaagtttttgcacttgttatttatcattgcatttcttgcttaataaataggatgatgccttagtaatttctaatgaccaatcatgcattcaaaatgttactagattgcattagcttatcatgtgattgttgacaactcctaataatgcctctatacaatagttatgtctgaagctattgcatttgttttgttttctattttaggaatacactatttttcccttctaatttgttagtgcatatgaatatttgatgaatacatactctgacatggatattactttgttcaggatgcatggcactgtgacatatgtggttctaaatctggaaggggatttgaggcaacttatgaagtgttacctaggcttaatgaaatcaaatttggcagtggagtaattgatgaactattgtttctggacagcttggtgcccacctctcacaccatggttctgcgtggtgttttcactgtgccaagagatgcttctttttcgcagtgcagatatacgatgctgctcatgcagttagttttgttcacctatagacttcgaatgcttcttggtgaaggttgctcttgttgtaattctgaacagggcctctaagctgctttgcaagtaactggtcctgctttaattccagtctcaatgcagtactcgcctgtaggtggtttcccatgtccctatctaaccccacagcagcagcatcaacaactccttcaaccgcgcacattaagagaaactggttaagtgcgtctatatcaatcacatgcgtggtgctcatgatggtctacttcgtagcataatctcttaagacttgtagagattgaattgtcagatatctgtcaggggactgcaagaacatcttcttggtaggtacattgcaacgtggaatgagattcgcttccaggtggtgcaatgatgtcaatggaaaagcactgaaagtgggtctgatggagcttctcaacaagactttgttcaagagaaggaatatgtgcttcaaagcagcgttcgagaaggtcaacttcgtagcatattcactcaagacttgaagatattgtcctgggagttctgtgcaaggtgtccagatgaacgacgtcgtcgaaggtatgatagaccaaatatcaaccagttagttcaggtagctaaaaaatgtcaaagtacaattgctgaaagtgggtctgatgggggttctcaacaagacattcaaacaaacagcaacatgttgttgacagctgggggtcagcttgcgaagattttggagatgcaatcgctaaatgagttgggcttttctaaaagatacgtgagatgtttgcaaatttcggaagttgtcaatagcatgaaagacctaatagatatctgtgcagatcacaaaattggtgcaattgagagtttaaaaaattatcctcgtctagcaacagcctcaaaggtccagatgcagaagatgcaggaaatggaacagctagcaaatgttcaaggtctgccaactgatcgaaacacactcaataagctaatggcactgaatcctggattgaacaaccatataaacaaccctcataatatggttaatcgtggtgctttgagtgggtcagcccaagctgctttagcactgaacaactaccaaaatcttctcatgaggcaaaattcaatgaactctagccctggctcacttcagcgcgaagggtcctctttcaataattcaaaccagagtccatcttcagctttgcaaggagctggtcctgctttaattccaggcccaatgcagaattcatctgttagtggtttcccaagcccccgtctacccccacagcagcagcaacaccacctacaacagccctcattaagtgcaaatgctttactgcaacaaaatcattcacagggttcccaaggaaatcaagctctgcagcagcagatgatccatcaactactgcaggagatgtcaaataacaatgggggagtgcaaccacagtctcttggtggacccagtgcaaatatggcaaagaatgcaatggggtttgggggccataatccatccttaagcggaggttctgccaatgttacaggaaacaatggacctatgtcaaggaataatagcttcaaaacaacttcaaatagtgattcttctgctgctggtggcaacaatggattaaaccagagaacatctgagatgccacaaaatctacatttgcaagatgtggttcaggatattggcaatgaattcacggataatcccttccttaacagtgatcttgatgataacatgggttttggctggaaggcatgactaacacaatcttggacatgaaatcggcatatcatgtgttgatgaagtgtttatcttattatctttgtacaggacactttaaatagatgctgtttttttccttgtttttccctgttattttcttgatggaatttgtttggactcggactcggactcgagtaggtttttagagattttatttgagggtttttgtcctgcaagtgtaatctattggacaatttaatgaacagttagtttattatacggcactcaaaaaaaaaaaaaaaaaaaaaaaaaattcctgcggccgc

SEQ ID NO: 3853 - DNA, 1058 bp, Glycine max
  Clone ID: GLYMA-23APR03-CLUSTER8272_1
tattaagcaagtcaaaatcactgtttgattttgcagacaagtataggggttcttactcgggttcttgtccattctattgctcgtactcaggttaccaggatgaactgttatgggctgcttcttggctatataaggcgagtggagaaagcaagtacttgagttactccataggcaaccaaggttggagtcaggcggtgtctgaattcagctgggataacaaatatgttggagctcagacattactaacggaggaattctatggtgggaagaaagacttggccaagtttaagagtgacgttgaatcatttatatgttcagtgatgccagcaagtagctctctacagattaaaacaactcctggtgggcttctatttactagagacagcagtaatttgcaatatgccacgagctcaaccatggtgctattcattttctctaaaatcctaaacagaaatcacattgatagaatacattgtggttctgcgcttttcaccccgtctcagattagagcctttgcaaaaacacaggtggactacatactaggaagcaatccgatgaagatgtcttacatggtgggatttggcagtaaatacccaaagcaattacatcacagaggctcatccatcccttcaatcaatgttcatccgaccaaggtgggttgcaatgatggtctctcagtttattacaattctgctaatccaaatccaaatactcatgtgggtgcgattgttggaggccccgattcaaatgaccgattcagtgatgcaagatctgactattcccacagcgaacctaccacctacatgaatgctgctttcgtggcttcagtgtctgctttgcttggcaaaacgaccgatcgaaaccaaattcaggactctgcagtttccccatatcgatgctagggaaactaatgaagttaattaatgtaacataatcaccgattatatatgtgtcagtggtactagttatttaccctgccatatattgaaactccacttttatgggctggtataataaaatcatacgtactgttttaccaactgccaaaaaaaaaaaaa

SEQ ID NO: 3854 - DNA, 1100 bp, Glycine max
  unsure (1)..(1100): unsure at all n locations
  Clone ID: GLYMA-23APR03-CLUSTER8283_2
aaaattaacattcttcttccaggacaacagcaacttctagtgagtgaagttgctaatgcatccaagggacctgtgattcttgtcataatgtctggtgggggcatggacgtgtcctttgctaaatctaatgataaaatcacaagcatcctttggattggctaccctggtgaagctggtggagctgccatagctgatgttatttttgggtcttataatccaagtaagtcattcacagcctcccttgtatnaaaaaaattccaatcctataatgatacttctttgacactgatggataatttncctaatgcaggtggaaggctacccatgacatggtatccgcaatcatacgtaaacaaggtaccaatgacaaacatgaacatgagggcagatcctgctacaggttaccctggtagaacatatagattttataaaggggaaactgttttctcctttggagatggaataagcttctcaagtattgaacacaaaattgttaaagcaccacaattggtgtctgttcctctagcagaagatcatgaatgccgttcctcagaatgcatgtcacttgatgttgctgatgagcattgccaaaacttggcctttgatattcacctcggggttaagaacatggggaaaatgagcagtagccatgtagtgttattgttctttactcctcctgacgtgcataatgctcctcagaaacacttgttgggttttgagaaagtgcacttgccaggaaaatcagaagcacaggttaggttcaaggtagatatttgcaaggatttgagtgtggttgatgaacttggcaataggaaagttccactgggacaacatctgcttcatgtcggaaacttgaagcatcaattaagtgtgagtgtttgaaacaagtcttcaaatcatcttcactattttttttttccttttttcctccctggtttccttaaaagaattcttctagggaaccagaaataagtcggaggaaactgtaacaaaattctctgatttgtattatcatattcaaatcacaaatttggaaacaaaatcaaattttgattagagcccaaaaaaaaaaaaaaaaaaaaaaaaaacggatgcgtggg

SEQ ID NO: 3855 - DNA, 947 bp, Glycine max
  Clone ID: GLYMA-23APR03-CLUSTER8409_7
gagttccagccgcagtgcgtgaccaacacgcttcagatccccacttacttttactacacttccggcgcctccaccctcgccgttttcctttatcaaactatctttcatgaaaactacacaaagtctctcaaggacctcaacatgcacgtcgaaatcccagggttaccgaagatccacaccgatgacatgccggagacggtgcaggatcgtgcgaaagaagtttaccaggttttcatcgacatcgccacgtgcatgagggacagtgacggggttatagtaaacacgtgtgaagccatggaagagagggttgtggaagctttttccgaagggttaatggaaggaaccacgccgaaagtgttttgcattggacccgtcattgcttctgcttcttgtagaagggatgataacgagtgtttgagttggctcgattcacaaccgagtcatagtgttttgtttctgagtttcggaagcatggggagattctcgaggactcagttgggagagattgctattgggttggagaagagtgagcaaaggttcttgtgggttgtgaggagcgagttcgaaaatggtgactcggttgaaccaccaagtttggacgagttgttgccggaagggtttttggagaggaccaaggagaagggaatggtggtgagggactgggccccacaggcggcgatactgagtcatgactcggtgggtgggttcgtaactcactgcggctggaactcggtgttggaggcggtttgtgaagctgtgccaatggtggcgtggcctctctacgcggagcagaagatgaataaggtgatcttggtggaggaaatgaaggtgggtttggcggtgaagcaaaacaaagacggcttagtgagttctaccgagttgagggaccgagtcatggaactcatggactcggacagagggaaagaattagacagaggattttaaat

SEQ ID NO: 3856 - DNA, 1418 bp, Glycine max
  Clone ID: GLYMA-23APR03-CLUSTER8410_2
gagaaaagccatgcaaatggaaagaagcaaaggaagagtgtgtgttacaggaggtacaggttttattggttcatggattatcaagaggctccttcaagatggttactctgttaacaccactatgagaccccacccaggacacaagaaagatgttagcttccttaccagcttacctggagcatcccaaaggctacaaattttgagtgctgatcttagcaatccagaaagtttcagtgcatccattgaagggtgcattggagttttccatgttgctaccccagttgactttgaactaaaggaaccggaggaagtagtgacgaaaagatccattgatggcgcactaggaattttgaaggcatgcctcggttccaagactgtgaagcgagttgtttacacctctagtgcttctgctgtgacttccagtggcatagaagaacaagtgatggatgaaagctcgtggagcgacgtggatagtcttagagcctcaaagccatttggttggtcatatgcggtttcaaagacattgacagaaaaggcagtgcttgaatttggagagcagaatggattggatgttgtcacactaattccaacttttgtttttggacccttcatttgtccaaatcttcctggctcggtccaagcttcattgagttttgcatttggagaaaaaagtgcctttggtttcatgcttcagacacccatggtgcatgtggatgacgtggctagagcgcatatatttctgctggaacttcctaatccaaaagggaggtataattgttcacagtgtctggtaacttttgaaaggatctctgaacttgtttctgccaagtaccccgaatttcaactaggcacaatggacttgtccaagcaagttgaaggtatcaagctaccagatttatcatcaaagaagctggtagatgctggatttgtgtacaagtatggacttgaggaaatgcttgatgatgcgatccaatgctgcaaaagaaaagggttacctgtgaggtagttgtgctgcgtacccttttatatatcataggatgaggattgttatacatataatgaaacaacagttatctgtgctaaaacacggtttgggatttgcttgcttttgggattggatagcactggcaattaaacctgctatttccagtgtaatatggtttgtattaaatatatctagtaacatataatgtattgattgtgacaaatctacattcacatctttcataaaagtaataaaggtgtgagagtgttcaatgacttctagaaatgctttcaaggaacatgcatttcaatttggatgtttgtaaacaagaatggtctaagtcctgaaattttaggtagggagatatgatgaagtaattgaattgctgtattcagcccttctcattatcagtatgatccattttcaatttatc

SEQ ID NO: 3857 - DNA, 3017 bp, Glycine max
  Clone ID: GLYMA-23APR03-CLUSTER8442_1
cagagagaatattattagcgcctagagacaaagacgatcaattcatcacaagcaagttcccatgaccggtaacgagtttcgcttcttcttgtcctgcggattcgccatggctgctacggcttcagcttccgctgcttctctctcccttcgctcttctcccttcaaactcaaccctccaaaactcaactccgttacgctccgtttccctcaccttaatcgccgttataacagcgccttcagagtcgtcgccgcttccgtttccgtctccaaccccaacgtgcaaaccggccccgacgatctcgttgcttccattctctcaaaggtggtgcaaacggatggaggagtattgctgaaggaggaagagcataaagaggtggccgaagtggctcaggaactgcaaaagtattgcgtgagtgagccagtgaaatgccctttaatatttggagagtgggatgtggcatactgttcacggccaacatcaccaggtggtggctataggagtgccattgggcgccttttcttcaacacaaagcaaatggttcaagttgttgaagctcctgatattgtgagaaacaaggtctcactttctgtattaagctttgtgggtgtggaggtttcgcttgcagtgaaaactcaaggctatagttgatgaatggaaacacgttatatttggaagtcctcaattgtacctggtagtggagtactgtaattttgagcatcgagttgtttttcaggaatcaggtgcttatttctattttccatcacctagaaaatccaattattatattgttgttgtctttgatgctgaagttggataaagaaatccctctgagcacaaacagttaaagctggccaggagtttgacccgtggtgtcatagacagagatctgaagccaagctcaaatgagagaaagtccattcagcgaatactaaaatatccaccgacaaggactttgagtggagatgagaggcagctcttgtggaaatttcgattctctttgatgtctgaaaagagggctcttacaaagttcctgcgttgtgttgaatggagtgatgtccaggaagcaaaacaagcattagagttgatgggcaagtgggaaatgattgatgtttgtgatgcactggaacttttgtcgcctgtttttgaaagtgaagaggtccgtgcttatgcagttagtgttcttgaaagagctgatgatgaagaacttcagtgttatttgcttcaattggttcaagctcttcggtttgagcgttctgacaaatctcgcctttctcatttccttgtccagcgtgcattacgcaatattgaattggcaagctttcttcgctggtatgtggctgttgaactttatgatcctgcatatgccaaacgattttactgcacttatgagattctggaggagaatatgatgaagatagcagctggtgttaatggagaggaagatgggtttaaacagtggcagagtttggtacgccagacagaattgactgctcagttgtgttcaatcactagagaagtaaggaatgttcgtggtaatacacagaagaagattgaaaagctgagacaactactttctggtcttcttagtgaacttacctattttgatgagccaatacgatcacctttggcaccaggtgtcctcattgctggaattgtaccttcagagtcatcaatatttaaaagtgcattgcatcctttgcgcctttcttttagaacagcaaatggtggaacatgcaaaatcatatttaaaaagggtgacgatcttcggcaggaccagttggttgttcaaatggtatcactaatggatcgattgcttaagttggaaaatcttgatctgcacctaacaccatacaaggtgctagcaactggacaagatgaaggcatgttggaatttattccatctcgctcattggcacagattttgtcagagaatcgtagcatcataagctatttgcaaaagtttcatcctgatgaccatgggccttttggaattacagccacctgccttgaaacatttataaaaagctgtgctggatactctgttataacatatatacttggtatcggagacaggcatttagacaatctcctccttagaaatgatggaggtcttttccatgttgattttggttttattcttggccgagatcctaagccatttccaccaccaatgaagctttgcaaggaaatggttgaggctatgggtggagctgaaagccaatattatacaaggttcaagtcctattgttgtgaagcatacaacattcttcgcaaatccagtaacctaattttgaatctattttacctaatggcgggttccaatattcctgatatagcttctgatcctgaaaaggggattcttaagcttcaggaaaagtttcggttggacttggatgatgaagccagtatacatttcttccaggatcttatcaatgagagtgtgagtgcattattccctcagatggttgagactatccatcgttgggctcaatattggcggtaaccccaatatttattgggtgttattacaccaagtaattaaccagcatctgatgctgtctttttaggcttcttcgaagcttaaaacgtatgtggttttatcttctcttggaactccacactcagatcccactgcagctgtatgcgcttctaatttctgaactaattatcctgaaggccacttagtgacattgtctatgtaaataaattagttctctttcgctcttctggttacggttgcttcaagactgcagcataacttaaaaaatcgtatcatacacaaactaatggttgtttaagtgaaaccatcctatttcatttttgtaaataactcttgcctggttataatctgtagtttgatatatatgtaaagtaacttttagttatgatgtttggccactttgctggggtaaattatcaaaactgtatctgtaagaactgttgatttatttttatattaataataaattttttattatttttttaaaaaaaaaaaaaaaaaaaaaaaaaaaaaaaa

SEQ ID NO: 3858 - DNA, 2830 bp, Glycine max
  Clone ID: GLYMA-23APR03-CLUSTER8442_3
ggcacgagggaagaagaagggtgttgtgtcaggtgtgagcacagagaatagcaccacgcagagagaccaagacgatcatcaattcaacgaaccttaattcatcacaaacaagttccaatgaccggtaacgagtttcgcttcttcttgtcctgcgatatcagtgttcctgtaaccttccgcgttgagcgccttgaaggcaatttgccccttcccaaatcacctgatttagaaaataatgcccccacagataatagaacgacagagttgtttgtggagtgtgcattgtacattgatggtgcaccgtttggccttcctatgagaacaaggttagagtccttaggaccatcatattgttggaacgagctcatcactttgacaactaaatatcgagacttaactgctcagtcacaactcaccttcactgtttgggatctttcgcatggtgaaggattaattggaggagccacaattcttctcttcaacaacaaaaagcagctgaaaactgggaagcaaaagcttaggctttgggcaggaaaagaggcagatggaacattccctactagtacacctggaaaggtccctaggcatgaacgtggggaattggaacgattagaaaagcttgtgaataagtatgaacgaggtcaaattcaacgggtggactggctggatcgcctcacatttaaaactatggagagaatcaaggaacgtgaaagcttgaaaaatggaagttctcatatgtaccttgttgtagacttctgtagttttgagcatcgagttgtttttcaggaatcaggtgcaaatttcttgtttccatcacctatagcctccaccaatgatattgttgttgtctgggatcctgaagtgggaaagataaatccctctgagcacaaacagttaaagctggccaggagtttgacccgtggtgtcatagacagagatctgaagccaagctcaaatgagagaaagtccattcagagaatactaaaatatccaccaacaaggactttgagtggagatgagaggcagctcttgtggaaattccgcttctctttgatgtctgaaaagagggctcttacaaagttcctgcgttgtgttgaatggagtgatgttcaggaagccaaacaagcattagaattgatgggcaagtgggaaatgattgatgtttgtgatgcactggaacttttgtcgcctgtttttgaaagtgaagaggtccgtgcttatgcagttagtgttcttgaaagagctgatgatgaagagcttcagtgttatttgcttcaattggttcaggctcttcggtttgagcgttctgccaaatctcgcctttctcatttccttatccagtgtgctttacgcaatattgaattggcaagctttcttcgctggtatgtggctgttgaactttacgatcctgcatatgccaaacgattttactgcacttatgagattctggaggagaatatgatgaagatagcagctggtgttaatggagaggaagatgggtttaaacagtggcagagcttggtacgccagacagaattgactgctcagttgtgttcaatcactagagaagtaagtaatgttcgtggtaatacacagaagaagattgaaaagcttagacaactactttctggtcttcttagtgaacttacctattttgatgagccaatacgatcacctttggcaccaggtgtcctcattactggaattgtaccttcagagtcatcaatatttaaaagtgcattgcatcctttgcgccttacttttagagcagcaaatggtggaacttgtaaaatcatatttaaaaagggcgacgatattcggcaggaccagttggttgttcaaatggtatcactaatggatcgattgcttaagttagaaaatcttgatctacacctaacaccatacaaggtgctagcaactggacaagatgaaggcatgttggaatttattccatcccgctcattggcacaaattttatccgagaatcgtagcatcataagctatttgcaaaagtttcatcctgatgaccatgggccttttggaattacagccacctgccttgaaacatttataaaaagctgtgctggctactctgttataacatatatacttggtatcggagacaggcacttagacaatctcctccttagaaatgacggaggtcttttccatgttgattttggttttattcttgggcgagatcctaagccatttccaccaccaatgaagctttgcaaggaaatggttgaggctatgggtggagctgaaagccaatattatacaaggttcaagtcctattgttgtgaagcataccacattcttcgcaaatccagtaacctaattttgaatctattttacttaatggcgggttccaatattcctgatatagcttctgatcctgaaaaggggattcttaagcttcaggaaaagtttcggttggacttggatgatgaagccagtatacatttcttccaggatcttatcaatgagagtgtgagtgcattattccctcagatggttgagactatccatcgttgggctcaatattggcggtaaccccaatatttattgggtgttactgcaccaagtaattaaccaggccacttagtgacattggcggcaacaatgacattggcctcaagacagcatcataacttaaaaaatcgttatcatacacagactaatggttgtttggtttaaatcatcctatttcatttttgtaaataactcttacctggtcataatctgcagtttgatatatatgtaaataacttttgctatgatgtttggccagtttacaagggtaaatgatcaaaactgtatctgcacg

SEQ ID NO: 3859 - DNA, 722 bp, Glycine max
  Clone ID: GLYMA-23APR03-CLUSTER8448_4
atagattttcttccttggaaggcaacacatcccactggtcacgtgttggtccaaacatccttcttctttttattttccgcactttaaaaaccactattccacaacacacaccacacaaatctccttcctcgtaacaatgtccgacacggaaaccacgctcgagcaaccctccactccgccgcagcccgacccctccgccgccgtatccttcagcatatggccccccactcagcgcacccgcgacgccgtcgtcaaccgcttgatcgagaccctttccgccccctccgtcctctccaagcgctacggcactctctcctccgacgaatcctcctccgccgcccgccagatcgaggacgaggccttctccgctgcctcctcttccgacggcattgagaccctccaggtctactccaaggagatcagcaagcgcatgctcgacaccgttaaggccagagctgcgccgattccctccgccgaagagggcgtcgccgcctccgtctccgactaattgtgtgttctgcgatgatgtagagttactttctcttgtgtgcgtgtaggtttttgttgcatccaattgtggtaataatattaatccatcaatttcattctcatcatgtagtgtttgcgtgttgagttttataaattgagcttctcagattttgtgcgcgattgaaactatatttatctcaggttagtaatagttacatagtgatgttggttcc

SEQ ID NO: 3860 - DNA, 1408 bp, Glycine max
  Clone ID: GLYMA-23APR03-CLUSTER8453_6
gcaagccccttgagcaagaaagcaagcaaattagtgcagagtgagtgagtgagcaagcaaataaaacccaaacaaacgcttctcattctctctctactcgttttgaagatgtttctcacaaggtgaactcctccctccctcttttgctgcaaaatttgcatttccatttaattgaggaactgattaggggttttctgtttgtttaattgcgtgagtgaaatctaacaggactgagtatgaccgaggagtcaacaccttttcccccgaaggacgtttgtttcaggttgagtatgcaatcgaagccatcaagctgggatcaactgcgattgggttgaagaccaaagagggtgttgtcctcgcagttgaaaagcgcatcacttccgccgctcctggagcctagtagtgttgagaaaattatggaaattgatgagcacataggatgtgcaatgagtggattgattgctgatgctcgaacacttgttgagcatgcacgggttgaaactcaggtactgtgaaccttatagcatattttaggtagttgattagctaatgatggatatgttttggtttattgttcacagaatcataggttctcctatggtgaaccaatgactgttgagtccacaacccaagctctttgtgatctagccttgcgttttggtgaaggtgatgaagaatccatgtctcgaccatttggagtatctcttctcattgctggccatgatgagaatggacctagcttatattacactgatccatctggcacattttggcaatgcaatggaaaagctatcggttcagggtcagaaggtgccgacagttctctgcaagaacaatacaacaaggacctaactcttcaagaagctgagactattgctttatccattttgaagcaagttatggaagagaaggtcactcccaacaatgtcgacattgccaaggtggctccaacatatcatctttataccccctctgaggtggaagctgtgataagtcgtctatgattttcttttcgtgactttctctattcaacatttgtgtttcctatcattcctgcctgacgtctaattattgagtattatgcggaaacttttttggtgggtgatgtttacatgtgctacacttgtggccaagttgtacactgtacgagattctggtgtcatttgctgcattcggtctagttgaaattgagtactataagggtttcaatgtttttgggaaaatcgtaatctattacccgaataccgagctagatttttactgtatgagatattaaggaacggggagacgatggaggaaaaaagaattacacaaagtatctatatgcattatgtgtatactattgaaagaattaggatttattttaaccatcttttattcctcgtagtcaaagcaaattgctcacctc

SEQ ID NO: 3861 - DNA, 505 bp, Glycine max
  Clone ID: GLYMA-23APR03-CLUSTER8461_10
gtgtgctactttccattcgttcaccgccccaatctctgcagcgccttcgatctagaaaacatgactaagagaacaaagaaggctggcattgttggaaaatacggtacccgttatggtgccagtctgcgaaagcagattaagaagatggaagttagtcagcacagcaaatttttctgtgaattttgtgggaagtatgctgtgaagaggaaagctgtaggaatatggggatgcaaggactgtgtaccgcaagtgctgtgacggtacggagcaccatcaggaggttgagggagcaaactgagagttgagctttttgttgatgttatcaattactattagactttgcgtgatatgcctagtttgtgttcactgaactgcattggttgtattcaaagtaaactccttaaagtttaattttgagatgactcttttaattttagttgtttggaactctttgtcagagtgattttgcttcatagttttattttattgttttcaattctaaaaa

SEQ ID NO: 3862 - DNA, 1288 bp, Glycine max
  unsure (1)..(1288): unsure at all n locations
  Clone ID: GLYMA-23APR03-CLUSTER85138_1
ttttttttttttttttcaaatanaatctcctgttttatttatgcatcgtcgaggctggccgacataaagtaaggggctctatcgtaatttccaataaattagggatactttttctaattattctacttttatttttagcccctcttacaatttatccttttgctaacacacccttctgctctccacgttaaatggagttagttcagtttctggttctacagtatatgcaaacaaagcctccaccaatgtcgctgctgccgccgccgaaacctcaccggagctccggtaactcccctggcgacagcattccagactggatctccgaatcaatcaacggcggctccctccgccgcgtcgacctcaactccggcaccaacggctgggcgtcgccgccaggctccgtgttctccctccgctccgaaagttactttcagaaccgccaaaaatgtcccgccggcgactacctcctctcgccggcgggcatggactggctcaaatccgccgcgaaactcgaccacgtgctctcacgcgcggacaaccgcgtgatgcacgcgctgcgaagatgtcaaaccctaggtcgctccctaaagagcttcgtcttcgcggtgaacctccagatcccgggcgcgaaggagcaccacagcgcggtgttctacttcgcgaccgaggaaccggatccggtccgaaccggttcactcttaaaccggttcgtgcacggcgacgacgcgtttcggaaccagcggttcaagctggtgaaccggatcgcgaaggggccgtggatcgtgaagaaggccgtggggagccacagcgcgtgcttgttagggaaagcgttgaattgcgcttactacaaaggttcgaattacctcgaaattgacgtcgatatcggaagcagcgcgatcgcgaacgcgattctgcacctcgcgttggggtgcgtgacgacggtgacgatcgatatggggtttgtggtggaggcacaggcggaggatgagttgccggagcggttgatcggtgcgattagggtttgccagatggagatggcgtcggccacggtggttgaggcgttgcacgtgccgcgcggggttgggtgggccaaggtgaatcatcataagtctgcggatgagcttgctttggatgattagatatttgtttagtgatagtagtacgaagtttatgattttttttatattttaattattcttcaatggattttaatttcttgttcattggatatagtagaaatataaaatttcttacacctagttgcctattattttgcaacactagaagt

SEQ ID NO: 3863 - DNA, 1253 bp, Glycine max
  Clone ID: GLYMA-23APR03-CLUSTER85512_1
actcattgtcactaacaaatggatatagctatcttctctccatcatccctcttctctgaagatgacattcctagtcgcagctatcttctctacttcaacgcaatcttctgaagatgacattcctactcgcgagggagatgcagactctcaagaaagctatgttgagaggaagcaccagtttcctgggatggagttggttattcgagaattttcctttcatcaactgaatgcaaatttactctggccagggacattggcatttgcagaatgagtggcacaggtgctttggccatatttcttcgaaaatcttacaatcttgatatttcaacttcagactatgatgaccaagaaatagagaagaacatagctcacaactgcagggcaaatgaaatacctatcgttcctcacataaaacacacctggggagacaagtttccaaattctgaccctgactgggacctgatcattgcaagtgatatcctattattatgcaaatttgattcagaccatttcctttcttctcaattgttacaagccgcaagagagaagagcagtttctccaactggaaatgatgagaatgatggagatgtagtgttgccgcggccagcctttttaatgagctggagacgcagaatcgggaaggaagatgaattgcttttcttcaatggttgtgagaaagctggtctaaaagtgaagcatattggatcccgtgtatattgcatcaattccatagagaatgagatatcagaaacaaaaggttgattaatgaaattagtattcaagcatgcatgggaggagaaagaagtgtaaactagaaggttggtccattaatagagtttcttctggtcatagttatagcttctatagagtaatttgcagctcctggatcctacttgataacacgcatacctactataaaacttttcatcaatttgagccgagagcaactgtgctacaatttctgacttgtttttattttcttattagttgttacatcactgaaattcatttcttgattttggttgtcaccataatgatcatgtaatattttctttagttgttacatcactgaaatttaaatcttggttttgcttgtcactgtcaagatcatgtgaccttatagagatctcttggcctagtaattcaaggttgatacgtttgttcgaaaaaaaaaaaaaaaacgcgccgccccctcccccccccccctcccccccccccccccccccttcccccccccccccccctcctcctc

SEQ ID NO: 3864 - DNA, 783 bp, Glycine max
  Clone ID: GLYMA-23APR03-CLUSTER85666_1
acgatttcaactacctcatagagcttcccaagatgtcttttttctggttctcaaacatggtccgtatgcacctctcatggcctgtactaacctatgccgccacgtggataacgctgctaacgttgatggtggcagcggcgtctatgtcgccgcaggtggcgtttgtctccgccataacgccttcctctaaattctctcagaagtgcagcagtggtgggtccattagaatgcccttggatgttccaggtgacatcctgtgtttccctgctcatatgttcgtgaggtccaaggttgatctaatcgttccacccgtctttgcagcggtgattgtagcggcttctgcttgcgtggttcgtgctgtgggcttgtgggagcatgatcaaactccttcagatgcaaattaactcggtaattggtatttccataccctctagcggcgctgggcccccggcttgtgacatcggtcaatcgctccgggtcacgctcgcgtctattttcttgtgactcaagtttgtcttagtttcggacaaagaatgaataaaacaaaattatgtgtcacgtgttgggtgggcaggagcttcgctgtcccacgttctgtcgtggtcccttgttggggactgcggctgcgagtctcggcctgacgcggtgattcggcttccccgggttcttttctcttggctgagagttcgagctccactcattgattctataaacatgggctcatttgtctttgtaaatcaacacaaagacattgtcagctatgctgtctttgtaatagacttc

SEQ ID NO: 3865 - DNA, 966 bp, Glycine max
  unsure (1)..(966): unsure at all n locations
  Clone ID: GLYMA-23APR03-CLUSTER8578_1
attatttcctagtgcaaaacattgttatagccttatagagcctcttccctcccttcctcttcaatttgctttcactctctctctctctctctctttctctgtcaaatactctgttctgtcttctcttcttcccctgttcaaagtccttttttagctctccatttatttttgtgctaaaaaaagaaccaaggaaatgggtgctcttgatttcctttcagattacttctcaatttccactcaaaaaaagaaacgcaaaccaatgcagacagttgaaatcaaggtgaaaatggactgtgatggctgtgaaagaagagttcggaattctgtttccaacatgtcaggtgtgaaacaagtagaggtgaatagaaagcaaagcagggtaacggtgacaggctatgtggatagaaacaaggtcctaaagaaagtgcaaagcacaggaaaaagagctgaattttggccatatattcagtacaacttggtggcatatccctatgtagcacaggcatatgacaagaaggcaccctctgggtatgtgaaaaacactgaacaagcactccccaaccctaacgcaccggatgagaagctcacctccctcttcagtgatgacaaccctaatgcatgttcaatcatgtaaattaagcaattttagtcaaatatgttcaccttgcaagttcatatgcttcacttttccatgtgtccatgtatatatagtttcttggaggctatttttgaacttcttgttagctatatgtattgtcttgtgtttaatattaatgactaggaattaggttctgcttataagttagaatagaacttggaggaataggtggaaattctgtttgctgcatgtgccaatcattgtgatagttgtgtacttgagtttaaattttaatcactactgttgtgctttcaaaaaaaaaaaaacaaatttttttaaaataaatatttctaagtnaaaaaaaaaaa

SEQ ID NO: 3866 - DNA, 1527 bp, Glycine max
  Clone ID: GLYMA-23APR03-CLUSTER86177_1
acttatgacccaaaagctactactaacatgagtcacgcatggatattattgttgacccaaattcttctggtggcggaggcaaagaaaaatgtcccagcggtgattgttttcggagactcctctgtggattctgggaacaatatcgtcagagccacggcctccccgccccacttattacccaaaagcttctgcacagtatcatgagtcccgcatggctattattgttgacccaaagtcttctggtggcggtgactacttcggaggccaagaacaatgtcccagccgtgattgttttcggagactcctcggtggattctgggaacaacaacgtcatagccactgttttgaagagcaatttcaagccttatggtcgtgacttcgaaggtggtcgtcccacgggacggttctgcaatggtcgtgtccctccagatttcattgctgaggcttttggcattaaacgtacggttcctgcatacttggatcctgcttataccattcaggatttcgccactggggtttgctttgcctctgctggaactggatatgataatgctacttctgctgtactaaatgtgataccactgtggaaggagatagagtattacaaggagtatcaagccaaattaagaacccatcttggtgtagaaaaagccaataagatcataagcgaagccttgtacttgatgagtttaggaaccaacgatttcctcgaaaactattacgtgttcccaacgcgaagactccacttcaccgtgtcacaatatcaggattttctactgcgtattgcggagaatttcgttagggaattgtacgcacttggagttaggaaattgtccataactggtcttgttcccgtaggatgtctccccttagagagggccacgaacatcttaggcgaccacggttgcaatcaggaatacaacgacgtggctttgagcttcaataggaagttggagaatgtgatcacgaagcttaatagggagcttccacggttgaaagcgttgtcggcaaatgcatattccatcgtcaatgatatcatcacaaaaccttccacatatggatttgaggttgtagagaaggcgtgttgttcgacaggaacatttgagatgagctacttgtgcagtgacaagaatccacttacatgcacagacgccgaaaagtacgtgttttgggatgcatttcatcctacggagaagacaaatcgcattgtctcaagttatttgattccaaagcttctagaaacctttagatgatgattatccattattttccatttgaaaaatcacatagtcttgcctagggcgacatgaaaaaaaatacatttagcgagatttaatgtcgggttgccatgcttgatatggatactttttttgtgtgttcaattgttataacaaataaatttacacctgaaatcatgtagtcatgtacacccacatttgaccttttgtaccttcccatgctatactgtgcttgggttttttcttccattgattcttgtttagctttgccaaaaaaaaaaaaaaaaaa

SEQ ID NO: 3867 - DNA, 1590 bp, Glycine max
  unsure (1)..(1590): unsure at all n locations
  Clone ID: GLYMA-23APR03-CLUSTER86208_1
tcagctacgtaggcccccccccccgatggaatgagattgcaacatggtagacaagagaatctgtcacagaaatgaagataaaagatttagtcaatgtgtcaaagacttagcttagctcagctcaaatcacaacctcggtgttctttctctcaatttcttctcataattgccatctccaaaaccttcacgaaccgcacacccaaatccaacatcctacgaatttttacacttctctcgagccatgaagaatcctttttctttttgcacttgtttctcagcatcgatcaaagaacaaaccaagcacgaattatggattgcatctgtaattacccaacagaggagccagatgaagataataatgatggcaactttcgcttattcacgtatagagaattgaattctgccacacgtggttttcacccatcggaaaagattggagaaggaggctttggcactgtctacaaggggcagcttcgggatggaactttggtggcagtgaaagtgctttcaattgagctagattccttgagaggagagagggagtttgtggcagaattgaatacactaaacaaatatcaaacaccacaatcttgtcaatctcccgagggtgttgtgtagaaggagcccacagatacatagtctacgactacatggaaaacaatagccttcgttacactttcttaggttcagagcaaaaaaggatggaattcagctgggaaactcggagggatgtatccataggtgtggccagagggcttgcctttctccatgaggaacatcaaccccatattgtgcatagagatatcaaatccagcaatgttcttcttgatccaaattttacaccaaaagtctcggattttggcttggccaagctactaagagatgaaaagtcccatgtcactacccatgttgcaggcacattgggttatcttgcaccagactatgctagttctggacacttgacacgaaaatcagatgtttatagctttggagtactacttttggaaattgtcagtggccaaagagtggtagatgcttatcaaaacggggaacgtttcatagttganaaggcttgggcagcatatgaggctaatgatcttctgagaatggtggatccagtgctgaataacaactatcccgcggaagaagtgaaacggttcctaatggtggggctgcgttgcgtgcaagaaatggcgaggcttaggccacgaatgtcagaggttttggacatgttgaccaacaatgttgacatgggagagtttagtgtttcaaaaccaggattagtcactgatctcaggagcgccagaataaggagccaaatgaatccatcagaagaatcaagtgttactgcagcaacctttgcagactcctctggatggagtaccgccaatcttgcccgttagatttatagggtgtttgatttcatgattcggaagtgatttttaaaagttaactgttataggttccacgtctcaaacgttattcttctattctcaatatgtttccaaacatgttactattacaagaatggttcttaggttatgatgtaggatcacgccaaatacatcatatcatcaattgggattcaaa

SEQ ID NO: 3868 - DNA, 2281 bp, Glycine max
  Clone ID: GLYMA-23APR03-CLUSTER86256_1
tcagctacgtaggcccccccccccccgacgtccgagttctcttgacatagtaaaggcattttctggaaacctccgaacgctgccgcaagcttcgtcgtcacctccttcactccgccgtgaggttcgaattgtgccgcaagctccgtcgtcgttcgccattgtcattgtctgtctaactcggtctccacagctagctgcctcggaccgttgtgcgtgtcatgggaacaccgccaacatccccgccgtattcagatggtcatttggaggctatgcctaagaagactagacaatccacacggcggagaaagttgactttgagaaccttagatcagcctagatcaacggttaatgtcgatcctgcaactggaaaaggatcaggcccacaaaaacagaagttccacaactatttaggggtcgtagctagagaaaagattcctattgtatatagaaattggaaagaagtgccggaatctctgaaggacctagtatgggatgacattttggccaaatttgatatcccagaagcctcaaatgccaagaaaaaggtgatgtccatggtggccactagatggaggcaatttaagtcttcaccaaccactaaatttgtctatgctgacactgacggggaacaaaaagaagatccttctgtaaaatatggtatgaatcaacaagcatgggatgaatttgctgcgagtcgtaagacccctacctggcaggaaatcaggaaaaagacacaacaaattcaaaaaaataatgactgcccccacgtactgtctcgtgggagttatgatttgcttgagaaaaatctaatagacaagaaaagaaagaaaagacaagaagaggcaatgctaactgagaatacaccattgcttaaggaccctacatgtcccattgaaagacatgtgaagtggaaaatggctcgcacaaagcgatatgggcaaatgacatctcaggcggcacaagaaatatctgatagaattgactcgttacaagagcagacgccacaggacagttttgttccccatgatcgtgatgacatactcaatacagccattgggcaatcggagcatctaggtcgttttcgtcctgatatgacaatcaccctgaaacagttggatgagataattagaagccttaaggaagagtggtggaatgtgattgaagaaaaaaacaagcgtattctggagaaactgaaacaagagttgaaggatgccataaaaattgagatttcccaaatgagatcacagcactcacccctgattggggtagatatactggcattaagtgcacgtgttagcacaaaggggagcaatgctgaaactgctgtgaacccattaggcaaggaacatgatggtcatgtcataccgactatggggttatatgtgcaacgtgaaaattgtacacacctggtggccttggggaaaatatatgagggggggtctagcattcacaacgtggcttatggcgctgatgtggtaagggtcagtgttgaaaaagttttagacggtaacgcccaagtcccgttcccgacatcagaaatacaatatgttagacaggcccttcaaacattcattacatggccgacaaatcttgtgaaacttgtgtcccaggaggtttatggaggagtggagctctagtttgggtcatgcttcgttgtatggattccttgagcctcagtcgatacaccatgcaaaggatcgacgtgctgaatgtgcacattacatacaaacttgggtgaaggaatctcaacgagaggtgtatctaggagcttacttgaatcaggcccattggcagctggttgtactgtgtcctacgaacaatgttgttgcctggttctgttcattacgtaagaagcctgatattcatatcaaagccgcaattaacaatgcaatgaagacactaaagaacactgtggatggtaaaaatgctcaaggaactcctaagtggattgaagtcaagagtcatgttcaaagcggaggctatgagtgtggctattatgtgatgcattggatgtggaacataataagtaggggtttaaaggatgattggagcatgtggtttgctgatggcacaacgttagacatggagacaataacaacaattcgcaagaaatgggcagcatattttgtaaaagttcaaaacatccgatgtagaaagctttagatgatatatgacgaaccactatggtcaatttgatggttatagcaaacattaaaaacacttatgtacaaattttggcatttattttacaataaatatttacaaaaaaaaaaaaaaaaaa

SEQ ID NO: 3869 - DNA, 808 bp, Glycine max
  unsure (1)..(808): unsure at all n locations
  Clone ID: GLYMA-23APR03-CLUSTER8629_2
ngaatcaaagaacattctggagtgtctgcgaccactaacacaaaaatacatataataatttcattgttcatcaaaaaaattgcaagcaccaccatatcattagacaacgagtttatctcttcttctactagagttctcttttctctgggtagtgtaatatcattaatcaatggctgacgctatctttggataccctttcagacgcttcatctggggtcactctccaattttcagagaatggtctggctcaatagccctcttagattggctcgaatcacccactgnccacatcttaaaagttaatgttccaggattcagcaaggaagacataaaggtgcagattgaggatgggaatattcttcacatcaaaggggacggtgggagagaggagcctcaagcaaaggagaaggatactgtttggcatgtggctgagagaagcactggaaaggggggtttctcaagggaaattgaattgccagagaatgtgaaggtggatcagattaaggcacaggtggaaaatggagtcctcagtatagttgtgcctaaagatgcaacacccaaaacgcctaaagtgagaaatattaacatcactagcaggctttaatttaaggttttcaaatctagaatatgtttatatgaatactaattgagaacaaaaaaaaaatgtactaatgatgtaacgattaagaccatgtgtgtttatattgtgacctagccctctttgattgatatgaaccttgtgtaactttcatgttactatatatgctgaaaccttttgctaaataaaccaagagcttgcataagtcta

SEQ ID NO: 3870 - DNA, 1237 bp, Glycine max
  Clone ID: GLYMA-23APR03-CLUSTER869_2
gtcggttacagagataataatcctgcagcactttcagactttctgcaatctgtgcactgtttaattccatattatcctttatctatctctttatctctcttctgcaaagtgcaaaccctacttactactttcacagctcctacctcctattcctctcccttcccatactctctgctcctaactttttctctcttctcccctttcttccattcctccttgtctctcgcaacgcgaaattcatggacgtggacatactgaaaacttccacgagtgacaacatcagcatggacatgatgatgacgatgatgcaaatggaaaagttccctgaattttgtgaacctttttataacaacaacaacaacactagtactgctcctctctacccagaaaacgagctcttaataaactccaccaccactctacccgtgttctccaacgttattaacaacccaaacgttataactccaccaccatcttcctctaattttattcaacaacaacccattacaccccatcttgaacccaacttggagaagaggaatctcgatggcggcgatgagggagatgatattccgaatagcggttatgcagcccgttcacatcgatcctgaatccataaagccacccaagagaaggaacgtgaagatctccaaggatccgcagagcgtggcggcgcggcacagaagagaaaggataagcgagagaataaggattcttcagagattggtccctggcggcaccaagatggacactgcttctatgttggacgaggccattcactacgtcaagttcttgaagaaacaggtgcagacgctggagcaagcaggggcaaatacgtcaccacacagtaatactaatagtcccaataatcacgttgttggtgctgctggttttccgctagggatgtcttctaactactccaataatagtagtgttaattattcttctttgttgatgaagggtggttgccaaccttgtcaaatgttcggttccacttctaaacaattgctcagctaatagttgttaggggaagtttgagagggaatttgcttgtttttgtgatgagaaagcaatgggttgtgtagtgttgatcaattggtgtatgcatgggtttggtggatcgggaagaacatgtttctccatgttaatgccattgttgcaatgatcttttgcttttacaatggtgggggtgggtgtaatcgaaatttcattaacataatggatgagtatgttctac

SEQ ID NO: 3871 - DNA, 1618 bp, Glycine max
  unsure (1)..(1618): unsure at all n locations
  Clone ID: GLYMA-23APR03-CLUSTER87326_1
gccaccactgctaacaacagagctccaaattcgcctctctctctctctctctctcttcgcttcctctttctcttgcacagaaaccaaaaaccgaacaagaccaaaaaaaaaaaaaaaaaccctaacccccctctcatggcttcttcactccttcaaccttcttcttcctcttctctcttcgccggcactctccgaaccttagattttgtagaccattcccgcgcccgaatctccgcgccttacaccgtgaaatgtgacatgtcggaatcgtcgaatttcgtcaatgggaaaccgatcattccggttctcaacgaaaggactctgcctaagttcatggaatccgcgagggaggcgaaggccgtcagcagaaatagtaacaggttgaaattgttctctggcacggccaatcccacactctcccaggaaattgctcggtacatgggcctggaacttggaaagatttccatcaagcgatttgctgatggtgaaatctatgtccagttacaagagagtgttagaggttgcaatgtttaccttatacagcctacctgtcctcctgcaaatgagaatctcatggagcttaaaataatgattgatgcttgtcggagagcatccgccaagaatatcactgctgtgattccctactttggatatgccagagctgatagaaagactcaaggacgtgaatcaattgctgctaaacttgttgcgaaccttattacaaaagctggggcagaccgtgttctcgcttgtgaccttcattcagggcagtccatgggttactttgatattcctgttgatcatgtacactgtcagcccgtgatccttgattatcttgccagcaagacaataagttcaagtgacttggtggttgtttcccctgatgttggtggtgtcgcaagagctcgtgcttttgcaaagaaattatctgatgcacccttagctattgtagacaaaaggcgccatggacacaatgttgctgaggtgatgaacctgattggtgatgtaaaaggaaaagttgctgtaatggtggatgatatgattgacactgctgggaccattgctaagggtgcagcactattacatgaggagggagctagggaagtgtatgcatgctgcactcatgccgttttcagtcctcccgcaattgagaggttgtccggtggcttgtttcatgaggtgattatcacaaacaccattccagttgcagagaagaactattttccccagttaactattcttactgtagcaaacctattgggtgaaacgatttggcgtgttcatgatgacagttctgttagtagtatttttcagtaaacaatcccaatgaccttttgcagttaatttaatcaataaatgtttttttttttatatgataaaaaaaatttatttataaaaaaaaaaaaaataaaaaaaaaaaaaaaaaaaaaaaaaaaaaaaacaaaaaaaaaaaaaaaaaaaaaacattttttnnaaggaanaaaaaaattttaaaaaaaaaaaaaaaaatctgggggggggccccggcccccatttccccttttagggggtttttttccccccccctccgggcccgttttttaaaacgggggggggggaaaaccccgggggtccccca

SEQ ID NO: 3872 - DNA, 1125 bp, Glycine max
  Clone ID: GLYMA-23APR03-CLUSTER8735_2
atcatcacttggaagaaaaaagagaggcaaaagtaaaagatggcaccttacatttctagagatagagcctctatttttgttttacttgcctcactagtccttccctttattctcctggactattcttcttctgtgttgtttgcaagtgcaaaatccccaaaatccaaggatgctgatttgttagaatttgctctcaatttggaatacttagaggctgagtttttcttgtttggggctttggggcatggattagatgtagttgctccaaacctaactgggggaggaccccttcccattggtgccaaaaaggttgaacttgacgatcttaccaatgatgtcatcttgcagtttgcttttcaggaagttggacacttaagggctataaagagcaaagtgacagggttccctaggccattgttggatctaagctcaaaatcttttgccaaactaatggacaatgcatttgggaaacctctggttcctccctttgatccctatgctaattccctcaactttataattgcatcttatgtgattccctatgttggcctcactggttatgttggtgccaatcgactactggaaagtgctacttctagggagcttgttgcggggcttctaggagtagagtctggacaagatgcaattttaagagaattgttgtatgaacgtaaagaacagttggtgccaccgtacggagtggccgtggaagagttcacaaaccgcatttctatacttaggagcaagttaggaaacagaggtttgaaagatgaaggtattgttgtgccttttggactcggtgccgagggtaaagttagaggtaacattcttgctggtgacgtaaactcactggcatattcaaggactccagaagaaatattaaggatagtatatggaagtggtgatgaacatgtttgtggtggtttctatcctataggagcaagtggtcaaatagctcaatcttacttaaattaagctaaagcatttgttttaaacttttatagattatacaacttgtctttaatccattgctaattttcttgttgctaaatattgttgatgggtgaagaccttgaaaaaacttttgataatatgcaaataataaagtgagaaatttggggtttt

SEQ ID NO: 3873 - DNA, 1200 bp, Glycine max
  Clone ID: GLYMA-23APR03-CLUSTER8841_2
gagtgaaattctacaatctatgcgcgccatgtgataggtctccttctcccaccactttgggtctttggcagcacacacttccctctcactcactcctaactataaacataaaatcctcccttcctcttccggaatctgattattaaattcgcatgtgagtgttctatatatgtattaattactacatatagctagatcttagggagcgtcctctgtttaatttgtagatcttgcttgaaggaaaatattcctggataccaatggctcaactcaatcacagagaggtactactgttctatgttcttttgttcctttctgtctctgtttgcttcagtgccacctggttggaacctcaacatagtagaacaatgttggatgccgaaaaagaagagcaagagaagcctttgaaaaagaaaaccaccacccaatccaacaaaagccaccgccaccaacaagcaagccaaaacaacaacaacaacaaacaagaaacaacaaactcagaagaaacctacgaaacaaaaagcaccaccgagttggatcatggaggagctggaagaggaagatgatgatttggtttcagagttcacagatctacccaacaagttccaccggacactcctccccgacctggaacgaatctccaccacttccaaagcctacatcaccaaagccaacaacgaaatgaccaaaggcttcaaaccctacgttggcaaaaaatacgcacctaccctcgccaccattatctcttgcgccttcatactcattcaggtaccaaaagaaccaatacaatgtgtttgaggtgaaccaaactgggtatgacaactgcactacagaaggggcagtggggaattggagcagtgggaaggatttcataccccttaacaaggccaagagatattacttcatttgtggcaatggccaatgcttcagtggaatgaaggtttccgttgtggttcatcctcttcctcctcctcccacctctgcagttgctgctcaacattcatcgccaaagtctgcttctcctgtgctcttaaaacgaggatttcgctcactgttggtgtctactgtttcagcttgctttggaattgtttggatttatcacttgtagagcttagtggctcattctttttccccttgttgtttgtatctttcatgtttgtttcggattcttgcctttcaaaagcttgcttgttggtgctg

SEQ ID NO: 3874 - DNA, 2544 bp, Glycine max
  Clone ID: GLYMA-23APR03-CLUSTER884_3
agttacacaaacacctatctataaaccattgattgaaaatcccccaacttcttacagagaacatctgcagtttgtgacagggcactcaactcccccctccaaacaacagtgattcatcagatgatggtgttccagtttcaccaccaagagtcagactcagagatgggaggtacttggcttatagagaaaagggtgtccccaaggaccaagcaaaacacagcatcatcattgtacatggctttggaagctccaaagatatgaattttctggcaccccaaaaaccattagacattgaagttctgattagatacttggatacaaagaaggaactaatagatgaattgggtatatatattctgcaatatgatcgagctgggtatggagagagtgatccaaaccccaaacgctcactgaaaagtgaagcacttgacattgaagagcttgctgatctgttacagatagggtcaaaattttatttgattggtgtctcaatgggatcatatgctacatggagttgtttgaactacatccccaacaggctaacaggtggcctcaaaatatacatttctaaacatatgtttggtttcagaaaatgtcaattttcattttttattttttgtaattatttggtgtagggattgcgggaaacaagtctatttgggtggatttgacacggctcatgctgctgccagagcctatgatcgagccgctattaagttcaggggagttgatgctgatatcaatttcaatctgagtgattatgaggatgaccttaaacagatgcagaatttgtccaaggaggaattcgtacatatactgcgtcgccaaagtactggtttctcaagaggaagctctaaataccgaggagtaacactccacaagtgtggccggtgggaagctcgaatgggacaatttcttggcaaaaagtgaggacatatttttatatatcaacttacgtagtgatctactgtggttatgaaatattatgaatttaagcacctattgggctgcaaagtgaaattggtttcagcttaattctcaatgcatctttatgcttttttccatgtttggagaaacatgtctaagatagtaatatagagatgcgttttggttatagagattgcaatgctttcatgcaggtatatatatcttggactattcgacagcgaagtagaagctgcaaggtcctagtgatacatgaattacattctacccgcactgaatttatttacatgaattatcaaagctcattaggctccatccaacacgtatctcccttttgattttctggaaatcagggcttatgacaaggcagctatcaaatgcaacggaagggaagcagtgaccaactttgagccaagtacttatgaaggagagctgaaatctgcagccattaatgaaggaggcagtcagaatcttgatctcaatttgggcatagcaaccccaggacctcccaaagaaaattgggggcaacttcagttcccctccttcccttacaatacacatggtggaagaagttcaatggtataattgaaactcatcttcatttattttaagtttcttgtaaattaagctgaatgaggtggatagcactttttatgctctcatgttagggtgcgcttgattgatcgttaatcgttcagttctatttaacagcaatgaccatagagatatggattgacgttagaagtgcattagaaagtgggagacgaataaaacaatgacacttaatttataacataactcttcatatcatgataactgttgagaatgcttgtctggctgtaacatttttgtagctttcgtgggttttccttgtagctaattacaacctgtattcctttgatttccttgattttttgtggaacttttggtttttggtattgttttatcaactctagatgtcatatattaacatggttctctttatctgcagatggaaaccaatgttagttctggaattggtaatccatctttgaaaaggatggttgcaactgaagatcgtccttcattatggaatggcatgtctcctaatttctttcccaatggggaaagagcagagagaatcggcgttgatccttcaaacggactccccaactgggcgtggcaaacacatggccaggtcaatgctaccccagtaccaacgttctctgctgcagcatcatcaggattctcaatttcagctacctttccatcggctgccatctttccaacaagttctatgaactcaattccccagagtctctgttttacttcatccagcatgcctacccgcaatgcatctgaatattattactaggttaagcccccacaggcaccaccatagctgattttgcagtacagattaaagacaaactaaaaaaagtgttttcggtccaaattctgtgtataattcagccactgattggtgtatactgagattcgacaccttattgctgtcttttgcttaaactctaagatctttgaagcaaatgctatttttagtgcactggcacaacgatgtttctgtttcccacaaatttgttggcaatcaagattcatggt

SEQ ID NO: 3875 - DNA, 1237 bp, Glycine max
  Clone ID: GLYMA-23APR03-CLUSTER8863_1
tcagctacgtaggccccccccccatctggcagcagaagaacaagtagttgagaactaagaaggagaagcaaatggcttcctcaatgatctcttccccagctgttaccactgtcaaccgtgccggtgccggcatggttgctccattcactggcctcaagtccatggctggcttccccaccaggaagaccaacaatgacattacctccattgctagcaacggtggaagagtgcaatgcatgcaggtatgacaactccacacatataaatacacaagaggcaccaaaatgattataattcatgttacatatttaggcatgtacctaaatgttacttaaataaacatgttagtcataggttgcttaaattttagtcataggaaaatttgcacatgtgctagttaatctgttaacccctttactcaattttcatgcaaattaattactaggtgtggccaccagttggcaagaagaagtttgagactctttcctacctgccagaccttgatgatgcacaattggcaaaggaagtagaataccttcttaggaagggatggattccttgcttggaattcgagttggaggtcaatttcttgcaaacacttttggtttaatcatagattttcttattcttagtttgtttcaacttattttcaagaaataatggcttctcttgctagtgtgctaaaagtacttttggaaacaaaacaaaaaatggttgtgttccaaaatttaaatttatctaacagatttttctatctgagagttatcaatatgtatcaaatctgttcctatctctgaccaaattttattcttccaaaacaagcacttggttttgagttttgatggttgatctgcttgtttgcagcacggtttcgtgtaccgtgagcacaacaggtcaccaggatactacgatggacgctactggaccatgtggaagctgcctatgtttggttgcactgatgcttctcaggtgttgaaggagcttcaagaggctaagactgcataccccaacggcttcatccgtatcatcggattcgacaacgttcgccaagtgcagtgcatcagcttcatcgcctacaagcccccaggcttctaagtgtgaaaaatttgcaaagcatttgtagccgccaccccactttgtttgtttgtacttaaactacattcccatttgtttttgctttttgagatttcatcatcctgtatttttggtttctgttttcggacttcaatggaaatta

SEQ ID NO: 3876 - DNA, 1448 bp, Glycine max
  Clone ID: GLYMA-23APR03-CLUSTER8934_1
gcacaagtcccaacctaaacccgcgtctcttcactcttcaattcaatggcttccacgcccttctccactttctgccacttccacaaacccaccctccttttcttagcttccgacgggttcaggctcggtggcgctccggcgatcgccttcggaaaggttcggaagaaccgcaaaatgggaatattccccgtttgcagagctggttctgccgtcgtcttccgcgacctcgacgccgacgactttcgccaccctcttgatcaacagaatacgctgctactgagagcaattccgggattgaacgaactgggaaaagctcttctaggaactgtatctgagcaggttatgctccttgaaaacattgggacatccgtccttgtttctaaaaatcagcttcctgatctttaccacctaatggtcgaagctgccgaaatattaaatgtagatgcccctgatctatatgttcgtcaaagtcctgtgccaaatgcatatacattagctataagtggtaaacgacctttcgttgtcattcatactagccttgtggagctcctgacaaaagcagagttgcaggctgttttggctcatgagctgggtcacctaaaatgtgatcatggtgtgtggcttacatatgcaaatattctaacccttggagcctattctgtacctggtattggcggtatgatagctcagactttggaagagcagctgttccgctggcttcgagcagctgagttgacttgtgatcgtgcagctcttcttgttgctcaagaccctaaggttgtcatctctgtcctcatgaaattagctgggggatgtccatctatggctgatcaactaaatgtggatgcattcctggagcaagctcgctcttatgaaaaagctgcttccagcccaattgggtggtatataaggaatgcacaaacaaggcaactgtcacatcctctgcctgttctacgtgctagcgaaattgatgaatggtcaagaactccagcttataaatctcttttgaaacgaggaattcagatcaaatcttagaacgaaatgtctagcagtgcatgcatggaatttgttgaaagtgcacagcagctcaaggttcttcaagttagtgcgtggtggcagatgttcaaatggtttcaggcggaagtagcatttattatgcatctatctacggctgctgcaaacgtgtatgtattcactgtgttatattagtcaacctgtaagtagaattttggtgagttggattattatttcatagaaatattggttctggaaagaaaagaattacctgtacaattctagcttagaaaatttctcggagtagaaaacactattatgtaagttttatgaccgaaaatttttatttgttgtattttacactataagctaagctctttttgaatagtactaaaacattgactgtttccaaaaaaaaaaaaaaaaaaaaaaaa

SEQ ID NO: 3877 - DNA, 817 bp, Glycine max
  Clone ID: GLYMA-23APR03-CLUSTER8943_2
atgtgacagattctccctccctgcattacctagaaacataaaaagcacacaatctcaaaaccaagctctctctctctttctatattttcttcttgttgtcttgtgtctcgttctctctatgagaattgagagaaggcatgagaaacagcatccggtgttgcatctcctgcattctcccatgcggggccctggacgtaatccgcatagtgcactccaacggccgcgtcgaggaaatcagcggcaccatcaaggccagcgacgtcatgaaggcacaccccaagcacgtcctcaagaagccttcctccccctccacccaagacggcgtcgttcccaagatcgtcgtcgtccctcccgacgcagagctccaacgcggcaagatttacttcctcatgcctctcccctcgcctccgtcggaaaagaacaaccacctccagaggtcctcctcctcggggaagaagaaaaggaaggaacaccacagcgacaacagaaacatcaacaataacaacgccatttcggtcgccaacttgctcgtctctaatgagcgctacttgactgaaatactctccgagaaagtttctacgcagagagacagaagacgaggacgtgtcgccgtctggaggcctcacttggagagcatttctgagtcaccatcacctgattatatgtaaactactgtaaacgcttcttcttattttcttcaagctctccttatattatattatattagcactctcaacatatatattttcatgttccaaactccaaacccatttttttttattataatttcagctaaataatctcatttcctttttcc

SEQ ID NO: 3878 - DNA, 1641 bp, Glycine max
  Clone ID: GLYMA-23APR03-CLUSTER89572_1
tcagctacgtaggcccccccccccggcatgcaaagaattgctaatgaaaaagcttttgtcttttacttcccacggcgtccatgtgctgtccctatattctaaacagaaccttaaatcacttgtttcgggtttaccagaccatttgattattataatctcaccgtcctgacagttaaaagaaaagagagattaaacatgcaatgcaacattaaagcactctctcccccctttaaaaatctcaattctcatgatatgctagagtagagcctaagcacacacactctcattttctcatttctccgtaccccaaaaaaaaatggtttcccttgaacctattgagggcaacctcagatctagcgacccaccttcaagtcctagaatatctttctcagcagagttcttagatgagaacaacttcatctccatcagtccaaatgccgagtatgagagagatcaagagaaggaacgtgagagagcaaggaatgctgctgagtttgagttcctttcaaacaacacgagcagcaacaacacagtgttaactgctgacgagcttttctttgaagggaagctcctacccttttggcagatgcagcatctagagaagctcagcaagatcaacctcaaaaccaaagagggagaggaagaggagttagaagaggaagtaatagtggtgagcaacaataacaaagaggatagtaatagtaatagtaatagtagagtaaattggtttgtggatgatgacccatctccaaggccaccaaagtgcactgttctatggaaagagttgttgaggttgaagaagcaacgtgcttcttctttgtcaccctcttcttcttcctcatcttcttcctcttctgcaagctcacttggtgatgtggctgccaaagaagggaaagaagggtcaaggagtagtaacaaagagcagcatgtgaagagggtaaagaaagggttggagagagcaaggtcagctactattagaattagaccaatgattaacgtgccaatttgcacacaggtcaaaagcagtgccttgcctcctcttttcccactcaagaaaggaaaattagagaggtaaaaaattaaattcaacttgcaagatatcattgccacgcttatgtttatttatatttagagtactttgatcgtttgaaataattaagtttgttttttattttgcttatttcttaatatttgttccaacaaattatgttgcaatgctagattagatgtttaatttggggggatctgagaaattacaatgtaaattctgacttgtataatcattggattatgtcattgtgcatttttcccttggtagaggtgagtaatagtagtagttagttttttgcttgtatgggtagtttgattgattaaggagcaatgtcccagatagtcagatgctgagtgagttcctcaacgtgcgagtcccacatgggcacctgtcagccgcatacatctgatcaacggactcaattattattgagtgtcagtggtaataatacttttaaaaatagctagctagggagagcaatttcagtgtatgcataacggcttgtaaaaaatttcacggtatatcgagcaatatttgaattcctagactgaaaagtggcccaaaaaaaaaaaaaaaaaaaaaaaaaaaaa

SEQ ID NO: 3879 - DNA, 1904 bp, Glycine max
  Clone ID: GLYMA-23APR03-CLUSTER90055_1
agaaattgtcacggatggtaattttgttagcattggcattaattaccttaatactgtcatcctttgcataatttctaattggttaagatgtaaaacccatttgtactgtcactgcatggaaattaaactgtattaaattctggttatatggtgctgatgtattggtggttggatgtatagtacagaaattgtttgtgcctttttttttttttttttttcctttcatcgtaccattaaatttacaccgaaatcgccgaatacgactaaaagcacaacactgatcctttcatttgcaaattgcaaatgcagaaaggaaaagcggattctgtctccatcctcagttcccttcctgaagatgttgccctcaaaattgcttcgctgcttcaggtgcgggatttgtgtgccttaggttgttgttcgaggttctggagggaactctgcttctcagattgcatttgggagtctcttgtcagaaacagatggcccttactctcttccttccatttcccttcttcttccactcattctcccaatttcaagaagtggaggaaattgtacttggagaggcaagtggaattgggacttagagcaaggtctgtagtgaagtttctggaagcttgttctcgttctgattcacttgaggttggggactatctgaaagctgttgacaccttgattggtacgatgtttgggtttgaaaacgtgcagaggttcttgtttgatcccttaattgaatgtgaatgagtgaacttgtggttgggcatcccccatatccttacaacccttgagatgctgggtgttcactactgcctcaccaccctggcgcttgcgggtgacaatcttgtagatgcccttcggattcaaaagtgctcagagctgcttggctgtgtcaggtaggggaaagttagttgctggtagggtgtctttcgcatatttgatgagacacgttctcggtgtgtttctgtggcatacttggagaagtggttgatgagtttggtttgggagttctttgccaggttgccgttcatgaggtttttcgtgtccgattacctatagattggaatagataaaaagatttatattaaagtatcgatatcgatataaattagtatgtgtatatctattgtttttacaattcagaggtaacatgtatagattgttatcatagataagaatataataagtgcaaactgtacaataaaataataaaattcccattctttgacaccctattttgatttgttcatgagtcttaataattagtgcccttagaacactgattaaggaatgataaatagaaaatttttatgaaaattacattgcattggaaatcatgggggagtgcatctcaataaaaaaaacttttcacttttgattccttgatcaatacccctttagggaacttaactagttagcattttcgttgttttatttacagtttaactagataaacacctgtttcagatcccacatattttttgttcctttcaaaaggtaattgcttcatcattggttaacttggtgtcgcttggtgatgatttggataattactatgcatgagtttatcaaactgtctttggcttattggcaatggtatatatgctacttttatttgctgcaaggttgcaactagagaacatgattaaacatggttggacatttgccaattgtgaaatccaaacagctgtttgattgcatgtaattgagtttattcaggtttatctcagctaaccatttgtgctgaatttcttttgcttgttcgtttcaccacatttaattaagaaagtttatttgtttgtttccttaatgcttcaattttttcgtagttattcttaatctttggccaatcaaataaaatatcttttgatcagttttatgtagggtaataatatcatggtaaactt

SEQ ID NO: 3880 - DNA, 1492 bp, Glycine max
  Clone ID: GLYMA-23APR03-CLUSTER9025_12
agggtttcccaaagttcgcggatttagaaaaattttaggtttccatttccattttcaatcaaggttcagttttttggaagaggaatgtcatggcctttttccttatgaacatttgcccaagggcggattttagatatccgcaaatgagtgagggcctgggtttaccgaacaggcctttgtaaatgcgagctatggattgtattaatctccaaaatagggtgaattggaccggtgcagcccatgaatccattttggtaggagatcccccctttttctatgtttagagttgggctcgtttaagtgcatcttggggacatattcttggaaaaatgcttcccacaggattcaacatgcactgccaactgggagtaaatttggtcgtggttgggatggagagtaagaaccactcccaaacccccaatataatggttaataatcgtgtccaaaaagaaactagtttggttatgaagttgcattccactactgaattaccaaagggtaaccaaaattgtaagaatgtggaatccagcatcctacatcctgtaaatggacagaagcttgagggaaatcatccttcaatacctgacttagaaggaaaacctttctttggttctgctgcagtaaggttcagtgctcctgtcaacatccttaatcaggtgcagaacgcccaatccaggaaattaggcaagtctgagaataagaaacaattggagttgaattctttaacctcaagtaatcagaataataatgatctggttgcgaagtttacaagtaatgctcctgcagtagagtccaagcccagagagatggggccaaggaacatttttaaacatccacatactaatgaagttgttagtggagagttttcctatggaaaagtcacgaatacaagtttgattagacaggtgactggttcatcacccctgaagtacatcacatcaatctagcagagctgctcctgctgttgtccatgggcaggagcagggtcttagtgacccagttcagttgatgagaatgtttgcagaaagggctcaaaagcaacacacttcttccaatcattctcttgttgatactccgccagtgacactatcaggtccatctggacagagaaatgactcgggcaatgcttcagcagcagctgcccatgcatggatgtctgtcggggcaggagggtttaaacaaggacccaacaattctagttcacccaaaaatcatatatctgcagattctttgtacaactcaacaagagaattgcatcagcatatttcaagaattcggggggagtttccctctggtggaatgcctttccaaccatttcaagcaggcgctgtttcacagtttcccaaccggcctatggttttccctcagttagcatctgctgaccaatctagatttcaaatgcagcccccttggggaggtcttagtcctcatagccagtcaaggcagaaacaggaaacgcttccacctgacttgaatattgattttgaatcac

SEQ ID NO: 3881 - DNA, 1667 bp, Glycine max
  Clone ID: GLYMA-23APR03-CLUSTER9025_3
gtaccgggccccccctcgagtcagctacgtaggccccccccccccaatattccatatgttcaatgaaggctttaatacttaaatttgacatttttgtttgttgaagtcagatttctctttattttctcttcaaccaaactaaaaaattactttcttccctattttcttttcctccatccaaacatagggtaaaggtgatacaagcatccgtcaatgtgaattgtaacaagctaataagatgtggtttgataaatattgatagaaatatattaggactattagtcttaatgttggtaagcttgagctacattatgactaatttgcctaataaattcgaacaaatattatatgcatttggatttagattgagatgcagcttgactagatctggatttaattctttttaggttcaattttatgagactctggatcagtatatcataaatgttttttttaagagagtatattataaatgttatcttatcgatttatctaattccatgtttccttcattaaatgcataatagttcttatgattgtttcttttgcagatatggtaatgctagtgtttggaagatctttactgacctttttgatttctttccgttgactgcattggttgagtccgaaatattttgtttgcatggtgggctttcaccttcaattgagactcttgataacataaggaacttcgatcgtgttcaagaggttcctcatgaagggcccatgtgcgatctgttgtggtctgatccagatgataggtgtggctggggaatttctcctcgtggtgctggatatacatttggccaggatatatccgaacaatttaatcacacaaacaagcttaagttaattgctagagctcatcagctggttatggatggatttaactgggctcatgaacaaaaggtggttaccatttttagtgcacctaactactgttatcgatgtgggaacatggcctccattttagaggttgatgattccatgggccacacatttatccagtttgatcctgctcccaggagaggagaacctgatgtcacccgtagaacgcctgattacttcttatgatgttgctgctgctgcatatcatactggggtcgcagttacatctcattctgcacaaatttcaagtagtttgtgcatcctcatcctcgttgatgagattgctgtaaggacttaaaatctttgggtatgcacaccaaacttttttggtgattgcccaataccgtactaatgtaaattaggcgagaaacattccagttttttgtgacgctcaagaacttgctggacaccctattggagaagtctcctagatgatggccatgtcagaatatgtattattccagtgacctgtggatatattttttgtgtttccccatctctagaagcaatgactgtgtttccccatctctagaagcaatgacttggattttatatttctgttgatgatttgctttgctatgttctatcaattttcagtaaaagttgcatgataatagtgattcagttttgttctttactaaaaaaaaaaaaaaaaaaaaaaaaaaaaaaaaaaaaaaaaaaaaaaaaaaaaaaaaattaaaaaaaaaaaaaaaaaagatttccggcaccccggggaacccacaagttcaaaaggggccccccccgcgggggagccccac

SEQ ID NO: 3882 - DNA, 2439 bp, Glycine max
  unsure (1)..(2439): unsure at all n locations
  Clone ID: GLYMA-23APR03-CLUSTER9025_5
cgtttccagaaaggttcaggtgccccggccaaccacctttataacggggggcaggggccccaaatcccgggggaanttagcaattgtggatataaaaaccaatgggaggtgaattcttttacccccaagtattccggaataataatgatctggttgggaaggttacaatttatgtttctccaagtagattccaagcccaaagaggatggggccaaggaacatttttaaccatccacattanttatggagtgtagtgggaggagtttcctattgaaaaatcacgaatacaagtttgattagacaggtgactggtccatcacctgaaagtacatcacatcaatctagcagagctgctcctgctgttgtccatggcaggagccaggtcttagtgacccagttcagttgatgagaatgtttgcagaaagggctcaaaagcaacacactctttccaatcattctcttgttgatactccgccagtgacactatcaggtccatctggacagagaaatgactcgggcaatgcttcagcagcagctgcccatgcatggatgtctgttggggcaggagggtttaaacaaggacccaacaattctagttcacccaaaaattaaacatctgcagattctttgtacaactcaacaagagaattgcatcagcatatttcaagaattcggggggagtttccctctggtggaatgcctttccaaccatttcaagcagttgctcctcaacctattcacacaggcgctgtttcacagtttcccaaccggcctatggttttccctcagttagcatctgctgaccaatctagatttcaaatgcagcccccttggggaggtcttagtcctcatagccagtcaaggcagaaacaggaaacccttccacctgacttgaatattgattttgaatcaccagggtcacctgttaaacaatctcctggtgtccttgttgactcacagcaaccagacctagctttgcactatgatgaggttatctaaaaatattttaaccatgtcttttgctccaagagattcacataaagctacaaatacaattagccttggaaagaggaataccagcttttgttgctatgcttggcactcgcagactcccatttcctgcgtttggatttgacttagttcattgctctaggtgcttgatcccatttacagcctacaatgcctcttatttcattgaagtggacagattacttcgccctggtggatatttagtcatctccggtccccctgttcagtggcctaaacaagataaagaatggtctgatctccaagcggtggcaagagccttgtgttatgaactgattgctgtagatggtaacactgtgatctggaagaagcctgtgggagaatcatgtcttcccaatgaaaatgaatttggtcttgagttatgtgatgattcagattacccaagtcaagcttggtacttcaaattgaagaaatgtgtcagtaggacatctgttaaaggtgattatgctattgggataattcccaagtggccagagaggctaactgcaatacctccaagatccacactcctgaaaaatggtgttgatgtgtatgaggctgacactaagcggtgggcaaggagggtggcacactataagaattctctaaaaatcaagttgggcactcgatttgtgcgcaatgtcatggacatgaatgcattatttggaggttttgcggcagccttaaaatctgatcctgtgtgggtgatcaatgtagttcctgcactaaagccacccactcttgatgttatctttgacagaggccttattggagtctatcatgactgttgcgaaccattttcaacatatcctcgtagctatgatctaatccatgtggccagcattgaatcccttataaaagatccagcatctggtcaaaacagatgtactcttgttgatttgatggtggaaattgatcgaatgttgcgtcctgaggaaactgtggtggtaagggatgcccctgaagtaattgacagagtagctcgcattgccagtgcagtgaggtggaagcctaccgtttatgataaagaacccgaatcacacggcagagaaaagattctagttgcgaccaagacactctggaagctctaattcctattccatggatgcacgcaactgtgtaatttaggtaaactcccttttccattctgtggggttggaggtgtcaaagatatcttctctatgcatcaaacgggtgcgattttctaattttgttcaacattctctcatataaagaagatagtgaggttaagatttgaaaaagattggaagacccttgtgcagttttaggtggaaagcggaagccagtgttgattttattttctctcaacttaaagaatgggttgtaattcaaaaatatatatttattaaaaaagaataatcgttgattctaattcagctacatttcactctc

SEQ ID NO: 3883 - DNA, 1007 bp, Glycine max
  Clone ID: GLYMA-23APR03-CLUSTER90307_1
actagtatctattttctcctttgggatttcactttcacggcaagaatgtcgagctcactggcggagaagtccaccttctctcggacttgtactcttctgaggcaatacctcaaggagaagggcagctttggagaccttaccctcgggattgcattgccatgcaccaacggttcccctgacacatcatgtcactctgcaacaaccatgcagtctgtttattctcgccacttggagattccaacttttattaacccaaggtctacggagaaggaggctaaagctgctcagttgactatcttctatgatgggcaagttgttgtgtttgatgattttcctgctgataaagtgcaggagatgatgtctttggccttggcaaccaagggaatttcccaaagccagaactcctctgcatatgctcaaactcataaccagcaaggaaataatcatccttcaagtattcctaatatcattcctcaagcgccatccacaccaattgttaatgacatgccaatcgccaggaaagcttcccttcatcggttccttgagaagaggaaagatagaattgctgccatcgccatatcaaacaaacagtcctatctctgctcctaataagcaggccgaatccctagatgctaaaccacacatctgatatatctacgctgctattagatgtttgtttcaattattatgattccaaatatttcctgtaattagcgtttcattttagttacaaaaaaaaaaaaaaaacaaaaaaaaaaaaaaaaaaaaaaaaaaaaaaaaaaaaaaaaaaaaactcgagggggggcccggtacccaattcgccctatagtgagtcgtattacgcgcgctcactggccgtcgttttacaacgtcgtgactgggaaaaccctggcgttacccaacttaatcgccttgcagcacatccccctttcgccagctggcgtaatagcgaagaggcccgcaccgatcgcccttcccaacagttgcgcagcctgaatggcgaatgg

SEQ ID NO: 3884 - DNA, 1363 bp, Glycine max
  Clone ID: GLYMA-23APR03-CLUSTER9053_4
cagctacgtaggccccccccccaagtcccatagagagaaatcttaaaggttctcattcagaaagacatcacatttcatgccaacttattaaaggatagtatttggtgagattcagcattctttttgactcattgacatggtttgctagactttgctgactagtttatcttttttatgctagtaatacacttcatcagtttctttatgtctctagatttagtttattgaattttatctaatgataatatcatgtatatttttaagagcctaagtatgaatctttctttccactttgggtcttttctgaatatatttttactttcgccagatcaaattgggctttctcccgaagaagtcatttcaaagattatggccaatcctgaagttgcaatggcatttcaaaatcctagagttcaagcagctatcatggatgtatgttccaattgaaatacttcattggtctttcatatgaaaactctggtatgatttcatctcttgtggttgcagtgttcgcagaatccaatgaatattactaaataccaaaacgataaggaggtatgctgatacttctgactttaattttgtccttccgggaggagtgtactttaccgagtttggttttctctccctttgtttcctgtttgctctttggcatgcataggttctctagttgtaattagtttcaggtttatgttaggtgaaaatcttttgatgatttttgacgagatgacaggtggtggcagtttgaatttgcatatttcgctacgtctctaacgaacaaagctataataactactctctttttcctcttaaacatttcaggtaatggatgtcttcaacaaaatatcagaactcttccctggagtaggttcaccttgatgcatttgtgtgttgttgctgttttctgggtcaagttatgcatccttttcctgatgacctaagacattattagctccggcctaaccacacggaacaatgcaaaactcttgtgtgctcatatactgcaggctcgcagttacagctccggatagtaactgtcttccctgggctaaaataatgccaaagttggattttttgtttcactaaaaatagttgagattgtgtatattgatgttttatgttttcattaaatattttgtttgaggcattgtatttgcagtttggtttttgagtattcaggtgccataaaaatgtgaatgcttcacataattgtaatactgcatgagattaaactaaacatgtaagcgaccaaataggtggcaacggtcaaatagtcatagtgaaccgtgtaatcaaagggatattcgttgtagtagttaatgtcagtgtttttgatgattttagtaatttgaagtttgactgt

SEQ ID NO: 3885 - DNA, 1044 bp, Glycine max
  unsure (1)..(1044): unsure at all n locations
  Clone ID: GLYMA-23APR03-CLUSTER9064_2
aaaggaaattttaagatgtcataaaaagccctttcccaaagcagaacaaatggaaatggtgcacctgaagattggccatgtcaataattagttacttgagtatgtctgtcttgcataaaaatattgataatctgaaattttaagtattggctggagtggcagcaaactttttggcttggtgattttcccctgtaatttctcctctgcttctggtataatatcctttgtttccatggtgaagtcattaggaaagagaaggactaatgaagattaatattcatcttctttgttgttgcttagatcattcgctattctttctttggctttaaagagacttttggatttactccatcatggcttttgtggcttagatatagcagcttcttagttttgtatccaacaggcataagcagtgaagttggtttaatatacattgccttaccattcattaaggcgtctgggaagtattgcataaggatgccaaacaaatggaactcatcatttgattacttctatgctgcgattgttgcaatgggaatctacgttccaggtagccctcacttgtacacatacatgcttgctcagaggaagaaagctctctccaaatcgaagagagagtaatgcaacatcagtagttttcattgattttgggtcaaacgtagccggtccaattggactcatcaggtgattacctctatgccgcagancgtggcaatgggaatctatgttccaggtagtcctcacttgcacacgtgcatgcttgcacagaggaagaaagctctctccaaatcgaagagagagtaaggctccttcagtagttttcattgattttgggtcaaacataggatatacacatgtcatgtcttggtttggatccacatataggtatcaggggatctcatgcgtttcatgttgacgtatcattaaaaggcaacatgccagagataaataaactagttattttgttcttctgcaacgtggtgcgaagcagcttcctatagttgatcgttggttcttagtcatcggctatagatattcaacgtg

SEQ ID NO: 3886 - DNA, 1734 bp, Glycine max
  unsure (1)..(1734): unsure at all n locations
  Clone ID: GLYMA-23APR03-CLUSTER910_2
cccccccccgggcttactcgctcacattaggagtttcacaacgcagctgcgcacagcacagtcctgaccctcccagaaaaccctaatcagcgtatcgaatagttggaatctccaattcttgtctttatctcttgaccagaaaaaatgtgcgaagccgtagaaattgaagaaaggcccaaatacaaagatatcagacgctattactgcgagtactgcggtatctgcagatccaaaaaacccttatcacctcccacatcaatttgcaccacaaggaagagtatgaaaaagcaagagctgaaagagatcccgaagcagaggcttcgaaatcgaacagcttgcgaggaatgtggtgccactttcaaaaaacacgcctatttgttgcagcacatgcaaagtcattcacttgaggaaagtaatctataagtttctaaaatcattggaaaattatgggttaatagtgtgaagcattggatcccagagaaagatctccaaaatgcgcgaggcagcatatatggacttgatggattagtatcaggtagggtgacctcctgtgaagctccatcaaggatgcctcggtcacgctctgtccaaaattgagaggccatttgtgtgtgctgtcgatgattgtcaggcaagttacagaagaaaggaccacctgactcggcaccttctacagcatgaagggaagatttttaagtgccctgttgagaattgcaacagtgagttctctttgcaaagcaatatgaaaagacatactgaggagattcatgatgacagttctaccactaccagtagtgacaaaagtcacaaacagcatatgtgtccagagattggctgtggaaaggtttttagatatgcatcacagctacaaaaacatgaagattctcatgttaatttggaatcagtagatatggtgtgcttagagcctggttgcttgaaacatttnactaatgtccagtgccttcnnncccatgtgaagtcctcccatcagtatatgacctgtgacatttgcgggacaaagcaactgaagaagaatattaagcgccatcttcgatcacatgaagctgaaggcagttcatcagagacctttcaatgcgagtttaagggttgcagctgcacattctcaagaaaatctaatctagacaagcataagaaggctgtgcactttaatgtaaagccttttgcgtgtgggtttcctgattgtggcatgagatttgcttacaaacatgtgcgagataatcatgaaaaaactgctaaacatgtttttacccttgtaagttcttttccctttctattccctttgtgcaaaaggctatcataagtgatattgtcatagtcacacggctttgcattgactttggttcagggggattttgaagaagctgatgaagagttcaggtcaaggccaaggggaggaaggaagagaacatgtcccactgttgaagtgttaattaggaagagggttaccccacctagtcaattggagcattggttatttatgcaggatagtgagtagagtgcatttagcactctgtgctcctattacaagtaggcaaaatgtaaatttaacatgttgacaggagtatataacattttggattattgttaacagatatatagaatttaggacaacgtgtaataatgattgatgcttatgagttatgacagattccatagtgtagcgaatctattaacctttgtaccaatttgcaatttaaacaactgcttttgttt

SEQ ID NO: 3887 - DNA, 2049 bp, Glycine max
  unsure (1)..(2049): unsure at all n locations
  Clone ID: GLYMA-23APR03-CLUSTER9111_3
ccacgcgtccggttttctttctttctcttgtggccggtgtgagggagactgagaccgaagcaagagtcgatggcggacccctactactcatacggtgctccggtaggcgctgacggagctagcattgcaaggagcagctttgctggttatatcccctctgagccttcaaattccactgaattgaggggcattggatcagattacctgcagagagatataggcttgttttacagtgctgatgataccttgggctccagagttcattctgagcctgttaagggttattcgcctcttgcagatccttgtctgagtaaaaaacgagatacaacaccattgggcattaataatggtgttcctgatgtaagcagtgaaagaccagcttctaaaagcagttatgacggtctaccaatttcggcggcagactcaaacattctgtttgtgggtggacttccaaaagactgcactagaagggaagttgggcgtatcctttgtagcttaactagcttatatgtctgcttgtatgtgtttgcgtgttgccttttgttcctggtgtggcaataatggattggaagaaagtgttttgaaattaaagctgtattggatttactaaatgagatcctctntagttagtcactctttattttttagttcaactaaaactttgcatggacaataagttgtcttttaagttaacagcatatggaaattaaatcacttggttcctgaaataactttgatggtatgttttgtatttaggattggattggattcgtaaagaatattaaaaagcggaagaaagcagagcagagagggaggtggaaaaagaaaaaggaagaaggaatgagtgcaacagtgactctaactctaaacctatgccgttcttccatcgtcgcttcttgtccacattatagccacaaaccaaaccctaatttcaatgccttttttagcttctctttgtctctgtctctgtctcaccacagacgcatcgttatctacaagaaaccattcccctctagacggacgtggctttatggatatatgaatagagatcgagattatgaattggagaatgggttagccttattcggttctgatgaagaactagcaacacaaattccaactcaggcccagtcacttgttgaaggatcaggctccattcgcatagcggagttcaagcctgttcctgatgttgattatcttcaggagttattggccattcaacagcaaggacctagagctattggcttttttggaactcggaacatgggattcatgcaccaagaactaattgagattcttagctatgctatggtcataactaaaaatcatatatatacatctggagcatctgggactaatgctgctgttattcgaggtgctttaagggcagagaaaccagagttgcttacagttatattacctcaaagtttaagcaaacagcctcctgagagtcaggaactattgtccaaagtgaaaaatgtcatagaaaagccccataatgatcatctacctctaatagaagccagcaggctatgtaatatggatatcatttcgcacgtgcagcaagtcatttgctttgctttccatgatagtaggttgctcatggaaacttgtcaagaagcaaaaaatttgcggaagattgtgactcttttctacctcgactgacaatttttatccatgtctatgcattatgtctccgcataagagtggggggggagagtagtgcttctttttggtttgtaattaataatattcagtgatattgctttaaattgcttcgtttagttcacctagaaaggtcacattccttttttttttacgaatttaaatcacattcctagagaatggtggttgatatttttttaaaggaataagatgtttccaagtatgtgcatgtgtaagtctatcaattttaatcgcattcctttttgtttagctagctaaatcccctatttgattactttcctttttttttcactttagttctttatcatgtttttaaagtaatgcaaagttaatgcctttaataatataaaaatattacctgcc

SEQ ID NO: 3888 - DNA, 1652 bp, Glycine max
  Clone ID: GLYMA-23APR03-CLUSTER9140_1
agcgcatccccgtcggggctcccgggcgatcgcccccctggcacgctccaacttcctctcatccacctagcgcaaagatgcaagttccattgatcgacaggatcaacgatctccaagtgggtctgaactctctgcagaacccatctttcccttctcagatcacaacctccctcgcttacaatttctgcaaatggggcgcagtcattctcgcccttgtcgccaccttcggcagcataattatcaatcactccccttagaacatccaaatcgctctcttcgggttctcgtcaaaacgcaaagatgcaagttccattgatcgacatcgacagaatcaacgatctccaagtgggtctgaactctctgcagaacccatccttcccaatcccttctcagatcacaacctccctcgcttacaatttctgcaaatggggcgcagtcattctcgcccttgtcgccaccttcggcagcatcatcaacagagtcactatcttcatcatccgcttccgcgccaaagccccttctctcccatccctaaccctaaacgacgacaatttttacacctcctcctcctctgacgacgacgacgacgacgataacgacgacgacctaacctactcctcttccgagcccgaagacgagccctccgcgtcttccagtttcatccgtttggacgactatttccgactcagaggaaccgataataataataataataacctagacgacgagtttcagactcaaaacggcacgcacaaacgatgtcgtagcatcggggatattttctccctctcggaactagccaacagcaagagcgtggtgaagctctgggacaccataggcttcggcctgggcttggacttcgatgattacgatggttactacgttggtaacgcggcggttccgacgagctccaccgcgtctccctcggtggttgtctcggcgggggaaggcgcgtgcgggaatctggcgctggagatctgggacacgcggctgcggcggcggaagcccacggtggtggcggagtggggtcccaccgtgggaaagaccctgcgcgtggaatctggtggcgtccagaaggtctacgtcagagatgacgggcgttacggcgtgacggtcggggatatgagaaaggtcagcacgccgttagagagcgtaacggaatctgacgcggatacttggtgggatgcggacgctattgttgtttcggacgagtcttttggcgaacagcaatcaatgttgcaacaaccaacttgaataataattgcagttcctttttcggtgctggaaatataattataataatcgaaaaaaaaataaggcgccaccatccgagattttctcaagagaaattgtttatttgtattattattcaatttaaaatttatacattgtatattcatcaaaaaaaaaaaaaaaaacctcataaaaaaatgcgtcaaaaacgttataagcgaccctaacggaaccttcgggggtgcgtgctcccgggtttccccaatttccccccgcttccgtgggggggcggtttcgctgcggccgtttcactggggcgcggcctgtgttgtccaaccgcgcgcgggcggggcagttatctcccgggggggttttcaccaaacggcatggctccccttgccccgggcaatcaccccggg

SEQ ID NO: 3889 - DNA, 1597 bp, Glycine max
  Clone ID: GLYMA-23APR03-CLUSTER91621_1
cggggttgccggggtgtaatactttttttttttttgttaaagggcaaatatatcaaatataataaatcaaaattcaaatatccacaactttttgttataaaaaaaagtacaatgtgatttagtaaaagaaaaaaaaagtcagtcttcaaaatattacccttccagagggcctatacatattcattctcacacgtccaaaaaaaaaaaactacaaaactcaattatccaaaaacaaaacctaaacaattaatttaagagagagaaaaaaaaaagagagaaaatggtttcaattttggatttcattgttaaatttgggtagagaagtagaagaaggaaaacaagaagggcacttaacgagaccgttttcgttgcacgcgttacacgttttgaagccggtcttctcggcgtagaccttcctactaccgttacactcgtcgcacagaacgaacctgtgacccgcgcacacgtggcactcggtggtgggatccactgcgggcaggtccatgaggatcttcttgagctcgccaacctcattgagctgtcgaacctcctcggccccaccgacgtacctgccagcgatgaacacgcgcggcaatgatgggccagggccgggcacgggccggcccatgattcggttgagttcggcggtgaagcccgagtccatggacacgtcacgctcgtcgatttggacgaggaagccgcgtagaatggagagcacgctcttgcacgcctcgaacgtgggcctcaccacgcgcaggctcgtgtagtacaccaccacgcgctgttccgcgcccgggaaataataaatcgcaggttgttgtggttcgggtttcgagacgacaacatcaggttcggattcggggggttcggggagtttgggaggttggggttgggggtggaggtgagttgaccaggttcggaggagcgagttggcgagtcggactcggtggaaaacggagggttttcttgtgggggaaggagagggtaattgttgatgatgctggttttgttgtgggggttcgtcgaggcaaagggtttgaatgtctttgaaggaagaacaagagaatgtggaagagggtgatgaagacgcgctgtgaattcgaacagttgatttgccccacggtcgccacattgaaggtgggaagctacaaatttgttttcttttttgtgtgtttgattctctttggttggatttgggggaattggggatttgggtttggagaaagaagagattttgggaggtgggtatggggaaagattggatttttggggggaaatggggttgaaaatggagaaagaatggattttttttttgttttattttgggggagagagagggaaatgggatttgttactatttttgttgatggggaagatggatgggaggatagagagaagagggggattttggttgcttaaagtttaggctttggtggtggtggtgaatttgcatctttccatcgctttttctagttatccctctatcgcctcctcctccaccccggcgacggcctcacccgcccccacccggcccactccgcctcgtccccttcccgcccacgctcccccccgtgccctccactccatgcactccttg

SEQ ID NO: 3890 - DNA, 1284 bp, Glycine max
  Clone ID: GLYMA-23APR03-CLUSTER92123_1
ttttttttttttttttaaatgaacaacataaaccacaaaataaattttaaaaaaatgatacaaaacaaagccataaaaaaaaactgccaacaaaattattactaaaatgcttgtaatttacatagatttcaacaattaatcatgatggtatttttacaccaattaattgatgctgctgatcctacttgagttgtgtgtctcttaaaggaggaagatgtcattctgaaagggacacacagcacaaagtctatgagactaaataggaaagaattaaagtgacagccacaaaaaatgcagagttggaagctgaaaatggttggcttctgcttcttgtggagtcccctgtggccaaattggctatccatgatgtagtagctactgctgcctgctcaaccgatgatcctggccctgattccattaatgacttcaaacttggagaagaaaagggacaaaatgtgacagtgtaatccgcggcagtacacgtaaaagtgctcgtagcatcatcaaacgcatagctataagatttggggcacgcagccttaaaaatctgcgagtacatcgacggggcgcacgccgccggtgaattaaacgccccgctgcagcaaaactccggcttcccgaaagcgcggcacgcgctctggcaagcgtcgccgccgtccaccctcaactccgccggacaccgccggttcaggtcggcaccgcaccccgtggcggcgcaggcgccggagccgccgcttgcgtccaccatcatggggaggttgtagccgtcgacgaggctcacgtcgtagtagtccggggctccctcgccgagcgtgaactcggcgagggtggccggcggagtggcgccggcaccgttgcaggttacctggccggagccgcagtcgccggtggcgcacgtgccctggccggattggtcgaattggcagccggttcggccccagaagcggcccgaccaaccaggcgggccgtcgaaggtacgcgtgcttcctctcttgagctcgaaaccagttgttccgatgtccggttttccgagaatacctggccacaccgtgtggtcacacttgttcacgaatgtgaatgttgtggctgagactctcacccctctgaaagccaggatgagtaggaaaatgaagaatcgttgaggagaaagtggatgatgtgagaagaacggagacatggttggattgctcgagtacacgatctttttttctttgggtgaatttgcgaattgaagtgaaagaatgtgtgtgatgaaagggcgaatatggtgctgagggggaatct

SEQ ID NO: 3891 - DNA, 926 bp, Glycine max
  Clone ID: GLYMA-23APR03-CLUSTER9216_5
gaatcttgaagccaatttgtttatctttagtaccacctagtcacaaaacatataccatgtcgaatttgagtttccttcaatttcatagtagcaactcgttggggcactcctcttttcaacccaatagtccaaacccgaacaacaacataaaatcatcaaaacagacatcaaatgtagggtgcaatattcagccaaagtcagaggaaatgaaatgggtgttcgacaagtttgacaccaacaaagatggcaagattaccctcgaagagtacaaagcagcagtgagaacaatggggtggggaatcgaaggcactgagactgatgagtcttttcaggtgatggactctgatggagatggcttcattgacttcaaagagttcatggacatgttcaacgtggaggagagggtgaaagagacggagatcaagagtgcttttcaagtgtttgatttgaatggcgatgggaaaatcagtgcagaggaattgtcacaagttctcaaaagcctaggggaaagttgcagccttagtgcttgtaagaaaatggtgatgggggtggatagaaatggggatggctttatagacttgaatgagtttatgaggatgatgatgagttgcaagaaactcacctaagttccgagaaggtctagaattgcttgaacaggatgcgcggagtgtgagatgttgtgaactctggcttcttatgcattaaaaaaaaaaaaaaaaaagacacccgagtgatcatatatgttttggtgtgatcataggtatttgtcttttcctgatcatatctttttttcttacttttcctctctattttgggttgctagatttgatcttccaaaccaaaagcatccagacagaaaaaaaaaagaataaaatttgatcacgtatgtaccacaaggccacaattagaaagaaacttctaattct

SEQ ID NO: 3892 - DNA, 649 bp, Glycine max
  Clone ID: GLYMA-23APR03-CLUSTER92400_1
tttttttttttttttgacataatcacttttgttgaattgataaaatagagcttcctcagttacttcagaaatcgaacaatcaactatgacaactacagtttcccaaacacacaataaccaaaaggagaaaaaatggagcaattcaaagcaatacacacataccaaaatactctagcaaggtaagattatcaaaattgcttttacaatttataaggacaaaggctcaaagacaatgcgccattcacaagatacattcaaaaccatccttgtttctccgatcattaactatttacttgctggctcttgtggcggcttaatgatgcctagttgcccaccatccttcgttgctagagtcgctgctttgatctcattgcagtggttaatgaatttgctcacctcacgatcagtatccatatcctttgtaaccttggatggcttcacgaatctctttcctttacgagtaacagggactttcccatgacgattgggaggtattgatttcttctttgctttacccttgaaaagattcgccttctgcgtcatttttctctgcttctgttgttcttctgatggctagggttaggattttaacttttgagtgcaaaaattctgaggttgggaaatttcctcgagccgctcgagccgaatt

SEQ ID NO: 3893 - DNA, 746 bp, Glycine max
  Clone ID: GLYMA-23APR03-CLUSTER9253_2
acctctttctccttctccccaattctcaaacctcacctagtattttcgtttctgaacccaattaattaagcacacaaggaccataacatacctatacctcaatatcacaagtcttatggaggcagagcaagaatgtggtcagagaaggaaagcgagagtcggaagagatttggcgcgagttgaaaaccctagtgagttccaatgatctccactcccttaacctcatgcaacacaccatattgggaaggttgcaggatagcaatgcggtgttgtcgcatttcaacgacttctctcagcactgctttgctgagatttccggcgacatcgctagaaacacgcgtgttttgaggtctgtcaagtccgaccttgattatatctttcagaagctcagaagtatgaaataaaaaattatggctacttatcccgatgcatttcctgaagactcatcgagcgaagtgattgataggagaccggatcttgaaatgtccaagtaactaacgttatccgaacacagattagaatgagttatactaatgaaagtttgtttcttctattgtaataaacatgtcctatttgtctcaatcgtttcaacaaagcttcttgcccttagccaagttctttaaactttttgtttaaacacttttatattgcagacagagaatgcattacgtccaaatgataaaattttgttttcagataaaaaaaaaaaaaaaaaaaaaaaaaaaaacaaaaaaaaagaaagaaaa

SEQ ID NO: 3894 - DNA, 1226 bp, Glycine max
  Clone ID: GLYMA-23APR03-CLUSTER9253_9
gtattagtagtccggattggaggagaaagggaaagtgtcgtccagattttaagcaagaaaaagtaacgagtgagggagagttgaggattgaggagtgaaggagcaaaggaaaaaggaaaaggaagataaacaagtttggctggattgcttttgcggacggcatgctttgatgtcggataaacagtggaaaaggacaggacacatggaatcttactttttctctttctcacactctaaccagcatagagcaaaaaggaaatggatagtccaccacattccaaaaacatgtgcccaacacaagcaattattatatacctcaataatcaccataatcttttttattacatttaaaaaccatatacttaatttcaaagtttcaaaaccagacggctcttaacaactgttttcgtgccttgaccgccaaactaatgcttcttttgtgtagattaattacaatattaaaaggggtacttaattttcttgtctgggttgaaattggatgcatgatgatttaattgatgtacttaattatgaataattttcagggcacaagtggtggggtggccacccagtgaggtcattcagaaagaacattgtaaacaacgttcaaaggagtaacaacaacgatggcgaaaaagccgccacaagtagtagcaacaatgtgaacatgggagcagctttcgtgaaggtgagcatggatggtgctccctatttacgcaaggtggatttgaatatgtacaagagccaccaagagctgttggatgcactggctaaaatgttcagttcattcaccatcgacaagtgtagttcccaaggcatgaaagacttcatgaacgagggcaaattgattgatcttctcaacggctctgattacgtaccaacctgtgaagacaaagatggtgattggatgctcgtgggtgacgtaccttgggaaatactcgtggaatcatgcaagcgcctgcgtataatgaaaggatctgcggcaatcgggctagcaccaagagcagtgcaaaagtgcaagaacagaagctagaggcaaatttgtaagttccagtttcgaccacaatctcctcgatctgttgctcttgggcgtccatgggaagcattaatgctaatataggagccaagttatataatatgtcggtaccattttttggaaataattttcttgtatatggattgtgtattatatatatatatgagaaaatagttggaaattcgggccc

SEQ ID NO: 3895 - DNA, 1307 bp, Glycine max
  Clone ID: GLYMA-23APR03-CLUSTER9261_2
ataggcatagctggctgtgagcaattgtggtttcacagaacgtgatcttatcaactatggcggagaaacacaacatcaagaacccagccgtgaagcggattctccaggaggtcaaggagatgcaatcaaacccttccgatgactacatgagcctccctcttgaggaaaatatatttgaatggcaatttgcgatcagggggcctcgtgatactgaatttgaaggtggtatttatcacggacggattcagctgccttcagaatatcccttcaaacctccttcgtttatgttgctcacacctagtggccgttttgagacccaaaccaagatttgcttgagcatatcaaatcatcaccctgagcattggcaaccatcatggagcgtaaggactgctttagttgcattgattgcattcatgcccaccaacccaaatggcgcgttgggctcattaaactacaagaaagaagacaggtgtgccttggccactaaatcccaggaagcacctccaaaatttggaactcctgaacgtcaaagactgattgatgagatacacgagtatatgctaagcaagtcatcccctcttccacaacttgccccctcacaagcttctgaagaacaatccaaaactgaggaggccaaggcccaggttaatttggaaaatcccgaggctttacccgtgggagcggagattccagatcaagcaggcgacagaattgttgaagaacaagaactgcctgtcaatgctaatcctaaccctgcaggagttgaagcttcaatggagagttcatccagtgtctcaagtaaccagttgctccaaaagtcagatgcaagggttcaaaatctgaaaccagatacaagggttcaaaaacctgacgatcgattgttcacacttgctgctattggacttgctatagcaattgtggttcttttgctgaagaagttcattaaatctacagaatatggtgctgttttcatggatgaatcttagatgaatctttgttcatgttggcttcaatatcaagattcttagcccatggtatagtcgataggaaaatttagcacttctgtgatattttatgatctttgaattgtacgtatgtcttgtaattatggcaatactaatatcgatatactacagctttgagttagtgagcaagggtctacttttttgagaagggtctactatgtgtaggaacagttataatgccttattgtttgcttatgacccctgatttatgtattctaaccgaaagaactcattattgccacaaaggttggatgaacaccttcgtggcttgtttttttacac

SEQ ID NO: 3896 - DNA, 1324 bp, Glycine max
  Clone ID: GLYMA-23APR03-CLUSTER93130_1
ttttttttttttttggggcaagccagcttaagccacacgctagggccgctgtaacagatttgagaaaatgaacatttacaaaactacaagtgtaaaatacaatcagcatttcacaatgaattccatccatccaaggtcgagcaaattatcaaaattaccacgggcaacacagcagccaacaaaaacagaatcatcagtgagatacattaactacactacagattagcaatggaaaaaaatgagattatgcagcgagactcaaacttattaactgaaaaacaacactatgaacaagcaaaaaagttccattgtgagtcactaatttgacgaattcagttcctcagaaaatccccgtgtctctctgacataagttgataaaacacacctaattccactttcaaattcaattttggccaatgcatcaccacaaacacaattacaacaccgcctcattaagtgactagccttcaaaacaagtgacccagcttcgaaagttaaactctcccttctcaaattaggggtaaaaactcaaaaactcgatgatggttgcggaaccgaacataatataatcaaatgggggtataatttgttctgagaggctgagttcccacaacggaaagcaacgaactttcctcgtcaagaaacaaatcctcggtaaccctaaatgcggcgtgcaagccaacaagaaccacggcgacgatcagcgagagcaagacgttgaggccgacgtgagtggagacgagcgcaacgacagtgagcaaacccaaaacgcagagcacggttctgtcgtcgagggtttggttgaaaacgacgaggaggccgtcgcgagagaagtagaggtagtaccaggcgacgaggacgaggaggaagacgatcatggagacggggtgccagaggaggctgaggaagacgatgaggagcgtgacggcggcgtagttgaagcggaagtggctcaggtttcttcggacccggatcatggcgtcgtcgtaggagtaggggcaggagagggctgagaggtctagaaactcgcgccatggacggggagtcaccaaggaggtagtggtggtggtggtggtctggtggtggttccagtgggagtggcgccggcgagggtgccgtagccggcggtgggaatgtgggacatttgggagtgttggttagatctgaaatttgtacatggatgggatgcgatttgatttgattgagattttgagattcagagagcaaggaatggtgttgccctgatggccgggtttctctctctctttagagggctgtttctcgtgctttgccccccatttcactcttttcattacttcaaagt

SEQ ID NO: 3897 - DNA, 957 bp, Glycine max
  Clone ID: GLYMA-23APR03-CLUSTER93269_1
ttttttttttttttggtggcatcaatcttagttttatctataaatcctcgtaggcccaatgaattgacataaaagttagaactcataacaagcacaaagaatttacacccagcaagctagattattctgaggtgctcgacataaaactaatactagagttaaaaattattggtattgcaactactcacgagaatttcaaatagtcaataaacagaatgttaacatatccatagacaatgctctcaaaaaaaccatatccatacacaatagttgtctaaaaaattgttcattgctgactgtactcagaaaaaactcccaccccacctcccaaccaaaccttgtatcactgggccttaccatgaagtgcactaactttctagattgaatctttaactccaatgtcaatgcaatgatactaagcagtgatcctgaaccgacccttggctaatcttcgagcaattactcttctgccacccttggttgctttccgagcaaaaaatccatggttcctcttccgtcgaataacgcttggttgatacgttcttttggggaataaaagcataggatcatctgatgaaggagcgtccccttgaggtaagaagaagcggagagaggggaggccacaggggtagagaaagccttgtttgtgggggaattcggcgtcgttttggggagaaatcgcaccggggagccgtgagagagaagggagtaataactgagaatgaggattagggtttttggaatgaagaagaagcgatttggatagccgagtcaacaacgaagaagctccacttctcagagacgccattcctccttcgtgtttcactcaaagaaacgcttcctaaaccctaatcaatgcaaagcagtatcactccaagctccaacctcaacgtggatcggagttttgcctctttcaagttcgggtttctattgcccgacccggaaggttttcttttt

SEQ ID NO: 3898 - DNA, 782 bp, Glycine max
  unsure (1)..(782): unsure at all n locations
  Clone ID: GLYMA-23APR03-CLUSTER93269_2
gaactacagacganaatttcaaatagtcaataaacagaatgtgaacatatccatacacaatggtctcaaaaagaacatatccatacacaatagttgcctggaaaattgttcattgcanactgtactcacaaaaactccaaccaaccaaaccctgtatcactgggccttaccatgaagtgcactaagtttcttgattgaatctttaactccaatgtcaatgcaatgatactaagctgtgatcctaaaccggcccttggccagtcttcgagcaattactcttctgccacccttggttgctttccgagcaaaaaatccatggttcctctttcgtcgaataacgcttggttgatatgtccttttggggaataaaagcataggatcatctgacgaaggagcttccccatgaggtaagaagaagcggagagaggggaggccacaggggtagagaaagccttgtgtgtgggggaattcggcgtcgttttggggagaaatcgcaccggggagtctagagagagaagggagtaataactgagattgaggattagggtttttgttggaatgaagaagaagcgatttcgaaaggcgattcaacaacgaagaagctccactcctcagagacgccattcttcttccttcgtgtttgactcactccaagctccaacctcaacgtggatcggagttttgcctcttttcaagttcgggtttttatttcccgacccggaaggtttccttttgttgttccatcgtcagtaccaacaacttctcgtcttctcgcaaccgta

SEQ ID NO: 3899 - DNA, 663 bp, Glycine max
  Clone ID: GLYMA-23APR03-CLUSTER93316_1
tttttttttttttttggggtaaatcaaagtcttattagtaaattgtgactaattgaataattttccaaccttagaaacattgataagaaatcgtaaaacaaaggagaatgtaatcgtttgagagactacatattggtcgatataatggaaattaaggaattatcaactccaatagaggtaaggtattctaaaagtccaccttcctaattaaacaacacacaagcacataagaacagtgcgaaggagagtccggtaaatgcagctctgcttgcacctccttcatcacctcctaacgttgccgggggttgcaccaaggacggaggcggagccgaagtagaggctttgcaggtggtgagtgtgaagttgacaccgcataagttggcaagtttgagagcctgagcgatagtggtaccaataccttcaagcatacccggagttgatacaagttggcagaaacatgtactctgggtttctttgattggattgcagcatgtgtcgggtggcttagtggagttcatgacatcaagacatggacttaggtgtttagcgcaagggggtgtagcttgcccatttgccaagcaaattactagagtcatgcctaacaccaccattaacggcatagacatgctagtgcgatacattttgttgaatattacttcctat

SEQ ID NO: 3900 - DNA, 1505 bp, Glycine max
  Clone ID: GLYMA-23APR03-CLUSTER93475_1
ttttttttttttctttttttttttttttttgttttttttgtttaatggactaaagttgaaccgtaattgaattgcataatgctcaaactgaatataatctgttcacacttcaaccggttcaagtatccagattaatttctaaaacatttttggcttgcatttgactacctaattctaattagagagcattttcctagaacagcacaacatttatatttctgtttctttcaaggtaaatcacaacgtttaagaaatctagcctcataactgctctatatcctgggtagaaaagtgtttgtctatggtgtggagaacttctagatcaatctcagtgatggtaacaaatttcggtaaagaataatccaatccttctgctggtaccacatcagttacaacagtttcattctcatgcatttcattgtcttgaaggtctttcacgctagcgccttcgtccaaattgaagagttgggtcttcatctctaagcacggcttcaaatcctcctcagttcgggctttattaattttttccataagatcacttatagctgataacctttcaatcccctttcccctttctgaagctttattagattcatcatcaattgattcattgatgtcaccatctacagcacttttcttgagcttctttaatccctcgtctacaatttgttgtattctcattctcaaaccatcacttctcatagaatttgatcttagctgcaattttaacccagggatcattgcctcattgctctccattgtagtaggattagactccaatgcagagggcacattctcatccaacgacttcacagctaatacttcctccagtaaatctacattctgcatgtatcggtcaaaagcttcattttccacttcaacattccgctccttgtattcctttatcttggcaaatctccattcatttatagctgcagcatcctttctagttagtggcttctttgaacgaagtgaaaggtgtaaattattgaactgagcaaaactattggaaagctgtcgaagtgatgcaactctacctgcagttgattgaggtggatctaaggattgctggtcaagaggagaggcgccagaagagggtgccttgtcaggaaaagttgaattagcttttaacacgtggatatgacaggggttttgatttctagagcagcaactcttgcagcattcgtaggggcatcttgaacgagcgacattgccgcactgtttgcacttgggcttgttgtggccacgctgggacttgggcggagtagggaccgcacccacgccaacgcctagggttcctggtttcgccgtagcgatgttgttgttgttgatgatgttggggttgttgttgttgttgttgggtgtcgccatagaatagagtaacagccacacctagcaccacctttctttgtttcttcttcttcgcgcgaaattgaaaacgaaaaaattgaaacccccaaccaaacaaagaccagcaacaaaggctgagtgagggaaaatttttt

SEQ ID NO: 3901 - DNA, 1221 bp, Glycine max
  Clone ID: GLYMA-23APR03-CLUSTER93588_1
cgtaaaactcataattagaatagttttcttttgcgtctggttaaagctgtaataaattactttcacataagcagcatcagtgattgaacacaactagagagtctacactataaagaaacaacattctcctatgctgcattctatcactaacaagaatataaaatagttataaaagaacatcgtaatgttcagttacactcttggggagtatcacgtagacgcttaagggtgttgaagaaatttcccaggcttgctatgagcttgtccccttggcctcttgtaaagtcatactgggagtcctctaaattttgtgagccaccccccttatagtctgctgctgattcactagcaattgctccgatctctactgccaactcttgcagtttcagagtcaatgtttcctcattttcttccctgctaattgttatcctttctgtgccgatcggcttcggcctttcgatatggtggttttcattcagctctactctgcccggactctttggtggcatcaccaagtgctttggaggcctttctgcagtacctttcaatttgggtcttgattctaggaagtctttcaaatactcgtcttctgaattatcatcctccggtccttcttcatggctgtcatcaggcctttgttcatgaaatttcttaggcttttgaacttggcatctcgatttacttcgttgccgttttcttttggacccaatttccacggttgcgtcgcgcgcctcgttcccatcttcatcatcgctcccaggatccaccatcccccgctcctcacgcgccctcacaacgcgttcgatggcctcaaacagctcgcggtcgaagcccggcggcggcatcgcgcccctcgctcccctggcgccgtcgtaggccgcgagcagcgcgcgccactttcggcggcactgcgggaggctccgcggcacgtcgagggcggcgcagttctcggcgatgatgttccactgctggtacaaggagagcgcgacggagcagtccgcctccaccgccgcgacctcgttcaccagaatcagcgattccgtcacgctccagtccggctccgcctgcgagcgcgtgcgccggaacccgctccccgaaacggcattggtgatgacgtcattgtcgtgctccttcattccttcttcgccttcgtttgatgacttttttgcccgggggatccactagttctagagcggccgccaccgcggtggagctccagct

SEQ ID NO: 3902 - DNA, 557 bp, Glycine max
  unsure (1)..(557): unsure at all n locations
  Clone ID: GLYMA-23APR03-CLUSTER9364_4
aagaataggaacccaaaaactaccatagccactactgattcagaaactcttaggcatagcgaaaatgacaaccaccttcgcgaccgtcgcaggactcggtggtgcatcactgtcatccacctcatctcgtctcacctcagattacagtgtgattgggtttgggttgattggttggctagcaccctcaagcgtaccggctatcaacggtaaaagtctgactggcctcttctttgagagcattggagctgagcttgctcacttccccacccctcctgcccttacttcatccttttggttatggctggttacgtggcaccttggcttgttcatctgcctcacttttgggcaaattggattcaagggaaggactgaagagtacttttgaattccaaacttatggtatgcttttgctttctctttttttcttcattcccttttgtgccttgcaatctataatgtataactctatgctacctttttccttcttactaggagaaatctgtgtaatatcgccttcataatgttgtatattattattgttgtacttgctccccnnc

SEQ ID NO: 3903 - DNA, 1647 bp, Glycine max
  Clone ID: GLYMA-23APR03-CLUSTER93930_1
ttttttttttttttttttacaaacgaaaaaggaaattaatatttaggcatgaaagcaggggcaataatgcagtgggagaggggaaggactgttcattaaagtgcaaaataaaaaaggaaaagcaaaagcaaaaggataattcaaggtacccttagccacctgcaataagtggcaatcccaagatcatgactcatgagctatacaaataatcatagatgacgtcatattgacagtcacgtggcatgtaagtatactaattcttaaagaaaacaagtccacattgtagggtaaagcaagggacagtttctccatcattgtcagctcgatatatacccttcatatattcctttgggatttcaatttgttgtttcttcaatctttatatttgtttggtacaacatgctttgaaccctagggccatgtcccccccaagcctcaattccatcaaataaagtctacccaccaaacaaaagaccaatagaatcgatgcacaattgttcaaattttgtttggtgcatatatatgaaagaaaactgtgaacaaaaacacttttttttttttttttttctctttgtactaggacaagttttaacatatatagcaattaaattaagtgtcattctcaatgttcactctaacgaatcagacccaataatttatttctgtaggaaatttaatgaggagctagttaatgaaatctaattttaggtacaatttttttttataaacaaatgctggtaattagtatgttatatataattaacaattttaacttattatacctgaataatgcgacgaaggggtctctgggggcctttggctgcatgtgtgcctagccatggtgtgtgccgccacacggtcttgccattgctgcctgcaaccaccttgtggtcaccaaccaccaactcaagagaccacataccaggtagcatctgccaaagcacaaagcaaccattatcactgcttcttgtccccaaacacttgacatttttcccagatgaaatctctgtctcacagcaaatcatcttcaccatcccagtggcatacatgttctttgtgtccttttgttgttttaggcaccctgtggctgccaaatactgctggataatgtatttggcagttgaagtttcaaatggggtgtctttgatgtgaatactaagagtgggatcatgtgctgagggaataggagccaaggggcaacccaagacaccaagcaacaacctcaaatcttgtgtcttggcatgaatggttccatagaatgatgatgattgtgaaaagcttccacctggggagatcttctgagtcctgaaccattcccttatgacttcccaagagctctctttcttggttccttcctcttgcatttcagggccagggccttccattaagggtgtcaaaggctgtggagcccaactctggcgccaacgggctttagaacccatatttggggtatgtaagagagtctcaaagagtaccacgcgtccgaagggaattgaattgaatgcaggtgaagatatatagtgagagagataatattggaacacaagaaaaaagaagaggtatcaatgtggatgcggtttgggagttttaaaagagtgtgtgtgtgtgtgtgagtgaggtgagggagtgatggggaagagacaaaag

SEQ ID NO: 3904 - DNA, 1561 bp, Glycine max
  unsure (1)..(1561): unsure at all n locations
  Clone ID: GLYMA-23APR03-CLUSTER94503_1
ttttttttttttttttannntaattaaacctatacatattcattaatttagtaaataaaacaaaataacaagtaaccacatcaaacattttcattataaggcgcagagtgagagagaggcgattattttttctaattgcaaattgtttttcagcacttttcttcttatttttatgagtgaagcagtacttcccctgtttggagccaatcttcttctgtatccctttatttgtctcggtctaacttgacattattcattttctgccaacaacactaactgtgtgtgtttggaaactatacctgatagctttacatgtatcacaagaaaccatatcaaataatgcgtaactaaacaccataacataacctcacctttcctcttggtttcttttttcttttttcagtgtaatatcagttatgtatcacatttcaatcgactttgaataaatatcaaacttctcagaagaagacagttgtggctcatgagtatactgctggcgagtgttcatggtaaagtcttgatcgttttggccaaaggctttttctttagccccacgaattgtggagcgcatggaattaagcaagtggccataagtcaaattagattcattttgcatggcttggatgaaactgaaagtcaaggcaccagagctttcctcaccgctcaaggccgatgtgtctgctgcatttccatcgtcatcacaagctgaaatgcaaactgctaaccctcctcttgtgcctttgtaaccagctcttgggtttctctgatcttcccatccataataaccttttcggttcatcctgcacataaatggtaaatcaagaattgtcccactaaagcaagtatcaacaagggcatgaagtttggcaccacgagggagaggcctaacaattgtggcgttgatttcatcgtcaagtatcttcccctcatgctcataatcaacggggcatattgcttcatcatatccatcaacctcatccatgttggtgtcttcttcctgtgaaccatgtccagagaagtgaaacaccaacgagtcccctgatcgacaaccctcgaccaaccacctcattgccattcgcatgttatattttgttggaattctcattgggtttttctcctctggatcatctgtgaggacgcgaatggagtcactagggaaacccatcttgttaatgagaaagtatttcatgctctgagcgtcattgacagaacctttaaggttgttaatctgattgcaataactaatgccaactaagacagccctcttgttgccataggaagaaggagggttcaatggagttggtggcggcgtcagtggcaatggccgaggataattgaattggttacgtcgtatcctatgtgcatagccaggagcagggtgataattaacaaatggaggtgtaacattgtttgcaaaatgataattgggtctgctagcttggcatccataacacatcaaaggaatgctataggcaacttcaattggcactagcaggggccttccgcactgcatgcatcttactcttcgagttgccatgcttcggaggttacggacgcgtgg

SEQ ID NO: 3905 - DNA, 1976 bp, Glycine max
  unsure (1)..(1976): unsure at all n locations
  Clone ID: GLYMA-23APR03-CLUSTER94832_1
atttttgtgtttctttgtgcttaaaaaatatgcattccatgcgtcacacttgagtatcgtttatataaaagtagcttcactagttacacagttcttgctagcaaaacaacacttgtcacctgtaatcttgtcacacacacacatccacaaagatagcaatgattaagcacttccaacagtgttacaacattgaaatgaccaaaaaaaacataacaaaatccaaacgtatcctttattcatctaaattagctaatcaaccccataacaaaaccaccccaatggctccagcaacacagtgcctcattcccatgtcttgcacttcttgtcttttagcctcatacttgaaactgggagtggtggaatgctctgctcatgcctgaacacattatcaggatccaccttggtctttattttcaccaacctgttgaaattatccttgaaatacatattgccccaagcagttgcctgtatgtaacttgtgctgttcttcttgttcattcccaaatcaagatctctatagttgacatatgcctcccttgggaacttggacacataaggtgtcatgtagttgtaaagcttcctaatccaatcttcatgctttgatgcattcttatccccatcttgccaaagagttaagtactggattttgtagagtgttccattcctatgagggaagggaatatcagattctgaaaacttgctcatcattccaccataagggttccaaatcatcaagggactatcttcttccagcaatctttgccacaatccctcaagtccagtttctggtattggatctctcacaaaatctgatttggctttgaagtagttcttgaaagttgactttccttgaagcagaacttcagggggggtgtcatttggatagccagcaatatagagcacagacttgatccaactagtttcaaggcaatcttttttagtcaaacccaattcaggaaagctttctttcatcacttggaggagtctgtcagcaccaccaaggaattgagcattgtaagatgttgtgatggttctctcagttttgtttccaacagtggctggttgaatgatgactctgatgaagagatcctcatcaatatagggtgccacttcctgccatctatgaagaatcttggttgcatcttgctctaggctccttgtaactgtgaaaacagtgacagtttctggcacaggaacaagctttatcttccaccaaagaaggataccaaagcttgctcctccacctcctctaatagcccaaaagagatcctctcccatggcttccctatcaaggatttgaccatttgcatcaactattcttgcatctacgacattgtcagctccaaggccatactttctcatcatcggacgatatgcacctcccgtgatgtgccctccaacacctaaacttgtgcaaaggcctgcagggaaaccatgaaccgaacttttctcatatattttgtaatagacctccccaatagtggcaccggcttgaatccaagcagtgttgtcttctatatcaacgtcgacggcgcgaagctttgacaaatcaacaattatgaaaggggactcaacttcagaaacatatgagagtccttcatagtcatggccaccactccgaattctcagatgaataccaagcttctttgagcaagtcactgccacttggacatgggaatcagtcaagggtgtgaatataagctcaggttttggcgctgaaggcaccaaataccttaggttctgtgcagaggattcaaggatcttgttgaatgatgcattttgtggagtgtaaattgatgcataaaatggagctgctttgtctgaatagaagctgagacattggacaaagttttcttcaagtgaagctgaagctgccaatgaaactgataataggaggattaaagttactaagtgtgaaattggtgacaccatggttttgtgttctgctcgagccgtttcgatttactacctcngnc

SEQ ID NO: 3906 - DNA, 788 bp, Glycine max
  Clone ID: GLYMA-23APR03-CLUSTER94989_1
ttttttttttttttttatacaaagggattatctcattataagagtaatgtgctaaaatgttacatggatttgaaaccgtgatttcctctattttttatcttttgaatctgtagccgtagtcccgtcattacttttttgttgacgaacggttgattcaaagaatgaaaccacttcctcttgcttgtcttctaccttttccaatagatcccctgcttcttcggcgagcttgtctacattttcagctacgttttcaacaaattcagcaacatcctgaagttttccttcgggaagattcttggcagccccttccgcaattttatcaaccctctcggccacttcttctactatatctgccacacgttctgcttgctctatcgttgtctcaattttctctttcaatagtagcaaaggtccccatttgttcgtcgtgaaggaaagaagtgcagcgactactgttccaatcatccaagctttccagctaccaggaaaagaatcagcagagggtaaatttcctggaggtatgctggcgtagacaaccatgctcatcttttttgtggcgtctttttgaaacctcaagcccaagttttgttctggaagagagaagcaattgtatttgactttggagttaagtcgaaattttgtaatagggcgatcatgatcgacctttgaagcttgacataatgtctccatggctaagcaagtagacttttgaataaaggttgtgtttgccatcggtatgtaaatgaatccaatattcattctcaaagatgatgactacatatatatat

SEQ ID NO: 3907 - DNA, 855 bp, Glycine max
  unsure (1)..(855): unsure at all n locations
  Clone ID: GLYMA-23APR03-CLUSTER95103_1
ttnnnnnnnnntttttttattttttttttttttgagtaatttaaagtggtttgaatccacctttgatcatntcttttcattaataaaaaaacccagacaatggctcaaggtcttttcagcttttacaattccactcgattattaacaactccatccatccaaacataaccaaactaatcggggaacaacagatgaaaattattgatagttttgatagtccaaatcattcagcgcactacatatgttaatgatattgattgataggttaatatcctattgaactatcaaatatttgtgccggtcaataattactcaaggcgtagttcaaaaggagagaacaaacaacaaaacgaagggcatgccaactcctcttcatggaaaaacatctgtagttacaaagaaagtatcttacactactcaatttggttatttagccgtttgggaagcttcagaggtattcgcttctataggacactgagatacgtatggtttgagcttgaaatcagtcaaatcaggaactacataatttggcaatttttcttgcatcaccacatacccacctttgcgagtgtggaaaccagtaggcttgcaattctttcccttataataaccacgaggagcacgttttgatgatagaatatcgagtgaagatggccgcttccttcgaaatgcccttcctattcctaagatgagtcccagaggcatctttttctagaaatcgcagagagataacaaattgggttggaaccgtcgacgaataatcagtgaaagcggagaaagaacaaagacagtggcggtgtggcaccgtcaggactgtgagggtttagggttcagggggggggcctacgtagctga

SEQ ID NO: 3908 - DNA, 2480 bp, Glycine max
  Clone ID: GLYMA-23APR03-CLUSTER95248_1
ttttttttttttttttttaaaaatgataaacattacttcagttttgactgttgaggtctcaccctcctgtattccttccaatagccagcttgctgttacagcttttcttacagatgttttacaagatgttcaaaaatgaaaagaaaaaaaaatgctgcactattgatgagaaaaataagggttaaattactcagttggttaagtgtttgataattttcaagtccctaaattaagttttttttagttgaattcctaaaacttataaacttccataaattgccattttcttagctggtataaactaatcctagggacctgctattttagtctatggatccaaaaaaagaactttagggacttgtttgaaattttccaaataatttagagaccaattgaataatttaacaaaaaataaaaagacttttatagttccatttctttggaaaaccactgtgacttgtttagctagcaaagtaaacattgatatccaagttgacgaacacggttttcactcttcaggttaacaggtagaaagactatcaataaccttgaggtagaagttccaactttgacttctttcattgatagcttcttgaccaaatgggtgctgctcaacatacttcaccatattttcagcatttgctaatccatccaaatattgtcgcagatcacctccaacagctagtgaattgtcactttcattctgaaatctgaacgtgcgcgggaacactgagttgtatggcttgtatggagaatcatccaacagcaatgtatttgattgattgaagtatcccttctcccatggaagattagaatcatgtttctcccaaattttcctcaaatccttaaaaaccagtggcttctgcttgttttcaagagttttgaaacttgttttggtacaataagaaagatcccaacaaaaaagcaacctttctttcatgtttcccatcaaacgattaatgacattgttaatatttttcttggttcttgaagaccatacagccacttcaaatttctcaaagcagaagttcagaaactcaagataaaaaggcctcttgaacattgctttctttcctaccattgcatctggtttacggtactttggagggggagaaactatgtccacaagcagcccatttagatcaagaataataagctttttcttcaaacacacaattgatggtctaactgtagaaatttgcaaagttttttgcctatataatttcctcaattcattactacgagaaacttgcttatcactatttgtttcatctaatacagatgactcagtattcatagtattttttataccttcctttggtatgcgacgaactaatttttttctttttcttttctctctacggggttgtttatcactatttgtttcatctaatacagttgactcagtattcatagtatcttttataccttcctttggtatgtgacaaactaatttttttcttttctctctgcggggttgtttatcactatttgtttcatctaatgcagttgactcattattcatagtattttttataccttcctttggtatgggacaaactaatttttttctttttctttttcttttctctctacggggttgtttatcactatttgcttcatctaatacagttgactcagtattcatagtatttttaataccttcctttggtctgtgacgaactaatttttttctttgctctctactgggttccatcctatgtgtcttgttatctaagtaaattaataatgcaagtaacactataatccctgtatagatgacagctcccaaggtttatagaatcctctactcccccattgtcttttgtccaaatgaactctggcagtggcagacggttgacggcggcggttcaaagttcaaacagcccttgccgtgagaaagtggttaccaagttaagatctattgagtgtcttaggttttgtggtgacgataagggggcggcgcagcggaagagcggcaaattgagatacctaaatcataactagatccaaccttcaccctaagaaatcttttttttacacgcccacttcgaatcatattattggaaaaacaaaaatcaagtaattaaataaatatgtttaatgaagtcaagttaatatttaataataataaaaaattcaaaatttatttacctctccatcgaattttaaattagattagatttttttccacattcaacaagaagattaagaccacaaaatattattgaaaaaaattatttaatttctaaattatattaagagattatatttaaaaagaatacaaattaaattaaatactcaatatattattttgtgaataatcaatagaggagtaaaagcctcttgggaaacaaagtttgaactgaatcagctcttaaggttaagaataaaattaggagcaaaataaaaaacatgatatgctatatcatcatccaaggcacgttgaccaaaacttccggacgcgtggtcgacccgga

SEQ ID NO: 3909 - DNA, 1050 bp, Glycine max
  Clone ID: GLYMA-23APR03-CLUSTER9638_2
ctttcacacttcagatctgtttcttcatcgaaattttgaattggatgcttaggcctaccctccaccgttgttcaagtaaatggcctttgtcaccactgctgaagtgtgtgatgcgaacccacagttaattttgagtggggagcttcgtgcccttcagccagtttttcagatttatggccgtcgacaggttttctctggacctatagttaccttgaaggtgtttgaagacaatgttttggttcgtgagttccttgaagagaaaggcaatggaagagttctagttgttgatggaggcgcgagtttacgctgtgctatattgggtggcaaccctgtggtacaagctcaaaacaatggatgggcaggtattgttgtgaatggatgtataagagatgtggatgagatcaatggttgtgatattggagtgagagccctagcttcccatcccatgaaagccaataaaaaaggcatgggagagaagcatgttcctgtaaatattgctgggacaaggatcagtgatggggattggctctatgcagacactgatggaattctgatctctcgaacagagctgtctgtttgatttcaattcatgcaaggactatatttatgggcagcacaggatctagtgtagtgctttcggtacttgtgttcttgacccggttcctcgcttccacaaaattataaccgatagaatccccttgataatcaaagtaggttggagtgtttgtccatttcataccaacattatctctgttttgaattactgtcacgaaagcttgtttttcccccatatattaagttaatggttgtctgttattaagtttggagagatataagtcataagtgcaaagtatacacatccatattttgaccagatgatcttattgtagttgcataagatgttgcggtctagagaccggaagcaggaaagatctgtatcttgtgctaaaaatttggtaggaaacgtctcttcttgtctctgcattccaaatagcagtagcatatatatattaactgatttagtcattaaaactcatgtatttttctcac

SEQ ID NO: 3910 - DNA, 1314 bp, Glycine max
  unsure (1)..(1314): unsure at all n locations
  Clone ID: GLYMA-23APR03-CLUSTER9683_2
cagctacgtaggccccccccccgagcagcatttgaactctactatcgttttctccgttctttctcaaagccgcactcaactttctaaaaccaaatcggtttgaatcctcatttcccgcctctcactggaaagcagcaaaatcacctttctctactatctatctgttccttttgtactctgagtgggtagaagtcatggtaaggctcactgctgacttgatttggaaaagccctcatttcttcaacacgattaaagagcgtgagttagatctcagaggcaacaagatagctgtaattgaaaacttgggtgctactgaggaccaatttgacacaatagacttatctgacaatgagattgttaaacttgaaaatgtaccatatcttaaccggttgggcacaatgctcattaacaacaacaggattactagaattaatcccaacatcggagagttcttgccaaatttacacactctagttctcacaaacaacagaattgtaaacttggttgaaattgatcctttagcatctcttccaaagctgcacttccttagtctgctggacaacaatattacaaagaaacctaattacaggctttatgttattaacaacctgaaatccctccgggtgttagatttcaagaaagtgaaaaataaggaacggttggaagccaaaaacttgtttgcttcaaaagaagttatagaagagattcaaaggacaccagcaaaaacattttcaactggtgaaactccaaatgtttctgaagcgattgaggaacaacagacgcccaaagtggttgctcctacacctgagcaaattattgctattaaggctgccattgtgaattctcagactcttgaagaggttgctaggcttgaaaaggcattgaagtctggtcagcttcctgcagatttaaaaagcttgagtgataatataatgttggataatgttgatgaaaaacatgaggacatgattcatgatgatagaagtcaagctgatggcaaatcgaatgatacacaagagcagagaaatactgattctgcttcaatggaacaggattagagtgaaaaggttttcaaatagtcctagcactgtggacttctttaatgtcaggttctagagttagactcttggtaattttccatgaggtgtactttatgaatcttccattacttgagaactggatgtttcaatttcactcgtggtgaatcattgctttggcctttatatatgtgttaaattgtattatttttacactagaacgattatggaatttgcctagagttttttcataaaaaaaaaaaaaaagggcggnnnn

SEQ ID NO: 3911 - DNA, 995 bp, Glycine max
  Clone ID: GLYMA-23APR03-CLUSTER9714_3
agtaggtcctgtccgttgtttagcttatcccaacacatagttttaattttccaatcaattccatccatcgggtctctctgtctctctcggatcatcaaaatcagaaagaattgggggaatggagaacaaccaggtccaaggcgctcaagcccaatcgggaccgtaccccggcggcgccggtggaagtgcaggtgcaggtgcaggtgcaggtgcaggcgcggccccgttccagcacctgctccagcagcagcagcagcagctgcagatgttctggtcgtaccagcggcaagagatcgagcacgtgaacgacttcaagaaccaccagctccccttggcccgcatcaagaagatcatgaaggccgacgaggacgtccgcatgatctccgccgaggcccccatcctcttcgccaaggcctgcgagctcttcatcctcgagctcaccatccgctcctggctccacgccgacgagaacaagcgccgcacccctcagaagaacgacattcggcgccgccattactcgcaccgacattttcgacttcctcgtcgacatcgtcccccgcgacgagaccaaggacccccccgcgctcgtcggggcaacggccagtggggtgccttactactacccgcccaatggccagcctgccgggatgatgattggccgccccgccgtcgatcccgccaccggagtttatgtccagccgccctcccaggcctggcagtccgtctggcagtccgccgccgaggacacgccctacggcaccggtgcccaggggaaccttgatggccagagctgagcgacaaccatgccgaaacggactgtcaggagttatgaagattctgaacttgcttggcattttgattgcttgcaatttggaaatggttttgttaactaaatttttatgggatgacactatgaacctgttaactcgatgaacagcatgatttaactacttctgtacaaaaatttaaaactaaaccagtgatccttctgtgtg

SEQ ID NO: 3912 - DNA, 1239 bp, Glycine max
  Clone ID: GLYMA-23APR03-CLUSTER976_2
aaattgcaatctaatcaaagccagagtgaatgctgttgaacgctgtctgaattttttgagctaaataaaagaagaaaaacagggtgagagagaaacagagtgagagagaaacagaggatcttcatatgaagagtgaagtgagttggagaataaagattcaacaacctgggaaagccgggagagtttttcttggagggaattttggactgcatccatgaaatcacaacagctcttgcttttgctgataggatgagcgattctgcatacagagtccaaaccacaccgcgccttgctcaatggagaatcgaaaacttggcttcttgcacttaccgcaaatcagatcctttcaagatcggaaactggaattgggttttgtttgttaaattgttcccagaaatatccaatcttacgagagacaaccccccaattgcatctttcatcgttcgggtcgttagttctgttggaggtcgccaggccatcacacatccagaaataaaggacaaagtgttaaagaacaacgaggattttgtttgggcaattgaggttccactaactgggaaattcattattgacgtacagtttcttgatttgaagactgcatccccaaacggtggagaaccttgttccatttgggcagaaggatttactcagcaaagatcaaatgcaaaagccatagagtctcttggtagaatgctaacagaaggcattcacacagacatcaccatcaatgcttctgatggaagtataggagctcatagagctgttcttgctgccagatcacctgtcttccgcagcatgttctcacataatcttcaggagaaagagttatcaaccataaacatctcagacatgtcacttgaatcatgccaggcttttctctattatctttatgggataatcaaacatgaagagtttctgactcataggctggcccttctgcaggcggctgacaagtatgacatatctgacttgagagatgtatgccacgaaagtcttctagaagatattgacacaaagaatgtacttgagaggctccaaaatgcatctctatatcagttgatgaaacttcctgcgaaatgcagatagggatctgatttctgaagtcttccatgaagttcttgatgcttggaaaggattctgaagatcttgcagttcaatttaagtgtgttttgttctgccttcaaaaggacatgaaagatgaaactgcaaatgtggaccaccaagttttgctcacataac

SEQ ID NO: 3913 - DNA, 902 bp, Glycine max
  Clone ID: GLYMA-23APR03-CLUSTER982_1
ctttttattgttccgagcggaaaaaacgtatgatgttgactgtgttgttgaaaaagcaaaatccagtgggagccacagagatacagtgtagaacacagtggtgtacataaaccccccagcacaaggcttaaacctaaattattgatccgagtgttattgatgtgcagcatcagtgagaaagccaaaaggaagcgccaatctgcattccgcggagtgcgcaaacgcagctggggacgctacgtctctgagataaggctcccgggccagaaaacacgcatatggctcggctccttcggctcgcctgagatggcggctcgcgcttatgactccgctgctttcttcctcaaaggaacatctgccactcttaatttccccgacctcgtacactccctgcctcgacctctctcatcttcccggagggacatacagtccgccgcagctgaagccgctctccactctccgcctcccaaagaagaacaagaatctattttcacttccaccaccacctcgtcctttcacgatgtcatggaagctcctcttatgagtccccttagggtggactccactttcggagatttctcatgggaccaactcttcgatttcaacgatgacattctcatcgtgggatcaacttctgccactcttgtcccttaacgctgcttttgcaattcgccacccactgcttctagaaactagctggattttctttcactttctgttaataactcttctctgcttttctaagacttgcttctgaactcttgtacaaaggagctctccaagacaaatatatatatatatatatatatatatatatatatatatatatatatatatatatatatatgtttactgagagactgatttcactaagcaccttaattaaataagtgtttctgaat

SEQ ID NO: 3914 - DNA, 1634 bp, Glycine max
  Clone ID: GLYMA-23APR03-CLUSTER98581_1
aagaagaaagaatttacggacgatgatataatttttcttccttggttagagagaaaatggaaaaaaaagacaaattattacttaaactaaaaattttaaagtttttaattttatttttttaactcaaaatttaattttcttctttcatccaatcaaacagaccctcgtgctctgtttggtagtagtgaagtgagagagtgaattgctagattttgtcgatttgatagaaacaaatgaatatatataaagaagcaagtttgggcactccttctggtgttttagtttatggaaaaaaaatcatcgataaaagggcagcactcagtctttacttcttccagcctaaagtccccccttcttccaattcaccaacaaacacagagctcctcccccttcaccctgaaatcccttttgtatgtgatcataggacccttcttgtccctcgtaatatgtctctttgtcaacctcgatgcttgccgtgattgcttgggtctattcttggtgggtcaccgccgccgtgcctcttccggtgacctccatgtgtcccaagttcaacagagcggtggttctgacggtggtgtacgccacccccattggagggatcagcacttcacaatttgctctgatacaatttttagaatgtaagtttaggcctaattcaacccaaaagctagctctaagtattctaacttggctttacttttagcggatgtgacttgggtttttctcaacatggttcttcttcggttttcctgttgccattctcttcctcttctcttttggtgcatcgtctgtttcctctatgttccaaaggactcctctcgggccttgtcttctttatcatttgacattcccggatggggagcttgcttccatggtcttgttggtgatggaagtgttagtgtgaggattgcatcccctttgatcatttatggttattactgactacagtcagagcaagaattaatccttttatatgatgcaagtagtttaccttggaaccttgttttgcttcttggagcagggtttgctttagctgatggagtccaatctagtggcctagcagacgtgctttccagagccttggatttcttggaagatacaccatactgggccattgctcctgctgttagtcttatgagtagcattattacagagttcatcacatctaacgatgccactgccactgccacacttctaatcccacttctatataacatagccaagactatgcatgtgcatcctcttcttcttatggtacctggagcagtggcaactgctttcttacttccaacttcaactccatcaaatgtagtgggatttgccactggccatattgaaatcctagacatgctcaaaattggcgtgccacttaaggttgcagggatagctgtgctctcaattttcatgccaactctaggagctattgtttttggaacagatgactatattcaatggatgccaaacataaactctccttggttgagaaattgatttcttctccaaattccaccctgctttacaaattcctggtgttctctatcattgacaatccacacgacctcccttattactatgtagatcaatacatggcaattgtggaaacccataatatatataataatataagcaaaatg

SEQ ID NO: 3915 - DNA, 1096 bp, Glycine max
  unsure (1)..(1096): unsure at all n locations
  Clone ID: GLYMA-23APR03-CLUSTER986_4
cactaatgggagttagctccccccttagggccnccccagactttccaccttattgcttccgggttcgaaatgttgtgggggaattttgaggcggactaacannnttctacccaggagaacagctattggcgcatgttntccaggcgaggcgccgcaatttaaccttcattaancgggaaacaaanagctgcgacctcctaccggcggcggcgggncgcttntagaacttagtggatgccgcccgggctcgcaaggaaatcggcccagaggccaattcgcttagaaacatccgaatcccaaaaaattttcttcattttctctcgcagcatttctcactagtcaaaaaccctctgagagagagagctcacaacaaagatgaccgacgaagacaaacccaaagccttctccggccaccaccatcaccctcctccaccgcagccacaaccctttcccgccgcccagtacggcaccttccaaggcgtcgccaactaccctcctccgccgcagccgcaccccgccatcggcttccctcaccccgttccgccgccaggcgccgccgactcctccgcccctcctccgccgtactacccggggtaccaagccgttcccggttatgcagttgctgaaggaagacctgtaagagaacgccaccttggaggcggtgcttgctacaactgtggtgaatcgggacatctggctagggattgcagtggaggcggtggtggggacaggtacggaggaggtggtggtggtggcagatatggaggcggcggtggcgggaggtacggtggtggtggaggcggcggcggcggcggaggaagctgctacagctgtggagagtctgggcattttgccagagattgcccatcaagtgctcgttgaatttactgttagggttgtttatgttttgcggattgttttaagtttttactttaatatgtcttagggattttaatggtttctgtccaaactatgggttcttatgagtagatgtgtgggatttttcttttttggttatttaaatgaagggtttctgtgttatcgttacaatctgcaaaaaaaaaaaaaaaaaagcttatcgatgcaatcgacctcg

SEQ ID NO: 3916 - DNA, 1295 bp, Glycine max
  Clone ID: GLYMA-23APR03-CLUSTER9870_1
tcagctacgtaggccccccccccgcataatattttacaatactaatcgttctttgattagatagagtatgatatgatatatatgtatgtactagtttatatatatgcatgatctcctagctcgaactatatatgtagattgattagtttaggttgattaggaaatggatgacgaggatgtgaatgaaagtttgcgcgagacgaaccagtttgatgaagagttcctaagagatattctgcagcagccagaagagggcggtgaagatctgaaaaactcatcgatcatgtcgtctctatttccaacaacttatatactgtccttcgacaaatccgctgctgaattgttaccaactgaaactgatcatcgtgattattcttcttcccaattgccctcatcatcaaattcaagggccaaccatggaaccaacaagaagcctcgaagcgcttcggagtcactggatcacatcatgtcagagagaaataggagacaggagctcaccagcaaattcattgcacttgctgccactatccctggcttgaagaagatggacaaggcgcatgtactgagagaagctatcaattacgtgaaacaactacaagaacgtatagaagagctagaagaagatatccgaaagaacggtgtagaatcagcgataaccataataagatctcatctctgcattgatgatgactcgaacactgacgaagaatgctatgggcccaatgaagcacttcctgaagttgaagcaagagtcttaggaaaggaagtgttaatcaaaatttactgtggtaaacaaaagggaattctgcttaaaataatgtctcagctcgaacgtcttcatctctacatatccactagcaatgtcttgccctttgggaatacccttgacatcaccattactgctcagatgggtgacaaatacaacttggtagtgaacgatctagtgaaagaactgagacaagtggctatgatgaagtcatgtgatgtgcaacaatgatgcgagctaattacgaacaagtccagtaattttagtttaaggacttgagaatgagtcataaatcatttcttttcaatagcctgttttgttttcgtatgttgatgagtcaataaaaagatattatgtttgctcggcttgaggatatatatatcccatgcttcattatgatatcatagtcttggacgaggataatcaaacttgaggccgaccctatatcatgatcaaggaggatataaatttactctataatttataacaaaaataaaagaatataatccacaaaaaaaaaaaaaaaaaa

SEQ ID NO: 3917 - DNA, 1781 bp, Glycine max
  Clone ID: GLYMA-23APR03-CLUSTER9914_1
tcagctacgtaggccccccccccatctttccacgaccgtaatgcatatgatatggcgtggctgcaatcaatcacaacagaactgaacatatcatggctacaacaacaacctcgtcttttgcctttctgaaatctcacactcacaccaaaacattgttcacccgcagaagctacaaagccataaaggctcaatctcaaactgatgtccgagaggaacaagtcgtggtagtgggtgctgggatcgcgggccttgcaactgctctgtcccttcataggcttggagttcggtccctggtgctggagcaggcacagtcacttcgaacaggtggaacttcactcacccttttcaaaaacggatggagggtgctcgatgcaattggagtagctaatgacctcagaactcaattcttagaaattcaaggctgtacaggatggtggtgaagtccgtggatgggagggaactacgcgccttcaatttcaaacaagaggatccaagccaagaggtacgtgcagtggagaggagagtgcttttggaaaccttggctagtcagctacctcgggataccattcaatattcttcacaattacagaggattgaagccactccaaacggggataccttgttggaacttgtggatgggtctaagctgcttgcaaagattgtgatagggtgcgatgggattcgatcaccaatagctaagtggatggggtttcctgagccaaagtatgttggtcattgtgctttccgtggacttgcgtcttattcagatggacaaccttttggaccaagagtgaattacatctacggaagagggttgcgcgctggatttgttcctgtttctccaaccaaagtttactggttcatctgcttcaatagtccatctgcaggttcttaatttaaacaaaaaaaaaaaaaatgcatcgttaaatcactgagttcataattgcaacttgcattgatatgccatcttattgtgacaaatagttgactatgttcaatggtaggtccaaaaataactgattcattggagctgaagaagcaagctaaggaactggtgaagaattggccttcagagctattgaacatagtggattctacgccggatgacactgtcattaagactccattagtagataggtggctttggccagccataagtccttctgcttctgcaggaagagttgtggtggttggagatgcatggcatccaatgaccccaaatcttgggcaaggagcttgttgtgcacttgaggattcagtggttcttgctaaaaagcttgccagagccatcaattctgaagacccatctgtggaagaagctttcaggtcatatggcgctgaaagatggccccgtgtatttccactaaccattcgtgcaaacctcgtaggttccgttttgcagtgggagaacccattggtgtgttctgttaggaacaatattgtcatacctaagctagtcaggctcgggccattgctggagcatacaaattttacttgtgagggtctataaagaagacaaagcaaggctggcaatggcaagcacaatgaaagatggagttgtcagggaatagagagagtttcatttctgttcaatatggatactgcatttgatgggtgtaaagagagttagttatgttcgttactcaataggttataaacattgtatttaaccgatccttaataagtacattcaacactttatgtaaaaaaaaaaaaaaaaaaaaacattgtatttaataagtacattcaacactttatgagaacttctccatttttctgtt

SEQ ID NO: 3918 - DNA, 1842 bp, Glycine max
  unsure (1)..(1842): unsure at all n locations
  Clone ID: GLYMA-23APR03-CLUSTER9955_1
ggagtgcctccgcctgtgctatggatccacgggcactttctcccccctccgttgtgccccgccgcgcgcgaagaagcagttttagtccccttatttgctcagtgtgtctgaaacatagaccaaaaatgtgctcttcgactctatcgtcctattctttcctcacaatcagctccacatttttcaaatcccaattttgccctcctcccttcccctctcgcgtggtggcgtgtcacgttggatccaattccaatgttcaaaagcacgttgccaccgacctcaagttcgtcctccacgacgccctccatgactctggaatcaacaccactcatgccagagaagctagggagcatttctgctcacaaattaggagattcactgatattgagaagggaaccagtatttgtatcaacaggtgtgttgatttggggagaactgctctctacatagctgcagaggatgattctctagtgtcacattcatcagttccacttcctgtcgatgattttattacgagattagatgatctttcgatggactactgtccgcactacagccccaaatatgattcatcgccggagaagttcttagagagcatagagagatttctatatattcacaagggtttcaggagagccaatgccaatgtattggagccacgagcactttatctccactcggttttgacccatcgttcaggatcagctgcaatgctatcacttatatactcagaagttctgaaaatgcttcggttgtggagccttttgcattttgatgctgaaattttcttccctcgtgatgctcttacccttcccacaggctatcataagcagaaaagcaaggagtcagaccaagctcacataatgacttcaggaaacctattagttgagatcttaaatgatctgaagcatgcattctggccttttcaacatgatcacaccaaaactttattcttgagggcggcaactgctgctaactgtgttgacagatctgattttgttggagaaagtggctcacaaattgcattagctaaggctgctcaacataggctagatcgaggtgtttggaccagtgtgcgttttggggacatgaggcgatctttgtcggcatgtgaacgtcttatcctgttgaaaaatgatgcaaatgagttaagagattacagcattcttctctatcattgtggattatatgaacagtcactggaatacctgacgaagtaccgagatctgaagaactcatctacgcaagaattatcatcatcaaactctcttagcagcctggaggaagatgccgtggataacctgatgatgcgcttgaatcttgtactgatggagcaagggtggagtcggccatcttatgccaagaattttcttggtaataattctgaaccatggtagttcctcttcttccatgtttattgagacaacatcacagaagatttgcatcaagccatattggaaatgaatgctgatggttcacggctgcggcaacttcatgaaaaggaaaaggagaatgagaaaaggagatggaaagatcaacatcataatcttggatgataagatgaggatgattcgtcacaaagaatagaattgttcgataagaatctaaggtttcacaccaaaaaaccaagaaacacatcattttaatggtgtatctgatctgaatattggcaactaagtgttttaaagagtctatttatatctttctaggcccaataactattctaataattaaaagacttgcaaataatcataaaaagtcctcagtccattgcaagtcaacaaatagacgtaagatacaattaaaaacacaaataaatcttattctaaaagttgantaaaatgt

SEQ ID NO: 3919 - DNA, 1863 bp, Glycine max
  unsure (1)..(1863): unsure at all n locations
  Clone ID: GLYMA-23APR03-CLUSTER996_44
atatgtatttatttaaataaacaaataaaaaggcaaactttcttatgataatttctttttctctatttaattaaagaaacaaaagaaaggctgaatgtcattattaattttgtttcctactatkggccttgcattgtagcctctacctaatttgaggcgtttggatctctctggctccaaaaatctaattaaaatgccatatattggagatgccctatatcttgagagtcttgatctcgaaggatgtatacaactcgaagagatcggtctgtccattgttctttcaccaaagcttacttctctgaatttgagaaattgcaaaagtcttatcaagctgccacagtttggagaggacctaattcttgaaaagctacttctcggaggatgtcaaaaactcagacacattgatccatccatcggtcttctaaaaaagctcagaagattgaatttgaaaaactgcaaaaatctagtaagcttacccaatagcatactaggcctcaattctcttgtatggctggatctctctggctgttcaaaactgtacaacaccgagttattaaatgaactaagggatgcagagcaattgaagaagattgatatagatggagctcctattcatttccaatcaacatcttcctactccagacaacatcaaaaatcagttagttgcttaatgccttcctccccaatatttccatgtatgagtaaacttgatctaagtttctgtaatttagttgaaatccctgatgctattggaattatgagttgcttagcaaaggctagatttaagtggtaacaattttgctacactgcccaacctcaagaagctttccaaactggtctgtttaaagttacaacattgcaagcagttgaaatctttgcctgagctcccttcacggattggcttcgtaactaaagcattgtattatgtaccaagaaaagcaggattatacatttttaactgcccagaattagttgatagggaacgctgcactgacatgggttttttcatggatgatgcaattgtgtcaggtttgcatgttcctcctttgctcctctcatctctttctctctccttttttgngtataggaatcaggaaataacatatagatgtctctgcagtaccaggtgaaatacaagattgaaagtgttagtccaggaagtgaaatacgaaggtggttcaataatgagcatgagggaaattgtgtaagcttagacgcatctcctgttatgcatgaccataattggattggcgttgcgttttgtgcaatattcgtcgtacctcatgaaacactctcagcaatgagtttttcagagacagaaaggaactaccctgattataatgatattccagtggatttttatgggagatgtagatctagaacttggtttagacaaatcagatcacatgtggctattctttgttagtcgaacacgattcactggagaatactatctcaatcttggcagattgcgtttgaaatgtgatgatgaagggatagagtggaaagagtcatgtgctgaggtgaagaaatacggatatccctggctatataaaggggatatagaagggccatcaaatccgttggctatgaagcgcaaatttggagaaattgaagaaaatgtgagcagaagggagaaaagatgatgcaagctcctcccaggaaaagacaataaagttgaatcttaggctgtagaatcatcattttattcatttcagtcgtcattcactcctcccaacaattcagaagttccataaaggaaactcatgcaaatttgtaataagcttggtgccgtaaaatcaggtttgtattcactattactgttatttttatatatatgattttttatataaaaaaaaa

SEQ ID NO: 3920 - DNA, 2256 bp, Glycine max
  Clone ID: GLYMA-23APR03-CLUSTER996_51
ccacgcgtccggttcaggtagcagaaaatgttgaggtcataataattgaagatccatatgacattcttcgaacaagaacaatgagggtcgatgctctatcaacaatgagtagccttaagcttctctaccttggatattggaacgttggcttcgaaatcaatttttcaggaacacttgctaagctttccaatgaattaggatatcttagttgggaaaagtatccttttgagtgtttgccaccaagttttgaaccggacaaacttgttgagttgagactaccttacagcaacatcaaacaactttgggaaggcacaaaggtagtatcaattattattattatttttctatattattttcatttaaataaacaaataaaaatacaaacttccttatgttatttctttttttctctatttaattaaagaaacaaaagaaatgttgaatgtcattattaattttgtttcctactattggcgttgcattgtagcctctacccaatttgaggcgtttggatctctttggctccaaaaatctaattaaaatgccatatattgaagatgccctatatcttgagagtcttaatctcgaaggatgtatacaactcgaagagatcggcctgtccattgttctttcaccaaagcttacttctctgaatttaagaaattgcaaaagtcttatcaagttgccacggtttggagaggacctaattcttggaaagctaggttctcgaaggatgtcgaaaactcagacacattgatccatccatcggtcttctaaaaaagctcagagaattgaatttgaaaaactgcaaaaatctagtaagcttacccaatagcatactaggcctcaattctcttcaatatctgaatctctctggctgttcaaaagtgtacaacaccgagttattgtatgaactaagggatgcagagcaattgaagaagattgataaagatggagctcctattcatttccaatcaacatcttccgactccagacaacataaaaaatcagttagttgcttaatgccttcctccccaatatttcaatgtatgcgtgaacttgatctaagtttctgtaatttagttgaaatccctgatgctattggaattatgagttgcttagaaaggctagatttaagtggtaacaattttgctacactgcccaacctcaagaagctttccaaactggtctgtttaaagttacaacattgcaagcagttgaaatctttgcctgagctcccttcacggattgaaatcccaactcctgcaggctattttggaaacaaagcaggattatacatttttaactgcccaaaattagttgatagggaacgctgcactaacatggctttttcatggatgatgcaattgtgttctcaggtgagattgttctctttatggtattaccattttggaggtgttactccaggaagtgaaataccaaggtggttcaataatgagcatgagggaaattgtgtaagcttagacgcatctcctgttatgcatgaccgtaattggattggcgttgcgttttgtgcaatattcgtcgtacctcatgaaacactcttagcaatgggtttttcaaattcaaaagggccaaggcatttgtttggtgatattcgagtggatttttatggagatgtagatctagaacttgttttagacaaatcagatcacatgtgcctattctttcttaaacgacatgacatcattgcagatttccatctcaagcacagatatcttggcagatgggtttcgagatatgatggagtgttgaaagagtcatatgcggaggtgaagaaatacggatatcgctgggtatataaaggggatatagaacaaaggaagcgcaaatttggggaaattgaagaaaagtgagcagaagggagaaaagatgatgcaagctgctcccaggaaaagacaaaatagttgaatcttaggctgtagaatcatcatttcttctctcattttatccatttgagtcgtccttcactcatcccaacaattcacaagtgtcataaagggaactcatgcaaatttttaataagcttggtggcgtaaaatcaggtttttggttgttatgggatgcttgtgtagctgtctttgttggttaagaatattgcttttttttccttttttggtttgagtaatgtttaacagagagtgatgcaatttctcgttttcagtcctttttacttgttagttcatgacagctaaaaaactagtacaaataaaaaatttaaaaacttctcgtgtc

SEQ ID NO: 3921 - DNA, 1985 bp, Glycine max
  unsure (1)..(1985): unsure at all n locations
  Clone ID: GLYMA-23APR03-CLUSTER9971_1
gtggacgacgatgcatacccctacaagtccttttccacttcacacccccaccaatactcgacccccgttcctctcagaacagacacaagagagaaacccatcatcataggacagaaactcattcattcccccaaaacccaaaacgatgtcgttttctcaccaccgtcgatctcaatcggagatgcatttccggatcagcgacgacttcgacctcgaggtcgatctctctccgtcgcatcatttccaatatccggccccgctcctccaagattccggatccataccccaatctccgcaacccgaaaccgcccgctccgctcaccagagaagcaactccgccgacgcctcttactcctccttggtcgacggcattgaggccaagaaggccttgtcccctgataagctcgctgaattgtggaccgctgatcccaaacgagccaagaggattctggctaaccgccaatccgcggctcgctccaaagagaggaaagcctgttacgtgttgcagcttgagagaaaatttcaatctcttcaaaccgaagcaaccgctctttgtgcccgattaagtctttttcagagagatacaactggtctgactactgaaaatacagagttgaagcttaggttacaagccatggaacaacaagctaacttatgtgatgctctaaatgaagcactgaagaaagaagttgatgggctcaagattgcaactggcgagatagtaatgcataatgcccatggtttgggactgcatccacttacatattctcaggctccattcttctcacatcagtcacaacatgggcagagtgaacttcaggccatgcaaatgccacagttgcattcactctcatctaatgtgcctacttccgatgagcctctgtttgatctagacattccgtatgatttgtcagaaatgttgtcaagtgaatctatcggccaatttcaggggctggacataggcgacggggttttgcataatctgatgcctgattgtccctccatttctgttaataatattaacaatgccttttgatgcaaattagactgaccaacatgtgaccagcctttttattggagtgttcatagactgacatgagtgagacctaaaggtattgattttttgttttctattggcacaaattaatttatgtagataaaaatgtgagaggttctttcaagttatataatccattctggtccattttttacattactgggagaatttgtacttaattgcaccttccacgcacacaacttttttacttcttgtgtgtacacttcttgcacttaagacaaactagcaggtgtttttgacagttctcgttttctaccatgttgcacaaagaatcatttgttatcaatttcaaattcaataccatataccgcaaagaaccatttgtcatcaactttaattgcaactattcattcatatggacatggtgtgccatggatggaccatcatatttatatttttgtggaaacataagttanncctgttttgttggtttactctcctgtcaattttaaagaagccatttgaatgagggagagagatacaactggtctgactactgaaaatacagagttgaagcttaggttacaagccatggaacaacaagctaacttatgtgatggtatgtttcaaccatagtaaatctacagattttagtcactgtacatgtttatctttgacatcagttacatatatcttgattatctttgatatcagttacattacatatatcctgagaaattttgctggtttttgcatcagcaggagtagaattatttacctacagagaagttattggaaattgttttcaacttttgatgcttttctaaatgtcattttataattgttagactgcatcattccagaaatcgaattgttccttgtgatcaataacctactagtagtgtttctgttttgttaaacttcaactaatatattggtatttacaactcatttccatgactttaac

SEQ ID NO: 3922 - DNA, 1642 bp, Glycine max
  Clone ID: GLYMA-23APR03-CLUSTER9985_3
ggcatatccaaaggaacaaaaatattattaagatgatcaacattattggagcacttgttctactctttgcatttctcttcctcagttgtgtgtatgcacaagacacaacaacccttgtgcctgcaatcataacttttggtgattctgctgtggatgtagggaacaatgactatcttcccacccttttcaaggctgattaccctccttatgggagggactttgttaaccaccaacctactgggaggttttgcaatggcaaattagctactgatttcactggtaagacaaacttaaaccatcaaatatccaacctgtgactatttagattagatgacaatggagtatatgtatattatttgtcaaagtagtctgttgattgagcaggatgggtgagttcatataaactctttaacactatcttcgattcctacaaataaaaaaaatatgtatatttttgggtgtataatgacaataacgagattttaacctaacacccttagaataattactcaaactcccactagaccgatcctggtgggtttatagagtagtagtagatgttgtactgctcatatatatacttatgcatttaagtttcatttttgttggaatgttttcttaatttgcagctgacacattgggtttcaagacctatgctccagcatatcttagcccacatgcatcagggaaaaacctccttattggagcaaactttgcttcagctgcatctggttatgatgaaaatgctgctactttgaatcacgcgattccgttgtcccaacagttgagttatttcaaggaataccaaggcaagctggccaaggtagctggcagtaaaaaagcagcctcaatcatcaaggatgcgttgtatgtgctcagtgctggaagcagtgactttgtgcaaaattattatgtcaatccttggatcaacaaagtctacactcctgatcagtattcgtcctacttaattggttcattctcaagttttgttaaggacttgtatggattgggagccaggagacttggagtgacttcactcccaccattgggttgcctacctgctgcaaggactatatttggtttccatgagaatggttgtgtctcaagaatcaacactgatgctcaaggatttaacaagaagctcaactcagctgcagcaagtcttcaaaagcaacttcctggtcttaagattgcaattttcgacatttacaagcctctctatgaccttgttcaatccccttcaaaatctggttttgtggaggcaaacagaggttgctgtggtaccgggactgtagagacaacatccttgttgtgtaattcaaaatctccaggaacttgttctaatgccacacagtatgtgttttgggacagtgtccatccttcacaggctgctaaccaagttctagctgatgcattaattctacaaggcatatctcttgtcacataaagactcgtgattatttatgtgttagaatttattttgtacaactacacatcgtgaaagtgattcaaaagtttgctgtttttctttagtttgaaaaaaaaaaactgtactctatttattttagatcttgagaaatttcagataaactcatttgtaaaccattttataataatagagaaatgtttgcttattatctgt

SEQ ID NO: 3923 - DNA, 1345 bp, Glycine max
  Clone ID: GLYMA-23APR03-CLUSTER99894_2
cacgagaccattacctagaacatcctaatcgaaaaaaaaacagtttcatttttgcgttatcgtggagttcaacttcgagggtttccttcacatctctgtaatttccatttccacagttactcttgtgaattagcgagatttgaagcgagtgatggctgcgaaggaagagaatcgaatatttgttggaggtttatcctgggacgttacggagcgtcaactcgagcatgcctttgctcgttacggcaaaattctcgaatgccagatcatgatggaaagggatacaggccgtccacgtggatttgggtttatcacatttgcagaccgtaggggaatggaggatgcaatcaaggaaatgcatggacgggaaattggtgatcgtatcatctcagtcaacaaagcacagcccaagatggggggtgatgatgcagaccaaggttacagaggtggctactcatcaggtggtaggggaagctatggtgctggagatagggtaggacaggatgactgcttcaaatgtgggcgtccagggcattgggcccgagattgtcctttggcaggaggtggtcgtggtcggggtggtagttcatttccttcacgtcctaggtttggagctgctggtggacatggggatcgcctgggtggtgaacgtgatcgatacgttgatgatcggtatgatggaggacgttatggagatagggatcgttttgataaccgtgactacaaatatggcagccgcgaccgctatgctggtgacaggtatccaaccagtggagatcgatttgcaagtgatcgatatggcgctggctcagactacccacaaaatggttatggcaaggaaagagggtatgaccggtacagtggtccacgaggaggtgctgataggtatggaagtggaatgggaggtcgagatgaaggaaggagttataggggtagacctggtccatatgacccgcccaagcaggggttctcgttcatcacttgatcgctactgatttctactgctgatgtttttaacgggaaatccaaatgcagaagccacattagagacctagttcttgttcttgttacgtaggacatcctgtttgggacaactgctactgctagattgtagtttcatagattgtggatttcatagtttgtttccttatttagatcgtgccaatccctgttgatttttcccccgcgtttgcttgacgctttgactaacttccctaatgcaagtaagcatgatttatcgctgcaaaaaaaaaaaaaaaaaaaaaaaaaaaaaaaaaaaaaaaaaaaaaaaaaaaaaaaaaaaaaaaaaaaaaaaaaaaaaaaaaaaaaaaaaaaaaaaaaaaaaaaa

SEQ ID NO: 3924 - DNA, 1504 bp, Glycine max
  Clone ID: GLYMA-23APR03-CLUSTER99986_1
tcaggtgccgattcaagcagagattaaagggaggggcgctcttggtgaggttttaatgtgagcacaagcctccacgtgtcacgcgtaattgcattactttgcggagttggttgcttttgtataattcagctaagtaggccccccccctcacgattcattattttttggttagttttattttttaatactattagtactgacaataggtttataaactaattcaattacaacccatacctgaaaatttttatcgtcaaattgtatagcagatgcaatcatagaagatgtagtgtaacatgaatggtcttaaatcctgagattcctgaaattgtttcattaaaaaaacggtatagaaatgacttatctgttagcaaaatgcttattagtttaacatgtgatgttctttatatttggtgttggtcactctattttcataaggaaaaaaaattcgcttttttgtgcttgacaaagttgttaatctattggtagaaaagttccttacctttcaccgcaggaaacatgttggtgatttacatttaattggatgggttagtatgcaacactaatatatcatatgtgattgcctgtcatttgattgttgtattattaaaacatgtattatctctttaagggcggataatgtaccgtgtgggccaaaatttgcagtttggttgagaaaggtcaatggtttgatgtcgttaatgctgataggatcaagagtataaatgattttgctaacttttttgcctacaagttgattccagagtaagcattcaactttcctcatgtcctgctatattgtgctttatacacactaaccattaatgttcctaatttaaatacatgttaggtacaatattagagtccaagtgtatgatggaactggtaatgcctgctttaaattaccatataaggatgtcaaaatattactgaaaatatcgtgcaaagatattgttttacacattgagggtccatatgctcaggagttaccagcactactgtatgatctaaatggattggacctattatttttagtagacacaagaattgaaggatcagctacatcaagtagcaatgttagcgatcatgatgggtactctgtgtctgaaatatgtcatgagaaggagattttgagaatgctccagagaggggaacactatttccaatttgatgaggggcaagctaaacgtgctctctgtctatctgtcaaggaaaacaaattgaaggtaaccaaacaacatcatgctcctggttgtattgattgagatggtaaagaaacaaagtaaaatgcttttatcaaattgtatctgatgctgctgatgtggaattacttttgtcaacaaatcaaagtctgctgaaatacagaagtagtctgattggtgtaatatgttttattgaacaaacctatctttatattatgcatatgtagtttaacttttgttcagacttgatttttaaaaatctgataaaaaaaaaaaaaaaaaagaaaaaaaaaaaaaaaaaa

SEQ ID NO: 3925 - DNA, 786 bp, Triticum aestivum
  Clone ID: TRIAE-23APR03-CLUSTER10009_2
aacatttccggcacgcgagcacaaacctagcaggtgtccaggtccgggtccgagcggcaccgaccgagcaccttcgcaaacccctcaaccctcgccgccgccgccgccggccgctcagcccccgccgccggcgccatgggcaagttccgcaagctcgggcgccacgccgcgcaccgcgtgtccatgctcaggacgatggtgtcgcagctggtgaagcacgagcgcatcgagaccaccgtcgccaaggcgaaggaggtgcggcgcaaggcggatcagatggtgcagctcggcaaagatggtacactggatgcagcaagacgtgcttctgcttttgttcgcggagatgatgttgtccataagctattcacagagctggcctaccgctataaagatcgagcaggtggatatacaagacttttgcgaactaggatacgaataggcgatgctgcaccaatggcatacatcgagtttgtcgaccgggagaatgaacttcgtgaggccaaacctgcgactccaccgccaccccagcgtgcccctcttgatccatggaccaagtcccatgccagccaacagtgggcagggcctaaagtcagccagaactccaaaacagaagggctatgagaatcaaacgcaccagtttatctttattttgtgtttgtgagatttttttatctttagacgcgctaattaattaggagatccattctgtaagagactaaaaacttatgtttccacatgatatctatattatttgtcaaggatcactgtgactagaaattgttactg

SEQ ID NO: 3926 - DNA, 707 bp, Triticum aestivum
  Clone ID: TRIAE-23APR03-CLUSTER10021_2
tcggcccgctaacgaacgaacactccgcatggcagtggcccaactcgagtctgacgccccctcccccgccccattcttctccgtagtcgccgccggcccccgatccgatccccactgcgccggcttcactgcttgagctccaagccttctgagggtgcaaggtttgcgaggatgccgaaggctgatggggatgccacgctcctgatccagtccctgaacaaggcctatgccgccacgcccacgaatctcaagatcattgacctgtatgtggttttcgctgtggtgactgcccttgttcaggttggttacatgggaatagttggatcacttcccttcaactcgttcctatctggtgtcctgtcatgcataggaactgcagtgcttgctgcgtgcctccgtattcaagtcaacaaggacaacaaggaattcaaggatcttcctccagaaagggcctttgccagatttcgtcctgtgcaatctggtgctccacctggtgatcataaacttcctcggataagccactgtcctacgagtttttgagattttgtagtgtcctaatgtttgagactgtcatcatgttcgatgttcatgtggtaccgcacaccatctatgtaatccgagagtttctctgtgaactataataatttcgtggatttagtgctaacaacataaggacatgagaacttgctttctaaaaacaaacaaaa

SEQ ID NO: 3927 - DNA, 885 bp, Triticum aestivum
  Clone ID: TRIAE-23APR03-CLUSTER10078_5
accaagtacagcacaggcattgccgcacacactcaccgtctcgccacgtgagaggagaagcccgcagcgccggtgcttgagcggatcgggaaaggatggccggcggcgcggacgcggacggggagcgccggatcggggtggccatggactactcggccagcagcaagcgcgcgctggagtgggccgtccgcaacctgctccgccggggcgacaccgtcgtcgtcctccacgtccagcgccacggcggggaggacgccaagcacgccgtctgggccaagtccggatccccgctgatccctctgtcggagtaccgggagccggaggtgatgaagaactacggcgtgacctgcgacgccgaggtgctcgacatgctcgacaccgccgcgcgccagctcgaggtaccttacttttttgtacatgcgcgggaggtgttccgatcgatcctctgatttgatcgatcgagcatggaggaagaagaacggactgactgcttaatgttggtctgatgatcagctgaaggtggtggcgaaggtgtactggggcgacgccagggagaagctctgcgacgcggtggaggagcagaggatcgacaccatcgtcatgggcagccgcggcctcggcaccatccagaggattcttctgggaagcgtgaccaactacgtgctgtcgaacgcgtcgtgccctgtgacagtcgtcaagggagaccgttaggtttgccatcggtgtgcatcaggatgcgcttcatcgttctctgctccgttgctgcgtccgaataaagtatggagcctgttgtgttttctgtatgccggaccttggcagattattgtagtcgtgtatgtttctgaacattcgggttcaaattcagtaaagtgtcgttcttttttt

SEQ ID NO: 3928 - DNA, 835 bp, Triticum aestivum
  Clone ID: TRIAE-23APR03-CLUSTER1008_2
ctggacagaagattccacacacgcacctcctcgtcgggcgagcgcagcagaaatggcgaccctctccatggtctccggccccgtcgccacctcgtctctccccctctccacccgccgccgcgcctcctccgtctccctccccgcccccaagaagggaggcattggtcacggcggcctgcggatcgagtgcatccgtatcggtggtgttgagatcccaaaccacaagagggtggagtactcgctgcagtacatccatggcatcgggcggaaccgctcccgccagatccttttggacctcagcttcgacaacaaggtcaccaaggacctctccgaggaggaggtcatcacgctccgtaaggaggtcaccaagtacatgattgaaggagaccttaaacggttcaaccgtgtggcgattgagaggatgaaggagatccggtgctacaagggcatccggcacaagctcggcctcccggtccgtggccagaggacaaagaacaactgcaggacgctcaaggggaagagggcttccgtcgccaagaagaagtcggcttcgtcctccgacgaataagtgacactgccatgtgtatttgcctcctgtttggtttttgtttgctacatcacggcgctaccaccattcggtactccgtttcaagtttccattccgtcgtagatgaattgtggggatatggtcggatgctgctgcaaagtttatagtcatgacatctcttctgttatatatgcactgattctaaatcatcatggttacatgtgtgtttcgtccctaagtaccgaatcgcatccaagcgattgctgggcatgttttgttaatatatgg

SEQ ID NO: 3929 - DNA, 1662 bp, Triticum aestivum
  unsure (1)..(1662): unsure at all n locations
  Clone ID: TRIAE-23APR03-CLUSTER10135_1
atcttcttcctccccatatcccctgtcgccctccgcgttggcgacgcacgtctcctgctttgcgttgtccttgatggacgggggccagagcgtcgccaagcggcacggcgcggccgcggccgccggcgccgaggaggaccctgagcggcaccgtgctctacatgaggcggcggatgatcacgatggtggcgacaagaaggcgcctcgccggagcagcagcaggcgggtcgcctccctcgacgtcttccgtggcctcaccgtcgctctgatgatactggtggacggcgccggcggccagtggccggtcgtcgggcacgcgccgtggcacggctgcaacctcgccgacttcgtcatgccctgcttcctcttcatcgttggcatggccatccccctatccctcaagaggattccagaccgcagccgggcgatcaggagagtagtcataagaacactgaagctgcttttctgggggatcttgctgcaaggtggctactcccatgctccagatgaactcacctatggtgttgacatgaagcacataagatggtgtggtatcctccagaggattgcccttgcatacttggtggttgcagttatggagatcgcaacaaaagacgcgagggttcaggatcagtcaagttcaggcttcttctcagttttcaggctgtacctttcccaatggattgtcgcatgttgcattctcctgatctacttgtcccttgtttacgggatttacgttccggactgggagttcacggtgcgaaatgtcgacagcccaaactatggcaaagttttaacagtgacctgtggcacaaggggaaatctgagccctccttgcaatgctgtaggttacatcgaccgtaaagttctcggcatcaatcacctgtaccagaaacctgcatggaggaggcacagggactgtactgatgattccccacacgaggggcctttcaaaagggacgccccggcctggtgtgcctcgccatttgaacctgaaggcttactaagctcattttctgcggtgttaagtacgatcatcggcgtacactacgggcacgtgcttgttcatatgaagagtcacatggacaggctaaagcagtgggtcaccatgggcatagctctcctcctcctcggaatcattctgcacttctctcatgcgattcctctgaacaaacagctgtacacgctcagttacatctgcgtgaccgccggcgccgctggcatcgtcttctccatgctttacttccttgtcgacgtcgtgagcctgcgttatgtcttcgcaccactgcggtgggtcggcatgaacgcgatgctggtgtacgtgatggcggcggccggcatcttcgagggtttcctcaacggctggtactacgacgggaccaacaacacgctggtttactgggtgaggaagcacgtgttcgtccgggtgtggcactcggagagggtgggcatcctcctctacgtcctcgtctcgcagatcctgctctgggcgctcctcgccggcctcctccaccgggccggggtctactggaagctgtagcgagccaggaagacatcggtgtcactgtttgcttgtgtgtgttggaacttagaattgtgtagcatctgtgtaagaagacaaganacgagaanaaangattgaagntcaatgaacnccattan

SEQ ID NO: 3930 - DNA, 2064 bp, Triticum aestivum
  Clone ID: TRIAE-23APR03-CLUSTER10152_1
gacgaccaggcgagagagagagggggggagaaccggaccctggaaggctggaggtgggagagtgtctgtcagccctcctcgagccccggcgattcctcctgccgccgccagaactcggtccatgagatagagaggaagagagggagagagagagagagggagaaccggaccctggaaggctggaggtgggagagtgtctatcagccctccctcgagccccggcgattcctcctgccgccgccagaactcgatagatggtatttaaacgaggacgagtgacccctccacttccttttgtatggtattgacaagagcaacaaccacctgggtgataatttttagaaaatgcaaggcagcaacctacctactgatcacatgatgcaacaaattcctaaaagtggtgtgaataagcacggtagctcaatgcaaatgctttcgacaaactcaggaaaacagctattcaaccaatctcagatgctatgaagtttcgctatgtcaatcaacagggctacagcgcctgcataaccctggatttcaatttggagaacaagaaaaaaaggatcaccaccagcaatagcagcaggatgaaagattgtctttactataaggtcgaaatcggtgattaggaagagcatgattgtcccaagaaggatcccgcaagaccgattcacagcattagactgggtttagtgatcttttgaatgcctttcgtaggtttaacggcctaagtacttctgggctcagcctgctccatggagctggatcctttttctgttcctttcgtatggaagtacattgttctaccgagccaatgggtgaactggagtgcactatagattgttgctagaagtcaagtcagaagggcatcctgctcaccgttggttgccgtcgcaactgtgtgcacatagttatccaaatatgcaattcgaggctatggtcggaccagttcctataataacaacaaccgtgtgaatttacccgaagatcttgcacttcagcactcactacaggttgctcttagatgtaaagaggagcatgatcagaggagggatgctgggcgggtggctgccgatcatgaccacaaccctgtctctgttcctgaggatctcgcccttcagcacccaccactgcatcacagtatgagggatcctgccatgaataaaaggatgtgtcatgcattggatcatggtgatgcgggttttctcgcctcaagctcgaatgatggtagtgggagtttggatccccatggcatcgcattggatatcaacaatggttttacggatggaaccaacctgtctgttgtgcggaaggaactggcttcccaacaaatagagcttcagaaacgtcgcttgcagacccaagcacaaaaactggaagtggcaaaacaacgtctcaagtgggagagattcaagatgaagaaggacagggaaattgaaaggatgacatcggagaatgaacaaatgatgcttcagcaaaagcgtttggaacttcagctaagacacaaggagctagaagttgagcttgagctaaaaggcaatgcaaatcatgcatgatagatgtttgatcagtcaaaagttttggtttgcaatatggtcgaaggtggtttttgacaagagcatggttgttcaagaaggaaccctcaagaccgattcgatgcattagacttggtttagtgatcttctgattgcctgtcgtcgttgtaacatcctttgtaactcctgggcttggtctaagcatgtgcttgatgtgataactagttcctcagctctttcggtgtcggtttctatggtgaacaataataaatgtgtgccggtcaacaaaacttcacagggaagttttgtgaacctgaaatgattttctttttctttttcttgggagtcttttcttctttctagccaatggggtgaacttgtgttgactatagattagtgctagaagtcaggtcagaagggcatcctactcagcgttggttgccgtcgcaactctgtgcacattgtttgccttatatgcaattcgaggttatatttgacccaaaaaaaaaaaaaaaaaaaaaaaaaaaaaaaa

SEQ ID NO: 3931 - DNA, 2487 bp, Triticum aestivum
  Clone ID: TRIAE-23APR03-CLUSTER10153_1
ccccccccctcccacgccctcggttccttgcgcagaacgcgggaggggagggagaccgcgaaagccgaagccacgcgggccgccgacggatcccgatcccttccaccccctccccgaccgcgacttcccctcgccccgcccgaccccgcggcccccgccccgtgccggatggccgcgccgcggctcgatccaggcgtcgccgccgccgtcgtgagctggccgcccccggcgtggaccctccgctcgtcggtcgggccctccgcctccgttcttcaccacccggcagaaagctactgcgttgggatgccaggcaatttatgggcttctggagggatgccagcatcacattcgaccacagtgacagcactagcggtggcggtaggggtccaagaccgatttcgtagtgctacagttgccatcacccccttctccccccgttgcttccccgcgccgaactcgaatcctccccctcgcgccgcacccgagggctccgccggagatcggtcgaggggacgcggccctagctggagatggtcgccgccgtggtgaactacccgctcgtcgcggggctcctcgccttcgcggtcgcgcagtccgccaagttcttcaccacctggtataaagagaagcgttgggatgccaggcaatttatagcttctggagggatgccatcatcacattcagccacagtgacagcacttgcagtgtctgttggtatccaagaaggctttcgtagtgctacatttgcaacttcagtgatacttgcatgtgtggtgatgcatgatgcttttggtgttcggttgcatgctggaaaacaggcagaggtgttgaaccaaattgtctacgagctgcctatagagcatccactggcagagacaaagccattgcgtgaaattcttggacacactgtccctcaggtggtggctggttgcatccttggaatcctcacggctgtgatcatgctcttagctctggggagttacacttagatatcggcaatatttgatcatcagatatcacatcgccgatcttgtaaagcataaagaaaaaagctcatctttgatgtaatgtgtaaaagtggcctgtccatgctgatgctacaaagtcttttaactgatttagatctgcgctgtaggatagtgggtcgtagcttcagttggtgctgtaaatctgagatgtttgccgtcgattagaacctcctcatgttgaatgtttgcagtacaactagcagtgatatgtagagcttgagaagtgatggttctgaaaaaaaaaaaaaaaatcagaagcgcacatcgagcgggcaacctcatagctaggaaattgactcctattgctttggaacaattgatgaacctcacttcgacggtgttggacttttgagcttggcttccattggcattatattatcgagctatctccatccacgatcactcgctcgcgtgccggtaccggtcaggtggtagaggtactctgctagctcagggacccggtccttctcagatagacgagcgaccgctgtcgtggacgcttggctggcggatcttctgtgaggcctgcaacatcgacacccctcaaagcgctggccgctacaaccgtcgaatggcacctcacatcttgccggaacaatggaggatagggtcagagtggtttgagcttaaccgtgagctggccgtgcgtgtggtagcggactacaagtagtactcgatcttccggaagcattgcagaccatcttgctacccggatgagcattacataccgacctatcttcatcttttccacgggtcgctcaacgccaacaggaccatcacatgggttgattggtcaagaggaggcccacatccagcaagatatggtgctggaaacatcaatgtggatttcatcaaggccatcaggaacaatggtacgcagtgcctctacaactcgaagcacacttctgtgtgctacctctttgctaggaagtttgctcccagtgctttggggccattgatgaatctcacttcgacggtgttggacttttgagctcggcttcccatcggcattatattatcgagctatctccatcgacgatcacttgctcgcgtgccggtaccggtcaggtggtagaggtactctgctagctcagggacatgtgtctcttcttagatagatgagagactgctgtcgagacgcttggctggcggatgacgctgtgtgggacggtgaaatttacttcacttatcctgaagctgattcccgagtaatggacgaatggcactacaagatccagagaggacattttcacctcccattctttttaatatatcatagctctgtgatagatcttttttctcttttcttctgcccccatatcacttattgtaatgacttggtcaggatgctaattttatgtgaatataacttgctcaatcaaaaaaaaaaaaaaaaaaaaaaaaaaaaaaaaaaaaaaaaaaaaaaaaactcgagactagttctctctctctctctctc

SEQ ID NO: 3932 - DNA, 2627 bp, Triticum aestivum
  Clone ID: TRIAE-23APR03-CLUSTER101572_1
gggtcttgtgttcctgtccacattttattttcctttgtagcaaaactctccctgtttttccatacaaccagccctgataactttttagctacaatcagagttacaacttacaaaggtataaactgaagagtttttgtcagcggtattagtaaacaaacaatgtgagaggagtgaccaagcagctcgcggaaaacatacaaggtacagaaaagcaaagctcaacataaccggtgggcggtcggaatttcaggaccaattacaacatcatcactgtcgccacggcggttccagggggccgagccacagaagtgttgcgccggagactccaggtatacgacgccagtcccttttgtgttccctatcagagtgctggaaacatctgacgagaacaacacacattgagggttatggatgatgattagttaccttgtagtagaccaaacagacagcagcagcagcaaaagcagagagaacatattcctacttcatagacaacacgggggccctctccgggtccttgcggagctagccggcatcgacctgcgactgactagccttccaagcatacacgactgtactgcccccagtggcactgctttcaggaaccggagtaatctgctcgcgactttctgggtctcaaagctaaagcagctggccagcagagagctcatgtatttcagtcagcgtccatctcctctccagtttgtcctccaagaactattgcctttgatccttccatgacacatgtactgtgtccccatgcaaacctcggaggtcgccctgggacgttcagtattctccaggtgggtttctcttcggtcggatccaggaggtagagctgtgaagcagagtgaagacctgctactgagccaccaaatatcataattctccctccgggtaggctcacagcaacatgatcaaggcgaggaggcggaccaaccccagcggggttacaggctcctggcattccactaccggtgatgcaccgccaggatggcgcagcatcactcaagtccattgtgaatacatcgccagacctgagtcgtaaagggccgcttttagcaagaccaccaaacatcaggattttcctgccatcgtagacagagagtgagtgccccaacctagaaggcggagtccaaggtgcaggtatctccctccaaacaggcctttccattgtcacatccagaagatgagtatcactgaggagcacaccagagtcggcacagccaccagaaaccaccagcttcgatccatccagtgtgcaagagctatgccatgaccgtggaaccggtggtgtaaggccaaaaatctcacgccatgtaggatgttttgcatccaaatccagaataaacacgtcattgagcaggccctggcctccacatccaccaaacagaaccaacagcgatccatttaggcatgacagggtatggccccagcggccaggaggagccaaccccacattgatgtgcctccactctggcttgctcgcactcaaatccagcacaaatgtatcattcatcggctgtgcgttaacaccttccccaccgaacaggacaacacggtttcctacagcacaagcactgaagttacagcgagatggctccactgaacccccgatcgtcaatttcttccaggtgacggcttccagtgtagtcaactcccttgctagccgtccccatgccaaactttttgtgccagccacattctcaagagcccgagttgcgtcgttgccccatgcattctgacaaaccattctccaaaggtgatcattctttgtcatgtgatacaaacgtttacatacagagttcacagacgctatatccctaggtgacaatcttgataggatcttctggcacagtacctcatcactcagttggaagagatgagaatactcagagcaaaagttacccttccctgttggacttggccggagggtattatctggtgtaatccatattgatctcacaacttcctttgccatagagccaggcaaaggtcccaaatcaacattacaatcgttgaagaactgaatgcccatataatgggttattgtttcatcatctccatatatgggctttagttgcagactcgtcataaatggggaaccatctttcctaaaattcagcagatcaccctggaactcagttccttcctctaaggcatctctgaatctcagtaactactatagcatcaacaagaggatgtctcctctgagcaaatggtcctctgcattgcaaaaaccggcagttcctgccgagcacctcctcggcgtggtacccggtggcgtcctcgaagccgcggttgacgtagatgatggggaagtcgggctcgagcgcgtcggacacgacgagcccgcaggcgccgccgagcacgccctcgatcgccagcgagaacccgccgccgccccggcacccatccgcgccccacggcccgaccccctccccctcctcctcctcctcgtcctcctccccgctgccgtccgagtcgctgtcccactccatggcccgcagagaaccactacctatcccatggcgcgcgctcgctcgctccgctagggttggctctctcgctcgcgctgctccgctgacgccgctgctgcagctggggagaaagttgggggattcgat

SEQ ID NO: 3933 - DNA, 1450 bp, Triticum aestivum
  Clone ID: TRIAE-23APR03-CLUSTER101981_1
ttttttttttttttttgttttctgttctcttcttttttttacatcatctcatataaactggaaaattgtgctgcagtgttttacacattcagaaatcggcagccatttggcacagcctggtccgaaacgaccgaggatgcagcgctgacatagttctgctgctgcagtcctcataacaccaagccagaattctgctattgatagcatttttaccctacataaccagagaccactgggatccaaaaaaggatgctgggttttcatacacccttgctaacataacacactgagctctgtttaaccaaaagttcagcatcagcacctgttgaataccggtactttgttttctcttaaccatctgcggctaattattattctacaactcttcatgatacaagctcaaaaaacaaacaacaaaaagagaaacaattacgcagattattgaacaaaaggtttacttcagccatgaaagttgaaggaacacaacagccgatgacatctggactttaaggtccgcaatatcaacatcatgacctccttcaaccaagccccatcgatcgacctggtgatcttcttcaagtctgatcagctcaatggattcatcaactcccaaccttcctctaaatattgcgagagggattaccaaggaatgggctgctgcggccatagcatcaatagatgccagctcacaatcatttgcatccttcagaacggtttctacagccttaactagccgctcatcttgcttccctcctaaaaaacttgtgtacacaacaggcttgaacccaaactcagtcttgacccagtccagtattgggtcaattttctccttctgtttttcatagactccttttgtaagttcatcatcggcaggtgagcgacaaaataccaaatcttgatggaatttttgcatcaaattggtaattattttcgttcgtgtcaacggaactctctccagtgcagtacaagcaagcttcataagaggcatcgtaaaaggccggattccatcttgttcctggtactcccactcggcggcgacggccatggcgagcgtgcgcgagtgcagcttgagcgggcgcttcgccggcgtcttgagggtgcggtagtcgagcatgaccgtccacccgttcccgtcgtcggcgcggcgcacggtggcgtcgcggtagaaccgcttccccaccacggaccccgtcatgaacgacatgggcatggacaccgaggtctcgtcccgcgtcgacgaggacgagggcttcctcacgtagatcgcctcgccccccgcctcctccccgcccggtctcggggacgcctccgccgccgtgccgagcagccgccgcccggccgcgcatcgccgcaggaggagcaggcggcggcccgcgagtatggtcgccattcctctgcctggtcgccgcttcacctgggccttcagtgtcccaatctagtagtacgtagt

SEQ ID NO: 3934 - DNA, 1239 bp, Triticum aestivum
  Clone ID: TRIAE-23APR03-CLUSTER102056_1
gttttctttttttctccgaactatcactgttcattaccactaacgaaaggcagatcagttgacacacatcatgttgcaacaagcagcggtgtgacggcactgagaaaaactaacaaaacacaagttaactaatacaaaatcggccattgattagaaaacccaaagtctcaaagggagaagtatgattttggtaatacaaaatcggccattgattagccaacccaaagcctccacggggagaacaaagaaagtgaagtttgcggctccaaatgaagcaaggtgaaacaagttcatgcatagctaacagaataaatcagaaataatcgtctactcgtcctttcggggctttttcttccttgtagcgaaactacttggtccaacagcttccactgacaatcgctttgtcctgcttgaagccagttcctccgacacttcatcatccttgtcagccatttcatcgtcgtcctcgtcatcggatgcaccttcatcctctgctatatcatccttccccggagaggactcccatcggtctttcccgtcatcatcatcccaacgacttccaacaggaggcacccaaaattccgaatcatctgaatcatcaatttctggttcaggttctcgtggcaaagaagggttggcaacagcagctttcttcttctccttcttctccttcttcttgtccttcttcttggtagacttggatttctttgcgacttcatttgactgttcaccttctactttgcctgtctcacctgatgccatcttttcctctagcttttctagtttattcaggaacctcttcccatttacatgcttccagatgtgctcctccgacttgtttatggtgtccccggtaatgttgcatatgagcttggacttgtgctcagggtggggcttgaaggcgttgagcggcggcttcttgtgcgcgacgccgtggtcgatgagcgcgaggcggcaggcgcgggaccgcgcgtaggcgtccttctcccgctccggcagctcgtgccccgtctccgcgcaccgccaccgcccgccgccggcgtcctcccaggtcggctggcccagcaggaagctgccctccttctccccgccgccctcgacggagccctgggggctcgacgcccccgagtcggacgctgcggcggcggccttgccctttttcgccattaggtcgttggcgagtcgcgggcctggaggccgtagagaagaggggggcggaggagaggagaggtgcggacg

SEQ ID NO: 3935 - DNA, 2028 bp, Triticum aestivum
  unsure (1)..(2028): unsure at all n locations
  Clone ID: TRIAE-23APR03-CLUSTER10237_1
gtcagaaaaggatattaatcaccacggcccggccagcggctcgcgactcgtcgctagcaaccacagccacactaccaccgtccatcgaagcctcgtacgcacgatggcccggcgccgctccggcgtcgccgccgcggccctgctgctccccctcctcgtattaacccaccacgggggcagcggcggagtcgcgcctagcgacgacggcaacactaccccccgttcctacaggcctcggacgtcgcgacgcccggcgggctcccctgcgggtgcgccgccgcggccgtccttcccctcctcgccctcgtcgtcctgtccgccggctgcggcgcggcgccgcagggcgcggaggtgacggggctgccgggctacgacggcgcgctgccgtcgaagcactacgccgggtacgtgacggtggacgagcagcacgggcggaacctgttctactacgcggtggagtcggagcgcgacccggccaaggaccccgtcgtgctctggctcaacggcggccccggctgctccagcttcgacggcttcgtctacgagcacgggccattcaacttcgaatcaggcaggtcagttaaaagcctgccaaagcttcatctcaacccttacagctggtccaaggtgtctaccatgatatacctggactcccctgctggtgtggggctgtcatactcaaaatgtttcagattatgaaaagggagacatcaaaaccgcggcggattctcatacatttctcttctgaaggggttacatgtaccctcagagtttctgcgacacgttttatactagctggggagttgtatgccggggtttttgttcccaccttttcgcatggaatttttaaaaggatacaaggaggaagctaagagaacttaaaacaatcaaagactacatggtggggaaggggggctacggagactgtttttgtttttaaggctcttgtgctcttgtgccatttgcacatggaatgggtctaatatcagaagaaatataccagcaagcttttacgacgtgcgacggaaattactggaatgcccgcgagggtaaatgtgaaagcgcgctttgtggaaaatcgactcgttaatcagccgaactgaacatttatcgacattctttgagccatgctaccacggcgagaagcatcaaagaaagcaaacccgcagaatagcaaattgcctaaaagtttcaaagatcttggtacgactaacaagccctttcctgtaagaacaagaatgcttgggcgtgcttggcctctgagagctcctgtaaaagccggacgcgttccattatggcaggaagttgcaagtggtgttccatgcatgagcgaggaagtggcaacagcatagttggagaaggatggcgtcagatctgcaatccatgcgcaatcagtaagttcaattgggccatggctcttatgcacagataaaattgatttcaaccatgatgctggcagtatgatcagttatcacaagaacctcacaagccagggttatcgtgccatcatattcagtggtgaccatgatatgtgtgtgccatacaccgggagtgaagcatggacaaaatctatggggtatggagttgttgactcatggcgaccatggttcacaaacgaccaagtttccgggtacaccgaaggctatgagcatggtctcacttttgctactattaagggcgctggacacaccgttcctgaatacaaaccacaggaagcattggctttctacagccgttggctcaatggttcaaagttgtgaggcttgggcccagctgcaaataatgggggaatatacttctgcatacagtcaagaatgaacaaatgttgatttgaagaaagagatgagctacatgccatatagatagttacatactcaaatttcaaaaatagcaattggaacactgcgtgttgtattcattcatgaaatgttatttggtcgatgcagctttgatattattgctctgcaagatttgtccactgtgtgatcatgacttctgaatttcagttgatatggagagtatatcatn

SEQ ID NO: 3936 - DNA, 1334 bp, Triticum aestivum
  unsure (1)..(1334): unsure at all n locations
  Clone ID: TRIAE-23APR03-CLUSTER1028_1
cgatccgtgtcgctattgggcgcggtggctttctcccccctccgatccgatgtcccccgcttcgcccgccgcgccgatccgacctcccgccgccgcgttctctccgccggggacgctctctccggcgccgccggctccgcgccatgaggaagaagctcgacacccgcttccccgcgcctcggattaagaagatcatgcaagcagatgaagatgtcggcaagattgctctagctgtacctgttctagtttccaaagcgttggagctatttttgcaagacttatgtgataggacatataatatcactgttgaaaaaggggtcaaaacagtgagttcatcacatctgaaacagtgcattcatagttacgatgtgtatgaattttttgaagaacgttgccagcaaagttccagatttgggtgcaccttgattctagtgttgatgataagcttggcaaaagaaggaaacatggtgaggatgaaagcgaggaggaatcgaagcggacaagaaatgaggcagcatgccacacaagcaacggcagagggcgtgggaggggacgtgggagaggtcgccgtgctgggcgtggagctgagagggagattgaacaccatgaattaggttgtgcccaatttagcaaaccaggccacctgaaggtagagattggagacgttgttctggacacaagtgaaaccaaagagcatacccctttgagcaatgccagggcctccttaaggaacattgacttgaacttagatcttgctgactacgaggaggatacgccgcaagtccagccttcggctccttcagctcctgtggtgaccgtggcaccgcaagtccagacttcaggaccgtcggtttcacagttgaaagaagaagtggagaccaaggatttcctgggctggcaaatgcctgagatgaacaagatggccatggacccggtgcagtttgcgctgtcgtcaaaccatagattagaggaggacgaagactatgacaatgaagaatgacgtgactctagcgtggatttagtttgagaagctgataggtagacatgacatgatgtacatcctagcaggcccagcttgacaatgtagtagcaattctcttgtagtatgtgtacccgcagatgctgcagaagtgatttaggatgtgacatatgttgattgctcaatagccagtagtagctagtattttgtgtagcaactatatagtgtagcaactatataactagacaggttcgccggttgtaaatcatggttgcttttagatcaaatgctatgtcataatgcttatgttagctcttatgaggttccactnttccaggtggattttttnttgtgt

SEQ ID NO: 3937 - DNA, 1476 bp, Triticum aestivum
  Clone ID: TRIAE-23APR03-CLUSTER10298_1
ccaaacgcaacggtccaatcgacgagtttgaaacctaccctctccccaacggtcggcttcggagcggcacacatggcggtggcggcggcggcgggagacctggcggtgcttgacgcggagactctggcgctgctggggggggggccggatatggcgccgggtggccgtgtgcggcgagtgggagaccttcaaggagaacgtgcggccgctgaaacgcgggcggaacgtcggcctcctcaaccaagccctcaaggcgcaccccgaccccgcccagcgtgccgccctcctcgccaaacgcaggaggatgatcgaagcaatagaagagtaccaagggcaagatccgctccagccatgggtagactgcatcaaatgggttcaggagtcgttcccggccggcggggagttctcagggctggtcgtgatctacgagcagtgtgtgcgtgcattttggcacgatgagcggtacaaggatgatctccggtacctcaaagtctggttagaatatgctgggaactgttcggacgctgaggtgatattcaggttcctggagtccaaccggattggtgagggccatgctgttttctacattcgctatgcattgctaatggagtcgaagaacaaggttaagaaagttgacgagatctttaatcttggaatagctaggaaagcaaagcctgtggagaagttggaaactacatacagggcatttcttgggagatcaaccagaaagaaggaacacgaggatgataccgcaagtgatgatccgcccgtacgcaaattcggtagtgacttgaaccgtggtgaaactagaggtcagcatgcagagaattcccacatgttggcaaaacctagggtaaagctgcaaagaatcgatgttaatacaccgatttcaatttacaaagagaacccattgccaagtcagggccttgagagagctaggagcaaagacagggcgtggaacacccttggaacacaagcagatagaaacaaagaaaataacatgatgcctgccagatggacctcgcacaagattccaccaaaggtagcagcacgacaagcagttccgccagctcgtgtcagctccattgaggtctttgtagatgaagaatgtgccgaggaaccagccccgcctcgagtgccaaagagtccaaaaccatctgttctgaagcttaggcaagcaacaagcaaaaaccttaagaaggaatcagaattgcttaaggagaatccgctgcgcaacttcccgctgagcagccttagataattaacagtaatattgttgacgacttgtttgaatctgttcctttatgccaaataagctttagactctaaagcttatagatgcaccaagcattgtaggctcgaatcgattgttgtggtccgtgtacactagtttgattgattaatcctcatcgaggtgaggattgaataaaatcttcagttttgtcacgcaaaaaaaaaaaaaaaaaagcttatcga

SEQ ID NO: 3938 - DNA, 1703 bp, Triticum aestivum
  Clone ID: TRIAE-23APR03-CLUSTER1029_1
ctctcacgacacactcacactgcgtcttggttctgcaatggaggtgaggtgcctgctgctcctggctgtcctcctcctggcgggggctcatggcggggaggcgcagccactcgtgccgggggtctttaccttcggcgactcgtcggtggacataggtaacaacgactacctccacaccctcatcaaggcggacttccctccctacgggatcgtgcgcttctcctcacaagataatcacagactcgatcaagagcttgtcttggttctgcaatgggggtgaggtgcctgctgctcctggctgtgctcctcttggctggggatcatggcggggaggcgcagccgctcgtgcccggggtcttcacgttcggcgactcgtcggtggatataggtaacaacgactacctccacaccctcatcaaggcggacttccctccctacggcagggacttccccaaccgcgtggccaccgggaggttttgcaacggcaagctggccaccgacatcactgctgatacactggggttcacgagctacccgcccgcgtatctcagcccgcaggcgtcagggaagaaccttctgatcggcgtcaacttcgcatctgctggatcaggctactacgatcacaccgcgcttatgtatcatgccgtccctttctcccaacaactggagtacttcagggagtaccaatccaagctgacggcgttcgctgggagcagccaggccaagtccatcatcagtggctcattgtacatcgtcagcttcggtgcaagtgactttgtgcagaactactacatcaaccctctgctcttcaagacccagaccgtcgaccagttctcggaccggctcgtcagcatcttcgtcaacagcgcgacgcaactttacggcatgggagcgcggcgcatcgcggtgaccacgctgccgcccctgggctgcctccccgcggcgatcacgctgttcgggcacgggagtaccggttgcgtgtcgaggctcaacagcgactcccagcggttcaacgggaagatgagcgcggccgtcagctcgctgtcgaagcggtaccacgacctcaagatcgccgtctttgacatctacacgccgctcttcagcctcgtcacctctcctgggagatcgagggttcacggttgcgaagcggggatggggcgggacggtgtgggcggagttcacggttgttcctgtgtcaacctgaagtgggaggggttactttctcgggctgtgccactcactatatcgccagcgttgtagctagggactgggacacatggagacagggattcgccgacgccctcctcgtcactggcatcgacctcgtcacataatgaaccacgcactggtcggctaacgtcgtcggtcggaggacgacgatggcacacgcttttcaggcgtcctgaagggaaaataatgtgtgcccagagctcccgtgccaagcgtgtcgttgtggcgggaggggttactttctcgggctgtgccactcaccatatcgccagcgtttgtagctagggactgggacacatggaaacatggtttatacgtacgaaaagctcgaagttatgggtgcaagcactggatcttttcttcttttttctttcattcatgtccttcaaatttgatgataactgtgtttttttcacaaaaaaaaaaaaaaaaagtattatcgatcatcgacctctcgaggaatcggcgccatg

SEQ ID NO: 3939 - DNA, 791 bp, Triticum aestivum
  Clone ID: TRIAE-23APR03-CLUSTER102_4
accaaagcattccacaaaattcaacaagcaatccaacgcagtccaacctgaggagatcgatcgagctcaagatccgcgagcgagaatggcgggcatggtgttcggcttggagaacccaatgatgacggcgctgcagcacctgctggacatcccagatggcgaaaccggtgcccccggcggcgagaagcagggcccgacgcgcgcctacgtccgcgacgcgcgcgccatggcggccacccccgccgacgtgaaggagctgccgggcgcgtacgctttcgtggtggacatgccggggctgggttccggcgacatccaggtgcaggtggaggacgagcgggtgctggtcatcagcggcgagcgcaggagggaggagaaggaggacaccaagtacctgcggatggagcgccgcatgggcaagctgatgcgcaagttcgtgctccccgagaacgccgacatggagaagatctccgccgtttgccgcgacggcgtgctcaccgtcaccgtcgagaagctgccgccgcccgagcccaagaagcccaagaccatccaggtccaggtcgcctgagaatgagatgcatcgtgtgcgcgtcgaatcgaagcagagtgggtactgagtttcctgtgatgatgagtgatggtttctctgtcttttgatctcatctgctagagtgtgtgtgtcgtatcgattcgtgcgcactggtgatggtttgatgtttcgttaatgcaaatgggggtgatctccggcttcgcctgaataaaacatgcgaatcttttggccacattttctattg

SEQ ID NO: 3940 - DNA, 1203 bp, Triticum aestivum
  Clone ID: TRIAE-23APR03-CLUSTER103154_1
aacatgcaagttgtacatgcccttaccgtttcgctcagctactccgtcctctcctcacagctatacggcgacgacctaaccctagcgccaccactccaccggcgtgcatcaccgcctccggcagccccctgaacaagttctccttggaattccgatctttctaaaagtcagagtttgccctctctagggttagaggtttggagccaccgcccctctctccccgtccccatggccgacctcggcagcttcggcaggcggcggcagccgactgctgcggaggtggtggggcgcctcaaggatgacggagatttcgacgccctccgccgcgccatcgtccgcaaggtcaaggacaacgaggtgctgcgcaacaacataatcacagaagtgaagcagtcaatgttactaagtgaagatggctctgaaaagttaaagctaaaagaactctctgatgcgatttttcaagacgtagggagcaaaataatgggtcaaatatcagacgaggtgtggagtgtcatccagtcaggtgaaactgatatccgaggaagtgtggaagctgtcttcgataggataatgaaccctgaacagcaacaggacacagggccttctcccaagaagctgaagagaaatggcaaaggagagcaagtttcgccagcaaaggcatcagcccctgttactgtccaggtggaagatgatgatccagaggaaccaccagggtttggtttgagtgaccttcagcgcagcaacatggtagtaaagcaggagcagccatgtgatgatgggcagaatcatacccaagtgaaaccaaatggtggtgagctagtgggagctggtagcttgggggacgccgatgatgaggatcctgatgtgcctcctggatttgatgcgcctcctggatttggttaacagcctcctggatttggttgacagccctgcgatcttctatgacagtgtcgtcgtttctgtggcagcaatgcgcgagaagatttcttgtttgctgctttgagggtgtagctgttcatacgagaaccttgagtcatgaaagtgaacctgtacattctgtgatggtggcaactgccaagttcataccgcccttggctttagctttgttgtgttaatcagaagacatatattgacaatagactaaatattttgcccgaacaatggcgtcgtcctatgcatcatctccagattgtgatacacagt

SEQ ID NO: 3941 - DNA, 1382 bp, Triticum aestivum
  Clone ID: TRIAE-23APR03-CLUSTER10342_1
caaaagggggggaggcttccccgggggggtgggcgggccgctcctagagagttaggggattccccccggggttgcgaggaaatttgccggagagggccatttcctgaggaccatccttaatggaggaagacctcttttttcggccggaaccagatggtcggcatggctattggcaggcgctcgcgcccaccccaccactctctcgcccgaaccagacgccgcaccaatcccgcacccgcacagcccatcggcgacctcgccggagaagagaggagaaggtgagagatggaggcggcggcggcggcggccggcgtgcaactgggcacctcgaacgccgcagatcgcgacccaggcggagatggcggaggcgcgcctgccgatcccctaccgcgaccagtgcacgactctcttcgccccaaccagaagccgcgccgcacccgcacccgcacagccgatcggcgacctcgccggaccagacagaagaaggtgagagatggaggcggcggcggcgacggccggcgtgcaggtgggcaccccgaagccggagatcgcgacccaggcggaggtggcgcatgcgcgcctgccgatcccctaccgcgaccagtgcgcgcacctccctcatcccgctcaacaagtgccgcgtcgccgagttctacctcccctggaagtgcgagcccgagcgccactcctacgagaagtgccagtacgagctcgtcatggagcggatgctccagatgcagaagatccgcgaggcgcaggcgggcgccaaggtcaagggcagcgtcaccatcggcgtgccccttgccccctccaccgcgaagctcgcctgatccgtcagattcaggatgggttggtcatgggagctcgaagggcgcggtgcttgcaaggatcatcaatgttgttcttgtatgaacaaaacatgtgttctgtttgaattaattcccgtcttgtttcctcctgccttttttgctcttttggtgcgagcacctaccagttttcttcttgttaagtgtgatgatgcaataaggaactagatgtttatactcgttgagtgaaatgacaccttgaagttttgaatacaacaaaataaaaaaaaaggttattgggggcaccaaggttccaattgaagcctgccccgccacgccgccttcgtactctgacagaaacaaacacacctattgggcgggacagtcccttccagccggttttcccacccgtcgtgccgcctctttgcctcagaggttggcctcccggcggcatgacggggtccggaccaagtcctaatacggcgttccgtcttcttccccttcggttggtgccttcacatgggctggccgtcgctgtccccggtggggcgtttggcccttcacacataagaggat

SEQ ID NO: 3942 - DNA, 1436 bp, Triticum aestivum
  Clone ID: TRIAE-23APR03-CLUSTER103442_1
accgctccccacccccctccgtcccctccctgcctcctccgatccccaccagaccccttcccctccgaccccgacccacaccccctcccatccgcccccacctcctccctcctccccccgcgagccgcctcgtcccccccgccgccccgcaggcccgccgccccccccgcgcgcccgcccaccgccgccgccccccgccggcccccgccgccggcccccgcgagcgggctccgccccccgccggatggctccgctgcccggcgcatgcgagctgacgcgacggggggcaggatgccggtgccgccagccggcggtgtgtccaaggaactggcgccgcggccccggcccggccagcccaggctgcgcccgcggcccacccgcctcagcatcgcgccccgcccccgccgtcccgttcctcataagcactttctacatggatggtccttgggcagcaactgccacaactggcatcttccttgctgcatccttgggcagcaactgccacaactggcatcttccttgctgcagcgatcactgattggctagatggttatattgcgagaaagatgcatttgggaacaccttttggtgcatttcttgatcctgtggccgacaagcttatggtagctgcgacactagtgttgctgtgcaccaaacctttggaaacttcactgctcacgaatggaccatggcttctgacagttccttccattgccatcattgggagagagatcacaatgtcagctgttagagagtgggctgcgtctcagaatacccaagttcttgaggctgtggcagtaaacaatttagggaagtggaagacagcgacacagatgacagcattgactctgctccttgccagcagagacccgagtctacatgtacaaggtgctctagtcccccctggtgttgcgttgctctatgcatctgctggacttgccatatggtccctagtggtgtacatcagaaatatatggcggatacttctaaaatagtgttagcacatagtgtaatagaagaaacaggagcaaaggcgacaatattccattcaagatgctgcaattttttggaagattgttgagttgattgatggggcctagatcttgttgagatcctcgtgtgacccgtgccattggtgcttggcggattagccgccaaagcttgttgagcatgcgaggatctctttagaagcaaaatatatagctcgtagcctgtgatgccagggtgatctactttcacggaaggtagccacagcttcgagtgttggacaccgtgtgtaatgagctgcaagactggagacgatgcagacgattgtaaccgtatacaagcgcagaccaggcggttggcctgtgcgtgtggagttcctgccactgtaattttacccatatcatattgccagggagcacaaaattattctttcaatgtgtttcaaaaaa

SEQ ID NO: 3943 - DNA, 2696 bp, Triticum aestivum
  Clone ID: TRIAE-23APR03-CLUSTER10352_1
agcgttctactcctctcttttgtttcccctcgacgccggcggcggcggcggcaaccagggttcagcaggaggagaggcgggctcggcgcggaaccctagctccgcaggggcgcctcctgcttcaccgcgccccttctcctcctaaaggccctaacccaaacccatccgcccctcctgcgcggcgccgcctgccgcaatggtccgccgccgccagtgctccggggcgggtcccgccgcgtcctcgccctacccggccctccgacgccgccgtgatctccggcccgcgccgcgcaaccccgacgtgcccgccgccgcccggaccccaccacgccgccgccctggccgctgaccgctggcctatgggcgaggtccatggccaccttcacccgcacgaagacgcacgtcaacgtcggcaccatcggccacgtcgaccacggcacagaccacgcgcaccgccgccatcaccaaggtgctggcggaggctgggatgcgccagaggcggtggcgttcgacgagatcgacaaggctcccgaggagaaagccagaggaatcaccatctccacggctcatgtcgagtatgagaccgctaagaggcactatgctcacgtggactgtccagggcacgccgattatgtcaagaacatgatcactggtgctgctcaaatggatggtggtattcttgttgtgtcagctcctgatggccccatgccacaaactaaggagcatattcttctagctcgacaggttggtgtgccatcacttgtttgtttcttaaacaaagttgatgctgttgaagatgaagagctactagaacttgtggagatggagcttcgagagctcctcagtttctacaagttcccaggcgatgatattcctatcatccgtggatctgccttgtcagccttgaatggaacaaatgaggagattggaaagaatgctattttgaaactgatggatgccgtcgattcttacatccccgatcctgtgagggtgcttgataagtctttcttgatgccaattgaaggcattttctcaatccagggtcgtggtactgttgtgactggacgtattgaacagggggtaattaaaactggtgaggatgttgaggtcataggtttgacggagagtggtcctgtgaagactacagttactggtgttgagatgttcaaaaagatgatggatcatggagaggctggtgacaatgttggtcttcttctccgtggtcttaagcgtggtgatgtcgagcgtggccaggtggtttgcaaacccggtactgtgaagacctacaaaaagtttgaggcggaaatttacgtccttaccaaggatgaaggtggtcgccacactgcattcttctcgaattacagcccacaattctacttcaggacagctgatatctgtgggaaaatcgagttgcctccggacgtgaagatggttatgcctggtgacaacgtaaccgcaatctttgagttgatgttgcctgttccgctcgaaccaggtctaagattcgcgctgagggaaggagggaggaccgtcggcgccggagttgtcgccaaagtcatgagctaataacaataatatgttccagacctttctcttttttttggcgtagtgaattttagcgaacaaatgaatgttgatatgaaggatttgtccgaccggaaacacgagataaacgagagtcgagagcaaggggactggcatggatgcatcttgtgtggatgcattcagccaaccaacttcctacggataatggtttgttaccattccgaagaattgctattttttcttctcatgttgggtagtttgctgtatcataccgcagcttgttacctagacacgcttctctggcatatattagctcggtgattcaataagaccgtcttgtttcaaaaaaaaaaaaaaaacggaggggtggcggtggggggtccggtgaagacgacgggtgcgggggttgaggtgcgcaaaaagatgatggatcatggagaggctggtgacaatgttggtcttcttctccgtggtcttaagcgtggtgatgttgagcgtggccaggtggtgtgcaaacctggcactgtaaagacctacaagaagtttgaggctgaaatttacgtcctcaccaaggatgaaggtggtcgccacactgccttcttctcgaattacagcccacagttctacttcaggacagctgatatctgtgggaaaatcgagttgcctccggatgtgaagatggttatgcctggtgacaacgtaaccgcaatctttgagttgatgttgcctgttccactcgaaccagggctaagattcgcgctgagggaaggaggcaggaccgtgggtgccggagtcgtcgccaaagtcatgagctaataacaatgatatgttccagacctttttttttggcgtagtgaaatttagtaaacaagttaatgttgatatgaaggatttatgcgaccggaaacacgagataaacgagagtctgagagcaaggggaccggcatgcatgcatcttgtgtggatggatgcattcggcctaccaacttcctgcggataatggtttgttaccattccgaagaattgctattttttcttcttctcatcatgttgggtagcttgctgtgtgagaccaccgcagcttgttgccttgacacgctcctctggcatatatttagctcggtgattcaataagaccgccgtgtttcctg

SEQ ID NO: 3944 - DNA, 1503 bp, Triticum aestivum
  Clone ID: TRIAE-23APR03-CLUSTER103761_1
cccgcccactcgtccaccgccccaccccagacccccccccttcaccctgccccgcgcgcctgcgtgcacacctgtcacagaatcccgcagattcccctgaacccggcgagggcgagcagagcaaccccgccatggccgcggcgatcctccgccgcctcagcccggtggcctcccagcgcgtgccccctcgcctcctgccgccgacgctcgcccgcggggtctccgactccacggagccgctcaccgtggagacctcgatccccttcacgtcccacgtcgtggacccgccgtcgcgcgaggtgaccaccacgccgcgggagctcgccgcggccttccgcgacatggcgctcatgcggcgcgcggagatcgccgccgactcgctctacaaggccaagctcatccggggcttctgccacctctacgacggccaggaggcggtcgccgtgggcatggaggccgccatcacccgccgcgacgccatcatcaccgcctaccgcgaccactgcctctacctcgcgcgcggcgggggcctcgtcgccgccttcgccgagctcatgggccgcgtcgacggctgctccaggggcaagggcggctccatgcacttctacaagaaggacgccaacttctacggcgggcacggcatcgtcggcgcgcaggtgcccctcggctgcggcctcgccttcgcgcagaggtaccggaaggagggcaccgtcaccttcgacctctacggcgacggcgccgccaaccagggccagctcttcgaggcgctcaacatggccgcgctctggaagctgcccgtcatactcgtctgcgagaacaaccactatgggatggggacggccgagtggaaggcctccaagagccccgcgtactacaagcgcggggactatgtgcccggattgaaggttgatggtatggattttcttgcagtgaagcaggcttgtaaatttgccaaagaacatgttctggaaattggaccgattattcttgagatggacacatatagataccatggacactctatgtcagatccaggcagcacttaccgcactagagatgagattgcaggaataagacaggagcgtgatccgattgagcgggtcagaaagctattattgacccatgacttggcaacagcccaggagctcaaggacatggagaaggaaatcaggaaggaagttgacactgcaattgccaaagcaaaggaaagcccaatgccggatacatccgaactgttcaagaatgtatatgtcaatgactgcggtctggagtcttttggggtggacaggaaggtggtgagaaccgtccttccataggctgccaaacgagaagcttggctctgtcagactgttcgcctggtgtatggtacgtgctggggagacataatagagtccaaggaattcgtagttagctgtattgtggacgtttctgtccctaaataagtctgtatatagagacgcgtgaccattcggactctgtaccgcattgcgctagtcattccca

SEQ ID NO: 3945 - DNA, 1080 bp, Triticum aestivum
  Clone ID: TRIAE-23APR03-CLUSTER103787_1
aaaatccctctccttcgctcgttcccccacctccccccccgcgcccgcgatagggttacagggcccccgcccccgcgccgaccgacagcccgccccggccgctcccccgtcccccccgccctcctcgccccgcgcccccccacccccgtccccgccgccccgcggctcgcgcggcccggcgccggtggctgctgagctacggccgccgtcgggagacgcccacctcccggagctgctgcctcctcagaccggcaccttctcgcgtgcggaaggggatgtccatgcttggcctccgcggtttgcctgcgaagatgcccaaacctcccacgcgtccgctcaaaacagtagcaaaagaaaagaaaactaaggcgacaaataattggatgaccattcttggccttccaccaaaaaaggcttctgcaaatgatcaagtcccaccaaatgagcaacaacagacacaacacaaaacaagtgaggataccaaaaaacttgcggcaaatgctcttgcagctgttagagatgccgccactgctgcatctggaagagggaaagtggagataaccgaggtaagggactttgctggcaaggatattgagatcaagaaacttgtagatgcggattcaaaggaagcggttgagaaggccagtgcagcgggtgcctcgccgtccgctgtggacaacatcctggagcagataaggaagaagcagaagctgagcgtcctggacaagacgaagaaagactggggagagtacaaggcagagaagggcgtggaggaggagctgggggcgtacaagaagagctcgaaccagtaccttgataggcagtccttcttgaagagagccgattacagggagtacgagctcgagcgagacgcgcggttgtcgttgatggcgaagcggaagagcgagagtatgcaggacgatgatgtctaggctttgatgaaaattgcgaccatgttggctgcactttgccttttgttggactcggtggagattcttttgaggtaatggtaaagacgttatttcatcgttgccttgtcctcttattatacaatcagctggtcaatgtgaaatctttaag

SEQ ID NO: 3946 - DNA, 1076 bp, Triticum aestivum
  Clone ID: TRIAE-23APR03-CLUSTER103877_1
actagcttccagcgcacacttgtcaccttcctccccgcaacgcatccagctaccccgtctcactcccgacccatcccaccagcaccaggacagacacggacaggacgatggagtcacccatggcggcccggaggctcctgcaggaggcggcgggcctgtccacgccgggcgcccggatcatcgccgacgacagggacatcgtcatcatcctcgcctcgctgctctgcgcgctcatcaccgtcctcggcatcggcctcgtcgcccgctggtgcgcgtgcggcggcgcggaagccagggcgcgcgccgccgccaaccggggcgtcaagaagtcggtgctccgcgccatccccaccgtcgcctacgtctccgccgacgccggcaagggcaagggcaaggaggcagaggaggccgccgcggcgccggagtgcgccatctgcctcgccgagttcgaggacggcgaggccatgcgcgtgctgccccagtgcggccacgccttccacgccgcctgcgtcgacaagtggctgcgcggccactcttcttgcccctcctgccgccggatcctcgccgtccagctgccggctgcccagcggtgccagcgctgcggcgcgcgccccgacccagccgtggcgacctggaagcctccggcccagtacggcgagatgccgcccttcttgccgtagcggctcgcgcgcgcgctcgatctccacagatctgggcgagagctagaagacgactagtagcagaggaaccagtcaaccaatcgatgagccttctgtttggtcaaatatctcggctgcttctcttaattaccttcctttgtttatctcatcatcagtagcagttcttcttaccgccgagctggaaatgcatagcatttctgaatttaggaccctggtatgcaggtgggtggtgatcaaggtgttgccactacatcttagcagctttgtacatttgtaaatagtaactataattactcctaaggagtaatcggcatcatcgattaggcttatctgaaactgtgaatacctttgctttccatgaatccatttggtcaattctgaaaaaaaaaaaaaaaa

SEQ ID NO: 3947 - DNA, 1389 bp, Triticum aestivum
  Clone ID: TRIAE-23APR03-CLUSTER10403_1
attttctcttgaaaaaacaaaataaaagaaatcgtcccctcctcgtcgtcgctgccgtcgctgagtgcgaactccgtcgtgtcctcccctctccctctctctatcccctctctctctctctctctctctctctgctaatctgagttcctcgttgagaagaggaaccgaggggcgcggcagcgactccgcccgtgatggtcgcccgccgcgctctgtggcggacgcggacatgcacagctcctccccctcctccgccgccgtcgcgtattcttcctcgtctccatcacacctctccccagtagacggcttcctctgcgtgaaggagggggtcgacgagatgatcaagcacgtcgccaatgagccctccctcgggctctacttcgtccagcagcacgctcaggcatccatgcccatcctccttgacgtcaagggcaaggttacagaaaagactcgtgagataacattacacactgaagatatagaggattctatttgtgctgtgaggtccatggctgagtttggacttccaattgctgatgatatgataaaggacataaataaatctctaaagataatgtcgaagacccaaccaaagaaagggttaacccagaaccccatttgggggttccaatcagacaaaagctcggaagcatggaacgatttggacgcaactaatggtggaagtagcaagaactatttgtcttccatgttgaacaccgcaaagcaaaaggcatcgagtctcagatggccacagactgatttcgctatgaacgatggcgttagtgagaagtcagtgtcatctacagctcaggagtcgtcacaagccggaggacatggtgcgtcaacaccctcggatgcagaaagggatgaagtctccatttcaagccgattgttggaaaataaaaatgcaggtactatgaaccagggcctgtctgcttctgatatctcccacacggcggagagctacaacaagttcaaagaagaacaggaactgaaactgcaagagtggctcagggagtcgaaagaagctgacgataatagaggttgagactgttgtaccagctccggtgttttccaccgctgtcggagcacgtcagaaatgaaaaacatgtccaaaccttggaatatgtttatgaccacagatctttttgtattgatgatcagtgtacatgtgcggcgtctctgtaaacattcgtgttcactttgcagctgttacattgatattcacaaggcagagagatctctctcgagtgtattgttgcaaaaaaaaaaaaaaaacctgaattacagcagaacatgtttgctattgtacttgggagcttggaagtggtttttatatataaactgatgtgccatatcggtggccgtccatcttgcgccgagattttt

SEQ ID NO: 3948 - DNA, 2045 bp, Triticum aestivum
  Clone ID: TRIAE-23APR03-CLUSTER10452_1
aaccggtctcgctctccctcccctcgtgccccccctcacgcgacgccaatccatctcctcgcctctcctctcctctcgagccggcgatacccgccctctgcgaatccctccgtcctgccagggctgcagccgcgaatacggacgagcaatcaggccggacacatgctcgcgcgccggcggcggctgctgcagcggcttcggctttggatacgcacttccagttagactccctcctcgaaatcacccgctctagcgtcagtccctgcgccactgcactccccatggcactgccggcggcggcggcgactccagtggccacagacttcctctgcaaccaccacaatctgtagcagcagaagcaccatgtccccgatcagttccaccacgaagacagcaacaagggccgcgtcgacgacgtcaacgacaccaacaggaccactaccccaattatcgctataattgaaataaacacccccatcatttcccacacattcagagatatcgagttaaaaattgccaactttgtcgactcatggggagatggggtgctagtgatggtctttggtcttgtacagaccaaagcgaccaaagaaaaatgatacttttttcttacctttttgcttcagcctgaggagtaaggttatgttctactcaatgattatttccactttgttgaccaagaacaagtgcaacctgcacaggtgagagctcacgaagccttggagactaacatggaatccaaaacagtccaaacaattgcagagtacattcatgaaaaaagtcgaacaatgcaagctgttccagtaacatctgaagaaaatgatgctgttgacagttacacttactctgagccaccactgcaagtagtttctcatgtcggacaactggggagatgaatctcttcaagaggaagcactttcttccttctcgaatggaatggcgatggcaccagaggagccggcacaacctccgcctgtgcagcgctcatgttgaggaacctgttggggagcccgtaaagaagacatatgcttctattctaagaaccgcaaaagccccacctccgttcccttttgctcaatcagcgcctgtgaataaacctcaccctacaacagaagcaaaccaggcaactctagggacttcatcggtggcagcagataagccaaaatctgacttctacgcagaaggccatgacgaagaagagagcagatctgttgatgttgggaatgtgccgcgacatgtacctgcggctgatcttgagaatgagttcaagaagtttggccagctcatccctgatggtgttgctatcagaagccgaaaggagactggtggctactatgcttttgtggaattcgaagaactgagtggcgttcacaatgcattgagggcttcaccacttgaaataaatgggcggcagatatatgttgaggagcggaagcctaacagtggaataaggggaggaagaagggggggaggcagaggtcgctttggcggcagtggcagaggatatgcgagaggtgacgagtacagcggtagccgtggaaagtcgaatggttatcagcgtgtccctcaccacgagaggggcattttgggggcaaggaactgatgccccatggcgatagaaggaagcataagaggttttgatccgtgagaagtggagcggagttgtaaaactaaactattggagcgctccattctgttaggttgcattttcggttttggggtttgtcttgggtttgccacagcagctcgtccatggacatgcctgtccgttcttaccaacagatactttatgttgctattctgtcttctcgttaatgttagagctgttcttttcggtcttctgtcaaaaaaaaaaaaaaaaaaaaaaaaaaaaaaaaaaaaaaaaaaaaaaaaaaaaaaaaaaaaaaaaaaaaaaaaaaaaaaaaaaaaaaaaaaaaaaaaaaaaaaaaaaaaaaaaaaaaaaaaaaaaaaaaggggggcccgttttaaaggacccaattttacttccccgggcttgcaaggtaatattttttttttggggcccc

SEQ ID NO: 3949 - DNA, 1339 bp, Triticum aestivum
  Clone ID: TRIAE-23APR03-CLUSTER10468_1
gcccggccccggcccgcacgcgccagtccgtctcccccatcccctctcggcgattctcctagggttagcgccgccgccggccgctggccgcctccgccgtcgtcccgtctccttctcctccgccccgcgtacctgacccgccgctcgagctgtgccacgcgactgttctccgccgccaagctagtcggacggaccaccggccgcgcccgcctccctcgtcggccgcagttgcgagccgccctcgcccgccagtcgccgccaagctgcgccctccccatctccgagcctgctccgcacgctctgcgctgatttcagttggtcgatccctcaaattctgaaatgcttaccaaagggaggagagttgccgggaggggtgaagacatgtctgcacattatgcatttgggccacatgaggatgatgcgattatcaaacatcggcttctgactaggaccacaactaccaggggtgaaccacccctaaagaagctccaaaagaagttcatgtccttcgccaccgaggtagagaaggatgcagacaatacaagtgattgtgagaggctgtacaaggcctttctgcaggaaataaacacttttgagctgcctcttctaaaaagcaaggctgtagttgatgcaaatctcagggaaaaggagagcttcaacgagctgcaggttgagatccagcgacaaatcttgcaagctcagactgatattgaggatcttaaaaagcaacttgagcaaagcaagattgagaggcagcacaaagaggagtgtgaagcaatcagaaaactgatttcctcgcagcctccacggtcagaaaccgagaaacttatcgctaatcttgagaaggagatagctaatttggaggccgagagtgcagcatgtacaaggacgttagagcttaggaagaagcagtttgctcttcttcttcatgtggtggaggaattgcaaatctcgatcgaagatgagcaaaggaacatagcagatgagctgagagccgccactgaagagccaaagttgagcatagaggaaggcagcggcggtgcttcggatgcgatggctgtagactgattaacgatcctagcactagcgagttgcttaccctgcacgctcaagcatgcttcggtagtgtctgggcgcggtgtttctttgtaagagatccctttttcctgttgttgctgtggtatcttgaaccgtaagatgtacttgacgtcgaaccattccgtgcttgtatgatagagatgcagaatcattgtgctgtaatatgtactccagatttagaattgcagcgtgattatttatcgtatacgctggaatcaaaaaaaaaaaaaaaaaataaaaa

SEQ ID NO: 3950 - DNA, 2068 bp, Triticum aestivum
  Clone ID: TRIAE-23APR03-CLUSTER1046_19
tcctccttctcctcaccccgcgcggcgcctcttttcctctcctcccctctcccctcgccgccgccgccagcgcctcctccaccacagctcgtcctcctatacacaggtgcggaggaggagatgttggtgctcttcgagacgcccgcggggttcgccctcttcaaggtgctggacgaggggaagctcagcagcgtcgaggatctgtggaaggactttgcctcgtcggacaaagcaagaaaggtggttgagctgaaggctttcaacaagtttgaaaacacttctgatgctctttcagccgcaactctgctaattgatagcaagcccagcaagggtctgcgcaagttcctgcagaagcactgtgatggtgaaacattggctgttgctgattctaaacttgggaatgccatcaaagaaaagctgcaaattgattgccttcacaactctgctgttatggaactgatgagagggctgaggaaccagctcactgaacttatgtctggactagctgagcatgatctaggtccaatgagcctaggattgtcccacagcttgtctaggtataaactcaagttcagccctgaaaaggttgacactatgatcattcaggccattggcttgttggacgatcttgacaaggagcttaacacttacgctatgagggtccgtgaatggtacggttggcactttccggagctcacgaaaattgttgcagataacatccattacgcgaaagctgtgaagatgatgggcaatcgtgttaatgcagttaaccttgacttctctgagatactgccagaagaggtggaagcagagctgaaggaggcagctgtaatttccatgggaacagaagtcaatgatcttgacctctcaaacatcagggaactgtgtgatcaagtcctggctctttctgagtacagagcccagctctatgactatctaaaaagtaggatgaataccattgctcccaacttgactgcacttgttggtgaacttgttggtgctcgccttatttcccatggtggtagtttgatgaatctggcgaagcagcctggcagcacgattcagattctgggggcagagaaggccttattcagagctctgaagacaaagcatgccacaccaaagtatggtctcatctatcatgcatcattaattggacaggcggctccgaagcacaagggaaagatctctcgctcgcttgctgctaagagtgcacttgccataagatatgatgcccttgctgacggtgacgataactccatgggtcttgaaagcaggatcaagcttgaaacacggcttcgagttcttgagggtaaggaacttgggaggtctgctggttccacgaaaggaaagcccaagatagaagcgtatgaaaaggaccggaagggtggtggtgctctgatcactcccgctaaaacttacaactcagcagcagatctagtgcttggacaaaccactgaagaaacgccaaagaagtcagaagttgcttcaaagaagaggwagcmccaagatgaagaacctactgcggaggcagctgaacaggacggcgagcaggagaaagagaagtccaagaagaagaagaagaaatccaaggacatcgaggagactccagcagccgtcaccgacgctagcgagaagaagaagaaaaagaagagcaaggaggccgaggacacccctgcagccaacaccgacggtgagaagaagaaaaagaagaagaaatcagacgctgaggacgcccccatggaggttgacgtgtctgccaagaaggagaagaagaaaaagaagaagcmcgctgacgagtgagcggcatggagatacgccggaaatttgtggtgtaatgctgtactatcatcgttgtctgaaagttttgggacttgccgttcatgtagaakggaattccrcattaggattagcakcgrsgamccctacaattcgaaacttgcaagtggtgagcagtcactttaaraggcccaatgctgtgctctcatctataacatctgccagtatgttcattctgtcgagtagtaatatatttatctgttgttaattgtcaaaaaaaaaaaaaaaa

SEQ ID NO: 3951 - DNA, 1636 bp, Triticum aestivum
  Clone ID: TRIAE-23APR03-CLUSTER1046_21
catatccaaacggcataactcctaaggacaaaaggactcccccggggcgcccttaaaactaggatccccgggctcagaaattcacgagaaattactagaacatcctaatcgaaaatccatatattcgggcctcgccgcacccccgtcaaatccacgcgaacatcgccacgccaagggagaggagagctcggaaagcatcgccagcgccgcagccccccgcgaatccgcgcccggatctcccggcccggcggcgatggcgctctccgacctctcccgcgactcgctcctccccagcttcctctactccccgcgctccttcgccgccgccgcctccccgcgcttcccctcctccccgtcgccctaccaggcgcccgcctcgcccgccgcggccccggctgctggcctcgtcggctctggcggggtcgggggcggcaggcccttctcgatccgcgcgcccacctcgtcaagtgcaacatgcagattgacccggcgaaatacaagagcatctcatctggatttggtgttctgttaaaggagcaaggagctaggggattcttcaggggatgggtgcctaccttgcttggttacagtgctcagggggcttgcaagtttgggttctacgagttctttaagaagacctactcagatatggctgggcctgagaatgctgtgaagtacaagaccctgatttaccttgcagggtcagcttctgctgaggtaattgctgatatcgctctgtgcccctttgaagctgtcaaggtccgtgtgcagacacagcctggatttgctcgtgggttgagtgatgggcttcccaagttcatcaaagctgagggtgctgctgggctctacaagggcattgttccgctctggggtcgccagattccttacaccatgatgaagtttgcttcctttgagaccattgttgagcttatctacaaacacgctgttcctgttcccaaggccgagtgcagcaagtcttcccagttgggtatcagctttgctggtggctacattgctggtgtcttctgtgctattgtttctcacccggctgacaacctggtctctttcctcaacaatgccaagggtgctacagtgggtgatgctgttaagaagattggcatgttgggccttttcaccagaggacttccccttcgcatcgtcatgatcggtactcttaccggtgctcagtggggaatctatgacgccttcaaggtcatggtgggactcccgaccaccggcggtgctccaccagttgctccggtagaggaagcagcgaaagccatcgcttgattgatttttcctactatgacgatgacgatgtattccgggatgatggggtattggtggatggggactgtatcaattacttgagtttagcacccgaaatcttttgttattgtagcagatggttattgtgtcatcattttgatgagaggaactcattaagcaggcgaaataggcctttttttgtccccgggaagtttgatgcttgacataataagttttaggacagcaacgctgttagagcgcaggttttgccatcacctgtactgaggaattcccatattatactcctgtttacctccaattcaacaaaaaaacctcggccgcgaccacgctaatcactagtgaattc

SEQ ID NO: 3952 - DNA, 1747 bp, Triticum aestivum
  Clone ID: TRIAE-23APR03-CLUSTER104969_1
acgagaccattgcctagaacatcttaaccgaaaagtagatcgtcaaaggtttgccacagcgtagtaccaccttctgcgcgcaaccccacccagttgcgcagccgtactgtgtcccggtgagcggtgatccggccgatggagtcgacacgggccgagctagcggcacccaccgagcggctggcgccgcggccgcacgtcgtgctgctcgccagccccggcgccggccacctcatcccgctggccgagctggcgcggcggctcgtcgacgaccacggcttcgcggccacgctcgtcaccttcaccgacctgtccaccgcggaggccctctccggcgtccctgcctgcgtcgccacagccgcgctcccggccgtcccactcgacgacctccccgccggcacttccatggagaccgtgctcttcgagctcgtccaccgttccctccctaacctgcgcgccatcctccgttccgtcggcgcccccctcgccgcgctggtgcccgacttcttctgctccgcggcgctgccgctcgccgccgagctcggcgtcccggggtacgtcttcgtgcccagcaacctcaccaccatcgcgctcatgcgcgccacggtggagctccacgacggcgttccacccggcgagtaccgcgacctccccgagcttctctgtctcccaggcggtgtctcgctgcgccgtaccgacctcccgcgctcgttccagagcagcaacgagccggtctacgcgcacctcctcgaggagggccggcgctaccgcggcgccgacggcatcctggtgaacaccttctacgagttggagcccgccaccgtcgaagagttcaagcaggcggcagggcgaggtgcgttcccgcccgtgttccccgtgggcccgttcgtccggccaagcacaagctccgacgaagccgccggcgcgtccgcgtgcatagagtggctagatcgccagccgactgggtctgttgtgtacgtctccttcgggagcggcgggtcgctcactgtggagcagacggcagagctcgccgccgggctggaagcgagcggccacaggttcctttgggtcgtgaggatgccgaatctggacggcaacgacggccatgaccatgaagacaagcaaaacccattggcatggcttcccgcggggttcctggagaggacggcggacaaggggctgaccgtggcggcgtgggcgccacaggtgcgcgtgctgtcccacccggcgacggcggtgttcgtgtcgcactgcggctggaactcggcgctggagagcgcgtcggccggcgtgccgatagtggcgtggccgctgtacgcggagcagcggatgaacgccgtggtcctggaagggagcgtcggggtggcgctgcgcccgcgggcgcgggagcgcggcgagatcgcggccgtggtgaaggagctcatggagggggcggacaaggggcgcgccgtgcggcggcaggccggggacctgcagcaggccgcggcgcgcgcgtggtcgcccgaggggtcgtcgcgccgggcgctggagcaggtcgccgccacgtggaagaaggtgacgctcgccgaggtgaagtaacggacggacgtgcaaggggaagcggtcatggctgtttgttggcgtcttgtgtgtatcggcggtgcatgtttgcttgtttgtgccgcattaataaaaggctcgtctgactttgatgaccgtggccggcgacgccggtggtcaccctcaaaaaaaaaaaaaaaaaagctttatg

SEQ ID NO: 3953 - DNA, 1905 bp, Triticum aestivum
  Clone ID: TRIAE-23APR03-CLUSTER104_17
ctcgtgccgaattcggcacgagggcaccgccggccgtccgcccgccgaccgttcctccgttcgccatggacccctacaagtaccggccgtcgagctccttcaacgccccgatgtggagcaccaactccggcgcgcccgtctggaacaacgacaactccctcaccgtcggatcccgaggtccgatcctgctggaggactaccacctggtggagaagatcgccgacttcgaccgtgagcgcatcccggagcgggtggtacacgcccggggcgccacggccaagggcttcttcgaggtcacccacgacgtctcccacctgacctgcgccgacttcctccgcgcgccgggggtgcagacccccgtcatagtgcgcttctccaccgtgatccacgagcgcggctcccccgagacgctccgcgacccgcgcggcttcgccatcaagttctacacccgggagggcaactgggacctggtgggcaacaacttccccgtcttcttcatccgcgacggcatgaagttcccggacatggtgcacgcgctcaagcccaaccccaagacccacatccaggagaactggcggatcctcgacttcttctcccaccacccggagtcgctccacatgttcaccttcctcttcgacgacatcggcgtgcccgccgactaccgccacatggacggctccggcgtcaacacctacacgctggtgaaccgcgccggcaaggcgcactacgtcaagttccactggaagcccacctgcggcgtcaagtcgctgctggaggaggaggcggtcacggtgggcggcaccaaccacagccacgccaccaaggacctcaccgactccatcgccgccggcaactacccggagtggaccttctacatccagaccatcgacccggactatgaggagcggttcgacttcgacccgctggacgtgaccaagacgtggcccgaggacgtggtgccgctgcagcccgtggggcggctggtgctgaaccgcaacatcgacaacttcttctcggagaacgagcagctggccttctgccccgggatcatcgtccccggggtgtactactcggacgacaagctgctgcagacaaggatcttctcctactccgacacgcagcgccaccgtctggggcccaactacctgctgctgccggccaacgcgcccaagtgctcccaccacaacaaccactacgacgggctcatgaacttcatgcaccgcgacgaggaggtcgactacttcccctcaaggttcgaccccgccaagcacgcgccccgctaccccatcccctcccgcaccctcaacggccgccgcgagaagatggtgatcgagaaggagaacaacttcaagcagcccggggagaggtaccgctccatggacccggcaaggcaagagcgattcatcaacagatggatcgacgcgctgtcggacccccgcctcacccatgagatcaaggccatctggctctcctactggtctcaggctgacaagtctctcggccagaagctcgcgagccgtctcagctccaagccgagcatgtaagatcagtccatggagtgcgcaaatcagaaatctgcttcagggccgtccaagttcttccctcttatcggcaaagaattacgtaccaaatgctgcatctacctacttcattttactgagcctattttgaaaagaggacatacatatgattctaccacacgttatgcgcattgtcgtccgtcattcatgtaataatttgtacaagagcccgtttctcctgatacttcatgattattgtaaagtgaatgcatcttgattaatgaaccaaattaagaataagttgaagagtatgtataccaaataatctcttgtgtttgtccaaaaaaaaaaaaaaaaaaaactcgagaacctggcccccccgggg

SEQ ID NO: 3954 - DNA, 1686 bp, Triticum aestivum
  unsure (1)..(1686): unsure at all n locations
  Clone ID: TRIAE-23APR03-CLUSTER105304_1
gcatcgaccatcacctaaaattcatcaatcagcatatagctatctatccacggtaggctcgacacagcgcccgccgccgccgccgccgcattattcgcctcgccgctcggcatcttgcccgccttcgccacctcggtctcggcccccgcgcgcggaaatggagctcggcctcgcctcctcccgcggcccggccggcccctcgctcgccgtcgccgggcggcggccgcggccctcgctctcgccgccgctgccctgccccctttcgcttcagatacagactcgcggttactcgatgccgactctccatcacaaggcccataccacagtaggatgccaggcttctgtagcagccaaatacatggaaacacctgacatagtcgatctggactgggaaaaccttggcttcggccttgtcgataccgactttatgtacatggccaaatgcgggacagatggaaacttttccagtggagaaatcgtgccttttggacccatagcactaagcccgtctgctggagtcttaaattatggacagggactgtttgagggcctaaaagcatataggaaaactgatgggtctgtcctattattccgtccggaggagaatgccataaggatgaaaaatggttcagataggatgtgcatgcctgcaccgactgttgagcaatttgtggatgcagtgaagcaaactgttctggcaaataaaagatgggtgcctcctaccggtaaaggttccttgtatatcaggccgctactaattggaagcggggctattcttggtcttgcacctgctcctgagtacaccttccttatttatgtctcccctgttggaaattatttcaaggaaggtttagctcctattaacttgattattgaagataactttcaccgtgcggcccctggtggaactggaggcgtgaaaactattggaaactatgcctcggtgttgaaagcacagagaactgcaaaggacaaaggatattctgatgtcctctatttggatgccgttcacaacaaatatctggaagaagtttcttcatgcaatattttcgttgtgaaaggcaatgctatttccactccagcaatagaaggaacgatattgcctggtatcacaaggaaaagtatcatcgaagttgccgagagcaaaggctacaaggtggaggaacgccatgtgtctgtagatgaactgcttgatgcagacgaagttttctgcacaggaacagctgttgtggtttcacccgtggggagcattacctataaggggaaaagggtagaatacgatggcaaccaaggagtcggcgtggtgtcacagcagctatacacctcgctgacaagcctccagatgggtcacacagaggatcggatgggctggaccatgcaactgaattaagtatcgcatcaccgatcttggctcgacagatttccagaacactgctatggcagatgaattaaactcttcaactgggacctaggggaagctaatatgtaattctcttgtttaccatcaactaggatcttgcaaaaatggtcagtctagctgggcagctagcgagacttcctgaacacggcacaagaatatgtgtttatcctctgatttcttttttcagaataataaacgttactccaaatgtatcaagtgatgtaaaacagagaaatttntctttaaaaaaaattgtagctgttgcc

SEQ ID NO: 3955 - DNA, 1196 bp, Triticum aestivum
  unsure (1)..(1196): unsure at all n locations
  Clone ID: TRIAE-23APR03-CLUSTER105396_1
atccaaaaccaaacacaagaagctcctactgaataaacgccagaggcggcggcaccacgaaagcgaagccccctccccgtctacagtctctccacgcggggcacagatcaccactcgccgccgcacctccacgccggcggatatggagcgcgccggcgccgcgccgggggtccctgcggcaggggagggcgcggcggcggcggccgcagcgccgaccccggtggcaggggcaggggtggtgaaggggaggtcctgcaagggctgcctcttctactcgtcggtgctcaggtccaaagggcgcggccccgtctgcgtcggcgtcacccgcggcatcccccaagttcctgatcgtatggttggagaaattgagctgggagctatccaagaaggtcgcaacctttccaacttcaaatatgcatgtgctggatattccatatacctagatgacaaggatacctctacagtgaagggagagaagcatgcagagctccctatctgtgttggagttgagctattgacagacagagctccaactaaacaagctccagctcacgtaactaaacaagctccaggtcacatgaaaaaagaagctactcaagcacatggacacaaacctgcgctgacacaagccgatttcataaccaaatttcagaggaatgctggacttgtggccagtggtgtggtcaggaacatgaataaaattgggacttacgtcaaagacacggtggatgacatcctgtacccataccgcaagcgtcccaagtaaaacctagctcttgttctccttcaatcctggagtagaatagagaaaaatgtgggagcatgtaatctattacttccggagacactggcgcaggagtagcctcgcttggtttctgaggctgtggctgggatttcactgcctgtcagttcatgcctaacgctagcaggctgttgtatgcctgcctgttttggattcttgccatgttcctttggtagagcctctccgctccccagcttgcaatgcgatcttcattctgctggttcctccagcaatgtataggatgcaatgtaacaaagctataaaggagctcatcttttgcctatttgaggctatcctttggagaataataaattaataataggccgtcatttggctccaaaaaaaaaaaaaaaaaagcttatcgataccgatacaanggggaaaagtattaaat

SEQ ID NO: 3956 - DNA, 933 bp, Triticum aestivum
  Clone ID: TRIAE-23APR03-CLUSTER10550_1
acaaatttagtactcgtatttacttgcaccccacttttcccccattccccttcccttccgtccgtcgccgggatcggatcgcgccgctcttctccggcaggcgcggcatcgccgatccagagcgggcggccagccggcctcgttgggcagccggtctaaggggagcaagaggaggagggatcgccggaggggggggctgttcatgacgagcctggcccgggcgaccgggacgctctactcgggcaacctctgcgcctccaacctcgccaactcccaccacacctactccaagatgttccgctgcaagcacggccacgccaaccacttcaacgacgacgtgaacgtggtcgccggggagatcgtggacgaggggatgaaggccgccggcctgcacaccgtccgcgacatcatcttcctcgcctgcggagccatcgtcggctggaaattcgtcgccgcatttgacgagactcacgaggtgaaaggagggcaagttcatgatggagagttgaacgatcaattggggaggatccggccggcccgacgccatccacctgtgggctgagcatgacgctcgcatcacttccagcgaggatgtcgaccagggggccgtgtgaccttgcaacgagaatgcaagcacggctcagtaggaacgcagaaatgacatgactgtcaatatttgagtgaatcagcgaggtttcgttcgcttgcactgcttatcatgtagctgctctgtagatgaacaaccatgtatgcttacctatctatgcatctgccaccgcattgacaaccacaaggagccaggacttgtttcatattacatgttcactccaaccaacgtgaccgcttgtcgttcatgtacatataagaatgtgtgtccacctggaataaaagcttcatcagtttagtactactgatttggttaaaaaaaaaaaa

SEQ ID NO: 3957 - DNA, 1932 bp, Triticum aestivum
  Clone ID: TRIAE-23APR03-CLUSTER1055_1
ctcccctcctaccctcacgcctgcattgcttctgctcccctccagttcccgctttctccgcactcccccgacgtgcgcgactaatcccacatgcgcccacgagagtgtcgactatatctggctttttgttcctattcgctttaggtttccgttccgtttacgtctgcctccattttcatacggatccttgtgcaccagtaaccataacaatctcttccatttagattagagaaatacttacagtatgatgtttttttttttagggatgatagttacagtacagtgttaattacatgagctatatgatcaggaacggcagagctcgaaacagctccggctacctgttctacgaacaacaacagcaattttcatgtgcaaaattattctggtctcttttggtcttgaacaaactgtcaaaaactggtatcagatacacatgtcaaaaaagacttggaaaaccttgtcacaatggcaaatcaactgaataaccacgagatggcgggactaactggacgccccacatcttctcacccctactcaaaattgaatcgtatattaaatgcacagaggaacttcaaaactttgaaaactccctgattgaccacattgcactggacttcaactattttaaggtgctctgatattgcagccgacctctccgctgaactgtagcttcctttcattttcatttcttgttttggtcccttgttggtaaagagctgaagagtgagcttctctagaactggtgagtgtttcagaacacaagctagtgcatccaagtcaggagcctcagaccagtcctcattgagtaataaagtctttaacttgctgaatgtagggcactgtctcaaatctcttctgaaaacgaaattttgaaatgcagataccagctcaagatgtttggcacctgagagagcacccaggagcacggaatcgccactgtcatctttattgaaaggaacagaattctcatcggagtcgtaatcgaaacagacatcgaagtcatcgctaagatcaagacgcgcagtctctagcagcgccatgttctcaagaaaaggggttgtgcccccaaatctaaacagcaccagggagacgaggcccggggtagaaacatggacccagcaattcgagttggagcggcagcttctgaggctcaaatgcttcagggaacgggaggataatgttcgtgctgggcatgacatttgtcttcataggcatatccttgctagcacctgatgaaaataaagtagctgacaccaaagatggctctaacgccacaaaggacgcggcaattgatatgaacagtgaagcacatgtatcaggaaattgcaggccaagaaagttgccgatggaggagacggaagtagatgatatggactcattcttaacctcagtaaaagtgaaagcaaaacacatattgtcgagagcaaagtcggcttgctccatgtcacttggccttggggaggagaccatcagcgcttcttcagtgcttgcaatcccaatggtttcctcgagaacaacagggtttaggggaattcgaactgaccgatcaaagtacattcccctgcggtccactgattgggataatctatagctggtgatgttctatagatacacaatacagatgttattttttatattgccaattggtaattgtttgtacttcccaaggcaattgtccgttctgcctcgtagtactaattagctgtaacatcagtgtatagtttcaacatttccactcgtaacattgtccatacccatgttgtaattgaaacagctgcttgcactacatgtataaacacaccatgttagaacaaacaataaaaaaaaaaaagggatcgagccgtccaacttccagggggggcccccgaacccattccgccaattagggggcccattcccggcgccacggggccgcggttttaaacaggg

SEQ ID NO: 3958 - DNA, 1957 bp, Triticum aestivum
  Clone ID: TRIAE-23APR03-CLUSTER105643_1
catgacaggactcactcgcaacagccacccggaaataattcactacgccgctatttattttactattaattgccccgactccgtctccgtccccgtccccgtcccccgtccccgccccctccgccgtcgccaccccaaattcccacgcaaaccctaagccagccagccagccagctagctcgacagcccagcccagcccaatggcggaggacgccggcgacagggaccagcagcagcagcagcagcccgccgcggccgcgggggccggagcagggcacgaggacgggggcggcagggacgagagctccgtcaagctcttcgtcggccaggtgcccaagctcatgaccgaggccgagctggccgccatgttccgcgacgtcgccgtcgtcgacgaggtcaccgtcatccgcgacaaggccaccaaggcgtcccgaggttgctgcttcctgatctgcccatcaagggaggaggctgacaaagcagtgaatgcatatcacaacaaacgcacgcttcctggggccccaagtccattgcaagtaaaatatgccgatggagagttggaaaggctggagcacaaacttttcattggaatgctacccaaaaatgtgacagatactgaaatgactgatttattttcacaatatggaaatatcaaggatttgcagattttgagaggttcacaacagacgagcaaagctggttgcgcctttctgaagtatgaaacaaaagagcaggctgtggcagctatcgaagctctaaatgggaagcacaaaatagagggttcaagtgtgcctttggttgtaaaatgggctgacacagaaaaggaaaggcaggctcgaaaagcacaaaaggctcaatttccgcagtctaatatgtcaaatgcaaatgccatgcaacaaagttcattatttggtgctttacagatgggatatgtgcctccgtataatggatttggctaccagccacaaggaacctatggacttatgcagtaccctttatctccgatgcaaaatcaagcaggcttcccgaatatggttcagcctgtcaatcaaggaagctcaatacggggcgttaattctgaattatcccctaattcacttcctaggtcattcaattcaatgcagttgggcagcccttatccagctgggcctggtatgcagtatcctgggtcatatgctggtggtggcatcaatagtcgtccttacatgaactctcataattcagtcaataaagttccgaatgcaaatgctacatctcccacatcttcaagcaccagcagcaacactggtcctcagctagagggtcctcctggagccaacttgtttatctatcacatcccgcaagaatttggcgaccaagatctagcaaatgcatttcagagttttggtagagtattgagtgccaaagtgtttgtagacaaaacgaccggtgctagtaaatgcttcggttttgtaagctacgattctcctgctcctgcgcaggcagccataagtatgatgaatgggttccaattaggtggcaaaaagctgaaagtacaactcaagagagacaacagcaagcacaataaactttattgacagcgcccagtcgataccttccaacacgatcaggaaaaaccggtacatatgtgtcgcacaattgatcgtttgtcccattgtttcttctggcctccaccatgtgtcgtcgtcggtgggggcttgtgtatcttggctcaattcaattcaacattcttgaaaactgctaaagtgtgtatttcgtcgcagcatagttgtagcatctgtaccatcagattcagacccattgtacatcagacattgattcattcaattgctcccttttttctaccgaaaaaaaaaaaaaaatagctcacgttaaaaatttcgcgtgggacgacgtgattttcttatgacttcaaatgaacattacttttcttctacacttgcttgcacatttaact

SEQ ID NO: 3959 - DNA, 638 bp, Triticum aestivum
  unsure (1)..(638): unsure at all n locations
  Clone ID: TRIAE-23APR03-CLUSTER1057_6
cgaacataactnttttatnnttctggggcatanntggnatagctgcaacaccctcganaaacacagggaccgatnctcaanaacataacacagaggcagtncacctntgaaacagcanaaggttccacagcattacttgtgattgataaacaacactcagcggcatccattcatgacccgcgcgtnaagtggcctcagggcttacggcagagtgtaagctccgcacttgtanccgacagggcggtcgacgaggttgcagcgcttggggatggatatggcggcctccggcttgatgccggcgctcttggcggtgtcggagagcatgacggcgcagaggcacttggggctctgcttgccgatggtgcgcaccgctgtgcagcacccgcttgacggcgccgagttggggtcctgccccgccgacgcgcacggcgccagcttcagcgccatctcgtccgccggcgtcctcccgcactcgccggccccgtgcgcgccccgcggagccgcgaggcacgccgcggccacgaccaccagagaaagcaccagcagactcctcatcgactcgcctcgatcgctaagtaagatgacagtgttcgttagagtacgtgtcgtgctactcgtaggctagctagctgttgctt

SEQ ID NO: 3960 - DNA, 874 bp, Triticum aestivum
  unsure (1)..(874): unsure at all n locations
  Clone ID: TRIAE-23APR03-CLUSTER1059_1
ctccacacaacacacacaaagcacacacacacaaagcacagcaggtgcaacactagctgcaagcacaagaagtaggcagcaatgagcgaggcatcgacctccctcgccgtggctcctcatcgggatagttgcagcctccgccttcaaccaagcacgctgcggctggccgaggccttgctgccgtccgatgaagtttgcaggaggctagagccaaagccaagaaacccaaaccaggagccaatggccaacacctgatgccgccgcaccccaggagccatgagccttgcaaacctggtaaccagaatcgcccaaacccaaaccaaacgcccgaaccaaaacccaggcacagaacgcccgaaccacgaacccaagcccaagacccatgccaaaaaccaaagcaccaagccctgactccaaagccaaagccaggccctaagcccggagccaatgccggaaacccagaaccaaagccggagcccgagcctaaacctgaatcgaaaccgaagccctcctccttaagtgcaaaccaccgacagctcacaattagatgggatacttatatacgacagttgatggaggagaccccatacgaagccacactatgctatttctagaataagtggtgtagtatttcttgtattccatttatttctattgttccatgcatgtgtgatgagtattagtactctgtaatttcttttttgcttgttggtatatgttcatctactttgtatgtgactcgactcgttgttcttttgagtatctacgcatgattgtattcattcacatgaatgaactattttgtcagtgaactgcaatataagttgtcatcaaaacaaaaaaattccccacaatggataggcccccgcnccct

SEQ ID NO: 3961 - DNA, 1945 bp, Triticum aestivum
  unsure (1)..(1945): unsure at all n locations
  Clone ID: TRIAE-23APR03-CLUSTER105_1
gccactcgacattcgtatccgctctaggcaggtctccccctccgcagcgcgcctcccgagccacccggccggcgcgcaggcgcgcacgcacgcgccggcccccgcggtccgcccgcgccgccggcgggaatccgctcgggctccggacaaggaaagaggttgcgctcggggaccgatggcggacgacgacgagtaccccccagcgaggacgctgccggagacgccgtcctgggcggtggccctcgtcttcgccgtcatgatcatcgtgtccgtcctcctggagcacgcgctccataagctcggccattggttccacaagcggcacaagaacgcgctggcggaggcgctggagaagatcaaggcggagctcatgctggtgggcttcatctcgctgctgctcgccgtgacgcaggaccccatctccgggatatgcatccccgagaaggccgccagcatcatgcggccctgcaagctgccccctggctccgtcaagagcaagtacaaagactactactgcgccaaacagggcaaggtgtcgctcatgtccacgggcagcttgcaccagctgcacatattcatcttcgtgctcgccgtcttccatgtcacctacagcgtcatcatcatggctctaagccgtctcaaaatgagaacctggaagaaatgggagacagagaccgcctccctggaataccagttcgcaaatgatcctgcgcggttccgcttcacgcaccagacgtcgttcgtgaagcggcacctgggcctctccagcacccccggcgtcagatgggtggtggccttcttcaggcagttcttcaggtcggtcaccaaggtggactacctcaccttgagggcaggcttcatcaacgcgcatttgtcgcataacagcaagttcgacttccacaagtacatcaagaggtccatggaggacgacttcaaagtcgtcgttggcatcagcctcccgctgtggtgtgtggcgatcctcaccctcttccttgacatcgacgggatcggcacgctcacctggatttctttcatccctctcgtcatcctcttgtgtgttggaaccaagctggagatgatcatcatggagatggccctggagatccaggaccgggcgagcgtcatcaagggggcgcccgtggttgagcccagcaacaagttcttctggttccaccgccccgactgggtcctcttcttcatacacctgacgctattccagaacgcgtttcagatggcacatttcgtgtggacagtggccacgcccggcttgaagaaatgcttccatatgcacatcgggctgagcatcatgaaggtcgtgctggggctggctcttcagttcctctgcagctatatcaccttcccgctctacgcgctcgtcacacagatgggatcaaacatgaagaggtccatcttcgacgagcagacggccaaggcgctgacaaactggcggaacacggccaaggagaagaagaaggtccgagacacggacatgctgatggcgcagatgatcggcgacgcgacgcccagccgaggggcgtcgcccatgcctagccggggctcgtcgccagtgcacctgcttcacaagggcatgggacggtccgacgatccccagagcacgccaacctcgccaagggccatggaggaggctagggacatgtacccggttgtggtggcgcatccagtgcacagactaaatcctgctgacaggagaaggtcggtctcgtcgtcggcactcgatgtcgacattcccagcgcagatttttccttcagccagggatgagacaagtttctgtattgatgttagtccaatgtatagccaacataggatgtgatgattcgtacaataagaaatacaaatttttactgagtcaaaaaaaaaaaaaacataggatgtgatgattcntacaataagaaatacaantttttacnagtcaaaaaaaaaaaa

SEQ ID NO: 3962 - DNA, 1064 bp, Triticum aestivum
  Clone ID: TRIAE-23APR03-CLUSTER10606_1
gacgtacacacggcaattaacacgcctccttcctggcacccggctccccctcaaaattctcaaatccaccaatctcccccccgtctccatcccaattccatggtgcaatagcagcttggccgcgtttcgcttcctcgccgtcgcgccgtcgacggtccgcctgatcccatggacgcctccgctggagccggatccggcaatgccccctgcgccggccgccggccccgctgcgtcatcttgctgctactactccctgctcggcatccgtaagaacgcctcctccaccgacatacgcgccgccccatcgacggctcgccatgaagtggcacccggatcggtgggcgagcgaccccggcgcgacgggcgaggcgaagcggcggttccagcggatccaggaggcctactccgttttgtccgacaaggggaagagggccatgtacgacgccgggctctttgatcccctcgacgacgacgaccaggatttctcggacttcatgcaggagatgctggtgatgatggatagcgtgaaaaacgagaagccggacacgctcgaagacctgcagaagatgctggatgacatagtcaacggcgacggcggtagccgcgccactgctggtgctggtggtagcggcggcggtggtgggtggctgcggtggtcgcgttccaccggaggccaaccgcagaactcgtgtcgccccttacccgcagccttcgcgaaggtgatggacgcgccggtgctcgtgacgtgcacgcaccgctgcgcttgtaggagagagatcagagcaagaagagagcaaccagcgtgaaaaaaccattagcacatcagaattgttgctcaatccccttgtcggggtggttacagcttagtgtttagatcatctttgatgacaattgacgccgtcgatctgtttaattgtgttcctttagctggttggtgcttcggtcgcggccaagaattggcgtggatgcgcgacagcccaaagattccatcatctttccggacatttcgatcctcagttaaatttgttctcccaattgttgctcgaatatacctcatctccatt

SEQ ID NO: 3963 - DNA, 1293 bp, Triticum aestivum
  Clone ID: TRIAE-23APR03-CLUSTER1060_1
agcactcggtcgccttccctcgtctccgcgcgcagcttccactcgcttaccagttgcaagtgcgggaggtacgggcgggaacaagggatgggccgccgcttccccctcagcaccggcgccaggcgcccgtcgtccggtcggtccgcctcgccacctgagaccggcgtccccgcctcctcggtctcggccgccgtcaaggcttcttagcggcacatcggctgtgctccggtgtacaggaccaagacagagagaaggtgcgcgctcaagaacttgagcggcgatggcacaaccacccggcaagccgtctagatcacttcatagctacggagcaatagtgcactgccggagggcgtcccggcggcgctgggtggcacgctccagcacctgcagaccggcagcgtgactatttggctcgttcactggtccaccggcaggccggggggcgcaagctacacgccggcagaacgtcgtcccggcccccgtccgggcgacgtgggaggcgatggacggcctctacgactcacgactcggccgtgccccgcgcgtcaggaactagtactgcaagtacaagaaggagcagctcgtcgtcgcgcgcgtgccgccggcggccaaccaggtggagtgccaccccgtctggcagcaggccaagctccgggacctctgcgcgtccaaagggatacacttctccgcctactcgccgctgggatcgccggggacgttcaaatcatacagcgtgctggagcacccggtggtggtgtcgacggcggagaagctggggaagacgccggcgcaggtggcgctgcggtgggggatccaggcggggcacagcgtgctccccaagagcacccacgaggagaggatcagggccaacttcgacgtcttcgactggtccattccgagcgacctgttcgccggcttctctgaaatcgaacaaacgaggctgatccgcgggaaattctggacgcacccggaaggcgtgttcaagtccgaagaagagatctgggatggagaaatctagtctgagcagttgcggagggagggcaggcagcttactttcgtatgtcggaggaggctgccatggcaacggaataacgtggtagtgataatcagcagtcgaatgagctcgagcttggctgctgttggcatgtatttgcatgagtgatttgagtccagaatagctttgttctcctctgtaatttttatgtttttattcatcagtcaatccaaagtcattgtgaaaaaagaagcagatataacagtccattgttgacatgtttaaaaaaaaaaaaaaaa

SEQ ID NO: 3964 - DNA, 1705 bp, Triticum aestivum
  Clone ID: TRIAE-23APR03-CLUSTER106336_1
ataaatatgcaccgccggccgcccctccgctcctcagcaccacaaacacatcggcagggaggaaacccaccgagtacactgtacacagatccaatggatatggagtcgtcggtggcggtggtggcggtgccgttcccgatgcagggccacctcaaccagctgctgcacctgtcgctgcagctcgcgtccgagccgcgcgggctgaacctcgacctgcactacgcggcgcccgcggcgcacgtccgccaggcgcgcgcgcgcgtgcacggctgggacgaatcggcgctccgctccgtccacttccacgagctcgacatccccgcgttcgccgccccgccgcccgacccggacgccgcctcggcccttccccacccacatcatgcccatgttcgaggcctacgtcgccggcgcggccgccccgctcgcggcgctcctccgggacctctccgcgtcccgccgccgcgtcgtcgtcctgcacgacgtcctcaacgccttcgccggcgtcgaggcggagcggctgcccaacggcaacggggagtccttcgggctctactgcggcgccgtgtcgtacatggtcggcatggtggacgccgggcaccgcctcctgcgggactgcggcctcgagtacgcgcccatggacaggtatgtgtctagggagttcatggagtgcgccaagaggcagtccagcttggcgcggtcggtctcgcgcggcggcggcatggtcgccaacacgtgccgcgcgctcgagggcgagttcgtcgacgccttcgccgagaccctcgctgccgttggacagaggatcttcgccgtcgggccgttgaatcctctgctggagccgggccagatcgacgcgaagcaggggcggcacgagtgcctggactggctcgacaagcagccggcggcgtcggtgctctacgtgtcgttcggctcgacgtcctcgttccgagggtcgcaggtcgcggagctcgccgcggcgctgaagggcagcaagcagcgcttcatctgggtgctgcgcgacgccgaccgcggcagcgtgtccacggacgacgccgacagccgtcggcacgcgagactggcatccgagttcgctgagcagaccaggggcacgggggctggtgatcaccgggtgggcgccgcagctggagatcctggcgcacccggccacggcggcgttcatgagccactgcggctggaactcgaccgtggagagcatgagccacggcaagccgatcctcgcgtggcccatgcactccgaccagccgtgggacgcgcagttcgtcgagaaatacctcggggccggcctcctggtgaggccgtgggagaagcacggcgaggtgacgccggcggcgatcatacagcaggcgattgaaacggtgatggtcggcgaggaagggctcgcgatgaggcggcgcgccatggcgctcggggaggccgttcgcgcctgcgcggctgcaggcggctcatcgcgcaaggatttgcaggatttcgttgctcacctcactaggtgatactgtatcgtgtgtctttttctctttcttttttctttttctttctttttgataaaacttgctcacctaacttaggtgatacgagtgtaataaagaaaacaaatactccctgagtctcaaaaaaaaaaaaaaaaacttagtgtattctctctcccgaaatataaggcgaagttaactttgcatggtctttgatgcaa

SEQ ID NO: 3965 - DNA, 1539 bp, Triticum aestivum
  Clone ID: TRIAE-23APR03-CLUSTER106551_1
acccacccgcccatcccctgttctgctcttacgccggaggcccagctcgtctccgaggcgaattcgcgcagcggacgccgcgattccgatcaccgccgacgccgccgcgctcgccggagagccatgtctcggtccatgagcctgaacatgaggtcggcctcgcgccgcgacctgccgcctccccagaagacaatcgaaaggtttgagaagatggtggaagggggaagttactacgaggcccaacaaatgtacaaatctaccagtgcaagatacattacttgtcaaaggtattcggaaggcttggacatccttcagtcaggagctacaatccagttgaagcatggacagataacttgcggtgctgaactcgctgtgctgttcgtggacactcttgtcaaagggcaatgtccttataatgaagaaactttttgatcgtgtcagaaagaagatatacggcgttccccaggataaatatgccccatttcctctgagatgattatgacgatgatgggcagaaattatccgaagctatttctgctgcgcaagtgcgttctctgaagttgttcatcatttctaagagcagctctcaggtggtctggctgagtttgggacatcaagaaacggatctcctgatctgcattgttatgttgggtgaatacatttattccgaatctccagaaacggacatgactaaagtatcaagtcattttgtgcgcggtaacgatcctaaaaaatttgcttctatgctggtaaactttatgggcaagtgctaccctggtgaagatgatactgcaattgcacgcagtgtcctaatgtatctatcactagggaatctcagagacgcaaatttacttatggatgggatgaaggagcagctaaaatctgctgacatggaacttccaaaaacagctttaattgagtttatcaagtatcttcttcaaacgcttgaaagagatgcttaccctctttttaggacacttcgacaaaagtacaggacaagtacagatcgagacagtgtatttgaggagttattggatgaaatagctgcaaaattttatggtgtacggcaacagaatcctctggagggactttttggtgaaatgttcaaggtgtaattgacgagaaacgaacttgatcatcatgtccttgccttcaatgcaatgattggttttcagctaaaaaaggcatccattgaccaaaataatacatttgtgggagatcaacagtgggtcacccaggaaaaacgtacaggaagtgctttgttggagcttcatcagtcatagtcaacggagttagtacatttgacatcaaactacatgaagatgcgccactgatctgttgtaaaatcgttctattggttttgatgtttttcttttcttctcctaaaggttttgatgctttccagcagtgtaacagatattgtaagatgatatggcattttgttatctttttttcctcattctgtgctaaatttgtttcgatggtttaagcaaagatatcaggtgctataattccactttcccaaaaaaaaaataaaaa

SEQ ID NO: 3966 - DNA, 1868 bp, Triticum aestivum
  Clone ID: TRIAE-23APR03-CLUSTER10658_1
cttgctggacaacacagctgtgcctgcccgcctcctctatctccaggagcattatgaatttgctatttataaggttcaagtggacaagccagttcagttggctacttttaccgagtgtgtgcgttctggtcaagatgttttcagactcgggagagatgaaagtctgaatcttagtataactcatggtatggtggcttataagattccatcctggtatgagagatgtcactatatgtatttgtcttgtgatccatctagtccctcactgcttcgtgatgatggaggacccatcattgatttagaagggaagttgtgggtctagttaacaaccatattaaggagacattcataccttcgttcttattgcacaagtgcttggatttttggagaagattcaattgtatgcctcgcctccatcttggaatgacgtttacttcaataaaacatttagatcctagctgtattgagagaatgactcgtaatcataacatcgagtccggtcttattgttgagcaggtgtctaaaggatcacatgctgagaaaattggaattcgtgaggggtgatgttattgaaagctttaatgggaagtacatttctactacaattgagttggagcagatgctgatagacatatgctgggatcattttgatcaacgaaaagagttatatgctgaaaaagatgtctccgtgaaaatatttgatgccatcaaacaacgccggagaactagaaacttgactgcaattgtatcggatcttggagaagacattgtggaaggcacttaccctatcatgcgaaaagaagccatgccagtctcgtaagtttcttgagctgggcctgagagaggtacttgcccgctgctggccttcatggacgagtcattggcaaattcaagttcggcataatcttgtgtgtgtgtgttcccagacaaaaactttaaattgtgggtgcctttggaccgtggaagcagcttagcttagagcataaccttgtactccctccgtccgcaaatacttgtcatcaaaatggataaaaagagatgtatctagaactaatatacatctagatacatccccttttatttattttgatgacaagtatttccggccggagggagtatgttactggctactaccgtacttattttgtgccttatgaaactcacatcctgtccctatgcaagtgtagttcagtaagtatatatgccagtgtaatgttcagactgcagaagcagaataacttagggattattggctaggaatatattttgatacaagggaaaagatttatatgctgaaaaggatgtttcggtgaaaatatttgatgccatcaaacatcgccggagaactagaaacttgactgtgattgtatcggatcttggagaagacattgtgaaaggcacttaccctatcatgggaaaagaagccatgccagtctcgtaagtttcttgagctgggcctgagagaggaacttgcccgctgctggccttcatggacaagtcattggaaaaaacccttgcatgccaattgcaaattcaagttcggcataatctttttgtgtgtgtgtgtgtgtgtgtgtgtgtgtgtgtgtgtgtgtgttcccagacaaaaactttaaattatggggcctttggaccatagaagcagcttagcctagagcataacctgtatgttactgcctactagagtacttattttgagtcttgtgaaactcacatcctgtccggtgcaagtctagcagccgtggatgatgaattgagcccggtaattatgctagtgtaatgttgagactgcataagcagaatagcttgggattattggctagtagcaattaattttagttcagtggactcaaaaaaaaaaaaaaaaa

SEQ ID NO: 3967 - DNA, 2404 bp, Triticum aestivum
  Clone ID: TRIAE-23APR03-CLUSTER1065_1
cttcctctaacaagtcgtcgcctggggcctcgtcgctccccctcggcacaacgacctcgaccctcccccaatccccgcgcggcgcgaccatggcgagccgcggctggcgtcgtccgctcgcctcgctgccagccctcgccctggccttccttctcctcgccgtcgctgccgccgcggccgaatcccccgaccggacagccccttcgcggccgccgctggtgctcccgctcacgctctcctaccccaacgcgagccgggtcgcgtcgtccaggtccaggcgagggctcgccgaaggaggtcacccaagcgcccgcatgcgcctccacgacgatctcctcaccaacgggtattacacgacgcggcttgtacatcgggacgcccccgcaggagttcgcgctgatcgtcgactccgcgagcaccgtcacctacgtgccctgcgcctcctgcgagcagtgcggaaaccaccatgatctagggttttaacttgatatctccagtacatattcacccgtaaaatgtaatgttgatggctttggtaatcgtgatgttaaccagtgcgcgagagagtccagggaggtgggactcatccaccacaacgggcaagtgagccaggttcttatgtcgtttggcacagaactctggacctaagccacttgcctgcttattttggtggtctcatctctggttacttgtcgataaatgttccatctccataacggaaaactggccttcaggcgtgggctgagctgttggctaaagagctggagtgagatgccagtcagatgcgacttatgaattttgtgctatggtggaatggatattggtggaggtgctatggtacccggggcagtgcctgtccctcctgacatggtatacacacattcaaacgctgtccgcagcccatattacaacattgagttgaaggaaatacatgttgctggaaagccattgcgggtagacccaaggatctttgacggcaaacatgggactgtcttggatagtgggaccacatatgcatacctcccagaacaagcttttgtagcttttaaagatgctgtgacaagcaaggtccatcccctcaagaaaatccgaggacctgacccaaattacaaggacatctgctttgcaggtgctggaaggaacgtctcccagttatcagaggtatttccaaaggttgacatggtatttggaaatggacagaagctctcactttcacctgaaaattatttattccggcactccaaagtcgaaggggcttattgcctgggtgtgttccaaaatgggaaagatccaacaactctattaggtggaatcgttgttcgtaatacccttgtaacctatgaccgccacaatgaaaagattggattttggaaaactaactgttcagagttgtgggagagactccagagtggtggggctccttcaccagcaccttcaagtgatccaggttcacaagcagatttatcgcctgctcctgctccaagtggtttgccagaatatgatgttggtctcatcgctgtttatatgtcgataaatgttacgtatccaaacctgaaacctcacctacatgagttggctgagctgttggctaaagagctggagatagattccagtcaggtccgacttatgaatgttactgggcagggaaactctactctaatcagatgggatattttcccagctggatcttctaattctatgtctaatgcaacagcaatgggtatcatttatcggctgactcaacatcatgttcagttgcctgaacatcttggcagttatcagttactcgagtggaatgtgcagcaacctgtatcgagaaggtcatggttgcaagaacatgttgtctccatactggttggagttttgctagttgttttcctgtctttatcggcctttttaggactgtatctctggagaaagaaatttagaggtcaagctgcatatagacctgtgggctcagtggggcctgaacaagaactccaaccgctataatattgaagctctttgactgggcaacaaataggtaattctttggtagagatactattatgcgggctaccatattgcggcggtacacatctgctgttggagtagcccttttcctttgtatgtaacacaaagcatctagcttacagaagaagcacatgatgacatgacttgttggttcaaaagttagagagttagttcataaactatctagcaattcagatcaagagctccctcttgaggcttactgtagaagaaggttttgttcatgtaatgtagattaaatagaatagaccagacacaaatcgcactggtggtgcaatgttgtaatatctatttgataagagccgaagaccttttttgcttcagtaaaaaaaaaaaaaataaattaaaactacatttctacgacgaaggtttc

SEQ ID NO: 3968 - DNA, 1571 bp, Triticum aestivum
  unsure (1)..(1571): unsure at all n locations
  Clone ID: TRIAE-23APR03-CLUSTER10667_1
gtgggcagagcaccgcctcgccagcttgagtacttgacagttcactctcgctgcagcggaggatcttcccttccttctttagctgttgctttctggaagtgtgtgcggtgatggggacgctcctggcgcgcgtcgccgtggttgctctcgcggcggcggcggccgctgtcgtcgtcgatggccagatgtcgccggcgttctacgacgccacgtgcccggcgctgcagtccgtcgtgcgccgcggcatggcgcaggccgtccagaaggaggcgcgcatgggcgcgtccatcctccgcctcttcttccacgactgcttcgtcaatgtacgttttggttccggggtgcgacgcgtcctgtcttgctggacgacacggccaacttcacgggggagaagaacgcggggccgaacgccaactcgttgcgcggctacgaggtcatcgacgccatcaaggcgcaggtcgaggcttcctgcaaggccaccgtctcctgcgccgacatcgtcgcgctcgccgcccgcgacgccgtcagcctgctcggggggccgagctggacggtgcagctgggccggcgagacgggctctcggcgagccagaacgcggcgaacgccaacctgccgccgtcggacgcgaggctccccgacctcctcgccaggttcagcgacaagggcctggacgcgcgcgccctcaccgtgctgtccggggcgcacaccgtgggctgggcactctgcaccaccttccgcacgcacatatacaacgacaccggtaacgaggccgtggacgccgacttcgccacccagatacgcgccaaggcctgcccttccgccggcggcgacgggaacctcgcgccgctcgagctgcgcgcccccgccgcgttcgacaacggctacttccaggacctcgtcgcccgccgcgtgctcctgcgctccgaccaggagctctacgggagcggcgtcggcgacggcagcacggacgcgctcgtgcgcgcctacgccgccaacgccacgctcttcgcggtagacttcgccgccgccatggtgaggatgggcaacctggcgctcaccgggaagaacggcgaagtccggctaaactgccggagagtgaactgagctgactcagtcgatcagtgaatgaattcttgatgtgcgcaacgaaaagcataaagctgttcacaaagatacaaaatgggcactgctgttcgtgcactggattttctgcctttctcccgtttggttcggggtgagcagctaatatctgacccgtggcaagatcctctacgcaggagaacaaaatttagccattttatgtgcagatgggcggttgagataggggcagggaatcctcccggactaggtgcatttctaagttctaaccgatcctctaaaagaacgtaagggagtaaaatttctggattagagtatctccaactgccgcacaaaaatttcgcgcccaataaaaattatagcgcgtcattttaacactttgagatgatgtttgtttcccagagacttttttgtgtnagagactagaaaaagtccctcatagagattttttaccaaaaaaaaaaaaaaaaaa

SEQ ID NO: 3969 - DNA, 894 bp, Triticum aestivum
  Clone ID: TRIAE-23APR03-CLUSTER107203_1
agtaatggccaaagaacttggcttgtcttaaaccatcggccaaggcaagctaccatgtgaggagaggataaagtggataaccccatcacttccaccggcttccaccggtctagcagctctcctcgtccagccagaatccaggcagccatggcgtcgttagccctcaggcccatcatgccagcagccgccgcggccgcttccacgaccacacctctcaaccgcgcccgccgcggcagctctacccttctccgtcgccggcagccagtcacgtgcatggccgagagcagcggcggcggcaacagcaccgtggagctggccgccggggcggccgggctcgcgtcgtgcgcgacggtggcgtggtccctctacaccctcaaggcgacggggtgcggcctgcccccgggccccggcggctcgctgggcgcggcggacggcgtcagctacctcgtggtgggggcctctcggctggtgctcaccgggggcgtcagctacctcgtggtggcgggcctcgtcggctggtcgctcaccaccaaggtgcgcaccgggtcgggcctcccggccgggccctacggcctcctcggcgccgccgagggcgtcgcgtacctcaccgtcgtcgccatcgccgccgtgttcgggctgcagttcttccagcaggggtcgctcccgggcccgttgccgtcggagcagtgctttggctaagaatgcatggctgatgttgtgaatcgtgtgagagcgtgttgctggttcagattgtaacctgaaatcggtttgaccaagcattctaagcatgttctgtgtgcgatcgtaattgctcagtttcaccgtgtcaggtgttctcgtcttcagtcgcaaaaagaaaagagggtgttctcatcttcaagttttcttttcaag

SEQ ID NO: 3970 - DNA, 1596 bp, Triticum aestivum
  Clone ID: TRIAE-23APR03-CLUSTER10739_2
atgcttggattgttgaaaatgtagttgcatataatcagatggtgttcctcaattgctttatcccaccagatgacagatacatgtgtgcctttgtcactttcaggcactctgaaccgctgatattatgggtttacttgcttttgtatggaagcatttctgacagtttaggtgtttatacagaaacttgctcttataccaatctaccattgcagatttcttacaggaaacttgacaaatggctgatgaggatgttcaacctatcgtgtgcgacaacggcactggaatggtcaaggctggttttgccggtgatgatgcacccagggctgtctttcctagcattgtaggaaggccacgccataccggtgtcatggttggtatgggccaaaaggatgcctatgtgggcgatgaagctcaagcgaagagaggtatcctgactttgaaataccccattgaacatggcattgtcaacaactgggatgacatggagaaaatatggcatcacacgttctacaacgagctccgtgtcgcaccagaggatcatcctgtgttgctgactgaggcccctctcaaccccaaggccaacagagagaaaatgacccagatcatgttcgaaaccttcagttgcccagcaatgtatgttgcaatccaggccgttctgtccttgtatgccagcggtcgaacaactggtattgtgctcgactctggtgatggtgtgagccacactgttccaatctacgagggatacacgcttcctcatgctatccttcgtttggaccttgctggccgggacctcacggataatctaatgaagatcctcacagaaagagggtactccctcacaacaaccgctgagcgggaaattgtcagagacataaaggagaagctcgcttacgtggcccttgattatgagcaggagctggaaacggctaggagcagctcctctgtggagaagagctatgagatgcctgatggtcaggttataacaattggttcagaaaggttcaggtgccctgaggtgctgttccagccatctcatgttggtatggaagttcctggtatacacgaagcgacatacaattccatcatgaagtgtgatgttgatatcagaaaggatctgtatggtaatgttgttctcagtggaggttctaccatgtttcctggaattgctgatcgcatgagcaaagagatcacggcccttgctcctagcagtatgaaggttaaagttattgcaccacctgaaaggaaatacagtgtctggatcggtggctctattttggcctctcttagcactttccagcagatgtggatctccaaggcggagtacgatgagtctggtcccggcattgtccacatgaagtgcttttgaagagtcggtgaaggggacttacaaaggggacttgctgccaagaatatatagtagtacatggtacatggttagtgttctgtagaagatgtgtaccctcagaggaataaggggtacaggaaaaaaatcagtatcggttcatcttttccgtttggcacaattgcatggtgcttgcctgctgtatgaaataatgaaatggaacgtatgtgtatgcctaagcgccattgtgtggt

SEQ ID NO: 3971 - DNA, 1084 bp, Triticum aestivum
  Clone ID: TRIAE-23APR03-CLUSTER10743_1
gttttgcccacctcttcgtcttattgcggcagcatttggacaaacatcttcatcataatgcggaagcaacagagatggccataaaaaaaattgaacatgttcactcacagcagcacagtcaactaccacaaccgaagctaaaaacatccatccatccattgtgcacactcatctcgattaggttacaacacatactgagcaactaagccgacggaacaattagtacggagcacaaatcgaagaagcacggtcacacctaggagcttaccaccgtcgcaaccacagcgagaccacacagaccggaaggcatccggcacgcaggccctcacaccgccaccttgcggtgggcgccgaggcagcctccgtggcgaccttggccttcttggccgaggagggacccggcgggcggccgcggccccggggcatgccggtggtggccttggcgacggcctccttgacggcgtcggccatggggtccttagccttgggcgggcggccccgaccgcgcttgggcgtgttggggtccttgggcgccgccttgggcttgggcggcgcgttggggtccttgggcgggcggccgcggccgcgctttgccggggtggcggagggagcgtcggccttgaggtagttgttcttggcgaaggcgagcttgccggcctccttcatgctggcgaggttggccgtgaggagggaggcgtgcgcggaggggaggccctcgtacttctcctcgatgtagctggagatggccgacttgctcgagccgttcttgtcgcccagcgcctcgatcgccgcgagaatcatctcggggtagggcgggatgtcaccggacttgggggacccgccgttggccatggcagcgacggcggctacaggccacggcggtggagccgagcggtcgggctacagtgcgggcgcggaggagggggcgggctgcggggaggggaaaattttcggatttggaccgggggaggaaatgggcgagctgtgccgcgtgtgccgaaggcagcaggcctatgacctagggtttccgcgtgcggtcaccgacgtgtgggccgcgtaggttagtaccctgggtccgggacca

SEQ ID NO: 3972 - DNA, 1736 bp, Triticum aestivum
  unsure (1)..(1736): unsure at all n locations
  Clone ID: TRIAE-23APR03-CLUSTER10747_1
gttacagtgttgcggtagcagcattgagcaacggtggtaggtaggcggcagcggcactcctacctaaccctccccccttctaaagcggaaccaaggagcgacgattgtttgacttctccccaccagaatctgcacaggcagcaaacgagtaggcaactctcccgcaatggccgccgctgcatcgtcgccctcccctccggcggtcatcacctgccgagcggcggtggcatgggggccggggcaggcgctggtgatggaggacgtggaggtcgccccgccggggccactggagatccgcgtcaaggtcgtctccacctccatctgccgcagcgacgtcacccagtggcagtccacggcgcagcccgatctgttccccagaattttcgggcacgaagcatccggggtggtcgagagcgtcggggaaggagtgaccgagttccaagtgggagaccacgcgctcaccgtcttcatcggggaatgcatgagctgcaagcactgcgtgtcgggcaaaagcaacatgtgccagacgctcggtctggagaggaagggcgtcatgcacagcgaccagaccacccgcttctccatcggcgggaagcccgtgtaccattactgcgccgtgtcgagcttcagcgagtacgcggttgtccactcgggctgcgcggtcaaggtcagccccaccatgcccatggacaggatatgcctgctcagctgcggcgcgtccgcaggccttggtgcggcttggaatgttgctgatgtatccaaggggtcaagtgtagttatatttggtctgggaactgtaggactttcggtagctcaaggtgctaagctacggggagcttccaagattattggagtagataccaatcctgctaagcaagaaaaggggaaggcttttggtgttacagattttattaatcctgccgaattgaatgaacctcttcagcaggtagtaaaacggcttactgatggaggggctgattactcttttgaatgtgtgggtgataccgggggtctttgtttggaggatggagacccaaatctgatatacctttgttagtggagaagtacgcaaacaaggaaatccaagttgatggccttgtcacacatgatatgccattcagtgacatcaacaaagcgctctttgtttggaggatggagacccaaatgtgatatacctttgttatgtggagaagtacgcaaacaaggaaatccaagttgatggccttgtcacacatgatatgccattcagtgacatcaacaaagcgcttgaactgatgctacaaaacaggtgtttgcgatgcgtgattcacatgccaaagtgacaggattgatttatacatcagtgccatcatatctgtacaattttggtggttttctcatcagtaatttttcacttgatctgctcctggctcgagttttcatgacatcaacatattgaagctctagtgtgattctctattggtgtctcgccttggagttatggtgttatagttgttgaggagattacaaatcatactgatattcccttggaattcctcatatgtccgacctctagaattattcgtgtaatctaacttgttaaaaattgatctgttagtgattataatgttgtatgcatgttcggtgcattgtgcaatattgttctaatattgagcttcttgattgggatgaattatgtaaaactgaatgttntaaaatgtaaataaaattatttnttntcaaaaaaaaaaaaaaaa

SEQ ID NO: 3973 - DNA, 1557 bp, Triticum aestivum
  unsure (1)..(1557): unsure at all n locations
  Clone ID: TRIAE-23APR03-CLUSTER1075_1
aagagacacacgcctagcctcacaagccccactcacgccagcttcaccgtcccgcacgagcctcacttcacccacaaaaactggcgagcagctcaccagcagtcccggccgccgtggcccccgcggccgcggtgcggcgctccccggccgcccccgtccccgtcttcaccggcgaccggctcccgcgccctccccgccgcgtcgtgcccggcagctggccggcctccgtgcggccgtccgtcgacgcggcggtgcgcccggtcggtcgcggttgcggtcaggctcgccctcctctacggcccccacaagtacggcgaggagcccgccgcctccgtccgccccagccaccgcggccgcgctgctgtccccggccgtccccctgcccgccctccaccggcgacccctcccccgccttccaggcggctgcgcgccacgccgctggaccgtcatccgtgtggtcgtccgctggaggcggcgctgcggcaggcggtggccgtggcggccgggcatgctccgcctctacttccacgactgcttcccgcagggctgcgacgcctccatcctcctcaacaacacggccgcccgcgagaccgcgctcggccccaacctcaccatccagccgcgcgccatgcagctcatcgagtccatccgcgccagggcgcacgccgtgtgcgggcccgtcgtctcctgcgccgacatcaccctgctcgccacccggcgaccatcatcgtcatctccgggcgggccctggttcaacgtgccgcagggcaacctcgacagcctcgccccggcggcgcaggccaaggtgttcgacctcccggggcgcgacacggcacgcgtggcgacgctacgggagtgcctcggcaccaggggcctcggcgacgtggccgacctcgtgggcctctccggcgcgcacaccattggcgggtagcagtgccgcagcctcgccgaccggtcccaacgcgccgacgacacctcgccccgccagctcgccgggcacggccagctgcagcacccgccccgccggcagcacctgcgacgtgctcaccccggacgctgttcgccaacgcgtcactacaaggcgctggggttcaaccagggccgtgttcacctccgacatggccctcgtgacaggaccaccgcgcgagagccatcgtgaggcggttcgccgggagcaaggacgctttcttcgggtagttcgccatgtccatggagtggcctcgctagggtgccaaaccggccggcaacgtgggcgagatcaggcgcttcagtgcttgcaggatcaacgcccagagcgccgacataatcggagagtccattggggtttgagtgggcaacgtgcatcctttttaataaaatagcaaaaaagtcggcaagcaggctagcaggtaacccgtgcgttgtgttagcgtgcatgcacggcatggccgtaggccatagccaatcgtgtttgagttctcggcatgcttcctttttctgcgtgtagcaataaagagacagagatttcgatcgtctttgcatctgatcttgagttnttgaccaaaaaaaaaaaaaaaa

SEQ ID NO: 3974 - DNA, 1065 bp, Triticum aestivum
  Clone ID: TRIAE-23APR03-CLUSTER108154_1
atcatgcccatcacgaatcctcctcgcacgtgtcctaatactacgggagaaacgccactcgcggacgcattgacacatcaaatcgaagcccaaaggaagttgcccgacacagcttgaggttcgagaaggaagctgcaaatgacgcatcgaggcgccaaagggaagtacctgcagacggatcctggagaaggcccagaagaacctctcgtacgaagcaggcggagacgcaaccctagagacaaccaggtcgcagctgcaccgacttcaacctagcgctctcggggttcatggacgacgcgacgcaggcgtgccagcagaacggcggggagctggccaaggccgtgtccgacgacggcctcagagccggcaaccctggcgcttccagctctaccacggcggcgaggacgtgaaatgcgccacggacgaggacctgctcctgctggacctgaacatcaaaggtgggtacgatcaccggctgtccgcccacggcatgcggcgcggcgcggtggacctggcggtcggccagcaccggaggtaaaatgtgtttcagtagaagggcgagcgtagttcttaagtcgagcagttgagttccccacgagagattcttttggcggtcccgaacggagatcatcttgtttacggtctggttacacttcatacgtacgtacccatgctgatgtaaaatctgtggaaattgagatccaggcttcgaataagtgtagctagacgatgatcgagtgtgagatctgattgcattgtgtatgtactacctaaaattctgatggactacaacatagcatcgtggagtgtttttgctgctgttgagggatggcattatggagtgttgcatgcaaaaaaaaaaaaaaaaaagcaaatcggagtggtgaacaagcaaaggtccgacgacggcctcagagccggcaacctgggcttccagctctaccacggcggcgaggacgtgaaatgcgccacggacgaggacctgctcctgctggacctgaacatcaaaggtgggtacgatcaccggctgtccgcccacggcatgcggcgcggcgcggtggacct

SEQ ID NO: 3975 - DNA, 1400 bp, Triticum aestivum
  Clone ID: TRIAE-23APR03-CLUSTER108235_1
acctagcaaatcatatcgctgtaaccttaagttggagtacatcgccccttcctagcaaaaccaccagcatcacgcaagcagagcaaatggagtcgacctctcgccatatggttgcgtccgtcctcttggtccttctcctcctcgtcgccacagagatggggacgacgagggtggcggaggcgaggcacaggcactgcgagtcgcagagccacaggtaccgcggagcgtgctggagggacgacaactgcaagcacgtctgcaacaccgagggcttcccctcgggcaagtgcaagttccacggcttcgaaagcaagtgcgtctgcacgaaaccctgccagtagccacctcatcgaccgacgacctagcaaatcatatcactgtaaccttaagttggactacagcatccgttgcgaaaccaccagaatcataaggtagacattctacgcaagcagagcaaatggcgtcgacctctcgccgtatggttgcgtccgtcctcttggtccttcttctcctcgtcgccacagagatggggacgatgagggtggcggaggcgaggcacgggcacaggcactgcgagtcgcagagccacaggtaccgcggagcgtgctggagggacgacaactgcgaacacgtctgcaacaccgagggcttcccttggggcaagtgcaagttccacgacttcgaaaggaagtgcttctgcaagaaaccgtgctagccacttcatcgaccgatggatcagctggctagttagccgcgcaccacgaccaccctcgtgatcttcgtagtgctcctctcctgtttcgtgtaccgctttccttattcctaatctagtaaggtctacatgcgttgtgcatgccatttccttgttacaagtattttgcttcgtacggtgtaatctagctagggtgctaataaaagttggtcgtcggtgtgcttggacgtcttttatcacattataaccgtccctagccgccacctctttactaaccctctgccccttcgtttttcacctccgcgtatctactcccgtttctagctgtctatggcccctgatccctccgtagttaatgtgcctctccctgattttcaacattaatcttatggcgcaatcgtcatgccgatcctgtctagctgctcgcttcggcctctaccagactacttctgtttgtctccccctctttcgcgccctctcacatccctatggctcattctttttaccgccccaccgccctcccacccttctttccctaccctactccacacactttcacgtacaccacgacttctgttttatttttattcttccctcctctatttgttcgtcttcctctcccacacgttgaccagattattgtattccacttaaccgcataacattatactcccttatctccctacag

SEQ ID NO: 3976 - DNA, 1534 bp, Triticum aestivum
  Clone ID: TRIAE-23APR03-CLUSTER108249_1
cgcgttgcgtttgcgttgcccaccccccgccgcaactctctcatccatcgcatccccgcgcctcctaccgccatcccatccaactcctcttccccacgcacgcgcttcgcgcctcaaatagcacgaacggggcaatggcagcggcgcggccctgttgcagcagcagccaccggcaatcgcgcctcctcgtcctcgccgcctgcgcgtcgcccacgccgctgctgctgctttagccgtccccgacttccgctccgaggtgatcgctcccccggccggatgggtgatctgggcgtccgggttgtgggcagaggctgcgccgcgccgatggagccgcgcaaggagatggtggcgccgtcgctggagcagcaggggcagcagcagcatcctcccctcttcatgggatttctcccgacgagatggagtcgcagatggcggcaacgggcggaagcggccgcgcgagaccgtggcgccgccggcacgcctcttctccctacaggcgccgcagggttctcccgggcacaaggtgatacacctggcgcagctgcaccggcggccggcggcgacgggcctgcggctcgacttcgacgagggaggctcggagcacgtggcgtgcacgtcgtcgacgtcgtcccttctccccggcgagctcgccgctcagtgcgggcggcacaacaacgagatcgaccggctgctccaggaacacgcggagagactccggcttgcgctggccgacacgaggcgtcggcagaaccgctcgctgctgggcgccgcagaggcgctggccgccggcgggtcagggaggtggaggcggagaccttcaaggcggcacggcgcggcgtcgagctggaggagcggctggccaggctgagggcggaggcggcgtcgtggcaagccaaggcaatgtccgaccagtccacggcggccgcgctgcacgcgcagttgcagcaggaagcggccacagcgcaggcgaggagtggcaaggccgccgaggaggccgagggagcggcggacgacgccgagtccggcttcatcgaccctgacagggtggtggaggtggtggccccgccaccggccaggccgtgccgcgcgtgccggctccggccggccaccaccgtgctgctcccctgcaggcacctctgcgtgtgcgccgcgtgcgatcccggcgcctctgcctcccaagccggcaccgccgccgccgcggcctgccccgcgtgccgctgccccatcaccggcaccgtgcaggtcttcttcgcgtgaaacgggtccccgccggatcatgaaatcagaaccatggaaaagctgtagtagatcagatcagacagggtgcataattccttcctctcttttctcccgtgctagtgaactgatccctccatgatcgcttcacctcttttgctggtgatctagtaaatctttactaatttgatttgaatcttgcgtgacagtttttactgctagcaacgcgttgattaggtgggaaaaaaaaaaaaaaaaaaaaaaagaaaaaaaaaaaaaaagaaaaaaaaaaaaaaaa

SEQ ID NO: 3977 - DNA, 1102 bp, Triticum aestivum
  Clone ID: TRIAE-23APR03-CLUSTER10839_1
acgccaaaacgaagccactgcgccccctccctccccccccccccccaaccccgccctccctccctccccgcagccaaatcgagatctctctcccccgtccctctcccacccccaccccacccccgccggccggccgtccgcggcgacgagcccaccagaggaaacatggcgtcggcgctctcctccctccgctacggcgacagcctgtcggtggtggccatctcgggcgccacggcggtgctctgcgaggccatctcctggctcctcatctaccgcaccgccacctacaactccctccgcgcctccatcgagcgccactcccgcaagctcgactccatgaagtccatctcctcgggcgccggcggcgccgcgccctcctcccagccggcctcctcgcgggccaagaagatggaccgcgtcgagtccagcctcaaggacgcctcgcgggagctctccctcgccaagctcaagtccggtgccgtcgtcgccgccgtgctcttcgtcgtcttcggcctcctcaactcgctcttcgagggccgcgccgtcgccaagctgcccttcgcgcccgtcccgctcgtgcagcgcatgagccaccgcggcctgcccgggaacgaccccaccgactgcgccatggtcttcctctacttcctctgctccatgagcatacggacaaacctccagaagctgctcggcttcacgccgccccgcgcggccgcgggggccggcggtggcctcttcgccatgcccgatcccaaagccaattgagcttgatgatcccctcttctatacatacatgtgatgcacctggtctgaagcaaagcatctgagttggtctcccggaaagagttgctgccctgaaaggaagataaataacctacctagtcgctcagaggagaaacactgcaagacactgtaacgacacaattcattttttccacccatgataagcaggcgtgaaccgtgcgtaggctggctgtatcgatcatgaacattctcgagttcacccgaagcaatctgttgccgggtttgtcgtagggttgtactttatcatcagtcgttctagtaccaaaaaaaaaaaaaaaaaaactcgtcgccgccgcga

SEQ ID NO: 3978 - DNA, 1706 bp, Triticum aestivum
  Clone ID: TRIAE-23APR03-CLUSTER108406_1
acgactgtcgcggctgcggtctcgcgggcttccactccttcaccaaccacactcctctcctcctcttcccggacgagtccacgcccgcccgctcacaatccccgcccccggcctcccctccgaccacctcccgcatcccccgccatggccttctccacccccaacgccctctccgcttccgcttccggccccgcctccccgttcaacctcgtttctcggcacctgacctaccaggtcctccccgccctccccttccaccgctccctcccgctccacctcccctccctccgcctcacccggcccctcctccctcccctcccgctcgcctcctggggcggcggcagcaacatcggactgtgctccggctatggcgggggtggcgatgacgactaactcccctccggcggtggaggagacgaggacgagggcgacgtcggcgacgacgcgtccgtcaacaggagggaggcgcttgttcgtgctggcgcagctgggctggaagctcgagagccttcaggccgattgcttttgttgggaacgaagcgggcgcccccccggcgggatcgtgcgccggttccccggtctcggcaagtcgcccatgttccgcgggtctgctccagttccccggcttcacggagcgcctcctcgccgatggtcctcctccccgcccaggtcgccatggagtgcggcgtcggcatcttcaccaagactgcggcagaatatgagcgaaggagggagaactttgtcaaggagcttgactttgtgattgccgatgtggtcatggcaatagttgcagacttcatgcttgtttggcttcctgctccaactgtgtctctgcaaccagcactatcagtgaatgctggggctattgctaaattcttccacaactgcccggataatgcattccaggttgctttggctggaagatcatacacatttttgcagagatttggagctattatgaggaacggcgcaaaactttttgcagtaggaacgagtgcatctttgattggcacgggtgtgaccaacgcaattataaaggcaagaaagactgttaacaaggatgatgctggcgaagttgaggatatcccaattgtttcaactagtattgcctatggtgtatacatggcagtttctagtaacctcaggtaccaggttctggctggagtgatcgaacagcggatgctcgagccgttactacaccgccacaaactagcattgagtgcgctgtgctttgcggttcggacggggaacacattcttgggttctctactgtgggttgactatgccaagtttataggcatacaataagttgaagacagacctagaattgcacaaatcattcgcaatgttgattcgtcgctacgccatatcccatatccttaccgtgcttcctatcctgactcatctgccttcataggagacactaacgacagaggtcgattgcttttgctggaaacgaaagatgcgtgcagagaaatggtaatttgtcgaattcccaagaacaagcgcttggattctatttggtggcttgtgagttttgtccaaaactcgattcgtttcagacgatggttttgcagtcgtttctgttgcgcaagtatgttcctgtgctctggcttgttctgtttaaaatttgcgcagataacagagatcatctgggttctgcatgacgcacgtcttgacgtgtggttatgagacttcattcttcc

SEQ ID NO: 3979 - DNA, 1175 bp, Triticum aestivum
  unsure (1)..(1175): unsure at all n locations
  Clone ID: TRIAE-23APR03-CLUSTER108743_1
ctcctcctccctgcacgagcacgaacaccaaccttttatatagcgtcgcctcctctcggcagcacccttgccagcctctcctcttcttctcccgtcctcgccttccctgccctgctcaggggatttggatcagggaagaagagaaggcaagcaagcggtggtgaccatggagttcaaagcggccgctttcaccgcagccgttctggcagtcctcctctgttccccagcatcagcccagaagagtccaccggcgccctcgccggtgtcggtgtcaattccgccgtccctcgctccggcgccggcgccggccccgcgctacgtggacctggcggcgctcctcgacgtggccggcccgttccacaccttcctcggctacctgcagaagacgaaggtgatcgagaccttccaggcccaggccaacaagaccgacgagggcatcaccatcttcgtccccaaggactcggccttcgcggcgctcaagaagtccaccttctccaaccttcaccaaggcgaccagctcaaatgggcagcatcagcgtccagtccatgtggtccaagcccaagatctccagcagngtctacgccaccaagcccatcgccgtctactccatcaacaacgtggtcctgcccatgcagctcttcagcaaggacccgccgctggcgccggcgccggcgcccgcgccggagtcgggggcgtcggacatcgcccccagcccgggcggcggcaaagcgggcgccgggaacggcaaggcggactcgacgagcgccgggcatgtcggtgtcgcgaattgcttggggctgctggctgccgcggcaggtggcttgatgctcctgtggtgagagagaacacatggatggatggttcctgtcatttgtaagcacttgaatttgattttgagctggttgatggaggcattcttttggacatagtaggcatgatgttaggattgagtcggggtattttacatcatattgctctcatgcataatcatgatcattactcataaattgacggacggatgaatatcgaaggaggtttcgtcgcctttttattatggacatagtaggaatgatgttaggattgagtcggagtattttacatcatattactctcataatcatgatcattactcataaattgacggatgaatatcgaaagaggtttcgtcaccttt

SEQ ID NO: 3980 - DNA, 1289 bp, Triticum aestivum
  Clone ID: TRIAE-23APR03-CLUSTER108946_1
aggttttactagggtttttgctagtttgcgccgtcgatcgccgccgacccccgccacccgccgacgcatccctccttcccggcacagcgtacgggccatgagagacctccacctcccgctgaaccagacccagagggtccgcctcgaggccgcgctccacgagctccagaccccttgcccccgcggccgcgtccgccgccgccgtcaccgtcgcggacaacatccccgtcaaccacgaggacaacatcctcaaagggcatggtacgacggatcaggatggggaggtggtggcgacgctgtgcggcgtggtggagcgggtcaacaagctcgtctacgtgaggacgctccgggctaggtataagccagaggttggtgatatcatagttggccgtgtcatcgagattgctccaaagcgctggcggttggagataaactttagccaagatgctgttttaatgctttcttcaatgaatttgcctgatggaattcagagaagaagaactgcggttgatgagcttaatatgcggagtatatttgaagaaaatgatgtcgtctgcgctgaagttcgtggtttccaacatgatggatctcttcatctacaagcaaggagtcaaaaatatggaaagcttcagagaggtcaattgctcacggtgcctgcgtatctggtaaaacgccggaagctgcatttccatcatctagagcagtatgacgtcgacctgatccttggctgcaacggtttcatctgggtcggtgagcacgtcgtggtgcgtgaaattgctgatttgaaggaagacgaacagaagctgagcgccgaagcggagacttttaccccaatagaaacaaggagacacatttgccgtcttgccaatgctgcacgcttgctttcagccctaggattcactctgactgttgagctgataattcagactgcggaagcgagcgtatcatcaaatgtcgagataaacgacatgctcggggctgaattctatgtccagacggcggagggagaggctaagcgtcgaggtgacctcctgggaaagaagaggtaatcatcttggccctgcctgcctggtttgctgtaaactgaaaatgctgacatgtacgggatatgtaaaaggaggtaatgccacccggtgcccttgtagcatacgacgattttgagattttggagcttgctccactgtagtgtgcattcgttttaagatggtattaagatatctgttattctgtcaaaaaaaaaaaaaaaagagcttatcgctccccgtcaacctcgaggaggggcccgatac

SEQ ID NO: 3981 - DNA, 864 bp, Triticum aestivum
  Clone ID: TRIAE-23APR03-CLUSTER109071_1
tttttttttttttttccaaacaaaaacagcatgatcttgctagacttcctctattccacgttactacatatagcaaatggcatgacatttctaatcaggacctatgaataatacacgtataatacaacgctttactgcggggaagttaaaactttgcatcatggtaagcttttgcttgccctcccatacagaaaatttcagtttacatcaaacttcaagttcagctgctgatatttgttgtccgcaaccgttatagatcttcagttttgaagctactgcttcgctctgccatgatcattattcctgatgcttaccttgccctcttcctcgttcgcattcacaggctgctcaagctcaagtctgtgggctgacattcgagcaatctcagagatggccgtgtcgcggacctgcatatcatcaccagcaagctcctcgtatgcagcctcgaatgcttcttgccagaaccgtggaaggcgtacctcgtcgctggtgcgtgtgtacatgtcccacatccgaccaactaatttctccctttcctccatctcgagggaatctagatcgtcgcggagtggcgcgtcgaggtcccctgaaataacggctgccaggtcgccggccgaccagcggagggagacggaggcggcggacatggaccagagcgcgaggagcgcgatggcggcgagggcccacaccttgtaccggcccttcccgaggagcgccgcctccgcggccccgcccgtggaggaggcggggatgctgatcttggcctcctgcagaagcggcgcggaggcgttgctgtcgccggcgagggccttcattactgctgtcggtgggggtggggcgggagtgtgttcttagcagtgagcc

SEQ ID NO: 3982 - DNA, 2253 bp, Triticum aestivum
  Clone ID: TRIAE-23APR03-CLUSTER109168_2
ccccaacccaaatcccaatccaacgtccgtccgccgctgaaaacacccctctcagtcccacccgcagccttcctccccttgtttccccgccgccttggaccgatccatccagcgcgcccactcccgttagccttccccgccacctaaaaaggcgcccgaggccgccgaccatccatgtccggccccgccatcctctccggctacctcccggcgcaccgcccgccggtgtccaccgccgactcctggcccgaccccgaccgttccgacgcccacgcccccgcccccggcaaagcgccgcgcgcgcagcgcgggcggacgaaccagtaccgcggcacccggcaggggccctgcggcaagggggcgggggggatgcggcgacggcgccaagcgggtcccgcgggcggctggacgcggacctcggccccggggggggccggagatccgcgcccccgtgcagcggcgtccgcgtctggctcggcacctaccccaccgccgaggccgccgcgcgcgcctacgaccgcgccgcgcgccgcatcagggggcgccaaggccaagctcaagcttccccaacgagatcctggtcggcgcgcccgcgcacgaggccccgtgcacgatggcggccgtgctcccttcccccaagaaagaggaggagcccgcggcgtgctcctgcgaggaggtgaatggcgctctccgaggagctgtggccggtacgagagtctacatgagcttcctcggggtcccctacatggatgggcggggccgacgggccgcggccgcccctgccgccgtcggtgtcgcactcgccggatgcaccggccgagctatggagctttccaaggacagctactacccgggagcctctggggctctgattgtgtcgtgctcgtagtctcctgccagtcgcagaaaacagagtcgattcgctctttcccttgtgttttgttgaattcattttttctctctttgttactgtggtgaatgcctcaatgtaatctcacaaattttccatgtaaattttatcaacggaaagcgctcttccccgacgcacgggcggtgctgctgcaacgctgcatccttctgttggacacgcggcgtggggaactacttcggatcgtctagagatgaacaggttggccaagtgagagtgtgagacgactactcccactggaactgctgtgtgcctctccaacctgtgggctgacgttaccagtggcagcccctcgggttgctcgttcgtgattagcgtgtattggtttctttatatatgaaaatcggagaggaaaagccgaggacgcgcgcctgcacccggccaccgtcacccccgccgccgcgccggcccgggcgccgatcgccgcgcagtcggcctcgacgcccgccatgtacgccggctccacccaggcctccgactacctgcgctaccagatgctcctgcagggcaggggcgccgccgccgccaaccaaggcaaccttctctcgttctacggcgggggcgggggcggtggcggcgccatgagcagctcgtatggcggcggtgtcatgagcagctcctatggcggcggcggcggcggcggaggcaccatgagcggtttcctggggtcctactactcgttcccgtcctcctcctactcggtggccacggtgccgtcctcctcctccgcgtcctccgctccgggccaccactactcgtcgccgcacgacccgcagcagcaccagcagcagcagggcgacgcggcggcggagtggagctgggagagcgcgctggcgccggaccctggcacgacgacggcggcctcctggtccgactcgagccagcagccgtaccacccgccgcacacccaatagcgcagcaatcgcgaagccaaccaagattctgcgccgtctctggaagaaagaataagatgcgtacggacggcgacggagacgggcgcggcagcagcagcagaggaagatcgagaatgatggcgtcactcgtggtcgggtcgggtcgggcgcatgtgttgattgaggacagccatgggctcgttttgttcgttcgttgattagtttgggcggtggtgcggggccgccccgtttttactactttctgttctggttattattactgcaaattaagaagaagaaaatggaagagcgggcgtgacgcttgcagttgcaggtggagattggatgcttttggggagggttaatcagagtcatttggcgaggtttaaccgcgtcatttgggaaaaataatgaatgttgcgtgctacctgg

SEQ ID NO: 3983 - DNA, 907 bp, Triticum aestivum
  unsure (1)..(907): unsure at all n locations
  Clone ID: TRIAE-23APR03-CLUSTER1095_10
acacacagccaagagtgagctagctctaataaaccctgtagtaaacgcacagcagctcggtaggcaacctatggcgacgaaagcggcggtgatcgccacgctgcttgccctgaacctgctcttcttcaccttggccgacgactgcggctgcaagctgcctagcccgccgccgccgggcgggggaggaggaggagggggcggcggcggtggaggcaagggtggaggaggagggaccggtggctgccctattgacgcgctgaagcttggggcgtgcgcgaacgtgctgggcgggctgatcaacctgcggccggtgacgacgccgaagcagacgtgctgctcgctgctccaggggctggcggacctggatgcagccgtgtgcctgtgcacggcgctcaaggccaacatcctgggcatccacctcaacgtgcccatcgacctcagcctcctcgtcaactattgcggcaagaacgtcccctccggcttccagtgcccccgctagaagagaagacccgagagatccatcgtccacagcaggcatccactatacgtacgtacgtgcatgcatgcgtacaccagctcgcatgcatgatctacgatccatccattgactagtactctatagctagtcgtatacgttatttgcttcataatttatcatcgctcttgctagttgcatgctaaactttacatgtgtgctcgtgtctctgtgtgtgtgtgtgtgtggggtagtatcctttgaactactgcttgtcatcgaactaggccacggtactgtatggaccatggatcgagttctcagccacatatgatctcatgcttgtaccgctgcctgctactattatatttgcttcaaaaggaggttgctcctcctacaattgtaataaagtaattaatatcacaanaaaaa

SEQ ID NO: 3984 - DNA, 1900 bp, Triticum aestivum
  Clone ID: TRIAE-23APR03-CLUSTER1096_1
cgccgacccgccacgacgcccttcccccatccccccgatccgaaccaaaccaaaccaaaccaccttctcgtcgtctccctccccaccgccgcggcggactgacccacccgacccgacccgaccaccatccccaaaccctcgccggccgatggagcagccgccgtcctcgccgccgccccccgcggcggccacggccacggctgcgcctactcccgctcccgcttccgctcccattatcctatcggactcgcctcctgcggccgcggcggtggcggagcccgcgctgaccgccgcgcagaaggcgctccgctccaagccggcgcgcgcccccgaggacaccgacaagaagaataagaagctcaaggatgtggaaatcagttttccaattgtctatgggacgatttcattttggcttggcaaaaaagcaagcgagtacaactctcacaaatggaccgtgtacatccgttctgcaacaaatgaggatttgagtgtcatagttaagcgtgtagtgtttcagcttcacccaggtttaaacataaaacccaccttcccgtcgtctccctccccaacgccgcggcgaactgacccaccacccccaaaccctcgccgccgatggagcagccgccgtcctcgccgccgccccccgcggcggccacggccacggctgcgcctacacccgctcccgctccctcttccgctcccattatcctctcggactcgcctcccgcggccgcggcgggggagcccgcgctgaccgccgcacagaaggcgctccgctccaagccggcgcgcgcccccgaggaccccgacaagaagaataagaagctcaaggatgtggagatcagttttccaattgtttatgggaccatttcgttttggcttggcaaaaaagcaagcgagtacaactctcacaaatggaccgtgtacatccgttctgcaacaaatgaggatctgagtgtcatagttaagcgtgtggtgtttcagcttcacccaagtttcactaatccaacaagagttgtagagcaaccgccttttgagttgtccgaatctggatggggggagtttgagattgcaataaccctttattttcacagtgatgtctgcgagaagcgcttggacttgtttcatcagcttaagttgtatccggaagaggacgctggacctcaatcaacaaaaaaaccagttgtagtggagacatacgatgaagttgtcttccctgagcccactgaagccttcttcttgcgagtgcaaaatcaccctgctgctactgtgcccaggctacctcctggtataacattgtcttctccaggtcctatggaacttatgccacatgataagaagcgttttgacaccaaggatcattctctgagccagtggttctcaaacttctctgaagcagatgaactattaaaactggctgctgctcgtcaacaggtgcaggctcacattgctaagctgagaaggcagctaagcatgatagagggaatgccccagcaatccagagttatctctggtcctggtcaacagtttgggcacggctaatggaacggtagctgctgtaaggaagatgctgaaacctgataacaactcgctaacagaatgtgatgaatgtgtcttcattgacgtcttaggctcgcaattgatgtttagtgctggccagtgtgcataaagcgcaacctatggattgtaccgcctttgtgcattttgaaatcaacgggagcatggtgtacctgcctcaaaaaaaaaaaaaaaaaagttatcgatccgtccacctgggggggggcccggtaccccaggcccccaaaaggcgttccggtgacacgggccccggtgcgaccggttgatggaacgcgtggggaaaaagttagttctggaaaatccttttccagtgggaaaagac

SEQ ID NO: 3985 - DNA, 1660 bp, Triticum aestivum
  Clone ID: TRIAE-23APR03-CLUSTER109880_1
ccccggtttccccccgacgcggtcaccgatcagcaacaaaagcaccgtgatagtaactagtgacagcgtgacggcgttcgcaatggcgaggcgcctgggagtcgtgctggctttagcggccgtcgtccttctcgccgccgcgggggccgccaccgcccaatccaagccacggccgcccaatgcccaggggccgaagcccaagccgaagccgataagcgtcaagtgcagtgagagtcccagggtgaacccctaacctaacccattcaagtcgatcaatcatcagcaaaaaaaacactatagtaacaactgacagcgtgagggcgctcgcaatggcgagccgtttgggagtcgtgctggctttagcggctgtcgtccttcttgccgccgcgggggccgccgccgggcaatccacgccacggccacccaacgcccagggcccgaagccgaagccgaagccgatgaaggtcaagtgcaccgagaaccgcaaggagaacccctactgtttcaaccggaacatggactgccccgccaactgcccccagtcctgctaccccgactgcaacacatgcaaacccgtctgcgtctgcaacaccccgggggcgtgcggcgacccgcggttcataggtggtgacggcaacgccttctacttccacggacgcagggacgccgacttctgcgtcgtctccgaccgcgaccttcacatcaacgcgcacttcatcggcaagagcggccacagtggcatgtcccgggacttcacctggatccaggccatcgctgtgctcttcgacggccaccgcctctacctcggcgccaggaagaccggcacctgggacgacgccgtcgagcacctggacatcaccctggacggcgagcctgtctaccttcccgctgacctcatcgaaggcgccaagtggacgtccagccgcgtgcccgagctgtcggtgacccgcaccaaggcggccaacggcgtcctcgtcaccgtcgccggaaagttcagcgtcagggccaacgccgtgcccatcaccgaggaggaatcgagggtgcaccgctacggtgtcaccgccgatgactgcctcgcgcacctcgagctggcgttcaagttcgacgcgctcaccgacgacgtccacggtgtggtcggacagacgtaccgctccgactacgtcaaccatttcgacgtgagggcctccatgcccaccatgggaggagatgccaccttcaccacctccagcctgttcgccgccgactgcagcgtggcgcgctatggagtcagccgtggaaacgacggtgccgcggtgctatctgagctcgctggtgtcacctgcgccagcggcatggacggcaaaggtgtcgtgtgcaagaagtaaaacgcttctgccatgcatatggcgagtgcccgtgtatgtctgcatgcatgcatggttgacaagtacacacagaaataagcaaaggacatacattaatgtgtttggaacttgtaactttatcaagaaatagtatgcgtccgtttgcattaaaaaaaaaaaaaaaaaagcttattcgataccgcccgaccctcaaggggggagcccggtaacccaatttcgccctatagtggagtcctaatttacccgccgctcccttggcccgccgctttttacaaaggtccgtggacctggggaaa

SEQ ID NO: 3986 - DNA, 2238 bp, Triticum aestivum
  unsure (1)..(2238): unsure at all n locations
  Clone ID: TRIAE-23APR03-CLUSTER1099_1
cagaccgcacgatcccggccctgctgaccacgagagctgcgcgggtgtccgaagcggatcgccggatccccgccgcgccggaccggtgagatccagcccccgccggccgatcccatggcccccgcggcggcccgggtcctcctcctcgtcctcgccctcgccgccgcctcctccctcgcggggcgcgcggacgccctccggtcgctcggcgtcggcgacggggcggaggccgccgcgcagggggactacgccgtggacctcaacgccaccagcttcgacgccttcctcacggcctcgcgggagcagttcgccgtcgtcgagttcttcgcccactggtgtccagcttgcagaaactacaagcctcattatgagaaggttgcgaaacttttcaatggtccagatgctgcgcatcctggcagaatactgatggctagggttgattgcgcatcaaaggtgaatgtagatctttgcagtagattttctggttgaccattatcctttcctactttggggccccccaccaaaatttgctaacactaagtgggaccggaagcaggtgataagcgaaaagaaattgattgatgatggaagaacaacagagcgcttgctaacttgttcacattagaaaccaaaaaatttgagaatgaaagttgactgcaaaaatgagaatgaaaacataattccaatcaatgcttcatatactaaataggttgttcaacagctcttgcgttacagataagcaacaggcacagcatgaccaaagcagttactcatcaagctcttataagcgtacatacgaattttgcttgctcatcatccatccaagatgtgtccaagacgactctgctgagctgcttattaactttgatgatcactggccttcaaacctctctttaagctcacaagacagttctaaattgttggaaagtgttgcagcagataaccacaagatctgttgcagcaggtaacctcgcgatctctggaaaggaggtcgtggaagtaaacttgatccaaggccgtggagctgtggtcgatgcgtgtggctgcagccgcggtctgtccgttttgcggcacggacttaccctcccaaccggggctgcagaaagccaatcaacctttacatcaatatgtgatttcatacacaatttcttcatctgtgaggaatgccgcaaacacttctatgatatgtgctcaagtgtgtcagttcccttcaagtcagcccgtgatctcagcctctggctatggagcacgcataacaaagttaatgagaggttgatgaaagaagaaaaggatatgggaactggcgatccatcatttcctaaggctatctggcctccaaaggcactctgcccatcttgctatcgttcttcaagcaggacgagtgatggagccttgcaggttgactggaatgaggatgaagtatttccattcttggttaactactatgggaagacgcttgtatcatcctataaagaaacctacatggagtctcttcaagggaggacgcaagtaggggcggcacttgctgacgatgcctcctcctcatatgattagacaattttaggttggtaggatatcattcttgccgtgtgcgtatacggaattcaaatgatagagaagtgattaggttctacttgtcgattttacaggcaaagaaagaactggaactgaaaaacagcccaccggttgctcaccgtgcacttcatcagaggtggcctccgtgaatgtatatttcttggatgggttaaaaatcttggtaagtagctcacagagagtgcacaaaatccaatgttggagctgtcatttacagaagtatgatgacctaacttgcaccttgttatagggttcaaaatgtagttctgtttttaccatatagttgtgatctgattgccggacatggatgaactgttgctgcccatttgatccgtgaaattttgaactcagtgttaaagctgaagtattgcgactttttatcgggtgtactctgtctgtggtatcaaaatttgtgctgtcgacgacagcatggtagtgcacctatggctgatataccctacacaagcagcatttggaattggcgaattgtcgagcaacaataacaacaacaatgaaggcgacagagtgattcctgcattctctgcgcattgaatgtacattgcacaagtctaaaattnctacatcttgtactcctgactctcgtcttgtacagcaggaacactttatcttcattgcttcaaaaaa

SEQ ID NO: 3987 - DNA, 2694 bp, Triticum aestivum
  Clone ID: TRIAE-23APR03-CLUSTER109_1
cggggttcccggcatgacaatgatggccatgcccgaggcgccctgcctctgcgcgcgcccgtccctcgccgcgcgcgcgaggcggccggggtcggggccggcgccgcgcctgcgacggtggcgacccaatgcgacggcggggaagggggtcggcgaggtgtgcgccgcggttgtcgaggcggcgacgaaggtagaggacgagggggaggaggacgagccggtggcggaggacaggtacgcgctcggcggcgcgtgcagggtgctcgccggaatgcccgcgccgctgggcgccaccgcgctcgccggcggggtcaatttcgccgtctattccggcggagccaccgccgcggcgctctgcctcttcacgccagaagatctcaaggcggatagggtgaccgaggaggttccccttgaccccctgatgaatcggaccgggaacgtgtggcatgtcttcatcgaaggcgagctgcacaacatgctttacgggtacaggttcgacggcacctttgctcctcactgcgggcactaccttgatgtttccaatgtcgtggtggatccttatgctaaggcagtgataagccgaggggagtatggtgttccagcgcgtggtaacaattgctggcctcagatggctggcatgatccctcttccatatagcacgtttgattgggaaggcgacctacctctaagatatcctcaaaaggacctggtaatatatgagatgcacttgcgtggattcacgaagcatgattcaagcaatgtagaacatccgggtactttcattggagctgtgtcgaagcttgactatttgaaggagcttggagttaattgtattgaattaatgccctgccatgagttcaacgagctggagtactcaacctcttcttccaagatgaacttttggggatattctaccataaacttcttttcaccaatgacgagatacacatcaggcgggataaaaaactgtgggcgtgatgccataaatgagttcaaaacttttgtaagagaggctcacaaacggggaattgaggtgatcctggatgttgtcttcaaccatacagctgagggtaatgagaatggtccaatattatcatttaggggggtcgataatactacatactatatgcttgcacccaagggagagttttataactattctggctgtgggaataccttcaactgtaatcatcctgtggttcgtcaattcattgtagattgtttaagatactgggtgacggaaatgcatgttgatggttttcgttttgatcttgcatccataatgaccagaggttccagtctgtgggatccagttaacgtgtatggagctccaatagaaggtgacatgatcacaacagggacacctcttgttactccaccacttattgacatgatcagcaatgacccaattcttggaggcgtcaagctcattgctgaagcatgggatgcaggaggcctctatcaagtaggtcaattccctcactggaatgtttggtctgagtggaatgggaagtaccgggacattgtgcgtcaattcattaaaggcactgatggatttgctggtggttttgccgaatgtctttgtggaagtccacacctataccaggcaggaggaaggaaaccttggcacagtatcaactttgtatgtgcacatgatggatttgcactggttgaggagggaacatagcataagaagtacaatttactaaatgggggcaagcccggaccagacgacatcctcaatcacgacttacattatcgcgatctcaccatatacccgatattgtctttcaaaagattcaggctgaggcagatgcgcaatttctttgtttgtctcatagtttctcaaggagttctattggtctacattggtgataataatggccacaccaatgggggcaacaacaatatatactgccatgattcttatgtcaattattttcgctgggataaaaaagaacaatactctgagttgcaccaattctgctgcctcatgaccaaattccgcaaggagtgcgagggtcttggccttgaggactttccaacggccaaacggctgcagtggcatggtcatcagcctgggaagcctgattggtctgagaatagccgattcgttgccttttccatgaaagatgaaagacagggcgagatctatgtggccttcaacaccagccacttaccggccgttgttgagctcccagagcgcgcagggcgccggtgggaaccggtggtggacacaggcaagccagcaccatacgacttcctcaccgacgacttacctgatcgcgctctcaccatacaccagttctcgcatttcctctactccaacctctaccccatgctcagctactcatcggtcatcctagtattgcgccctgatgtttgagagaccaatatatacagtaaataatatgtctatatgtagtcctttggcgtattatcagtgtgcacaattgctctattgccactcgcatccgatcctcctcggctgccgagacagcgacacggtcgacgccaatgccggggacggcagcggcggcgatgggtggcggcaccaaccgtgcaggctcgtcgcgctgcaccactgacagatacatgtgcaaactgcaaagtttctggtaatcagagaagtttttcctgaaaaaaaaaaaaaaaaaaaaaaaaaaaaaaaaaaaaaaaaaaaaaaaaaaaaaa

SEQ ID NO: 3988 - DNA, 885 bp, Triticum aestivum
  Clone ID: TRIAE-23APR03-CLUSTER110022_1
agcatccgggcaagaactagcgcgcgctctcgctctctcttttctctccctctccctctcaccaccagcagaccagctccgtgcgtgcgtgcgtacgtacgtgaccaccatgagctcctccggcgcccgcggtgtccgtcgagagtacggccggacctatgtggtgaggcccaaggggaggcacctggccaccattgtgtggctccacggcataggcgacaacggaaacagttggtcccaggtcctgggcaatctcccgttggataatgtcaaatggatttgccctactgcgccaacgcggcccgtagcggccttcggtggattcccatgtactgcatggttcgatgtggaggagacttctgttgacggccccgacgacgtccaagggctggacgcatccgccgcacacatagcaaacctgctatcgtccgagccctctgatgtgaggcttggtatgggcggtttcagcatgggagctgccactgcgctccactctgccgcatgttatggtcatggaaggttctcaaatggggtcgcttaccctatcaccctcagcgccatcattgggttgagcggctggcttccctgctccaggaccctgaggaccaagattgagagctcacagactgctttcaggagggctgctgccttgccgataatgcttggccatggaagaggggacgaggtagtcacgtataggaacggcgagaggtcgtccgagtttctgcggaactcgggcttttcttaccttaatttcaaagcctacaacggactgggccatcacaccatccctgaggaaatggacgatgtcttcaagtggctcaaggcaaggctcgggcttgatcgctcttgcggctaagtggagaagcttgtgccttggtggct

SEQ ID NO: 3989 - DNA, 1291 bp, Triticum aestivum
  Clone ID: TRIAE-23APR03-CLUSTER11020_1
aaaaccaatcgtacgctcgctcgctcatcaatttcagcagccattccacgaccgcccagagaagactcgcctcctcccgagctcccctctccgtcctcgtcgtctccctctcccgcttccccccacccaaccaacacgctacgccaggcgcgagaggcaccagcggccatgaagggcggcggagccatcaggagcggcggcgggggaggcggcgggctgatgcggacgcggctgcggctccccgtggtgctcctctcctgctccctcttcttcctcgccggcttcctcggctccctcctcttcacccaggatccgcagggggaggaggacgtggagcggccgctgcggagggagcggctcatggaggcggtctggccggagatggcgtacggggagtccggcgagcccacgccctccttgatcccttaccagattttgagctggcaaccccgtgcattatattttccacaatttgcaacagcagaacagtgtgagaatgtggtaaaaactgcgaaggcacggcttaggccatcaacattggccttaaggaaaggagaaagcgaggagactacaaaaggaataaggacaagctcaggcacattccttagcgccgaagaagatccaactggagcccttgcagaaattgaaacgaagattgcaaaggctaccatgatgccaagaagtcatggagagccctttaatgtccttctgtatgagattggacagaagtatgcttcacactatgatgcatttgacccggctcaatatggtccacaaaaaagtcaaagggtggcatctttcttgctctacctcacggatgtcgaggaaggtggagaaaccatgttcccatatgagaatggggataatatgaacataggctacgactacgaacagtgcatcggcttaaaggtgaaaccgaggaagggggatggcctcttgttttactcccttatgctaaatggtaccattgatccgacttcacttcatggaagctgcccagtggtcaaaggagagaaatgggtcgccacaaaatggattagagacagaggctccacgtcctaaatagatcaacacatacatagtaatcatttttttctacaccatcttgtacctgtacattacatttattcaatttccatcggccttcatgaaccagtgaggtaggggaaaaaacaacttgcagtttccatctgctaatttgacagtcgtgttagtctaatcttggtggctgggtcatgtatcttttcttttctacttccttcgtcccagaatatacctgaacttatagctt

SEQ ID NO: 3990 - DNA, 975 bp, Triticum aestivum
  unsure (1)..(975): unsure at all n locations
  Clone ID: TRIAE-23APR03-CLUSTER11034_2
agtattcctcggttttcccctttggctgcctgcctagccgaaaccgacgacgacgctaccactctccttcctccccttccttcaccgcgtctcctcccagaccaaatccaacccggaatcaacttctccccctccgatcctcttcctcccccttccctgccgcctccgccggcgagaatcgccgtcgcgcccgtcgctacgacctaggagccctccttcacgggcggacctcttcccggagccaccggagggcggggacggccggccagtctcgtcttgagccgcagtggaaatggctcagcttatatgtggtggttgccgaactttgctgatgtacacccgtaatgcagacaccgtgagatgctcatgttgcagtactgtcaatcttgtcagaccagtcaataatatagcccacgtgaactgtggtcggtgcggacaacttgatgtatccacatggagcaccttctgtcaaatgtgccatctgcgattatntcncaaatatcacaaatactggaataaataccatgccacccgcgccatgtccaaggcctacatcaaatgaatctgcatataatgcctcatcagcttctgttcccacacctcaaccccagaatgtaaccgtcgttgttgagaaccctatgacagttgacgaaaagggtaaactggtcagcaacgtcgtagttggaattacacctgggaaaaattgaagggttgtttctcacctgatgtatacctgttttgtgttctatataagaacctggaaagacccatgtactggtatttccagcctttggtgattggttgctgcctgacctggaagaacaaagacacataaagtgtttttttttttggaatttcaccaaggaaagcttgcatgtcgaaagctgtattctggatatgttgattcttttgtctgtatatgagttctatcagacttcactctgggcatgacaaaatggtattatacatattttg

SEQ ID NO: 3991 - DNA, 1734 bp, Triticum aestivum
  Clone ID: TRIAE-23APR03-CLUSTER11043_1
ccttttttggctcttcgggcacctcaagagagggcagcaccaagtcgcctctctcccccctcacccaaagctcccacctttcgcttcccctcctcctcctcctccgccttcccaattccccaattcggagcgcccgaggaattcggcgtcgatccgacgcgaccgaattcgccccgattcagctgctgctcttggttcgtacgtcctgctggccggcctctttgtctgtctcaactcgatccacgccgttgcggcacgcttcctccctgcggggtttggcctgtactgatctggcctggaaatactcctactctagtttcgcggatttttgtgttcggtcccatttctcggttttcccagtggttcgtgctgatctctgtctctgtgtactatcttctcctggcccgattgttgatgggatttggcctctcacgagtcggccagggagaatttcctgcttggcgaagcttctgctgaatttgctaaccatttccacgttttacttgggtctaagaaagctccagttttctccaaccaatcgctctgatctcttcttgtctagatctaatttttctttttgggtttggtgtcttaggtcttcacccaataggtcagaaattatcaaccatttcccgtttctctgctgaaatttctcttcatttcttgctctttctaccctcggttcttcctgatctgattgttcaagctcggggtttgtctcagtttgcttgatttgtttatccgtgtggagtcaaatggcgcacgagagctgtgatctcaacaaggacgaggccgagatcctgaagccatcctcctccacaccttcgcctccttccccaaccacaccaccaccaccaaccgctcaaataccagaaccgcaacctccacagtcgccaccacaaccaccggcagctcaattcttgtccaggccctgtgaagttgttcacatagagacttccaaaaagaggaaacatgctgatgcggtgtcaatggccatggcggctgcgccattgtcgcctgtgctgtttgttaaccgttgcaacgtgtgccgcaagagagttggtttgaccgggtttcgttgccggtgcgagaagctcttttgtccgcgccaccggcattcagaaagccacgactgctcatttgattataaaactgcgggccggaaggagattgcccgggcaaaccctcttatcagggctgccaagatcattaggatatgaggttcatctaagaattatatgaaagacttaaatcttggagatgctgcaagtgtatcatgctgtcattccaaggatgatccgaaagcatgaccactgccaacttgtgaagacattccccaaacaactaagctcttagtagcatacaagcctacattgagcaagagttggttgttgtgggagaatgcttcactcttgttcttcgtctggctatggttcactctatagcatctgaagctaccatgaacacagatgatagaacctatagtgtccagttgtaattctgttggatccaaagatttgttatattgtaatctttctttactattgttcaaattctacttaatgcaattgtgtgttactgaaagctcgtgtgatgtttagtgtgtcaggtcgatactgaagctactcagttctcgtacgatctgttgtaacatttcttgtagcaaataattttttctcaaggaagcaaaagatcttcctcatctcattaattaagcaaaaaaaaaaaaaaaaa

SEQ ID NO: 3992 - DNA, 777 bp, Triticum aestivum
  Clone ID: TRIAE-23APR03-CLUSTER11066_1
ccgcccattaacctccttaaggggaccaaaagcggacctcccccgcgtggccgccccttctgaactagtgaatcccgcgggctgcaggatttccacgagaacattccctggaacatcttatggaaaaacgaaccaacccagtccctcctacatattcagtcagtctttgcaaccaatcctcgccaaccagacgcaagcatgaggccacaggtgctgctcgccgcgctggccgtcatcgccgtcctcgcagcagctctgcctctcgcccatagccaaggcgcgacgctgtgctgcgacaactgcggctcctgcaccaggtccatcccacctcagtgcacatgcatggacacctcaccaaccgggtgcaacccggcctgcaagacctgctcgaggtccaccgtcggcggccgcaacagcttccagtgcaaggaccgcgtcgccaacttctgcaagacccgctgcactaacgccgcgtgattggacctgttgtcgcccgaataatgccgattagcttgtgcttttcctttattttttgcagtctttaagagttccctctgcatcttgatctggtagatgcagagaagaaatgagggttcgatgcatgctcatcattccttcttgtgtctgaaataaagagcatattctttgctcaaaaaaaaaaaaaaaaaaaactttaatcaaaaaaagaaaaaaaaaaaaaacttgcaacgagtagacccgaatagacctccgcccattggtcccgcccacccggtgtattcaaaggcgacgttaaaa

SEQ ID NO: 3993 - DNA, 813 bp, Triticum aestivum
  Clone ID: TRIAE-23APR03-CLUSTER110771_2
gatacgagcggagtgagcagttacgagcggagtgaggcgaggcaggaggagagatgagcggggacgaggttgcgaaggccaaggctgccgccgcggccggcggcggcgtaggggagtacgggacgttccacggtccgcccagctacccgcccccgcgcccgcccgtcgggtacccgcagcccgccccgccgcccggcctccacggccagcgagagcccaactcgcgccaccgcggcgggtaccaggccgggaacgctcaagatcacgaagcaggtgcgcgtggacatagacctgaccgccttccatgctgcggtattggcatgggctggtttctattcataatcggtttctttcttggtgccatcccctggtatgtcggagcatttctgttgtggtgttctagagtggattacagggagaaaccaggatatgtggcatgcacaatagcggctgtccttgctacaattgccgtcatcatcggggcaaccgctggagctcacgtttattgatgtcagtctacattgtgtcactgtacatattgtacatttcatggatgaagaaagatgtcatgtcgcgtcttctgcactgtatttgattattaactttgaaatattcaatgtatgacgaggagaaccaagtccttgttatggtcacaaataaatcagattgagactaccttgccttgtgcatgcttgggactaccttgccttgtgaatgctcaaataaccttgattttgaaaacaaatgatgtaacttcgcttggcgagcaacggctttcttatactgtactaacaatggctttcttgtactgtt

SEQ ID NO: 3994 - DNA, 1410 bp, Triticum aestivum
  unsure (1)..(1410): unsure at all n locations
  Clone ID: TRIAE-23APR03-CLUSTER11079_1
tttttaatcctttctctcctctcctctcctcctttgccgtcttgagagtcccctttttcccgtagtctcgctagctagggttttcgcccctaaaccaagaccccctctcgcagctatggcgcccgctggaccagcgcggatggggaaggacgggaaggggaaggaggccaaggggaagggcaagcaggcggccggctcctccgacgacgccggaggcgccaagggaggcaagggcaacgggccaaggggcgggcaagggcaggcgacggacctcggtcacctgtcaccttcgtcaaaagctagggcacgatgttgtgcgagaagcgaggggaagatcaatgaggcgtacaagaagctgcaggaaggctggttggacaacggggacaaggtccctcctgctgagtttgccaaggtagcccaagaattctctgaatgcccatcaggaaagaaaggtggggatcttggatggttcccgcgtggcaaaatggctggtcctttccaggaggttgcgtttaacacaccttgtgggagctactagtgcaccattcaagtctacgcacgggtaccacttcatcctctgcgaaggcaggaagaactgatatgaaagtatgcttcaggtttggaatgcaagcaccttgggataatgtgggatgcaaatgccccccattacttgtctgttgactcaataaccgttgtgcctggacatattaggtctaggtttagttcatgtcttcggctatatgctagtctttggctacatgccggtcatcggctctatgtcgggagggagatgccaggtctaggggcccggatctggtattgctttgtctctctgctccttgttgcgcgctcccatggacggagccagaggtgatgaggaggagagcacctgaaacctccaataataaaaaggttgttgtggtggagcttgggttctgggtgcctctccgcgatctcgtcgtcgcggtggcggaagatggagaggggtggtcgaatatgagttggagatcaccacatgacagccacgatctgccgccatgacctttggctgagaaggcggcctttccagacgcctttgagagcgtcatctcaacctcctccaagacggaggccctctgtgggattcccagcggcgcgcagcggccttcctctcccatgtggtttcgtccccggcgagaaggaggacggtcggcggtggagtccctgttgttgtggtggagaaggacttgattgcttttcgatgttactttttagggtcctttgtgttaatttccaggactgttgtgtaacttctagttctttcgggatcctgtttgtgtattgtactccaccgacgatgaacgaaagacagcactaggcccttctgggcctttcccctgttcaaaaaaaaagattcggcaattgtnaaaa

SEQ ID NO: 3995 - DNA, 2141 bp, Triticum aestivum
  unsure (1)..(2141): unsure at all n locations
  Clone ID: TRIAE-23APR03-CLUSTER1108_1
gctggccggcggtcgtcatgccactcagtcgcagtcattgagcagccgcacgtgcgcggctctgcctcatcgaactgctttatggatcccggtgtcgggtacacgctgccgcctcgcggcctttatcacagtgccgtttcccctcctccacggagattcccaactggcatgtccctgatcccgcgcgctgctccggcggcgagcatggcgttcgccggacgggaccccgctgtcatctccctcctcaagatgctaccgctgctcgtgctcctcaccttctcctccgccgcggcgcccccggcggcggcgtcaccctccgccgtgcacaacaacaactgggccgtgctcgtctgtacctctcgcttctggtttaattatagacatatggccaacacgctgtctttgtacaggactgttaagagattgggaatacctgacgagaggataatacttatgttggctgatgatatggcttgtaatcctcggaacaattatcctgcccaagtgttcaacaatgagaaccaccagcttaatctttatggtgacaatgttgaggttgattaccgaggttatgaggttacagttgaaaactttttgcgagttttgactggaagacatgagagcgctgtaccaagatcaaagcgtctcttaagtgatgaaggaagccatattcttttgtacatgactggacatggcggggatgaatttttgaagttccaagataacgaagaacttcagagccatgatttagcagatgcagtaaagcaaatgaaggagaagcatagatttaaagagttgttgataatggtagatacctgccaggctgctactcttttttcacagcttcaatcacccggtgttttggcgattggtagcagcatgaagggggaaaactcttactctcaccatctcgactcagacattggtgtttctgttgtggatagatttaccttccatacacttgctttctttgagaagctgaacatgtatagcaatgcttcattgaacagtcttttcaactcatacgacccttctatgctgctgtctactgcatattatcgaatggatctttacaagcgtgcattaaacgaggtcccagtgacaaatttctttggatcagtcatgaagactatccacactgattcagcctacacaggctttctagctgcacatgacgcggaactccccctttctgcaggaaataatatacttgatcatgtcatgtcacagaatgaggctagtgcaagaagatcgaacatagaagagatgaatgaggcacaattaatgtcccatggatggacagaggtcctgctagagcagctggaagacaaaaattctgatgttgttgtgatgtatggtctgggaactatgggcatattgctggcaatttgaacctggctatcaatgtaggaactctgaagtgtgctcttaacacatcatcttcttgcagaaaaacttagtcatactaactttcacaggatgggaccaagaagaatgaaaagaagagagatactttggcggtcaacgttctgtatttcctttttacctaatcatagcatccattcagtttggaacaaattgttgtatgtagttttcgcatggtaccctctactttttggatacgtagctcgatatgtttcgtagtcatttttatgcatctgtgctcctgcatcacatattgtacctgtcagattatttcattgctacttgaaaatatttccatgtagcaaaaaaaaaaaaaaaaactcattccggccggcggcggctcgcgaggggggcccccaactcgccccaaggggggccgttttctcccctttaattcaccccctttgacctccccgaaccccaacaaccaagggccgccccttgggggccgccccggcgccgctacccaaatatttttacccttgtcaccacctccccccctgtccccgcggggtgggttaaaaaaaaaaagaaaacccccaaaaatattttcctttccccaaaagagggcgccccccccagaagggggaaaagagaaaattttcaaacccttacatattttttgataaaacccccccgaaaaaattttttgtaaaaaaacccccctttttttttttaaacacgaaagtggggaaagaggcgaaaaatccccctan

SEQ ID NO: 3996 - DNA, 1272 bp, Triticum aestivum
  unsure (1)..(1272): unsure at all n locations
  Clone ID: TRIAE-23APR03-CLUSTER11096_1
aacacatctttgacatccccacgaccgcactcgagtagcagccaaagggcaacacatctttgacatccccacgaccgcactcgagtagcagccgcagacagatcttcctcgaccaccggcggctaaccgcttatgccggcctccgcccgcacccgcgtagcaggcgccgagagccctttcccgcccgccaccggcggctaagcgcatatggcggcctcaccggcaacatcgtccgcggccgcgagggcctccaccttcccacggctatcgaaggcgaccctgcgtgcgcccagagcccgccgccgtctgcggtccccgtgtcccacctgcgcttgtccgggcgcgctggtcgcggatgctcgggcttcctggctcccggttgtggccgcagccaccgaaaggcagccgaggctgatggggtcgctgaccaacaccgaggggcctcaggttcggcgtggttgtggcacggttcaatgagatagtgaccaacttgcttctgcagggggctttagaggcattcgagcgatactctgtcaaagcagaaaatatcaccgttgttagtgttcctggcagctttgaaattcctgttgcagcacagaagcttgggaagtctggaaagtatgatgcaattttgtgcattggggctgtgattagaggtgacacaacccactatgatgctgttgcaaactctgctgcttcaggtgtactcaatgctggattgtctgctggcgtcccctgcgtatttggtgttctgacctgtgatgacatggaccaggcgctaaatcgtgctggtggcaaggctggaaacaaaggtgctgagaccgccataactgctattgagatggcctcgctgtttcggcatcacttagcctgatgacaccgaatgctatggtcggcgagccagcaagattttctcccctgttcgcggctatcggagtttttcccccacatttgttttaaaatttcttttttcttgctgcaggctagtgtttgacatgtcgtttctaaattattttggtctgtacgtatgtactctgattgcctgttcgcctttgcccgcaagaaacttgcaagtttagagcatgaataaactttttttcctgcaaaaaaaagaaaaagacccgggggcccggtcgcttttttgcacacatgagggatcatgaaactcgcttgatcgatggaaaccganttggttttatcatccgtccaccccgagggggggccggaaccaatttccccttaaagaggcgaattaccccgttcttggccctc

SEQ ID NO: 3997 - DNA, 1159 bp, Triticum aestivum
  Clone ID: TRIAE-23APR03-CLUSTER110985_1
ccataggcagtgctatattggaaccgttccagagataggggagccataaaagttgggagtggtcccacacggaggtgggcgggccccctcttaagaaatgtaggtggtatcctcacggggggagtgccagggaaattcccggcggaggccccggtgtcgtgtggtagcattcctttggttcggaaaagccggtggtttttcagtccggggggttcaggcaggtattttttccccataggatgcatgtgggttcctcgcggggcggcctttttgtgtaagctggggcgcttagcgggcggaggccactgttgatgggtgcagcccgccctccggagctatgggtttcgaaagcggagccggccacttctttcggggtgggcccggaatctcagagtctcacacccacaccgctcggccatcaaaacttcacaaagatgccgaggtccaccagccgcctccttctgctcgcgctagcggcgagccacctgctgctcgccggcgccggcgccggctgcgggccgagcggcacgctccggccgagccggggccactcgtgcgaggactgctgcaaggccgggcaggcgtacccgacgtacacgtgctcgccgccggtctcctcgtccacccgggcggtcatgacgttgaacgacttcgacgcgggcggcgacggcggggacccgtcggagtgcgacggcgcgttccaccacaactcggagcgcgtggtggcgctgtccacggggtggtacagcgggggctcccgctgcggcaagagcatacggatccgggccaacggcaggtctgtgctggccaaggtcgtcgacgagtgcgacaccgtcaacgggtgcgcccgcgagcacgccgctcggtcagaacgggtgcgaccgcgagcacgccttccagccgccgtgccgcaacaacgtcgtcgacgcctcccaggcggtctgggacgcgctgggcatcaccggggaggaggtcggcgagtacaacgtcacttggtcagatgcatgacctatatatgtgcatggacgaatagagtgtacgcgcggacccaaaatgaataaacggaatttataagggccgcctatttaacagggctctgaaaaaaaaaaagagggggagcccctacgagggggaagaggaggaggaagaaaaggagaag

SEQ ID NO: 3998 - DNA, 1578 bp, Triticum aestivum
  Clone ID: TRIAE-23APR03-CLUSTER1113_1
gcttgttctatagcttggccgctcgggaggtcaagccgcccgcccgcccgtaaaccctatcttctcctgttccccttcgtccccggccggcgacgacgccgcgcgcgcagcgaacccagcccctcctccggttgcagtaagcaaggaaggatgagtaggcgctggagccggaccatttacgttgggaacctcccaggggatatcagggagcgggaggtggaggatctcttctacaagtatggacggatagttgaaattgacttgaaggtccccccaaggcctcctggctttgcttttgttgagtttgaacatacccgtgatgttctacttttgctctacggccgcggccggcgacgacgtcgcgcgagccgcgatcccggccccctcgtacagggtgggagtaacccaaacggaatggctgcagtacagctcgctgggagcggggagccattttacgttgggtaaacatcccgaggggcatatcagggagcgggaggtggaggatctgttctacaagtatggacggatagttgaaattgacttgaaggtccccccaaggccacctggctttgcttttgttgagtttgaagatccccgtgatgctgaagatgcgattcatggtcgagatggttacaactttgatgggaatcgtctgcgggttgaacttgcacatggcgggagggccaactcttcatcccttccgaacagctatggtggcggaggacgccgtggtggtgtctctaggcatacagagtatcgtgttctggttactggactaccttcttctgcatcatgtcaagatctaaaggatcatatgagaaaggctggtgatgtttgtttctctgaggtgtatcgtgagggtggtggtactattggaattgttgattatacaaactatgatgacatgaagtatgctataaggaagcttgatgatactgaatttaaaaatgcattctctcgagcgcctataagggtgaaggagtatgctggcaaaagcagccgctcctattcacgcagccgtagcagaagccgaagtggcagctacagcaggagtccgagtccaaagaaaaaaccatcacgccgttcagcgtcaagatctcggtcgagatcagtttcttcccattcaaggtcaccgtcaaagggacgctctccatcaagatcaccagcaaaatcccaatcccctgtcgctgcgtcccccgtcgtcaatggtgaagcagcaagccccaagagggacccaagcaagagcccatcacgttcccggtctcctgatgccaaatcagagtaaaacggatgcgaggctaggagcggtgagaggcggagccatggtcttcaaattcttcaaattttgtcttcgccaacttctgcatccgctgttatagtactatctctgtgttcggttattctaggttccttgatgtttctgtaaaaacttgtttggatggattcttgagatttatgtactctcttcattgtcagcatttttacttggattattatctatggtcgttggctcggaagatatttgaatacagtaacattgccgtttgtaatgctgaaaatataacctggatttgaggt

SEQ ID NO: 3999 - DNA, 1437 bp, Triticum aestivum
  Clone ID: TRIAE-23APR03-CLUSTER11158_1
agagttagggttccacttccacctcccctcctccctccccctccccccctctctctctccctcgccgtcgccctcgccgccgcccccgcaccgcacggaaccgcacgccggggaggtgtgcggattaggccggtgtgatgcggcagcttcgactacaagacgcctccgtcaggcctggagcgccccttctcaacgtcctggcacatcccccgcccctacacgacatccagctacacctcggcctccttccaagccaagcgcgacgccagcgacgcaaggaggcgcctcagcagcgccgagttcgcccatacctgggccaggccagccgccgactcgccgaggaatggggagcgggagaccaggcggcgcgcaaggcccacaagggccgatccgaggcccacccggaggccccttggtacccactttgttctcaaccgtagaccacttccgcacctaaggcgtcgatttcaagcggccgtttgagccctacggcaagattgcaaacattcgtatccgcaagaactttgctttcgtgcagtacgaggcgcaggaggacgccagcgtagccgtcaacaaggaccgacaagagcacgatattggacagggatagtgacggttgaatacgccttccgggatgatgacaatgaaagagatgacagacatggcagtcccaggcgaggcggtgacagatacggcagcccgagacgagggggtgacagatatggcagtcccagacgaggcggtgacagatatggcagtccaaaaagagctgaccagggcaggcgtccctacgtgcgctcccctagccctaggtaccgaagtccagattacgatcgccgtccacgtaattctgggtatgatcgccgcgatggagcaccctatggtaggagccgaagccctgtgtatgatcattatgaaagaggcaggagccccggctatggtcgttattagggtggattgatttcgaaggatcacaaaggaaggaatcccagggaggaaggagggtgcatacgctcagaccctttttgtccgtgtgctagaagagcgagggaagtgaagggcaatgcgatgctatttttttcatatcaacaccaccttgtgtatttgagacgaatagttcatatcaggtgggatcaagatgttttaagcgattgttggtcgaactggcatggatgatgtacgcggttacgcctcttaatggcctcttgacggtgaaaccctctgcatttcccacctgacactttggagaagtagtttgtttgtttgtttgttgggttgttcgggccctggatcccggtgtgggactggtattggtattggtatcccttccggttgtggtctgcctgccggttgtctcgccctaaattgttgtaacgcccaaaatatggttgagtggcaatggtttttgttaaaaaaaaaaaaaaaaaaaaaaaaaaa

SEQ ID NO: 4000 - DNA, 1341 bp, Triticum aestivum
  Clone ID: TRIAE-23APR03-CLUSTER11167_1
gagagctcgtaaacaacaacagtacgaacccaccctagaaaaaagcccatacactcgcaccaccgccggcgctgacctgccgtgcccaacatccgcctacttgaagtgcctcctgtttttgcttttatttggagcgtctcctccgtgctcagcgggctactgccctgcagcagatcccgcggccccgatgcctcctcccgccgccccgacgcctcctcccgccgagccgctgccaaattcgccagattctacctcccccacggaggaggctgaggcggatgcgggaggcacgccgtcgagggccgggccggtggggacagtaagctggggaactgggaccctcgtcggcgtattcaccgggcttctctacggcggggccaaggaggccaacgccaacgtcagcaaagatgctgaagtgatgttgaagatgggaagcaccacagacaagcgcgaacaatataggttgatgagagatgccatggagaaaaggttcattcgggttgccaaaggctcactagttggtggtgctcgccttgggatgttcactgcaactttctttggcatacagaaccttcttattgagaaccgtggggtgcatgatgtattcaatattgttggagctggctcggctaccgcagctgcttttgggcttatattgcctggttcaccaatgtggcgtgcaaggaatgtattggttggatctgctctcggtgccggaatttgctttccacttggttgggtacagttgaagctggcagagaaggccaatcttgagattgaaaattcaaaatcgccatcggatttacaaggcaatcaaagtcgtgtgggggctgctatagacagactagagaacagcctgaggaagtaacagtttgtacccatgcaaggagccaaggatctgttgtcaacacccatggctatttcgcttttgttttgttcatgtactttccataggaatgcggttacttttgaagtggtaatggcagcaagggaaactgtctcttgtatgaagataaatttggatacaaatacttacttgctggagctgggatatttctagttaaggtacctgtttgggtgtttgtgccattatgacctctatgatcagcattgtgcatagtattagtattcgtgacttctcgttagcttgacaatacctcggaaggatgctgccatctcttattttcttggaaagtttgtatcggtgatccatcacaaactatgcttgtttggtttgatgctcatgtatgctaaattttgccttggcagaattttgtcaaaaaaaaaaaaaaaaaagcttatcgataccgtcgacctccggggaggcgcccgttacccaac

SEQ ID NO: 4001 - DNA, 983 bp, Triticum aestivum
  Clone ID: TRIAE-23APR03-CLUSTER11206_2
atatttaatttgtttctagtttctacatttcgctattcacgaatctgagatgttatgctctagccatgatctgcgattcttctggctcctgcgagattgacaaaatacaagatacttttaatcaatggaagcaagcacctgaaaatacaggagagtatgtgcatcttaccagagaactgctaaccacctgtgagagcgtccaatggcaggtggatgagttagagaaggcaatttctgttgctgagagagatccagcttactatggactaaacgaggttgaaattgggaaacggaggaactggactagcaccgcccgcaaccaggtggtatcaatacggaggaatgttgaagctggaaagcacaagactgcctttggacgttcggtcaatccttccgaactaggcagatccaagcagcacatttctcaggataacgatgacttcattgcttcagaatctgatcaacagatgctcctgatgaagcgtcaggatgatgagttggatgcgcttagtgctagtgtccagcgaattggaggtgtaggtctcacaatacacgaagagcttgttggacaggaaaaacttctaggtgaactaagcctcgacatggaaactacctccaaccggctcgattttgtgcagaaaagagtggctatggttctgaagaaggccagcttgaaagggcagatcatgatgatagctttcttggtggttcttttcatcatccttttcgttttggtattcttgacttgagagatggagtttaagttgcgtgagtatttgccatcaggtgtataattgattcgtgtaattggggccggtatagttttgttcttcgggatctgcctctgccaagtaatatcaaagtcatttttcctgtaatatggcgaacttcagttgcatgtttaacgatatgtgttgttccccactatattcaatatagaaactcaccgaaagagaacagatataaaggaatggaactaccgc

SEQ ID NO: 4002 - DNA, 1683 bp, Triticum aestivum
  Clone ID: TRIAE-23APR03-CLUSTER1124_1
atcccgcccgagcatcgacgccccgccccaatccccggccgcgcgatccagccatcccaccgcagtcggtccgtgaagaaagctgcctccctgccggccccacaccaaccaactccccgcccccacacccgtggcacccctccggcgcccgcggtgctgattaagaggcgcgtgccggccggggcgaccaagcgagggcgcgcgaacccgcgcctgccccccgcgccgggctggtcggacgcccagcgcaaccggtcccatctccaccgccggcgcacgcaacaacaaggagaaacgcctccagggatgtgggtcacgtcgatgccgcacgtgtgggacgaggcaggccaggagccccacggccgacggcgccatcatgtcgcgcgcgcccgcggccgcgatgctggggtcgctggccggctggctgtcccgcgccgccgaccccccggcgcacaggctcggcggcgcgcccgcggcgcccccgggggcgccggcccccgtcccgataccctacggcccccgcatggccttctgcgagagcgccgctcccaaggagcgggcccggatcccggccggcatcccatgagaggtccactcccgccacgacgtgagcgaccggccgcccggcttctcggcggaagtggccgcggaggtgtacatcgtgccggatatgggcgaccagtgagcgctgcgcgtgtcacattacgcccctggcatcctccactggtcgatggccaagagctcgctgcgcgcttggattgtcgtggccctaaattctacgttcggcatatcccttggctgccatgctgtctggggcgccctcaagtacatccctgaaaggattgctggagctgcaatgatggctccggtggtgaactactggtggccgggcttccctgcggatctcgccgcggaggtgtacaacaagcaggaggtgggcgaccagtgggcgctgcgcgtgtcacattacgcccctggcatcctccactggtggatgcccgaggtccggctgcccacctccaccgtcgtggccggcaccaccccgctccccaacaagcgtgacgccgagatccgcgccaagctcaaggccgacggcacgttccagcagaagatggaactggcaacacagcaaggcatccatgagtcgtactaccgcgacatgatggtgatgttcggcaagtgggagttcgacccgatgagcctgccgaagccggcttgccctgtccacatctggcagggcgacgaggacggcctggtgcccgtggtgctgcagaggcacatcgccagccggctcagctgggtgaactaccatgagctccccgcaaccgggcatttcctgtcgccggtccccgggctaggtgacaccgttcttcagacccttttcggcaatgctaagcaatgatcagcaacagcaatagcagctctgaacatactacgttgctgaagtatagcgttcttccggtgcattgttttattctaaggtggtcaggtaatcgctgctgattagcgacgatgttataggtgaaatggtggtgtagcatcaagtgttttttgtggtggaaatcgcgcggccaggatgtgcgcgcaaaatatgtaattgaaccttggaagttagaaacgagaaagtagtggaactactatacaaaaaaaaatcttaccttttactccgtacttattttttgg

SEQ ID NO: 4003 - DNA, 2625 bp, Triticum aestivum
  unsure (1)..(2625): unsure at all n locations
  Clone ID: TRIAE-23APR03-CLUSTER11253_2
acgttaagacccaaacccttgtgctctccagacgcgtagttcatcgtcagtctccaccaaccataaataatcaggtagcagcacggatccgcagcggcaccagcgatggcagagttatcgtggctcacggcgctagggttcgtcttcctgaccttcaactccggcatggccgtgtaccgctccaacggcgacgccgggtccgtcatcttcgtcgccgtctcctacctcgacctcgtggccctcttcgcctgcctgcgcctctacgagcgcctcgaccgccactccccccgccgggagcggatcaaggccgccgtctgggcgctcaccacgctgctcaccgtcatgttcacctacaaggtcgccgaggtcatgccgctcgccgtcaagctcctggtctgggcgatggccgccgccaccacctgcggcggcttctacgtcttcttcgtccacgacgacaagccgtaccagcagctgcaggacgcgtcggccgccgccgagcgcggggacgtcgccaactagtggctatattanacggcggctgggcgctggcccgcgaggtacgtgcttcggtgctaacancggcgtcgggcgttagatntgggggcaaactattaggtcgttcctgtatcttggctgtttttcttccctttttttgccggcttgatgtcacatggtctgctttggcttgccggcgtgctcggattagcagatntggaatttggccnccggcagatgagatctgtccagtttgatgacgtgcttgttgatcaaattaataattgcgtgctctgttgagaagtgagtttgtgttaattatgattcccgattgggccatcaaattgggcgtgtgcccgccacgcggcccacaaggaggaagaaactgcgacagcttgaggtaagttgagtggattgcaattgtgtaagggctctatttgcatcaggaggagggtaggggaacggatgctgagggagtagacaagaaaccagagaaatccttagtgtgcaaaagtggatgatcccttggtacagaggtggtgtagaaactgcaaatagtttccttgaatttgtgtgaaaatagtgaattgtcgtgactagccaaagttgagatgatatgaagacagacgaactgcaggacaacatatgagcgaaacaagcagaggcataagtgaagattgcagatacaatggaaattcatctgcacaataagacaacaagctagaaatgttgtacttgttaagttgtctcatctgatgcacccatcagtggtttgcagtatgctgacgggaactatagattgaacatatggcaactggaaatttgataaacaaatggaaaaatattcaactgtatttgaggtatgagaccaagagtcgaaatcatttaaccattggtggcctcatcagcttgcaattgtttctgcactctcttaaagatttcagctgatttatgtccctgcttgtaaagagcggctgggttactgttaaccacctggatgaagatcttttcatggatcattcaagaaacttggcgaagtgcagagatccttcataccttcctcttgtcaagaaaatacaactaagacaataaatggacaattgttcaactgaatttgagatattgagatcaggggtcaaaatcattcaaccattggtggcctcatcagtgtgcaattgtttttgtactctcttaaagatttcagctgatttatgtccctgcttgtgaagagcagctggtttactctgaacttgatgcaaaagtatggatgctgggaatcatgaaggagattggagagccagaacttgatgcaaaagtattggatgctgggaatcatggattcaagaaaatttgcaaagtgcagagatccttcatataccttcaacagaatatgactagacaaggttgcgtgcagagactggagagccagaataataatgagtagggaagttgttcaagtcagaagaacaatgtggagagaactagttcatgtttgctgtttcggtttaccagcatacagatgaactgttcgtaatgaaaatataaccacagactaagacagctcattgataactatgtgtagtgggagctaggaaatggccattggaatatattatcagcagtaatggatgacacgtacaagggaataaatacaaggaaattacaaagctgcggatgttcaaagagaatgaaatatactacagctatgacgatgctgatgccaatgccaattccgatgctaattctttgtcacattatccggcaagccgacagcaaggtgagtttcaagggaagagaaaaggccaagatatactaacccctagttgcccaaaatctaatttgccgtcgctgttgcctgacgtatgtgctgcgctgtagcaagttcccagcctgccctattacgcgtttaagttgaataaattccactatctgcgagctataagttataacgtttctatgaactgtattatgtctatctatgattatattgtatgtcgttcatgtcggtcgagctctgactagttctcggaagcgttcttgatggtcaggttatgtattgcacactactggtgccaactctactatcatttgctcctcgttgtaatgctcatggtctgtattcagtacgtt

SEQ ID NO: 4004 - DNA, 917 bp, Triticum aestivum
  Clone ID: TRIAE-23APR03-CLUSTER11254_1
acgtccctcccggcctccctccctcccctccccgcccctgcccaccctggccgtcgacctcccgtcgtatttccatctccccgtccgttgcttccttctagacaccaatccttcttcctcacccgactgcccaacttcccggagcaagcgaattgcatcatgcccgcagtgatgaaagctctcgccgccgcctcgccggtctcggcgccgccatcgccccgtcggagggtcgcaggctccgcaggcgcgccgtgccaaagcctgcagtcctccttccgcggcatctccctgcggtgctgtcccaggaaaccggcccaccgctggccgccgctccgcagctcccgggcgccggcgcaggtggtggcgatgaagcgggcgatccgagttcatccagggcacggacgagcagacgatcccggacgtgcggctgaccaagtcccccgacggcaccaacgggatggccatcttcggggttcgaccagccgtcgatgttcgacgcgtcggcggagctcggggacatcacggggttctccaggatcgacgaggagggcctgctgcagtcagcggccgtgagcgccaagtgcgtcaacgggaagccggctagggtggaggcaaagtacgtgatgcgcactgccggtgattgggaccgctttatgatgttcatggagaggtactcgcaggccaacggcctccagttcgtcaagaactaggtctcatttcctcgatgggccttgtgtgttgcccatgttcagttcagtataactgtcgagctggtaacgaaggtgaatgattgtactgaggtgtcatgtgtatctcttatgtaactttgacattgtgtgaaattttgtatacaccagccaaaaaaaaaactcgagactagacctcggccgcgaccacgctaatcacttggggattcc

SEQ ID NO: 4005 - DNA, 777 bp, Triticum aestivum
  unsure (1)..(777): unsure at all n locations
  Clone ID: TRIAE-23APR03-CLUSTER11254_2
cctctgcgccagcgtccctcccttcctcgcccagccggccatggaagctctggccgtcgcctcgccggccgcggcacggccgcagccccgtcgacgacgcctcgccgcaggttcatcgtgccaggggaggacgagccagctgcacacctccttcagcggcatcaccgtgcagcgccggccacagaagccgctgccacaccggcgatcatcgacggtggtggcgatggcgacgacgtcgcggccgtcgatccagttcatccagggcacggacgagcagacgatcccggacgtgcggctgaccaagtcccgggacggcagcaacggggtggccatcttcaccttcgagcagccgtcggtgttcgactcgtcggcggagctgggcgacatcacggggttctacatgatcgacgaggaggggacgctgagctccgtggacgtcagcgccaagttcgtcaacggcaagccggcggccgtggaggccaagtacgtgatgcgcacccccagggactgggaccgcttcatgcgcttcatggagcgctactcccaggccaacggcctccagttcctcaagaagtagcagccatctccgtccatccaatccatcatcatcatccatgaataaatcttttgatcctttttcttctaccttttctttcaaggattcctgacagaaactacgtagctgctatctatagctgcattgagttcagtcatcnccgtgactgctgatttgtgtcagtgctctgttgctgcgtgccttattcatgctgctttctc

SEQ ID NO: 4006 - DNA, 2181 bp, Triticum aestivum
  Clone ID: TRIAE-23APR03-CLUSTER11262_1
gattgaacaccagtctgataccaatcagatcggcagcagcggcagcggcagcggctgcatctgcatctccgccccggctccaggatcccaccccaccccgccgcgccggccatgtctccctccggggaggtggtcgcttccgtctcctccgcgctcgccgtcctgctcgtcctcctcgcctgcgtcgagctcggcgacgcggccgccgccgtcggcgtctaccgcctcatccagtacgacctcgccggcgccccgctcggctcccgcgctgccgcgctcaaccaccacgccgccgccttcccgctccccgcgggggccgacctctcccgctccgcgctcgtcgcgccgctgctcgacctcccgctcgccttcctccgagagtacctggcagagaaaaaacatcttggagggttgctcattctgcttccgagaaacatcagcgctaaaaacgtatagggaaatcaaagatgaccagggggaaccaaagtatgtgctggctgagctagaaaagttgctcatgcatgaagaatccccgtttccagtacacttggcttcccataacgacaatttgtataccgtattggcccgttatgtataataaagggtccataggctagccagtcattgcttgaatatggaggaatacaaggattgtatgcccattcagaagagacctaaacaccaggatctacgaaaagctaagcaatctacaccagatagacctgtaattttcagaattaccctttgttctctagccaatgtgagcggcatcagattctccagggcgaaaacattttcttctgcacacaaggaattttgactgtaatttgttgtctgttatttgtttttttcatttctggctactgtgaagtagaaggcctatctgcataatcatcgtggcagtgtgttactatgttatgtatggatagacagcaccactctgcacccccaagtccgtactttggcactgggagctaccaagtggcttagaagtttcgatcagcgtgtacgcgagagtattgactatgcaatttgcttgaatagcgttggttcctggagcaatgatctctggatgcatgtatcaaagcctccagagaacccttacatcaagcaaatctttgaagatttttcagatgtctccaaggaaatgggcatttcagtcggcatcaagcacaagaagattaacgtgtcaaattctagagtagcatgggaacatgagcaattctcgaggtttagggttactgcgctaactctttcggaattgtctacacctcctgaatttttggaaagcactggtggtctgtatgacactagagaatcagtggatgttgagtcagtaatgagaactgtcaaattagtttctgagattcttgcgagacaaatctacgggttgagaggaaggaacattgatgtttttgctgacaacagcagcttagccatcagtcctcactacatccggtcctggttggatcttttttcacggacaccacgggttgcaccttttcttcagaagaatgaccccttcattgtagcacttaaaaaggaactgtccgagcatactactgatgtgcatgttcaaaatgacgtccttgatggcatgttcactttctatgatgcaacaaaatcaactttaaacgtataccaggttgcaagtgttactttcgacctgttgttccttctggtgctcggttcctatctaatcgttctcttcagtttcctagtaatcacaacacggggcctcgacgatctcattaacatattccggcggcctccatcacgtaaagtcaagggagcataggctagatcatcatgttttgtgtattagtaacgaggagaagtgcatgcctagttagaagagcgctagacaccaggatttacgaaaagctaagctttccacaacagatagacctgtaattttcagaattaccctttgttctctagccaatgtgagcggcatcagattctccagggcgaaaacattttcttctgcacacaaggaattttgactgtaatttgttgtctgttatatttttttttcatttacggctactgtgaagtagaaggcctatctgcataatcatcgtggcagtgtgttactatgttatgtatggatagagagcaccactctgcactcccaaaaaaaaaaaaaaaaaaaatgagatgcgaaaaaaaaaaaaaaaa

SEQ ID NO: 4007 - DNA, 1728 bp, Triticum aestivum
  Clone ID: TRIAE-23APR03-CLUSTER11266_1
ctctttatccaccctatccaccccatccaaatcccccgattcctccaaccctcccagaccgcaatggccgccgccgccgccggccagccctcctccgccgacagccgccgctacgtcgtcggctacgcgctcgcgcccaagaagcagaacagcttcatcaagccctcgctcatctcccgcgcggcggcgcgcggcgtcgacctcgtccccgtcgaccacgcgcggcccctcgccgaccagggccccttcgacctcgtcatccacaagctctacggccacgactggcgcgcccagctccaggccttctccgcccgctacccctccgtccccgtgatcgacccgccccacgccatcgaccgcctccacaaccgcatctccatgctccaggtcgcctcctcgacgtcccgctcaccgacgccgcctccgcctccgctgacggcgaaggccaccgccacaccttcggcatccccagccaggtcgtcgtctacgacgccgccgcgctcgccgactcgggcctcctcgccgcgctccgcttcccgctcatcgccaagcccctcgtcgccgacggcagcgccaagtcgcacaagatgtccctcgtctaccaccgagaggggctccgcaagctccgcccgccgctcgtcctgcaggagttcgtcaaccacggcggcgtcatattcaaggtttacgtcgtcggcggccacgtcacctgcgtcaagcgccgcagcctaccggacgtctccaaggagatcctcgaggacgccgccgccgagggcaccatctccttctcgcaggtatccaatctccccaatcagcgcacggccgaggagtactacgaggacatgcggctcgaggacgccgtcatgccgcccactgatttcgtcaacgagatcgcaggcgggctccgccgtgccctgggcctgcagctcttcaacttcgacatgatccgggatgttcgtgccgggaaccggtatctcgtcattgacatcaactacttccccggttacgcgaagatgcccggctacgagattgtccttactgatttcttctgggatatggttcacaaggacgacgtggccctcaaggaggaggagcagcagagcaatcatgctgttgtgaaatgagatggatttgctcggcatagcttgctcgcaaacctgcaattctttcatgtctgggggaaatgtgaggtggcaggatggttacaagactcgaggggaataacgagcaaccaattaggatggggagatggggattaacaggttctggatttacttgggtttcaaccagccgcaagcggaggacctgcaatgtaaatcctctctccttgctcctgtcataccggttgtttaggtatctttctgttcttcgtaatttgcttcacccagtttagttagaacaaaagtgggggaacggaagccaagttctgaagaaggtatatttgttctggatgtgcaaatcttttgttcttgatgagtaccggatcagtggccaccaaaccttagtggtactaaatgatgaatatgtttccaatgatactggaggtctgagttttatcacctcctcgaaagaaaggggttatgcaattctctgaacttttagcatttgaaatgcaaacttgagtcagctctgtctgtggcactagttctatcatccaaaactgaattttacatctttgatcagagttaaatatgtacatgtacctgcaatgatgtcatttaccctatgctt

SEQ ID NO: 4008 - DNA, 1711 bp, Triticum aestivum
  Clone ID: TRIAE-23APR03-CLUSTER113898_1
gagctgcctcccactcccccccgtgccctcttcccgggccgccgcccggttccaccgctctcccccgcccgccgtggtcgcccgggtctcagcgacgatgtctcccgcctccgcgcgcgccctcaccgtcgactctctgaacccaaaggtgctggcgctcgcggatcacctcgggggcgccgtcgcccgccgcgcggagcgcatgcaaaaagagctagaaacaaatccaggtttataccctttcaatgagataatctattgcaaccttagcaatccacattatctcggacaacagccaattaagttcttccgtgaggttcttgccttgtgtgattacccgcatcttctaaactgcagtgtaactagttccatattcagttctgatgcaataacaagggcaagggagattctagacctcattcctgggagagcaatgggaggatacagccactgtcagggtactgaagggttgcgaaatgcaattgctgctggaatagccactcgtgatgctttcccatgcaatgcagaggacattttcctgacagatggagcagccgcgccggttcatatggtaatgcacctgttgatacgagatgaaaaagatggcatcctttgcccgattccatcacacttcctttatacaagctcaatggctctgtgtggcgcaactcttgtaccatattaccttgacgaatcaggaggttgggccgtgagtatttcgaacctgaagaagcagctggatggtgcccgatctgaaggcatcactgttaggggacttgtggttgtaaatccaggcaatcctactgggcaggttcttgtgaaggaaaaccagtgtgaaatagtggaattctgcaggaatgaaaaccttgttcttctagcagatgaggtttaccaagaaaatgtttacacagatgaaaagaaatttatctctttcaagaagatagcacggtccatgggttttggtgaagaagatatttctttaatatcattccattcagtttctaatggatactatggagaatgtgggagaagagggggttacatggaggtcactggcttcaattctgaagttcggaaacaagtatacaaagtggcatccctaagctcatgctccaacttagccggccaggttctcgtgagcctagtcatgaacccaccaaaggttggagatgagtcatacacctcttaccgggaagaaagagatcgcattatgttatcgttatcccgatgtgcagaggccatggtgcaggcattcaacagcctggaaggcctgacttgcagcaaggctgaaggggcaatgtttgtatttccatctgttcggctgcctaaaagggcgattgcggctgctgaggcaatgaacgccaagccagatgtgttctacgctctccgccttcttgaaaacactggcatcgtcgtcttgcctggttctgtgtttggacaagtacctggcgcatggcatttcagatgcacaatcctgcaacaggaggagaaagtacaactgataatctatcgctttaaggcgttccacaaagctttcatggaagaatttcgcgattaaaagtcgccagcttattttatctgtagcacaactttagaagtccggacagaaaaaacatgagctttgtaaactgtcagttacatgatttatgtctggaacaattgagtttttcctttgtatcattctgaagttaatctaaaacttatcctttgc

SEQ ID NO: 4009 - DNA, 1397 bp, Triticum aestivum
  Clone ID: TRIAE-23APR03-CLUSTER114084_1
aagcagcggcactgccggcgacaccctctaccgtcacggcgtcgcgcgcgaactggttttcgtttccttcttatctcactcctcacccgagaccctcacaatcccctcacccaatagaagaagcggcggacttggcggcgatttggatcgaggcggcggcgcgattcggcttggattccggcgcaacggagcttggacgggagacactcttttgcatcctctgtttgtttgcaacttctctgcttttctcaaggtcagcagctgaccagaggaggctgggagcattagtacagcaaccaattcgccgcaggtggaaggtcttcttctcggttgatagcactcttttggtgccgatgagcaagaagaacaaacctgaaaagtcaatcaagttgctgaaagatgctgaacaaacagtaacttcagattacatcacaggagattcccttgatgaactattgtcgaaacttatcaggagcgtggagtctgccaaggcttcaaggggaggtttgccagaaaagatatggatgaaacaacaattttctgttggggtcaaagacgttacaatggttctccagcgaatgcctgctgctgctgcttctcgttctggctgttccactgaagcaccgaccagcacagctaggcggagagctcctttggtgccacttcaggctgtcattatagccgctgattgcaatcccaaatggctaacaaagcacataccaaccctggcaagcacaaggcaagtccccgtattgtgcctcaaggacaacaaaggaagctcgttgaggttaggtcaagtggcgaatgtccgaacagcgctggccattgggataaaggccaaagacagcataatcaataagactgttgacgaagtgctgaaggattattataagccagtggccgatgaacagtaaattaccccccattcccagtccagtggcatgatgagctagatcttaacctctgtgtgctcaacattacaagaacatctccaagggggaggtttccttttttgcggggaccatgggagggtctctgaatgttgtcgaattgtagtgcatcagtctaatctcaagacttttgggtgacatcttttgctggcaaaactcatgaagaataagcctgtagctgtggctggtctgtcgggttggtgcagttcggttgaagaagatgtgcctggaacagcattttctaataacactgcactgtaccacaatgctgttttattggtcgctgatgctgagtttttccgtatgaattacgcgaagcaaagcaatttgcggaaatcatttttgttcgttgtggagttactgatgattaatccagtttcatgttaagttgtatattagggatggatgattttctgacaatgtgaaggcagaaactaagattatgtt

SEQ ID NO: 4010 - DNA, 1025 bp, Triticum aestivum
  Clone ID: TRIAE-23APR03-CLUSTER114832_1
aaaaacccctcctcccttttagcatcgccggcagcgacgacggccatgctctccgccgccgcctcggccattcccaggctccgctgggccgccgcgccgccggggcacgcctcgccgagcacccggtggtctctgctgcggcggcgcccgctctcctcctccccgaacgcagcgcccaccgtggggccggggcccctggagccgccggaccttccccgcctcgccaactccgcccgcatatctctctcgccgcaagaggctgaggagttcgcgcccaagattcagcaggtggtggactggtttgggcaacttcaagcggttgatcttgagtccatggagccttcacttagagctgatactgcagctggtagttctttaagagaagataaggcggaaccatttgctaacagagatgccataatagaggcccttccgagttatgatgatccatacatcaaagtgacaaatgcgctgaccaaagaatgacatgtgggtctgtaaatcaaagttatgatattgttaacattctatttcattatacaatgaggcatggtgaatcaactgagcttgcaaagcatcgagcgagcaatcaacaagcctgagttaagtttgacatcctcggctagaacagtacgactcaacaatttgagcgatggatctgcagtgcctgcaacagaagatccatccttgcgtgccatcatgctttcggaccaaatacatgtcattttcttaatatgcttttatttatgtttctggaatgtgggggcttctagcgctatcactatgcctcccaaacggcgataggtttcatgtgatgctatcacctggtaatttgtcttcagtttgttaatcctgtaagttttctgggttaggctgaacctcgggacttatcgtgctttctgtttgagttttctgcaggttttagctttttaatcctgtaaaatattctgggttaggtggaattctatgtttcaattttgcattggccagatcatgttcccgtacctgcccgggcggccgctcaa

SEQ ID NO: 4011 - DNA, 1963 bp, Triticum aestivum
  Clone ID: TRIAE-23APR03-CLUSTER11531_1
gcccacctccacagtcccccccccaccccctgccccccccccccccccccccgctcccgcgcccggcgccgccacctcgccgatgcccgccgccacccccgccaccccccccctccctttccctccccaccgcccccccccccccccgccccccgtccagcagccacccccccgcccggcccccccccggcctgcccgccccgcccgcgacgccgccggccccccgcccgccgccgccaacaagcgccggcgccccgcggaagaggacatccgcgaggaggccgcgcggcaccgcgggccggccaacggcttctcggcctggtacgagcccttcccccctggccccgccggcgccccccacacgcacgagccgtactccctgggcgatatcctctacccctccagctccggcgtcctccttcacgtgggctacgacacgcccgcccgcgcgcggggcccctggtgcggctgccgcgacctcttcgacgcccgcgtctccagccccgcctggccctccggctccggcgtctggtccaagaaggagttcgtgctccccgggatcgacccggaccacatcgtctccctcttcgagggcaactccaacctcttctgggccgagcgcctcggccgcgaccacctcgccggcatgaaggacctctgggtcaagcactgcggcatctcccacacgggttccttcaaggacctcggcatgaccgtgctcgtcagccaggtcaaccgcctccgccgcgccccgctctcccgccccatcgccggcgtcggctgcgcctccacgggggacacctccgccgcgctctccgcctactgcgcggctgccgggatcccagccatcgtcttcctcccggccaaccgcatctcgctcgagcagctcatccagcccatcgccaacggcgccaccgtgctctccctcgacacggactttgatggctgtatgcggctcatcagggaggtgactgccgagctgcccatttaccttgccaattcgctcaattcgctcaggctggaggggcagaagacggcagccattgagatactgcagcagttcgattgggaggtcccagattgggtcattgtaccgggaggcaatcttggaaacatatatgctttctacaagggattcgagatgtgccgtgttcttggtctcgttgatcgtctgccacggcttgtctgcgcacaggccgccaatgccaacccgctgtaccgctactacaagtcagggtggacacaattccagccacaggtggctgagccaacatttgcgtcggcgattcagatcggtgaccctgtatcggtcgaccgtgcggtggttgcactcaaggcaacaaatggcatcgtcgcagaagccacagaggaggagctcatgaacgcaatgtccctcgctgaccgcaccggcatgtttgcctgcccgcacaccggggtcgctctcgcggcgctcttcaagcttcgggaagagggcaccatcggggcaaacgaccgcacggtggtcgtcagcacggcgcacggcctcaagttctcccagtccaagatcgactaccatgatcagaagattgaggacatggcctgcaagtacgccaacccaccggtcagcgtgaaggccgacttcggcgccgtcatggacgtcctcaagaagaggctcaagggtaagctttgagcatgccctcctgctgctgctgctgacccctccgattggctactgcgattcgattgtcttgtgcatctgattcaaatgtgattggtttgctgtgtggagcattcaaacccttgatttgaaatcttgtaggtgagtgagactcttgtaggcgtgtcggcggggaatggttagggggtggggttgattatctcttgtaccgtgttgtgttctatggataataaacggttgtgttgtgttgctgttcattgaataatcaatcattcagtctgtttgctccaaaaaaaaaaaaaaaaa

SEQ ID NO: 4012 - DNA, 1551 bp, Triticum aestivum
  Clone ID: TRIAE-23APR03-CLUSTER1158_1
tagagccgctataagccacacaaaccacacacacacttcttcaacctctcggcgctccagtcctttccgcctcactcccctcgcgcttcctcctccgcctcgtcgacccggtcccactcgcggcatcctccgccgccgcgccggcgcagcgatggcagcccgcgccccttacttcgcccccgaggaaggcgcgcggggcatccgcccaggggagtcacctgccgcggcgctccgccggatcctggcgacgccaggcgctcaccaggcgccctgctgcttcgacgcgctcggcgcccgcctcgtcgagcgcgcggggttcccgatctgcttcatgggcggtttctgtgtttctgccgcacgacttggattgccagatgttggattaatctcctatggagaaatggttgatcaagggcgtctaatcactgaagcagtttcagtccccgtgattggtgatggagacaatggttacggaaattctatgaacatcaagagaactgtaaaaggatatattaatgctgggttggctggaatcatgctgtggcaccaaaagcatgtggacacactggacacaaggaaagaaatctagtcatctcgagggaggaagcggtcatgcacatagcagctgctatagacgctagaaaggagagtgcctctgacattgttattgtggcgaggacagattcccgtcaagctgtttctcttgatgaatgcattatggagagttcaggcctttgctgatgctggagcagatgttctatttattgatgcccttgcttcaatagaagagatgaaggcattctgtgcggttgcacctggagtaccaaagatggcaaacatgttagaaggtggtggtaaaactcccatattgacccctgctgaactcaaggagattggttttagccttgtagtctatccgttgtccctaattggggtggcaatgcgtgcaatggaggatgctctactcgccataaaaggtggtggcgtacccccacctgccagcctgccatcttttcaggagatcaaggatactctagggttcaaccgctattaccaggaagataaacagtacactgtcccgcaagccgagccatcaatgccaactggtaacccgtagaaaggagcgaccctgttcaattctcaggagctatatggaaatgggatccaggtgtccactgagcgatcagtatccatttgctttcgagaatttgagatttgtgcctccgggcaatgaggcagagcaatcgcgtttatcctgaggcagacgattttagcaagttgtaaatgaggcggtgtgacgaaatgtttgtaaacgatgctgcttttggtgtcagcaaacctggattcttggtgtcactttcaataaaataaaccaactttgaggtagttgagaaatgtttctcaccagtgtttgtactttgtagtaagttgaagtaaaatagtaagaattgtcggcatgacagatttctttggcactaaaaaaaaaaaaaaaattactcgatttaaggggggggctctttaaaggatccaatctaaattacgcgggattgc

SEQ ID NO: 4013 - DNA, 1117 bp, Triticum aestivum
  unsure (1)..(1117): unsure at all n locations
  Clone ID: TRIAE-23APR03-CLUSTER115926_1
ttttttttttttttttcgatcttnaatcggatttttcattaaaaagataaaacagtttaaaaactggaaattcaaaaaaaaaaatctacattcattcatgcgatgacgtgacgtagtctgggtgttatagggcgcgtgggcgttatgagcgtcctttttgttttcacattcgaggaaataagtaggcagtgtatattgcaccgtatatataacatcatgggtgaagtttatataacggaaactgggagtgtgaagcaggcggctgaaagaagctccaaacatttgttgcacaatgtgcaaatgctcgccgcttatttatccatcatggataatccatggcagaagcttaagtactagctggaaggctcggaacaagtgctgctctacgccgagagctgctcacggcgagccttgttgagcgccaggagcttgtccctcgggggcagggtctccttcaccacgtcgacggccaggaaccggccgaaccaggccttcatcagaggcagctcctcgtcggtgaccacgtcggcgccggagacctcctcgatgatgggcagccaatacgcgtaccacccaaccacgacgtcgaggtagccgacggcgtcgcccccgaagaacttcttcccctccagggccttctccagcgtcttcaggcaccgctgggcctcgcgcaccacctcgcgctgcgcctcgccggtcgccgtgaagaccgggaagatggcggcgttgcacttgtcgtcggcgaacctggcccagaacctcgcctgagcccggtcgtaggggtcggccggcatgatggggtagccgtccttccacgcctcgtcgatgtactcgacgatgatggtggactcggcgatcggcttgccgtcgtggaccagcaccggcaccttcttggtcaccgggttgtggcggagcagcgcgtcgctcttgctggcgaggtcctcgtcgacgtactcgtacccgacgcccttcagccggagcgcccactccacccggatggccatcgggctcgcccacatgccaaacaccttcactcccttctccgccattgttggacctccgtgctgcttgctgctttgatgttgatccctcttctgctcgtgagctataaaagaag

SEQ ID NO: 4014 - DNA, 1399 bp, Triticum aestivum
  Clone ID: TRIAE-23APR03-CLUSTER115984_1
ttttacccgcctgcgcacccttcccccccaggagctactattagccatgacgatgatgattctttcatacgagcgagtaaaccccaaaaatttgcagacggaccacctctggtgttgggggcttgtgttcagtttcttcacgaggattcaagtctccaccgccaggccgctgccgccgctggagaggctcgcgctcgtcccgtcctgctccatcatcaccgccttccgcttcctgctgccgccgccgcagtcactcgtcattccggtgctgctcactttggccgccacttcctccgtcggctcggctggcgcttgccccgccggcttcgcctcctcctgctctgcccgggccttctctggctgcccctgctctgacgttgcttgtggctgccctcggggccgccgctggggctgggcctgctcccgccgctcccgccgccccctgggctcctgccgcgttccattggttaattttatttataatagggtcgataagactgtcacatgatacctgctgatcctggcaggcacattctcagacgacatgatcaccactggaatgtccttcaatgaagatgaccccttgaccctcctcagcagatcgtatcctgtcatgccaggcatgcagtagtcagtgatgatcaaattcacgcccacctcctggtggtggtcaggggcggaggaggaagggggtgaggaggaggaggaggagtcgtccccctcgtctctaagtcccaggacctccagcgccttgctcccggagtccaccgtggtgacttggtaggaggaggtcctgagcagcatctcgatgagcttccggtcgatgacgctgtcgtccaccgccaggacgtggaaccgggtctcggcgtcgaccaccgtcatggcgcgcgggccgggctgggagcaagaaccagaggaaccgagccaatccgcacggaggccctctcaatctctctccctctcctcgagctcagacagagacagagtgggaggaagagggaaatctcgccgatctctccgccgtcgccgccgccggagggaggcttggattggtgaagattggagggggagacgggggagtgcgttggtggctaatgcggcatctcggggcagggagggggggctacggggaggatataggcgggggcggaggacatcattgattcacaccatggcagcacccaccgcatcaccggcaccaccgccacggcctcttcccgggaaagcgggatccgaccagatcacgcacccgaatctccacagcaaatcgcctccatgacttcccctttatctcctcctcgtggcctctctctctgtcccggtggtggtggtgggtttgaggagggagcgctctgttctgttcttggctttggaaccgggcggacctcgtgccgaattc

SEQ ID NO: 4015 - DNA, 1507 bp, Triticum aestivum
  Clone ID: TRIAE-23APR03-CLUSTER115_31
tttttttttttttttaataaatttgattcttcatggaaaaaagtaatccaacggtaagcttgacaaggcggtctgacatcgtcacataccacccgccacgactgctccaatcacagtgccatgggcatcggatccattcctttcgtgagctttgtctagtgtgtctgcttatccctagtttgtttttgggacgacggctgtctttgcgagccgtcggatgccctagctcctggctgtaggatcaccagaatcagaatggcatgccaatacatagctgaaggatttcattcatccatggatgcttctttgtaattactagaagtattactactctgtcagttggtctctttcatggccggctttgccgaggcgggaggggccgggaggacgcccttctcctggaagctgacgacggtgtcgtagaggcactgcgccaccggcgtgaactcgaggcccagctcacggagccgcttgttcgacatcttgtacggctgcttactcgggttcacctcgtcagagcacctgctggggatggggtactcggggaagaacttgcggaggatggtgacgacgtcctcccggtggagcacggcgccgtcggccacgcagaggtagcggccggcggcagcgggggactcgaagacgaggacgtgcgcggcggcggtgtcccggacgtgcacgtacgcctgcacggcgttggcgtacgtcttggcggagccgtccaggtacttgagcacgtgcgtcaggctggcgttcaccgctggctgcagcgccgggccctgcaccagcaccgggttcaccaccaccaggtccaccccgcgcgccgccgctgcctcccacgcctcccgctccgccaccgtcttcccgtagcagtaccagttcttggtcttcttgcagaactcgaggtcgctccagcacgactcgtcgacgacggcgtccgggccgcggctggggtccatggcgacggcgccgatggacgacgtcagcacgacgcggcggaccgtgccggactccgccgcggcgtcgatgacgtagcgcgtgcccctcaccgccggctccaccatctcctcgggatcgtcggtaaccggcgaggcggtgtggaagacgccgtggcagccggcgatggcggcgcgcagcgcgtcgccgtcgagcaggtccgccttgcacagcaccagccgctccgccgcgccggcgaggcccctcaggtgcgcgttcttcgcgtcatcggggttcctgacggtgcctcgtacggcgtaccccttctcgagcaggagcttgacgatccacgacccgatgtagccgccggcgccggtcacgcacaccgtctgcccgtgccccatggccgtggctgtggcctcgccgccgacggtcatgctggctccttgctggggcgtacgaggcggtgcggcacaaagatctcccctccggtcggttaggtgaatgaatagatgtgttggcgatatcaactagtcaggcagatgagaacaacgtatgcgtggggagcgct

SEQ ID NO: 4016 - DNA, 1131 bp, Triticum aestivum
  unsure (1)..(1131): unsure at all n locations
  Clone ID: TRIAE-23APR03-CLUSTER11609_1
atctcactcccaaacccccactcatctacacttctatccacaccgtcgagctgcgcacgcgcgcgccctccgctccaccgccatggcgtccatcaccctcctctccctcgctccagccgcgaccttcctccacctcccggcctccaccgcctcctcctccccccacttcgccgccattccccgctccctcgccggccgccgggccctcctcctccgcgcgcgcgcgccccgccgcgtcaccgtcgtgtgcagcgccgcggcggcggccgaggcctcggaggcggagcccgtggagaagttccggctcgacaacctgagcccgcagaagggggcgcggcggaagccgaagcggaaggggcgcggtatctcggcggggcagggcgccagctgcgggttcggtatgcgcgggcagaagtcgcgctccgggcccggcgtccgccgagggttcgagggcgggcaaatgccgctctaccgccgtcttcctaagctccgcggaatcgccggcggaatgcatatcgggttgccaaagtacgtgccgttcaatttgagggacatagtgcagggtgggttcaaggatggcgatgagatttccttggagtccttgaaatcgaggggcttgatcaatccatccggcagggaaagaaagcttccactcaagattttgggagatggtgatctatcagtcaagttgaacatcaaggctggggcattctcctccgcggccaaggagaaacttaaggcagctggctgtactttgacagtgttacccaagcggaagaaatggctaccagcagcttatgtgaagaaccaagctcgtgctgaagagtactttagcaagaaaaaaggcggcgctgttgaatctgatgaagccaccacatagagttcatacacactgtacttctctacccttctctttagcatatgttcattgctcccatctcatttcagaactaccatgtcagatggattttgtgtttatgtgatataagcaagtatattgtgcccttattttaaaaaaaaaaaaaaaatgcaggggccctgttgtaaaccgcttacacgaaaaaagaacgcccacngcgtccnttaaacncntgactggaaacctggnttncaactaacncttgagnaanc

SEQ ID NO: 4017 - DNA, 1438 bp, Triticum aestivum
  Clone ID: TRIAE-23APR03-CLUSTER11633_2
gcaggaattcgcacgagaccattacctagaacatcctaatcgaaaaaagacaacatccggtagtagctagagcaacaaggacgaattaaacaacaacacaactactcttaggaatggccggcgaggaggagatgcaggtggtggagtcctgcttcgtgacgccggtggcggacgcaccgagcagggcgatccggctctcgccgttcgacctcatgctagccagcagaggctacaccccactcgtccacttctaccgcccaccagaaaccgtgggcgacgacttcttcgacgtgacaaggttgaagacggcgttgggcaaggcgcttgtgcccttctaccccctggccggccgcttgagggcgggcggcgacggcaggttggagatcgactgcaacggcaagggcatgctcttccttgtggctcagtctcgtctcaccatggatgacttcagcgacttcaagccatcatcaaagcagaggaggctgtttgttcctcatgtcagcgactcagatggcctcttatgggcaacccaggtgacattcttaaagtgtggtggggtggtcttagggtcggcaatccatcatgctggtatggacggatctgttgtattccacttcttaaggacatgatcagctttctccagagacggcgaccgggctatggtgaacctcccctgccatgatcgctcgcgcttgtctgcgcgtgatccacctgttgttcatccctatgctctttccatttttagccccaagataaacctacccccacagccagggctggtcgtcaacgaggttgtagccctcacccttgccaaggaccaactttccactctcaagcacatatctggtggcgatggcgtgagcaccttcagcgccttgagcgcccacctgtggcaatgcatgtgtttagcccggcagctacccccggatgctacgacgcagcttatgttctcggccaacatccgccgcatcatgaggccaccactcccagacggctacttcggcaacgcgataataaacctaagtgtcggcgacaaagcgcgtgcaatcgcctcgcgcgagctgagctacattgcgcggcgaataagagacacccacagacggttgaacgacgagctagtgcattcagcaatcgactacctcgagctagcaaagagggacgacgagcgcccgactacaggcaatttgccggtgactgacattagagttgtcagctggcttggcatgccgtcgtacgatgcggatttcagctggggaaggccattggctatgttccgtgctgaaccaaaccgcggaggttttgttcacctgattgacagcgcacagggtgatggcagtgtgcgcatcatcatgtctatagaggctgcaattctcagcgagttgaagcgtttgttgtatgccaaattcgacaccatgttgtattctaagttttaacctac

SEQ ID NO: 4018 - DNA, 1458 bp, Triticum aestivum
  Clone ID: TRIAE-23APR03-CLUSTER11653_2
acgacaacactagccagtgaaattactgaaaagctcataaaattggtgcattacgttttgtacaaagaaaagcttcgactcactgactcatactttggtctctaagaagtaggtcgacgaaacagccagaccagccgagtcgaaagtccgcacgagccgctgcctctttcctggtgattccatccaacaaaactccaaattaaaaggatctaactgctcaatgcacttgctgatgtctgatggatatcccatgtacatccctccaggtagcaaagtaatctcatatcctccatcaaactgaagcaagttgctattcgctactcctgtccagtggatcgttgttgtcgtgctagttccggttttcgttgatatattatcctgaaccagctgaccattattgtccatttcaaggaggacaaccgtatcagcctcatcgagcgttgctccatacaccccgctcctcttcgtcacagaatggccctcccaccttccaagcagagcatttatcctatcgttgctgggattctctggatcatcagttgaagagtgtgtaagtggcactatggagccctgattttcatgaaaaacaataagtgtatcgagcactccatttgggtccattatgtggaaagctcttactcgaccattgccatcaagagagtaaatacaattctcacagacaatagatggtttccgtgaaggaatcttcaagtttctgggggattcttcaccagtgtcatcttctccgagcacaccggctcgaaggacagtctccagcattccagcagtctgatatctcaatgcaaatgccttctgctcaggaaagaaccctatctgtgcactgctgatatttatctacagtgaacatgttggtctctttgattttgtactccgcccactccggttcgggatcctcctcgtccgcaaatgttatcccggacgtagcctgcttgatatacagcgattgcatgaggctgatgaggtcgccctccccgtaggtgctggcggacagccgcgtgctgatctcctgctgcaccctcccgtgcgcatcgaattggtagaagatgccgttccacttgccgacgttgaggtcgaagaagctgcagaggttgtcgatgctcatggcctcgtcctcgtccacctccggcgcgcccgtgacggccgcccgggcgcagagccggccgcgccggagctgggcgaggcgttggtgggccggcgcggcggcgcaggggcgtcggctgctccgtggatgcgggaccgcggaggcggccagccggaggcccgcgagggtttccgccatggccagtgggggagtgaagcgggaggagagaggtgttggtgggttcttccagttgcgctggtccaatggtctcgggccctcggggaaatttcctggcaccccgggggggactcccttatttttaaaaagggcccccccccccggggggggaagtctca

SEQ ID NO: 4019 - DNA, 1850 bp, Triticum aestivum
  unsure (1)..(1850): unsure at all n locations
  Clone ID: TRIAE-23APR03-CLUSTER117114_1
aaagaaaagcccactctccctccccgtttccaccgccggcggaaggatcggagaaacacgccttagggtttggctccgcccgccgacgccggccgggaggcgctccccgacctgaggccgtgagctcctctgccgcccccaaggagcatcttctacccgagcacggagaaccacaagtttccatttaaatttggccaccatggtgtgggagcttatcgaggtcgccggcaacctaactcccctcccacattctacagttgatgttgtggctgcgaagattgaatccaaggtagccaatactgtcattaggcaacttaatcaggtgtgcccactggagaatctgcggcatgttaagcgggtgcgtcgtcgtattcagtgtgaaaaatccgagttatcgatcatcttatgcctttccactgaatctgaaagtggtaagaatgggtttcctgaggctgtacagaaggtagtgaaggcttaccagttgagtcctttcattgcaaaagttgccagctatcctgctatgtcgaaagaggaatgggaggaacagtgcaaactctggccaacttcttatcatcccctgcatgacactggtggttcatctggatttaaagaggatgaattaccatcaatatttgattgcatgaggactgctatccagttatcagaggtgggcaacacggccattattgttgatccatcaagtatgcaaataatttcaaaggctacagatcaaacacaccagcatgatgccttccagaaaaggaacagatgtgtcaatgtggaagcagatggtggccgctctttggctgaaacagctggggctaatgatggcaggttgttgctgtcaagctcccatgttcgcaatggcttgaacatggaggtctcatgtatggacccgtggggatggacaaaacagaggtcttctgagcagaagactttgtcctctgaaggtggttttctttggcatcctctgagacatgctgccatagttgccattgaaaatgctgccgagagagatcgaatgatgttccatacttcaacttctccaacaaccgaattaaacttaaatggcgatatggataattgttctgataatgaaccagcaaagcggccaaagatagttacaaaggataaagaacaagctgaacatcaagaatgcgggagtgacttgtctggaacaaacagaccatatctctgcacaggatttgacatctaccttgtttgggaaccctgcacaatgtgtgctatggcacttgtacatcaaaggttcaagcgtgtcttctacgctttccctaatccaatcactggagcgctgggcagtgtctacagattgcatggggagaaaagtttaaatcaccattattctgtgtgtagggtaaaaatgccagagccagatttgaatgtttcaagtgattaccctgaaaaaggctgctcagattttgtaccatcctagttcttgaaaatctatgagcttttttaggctacttgcttgtggttcgtcatcttcgctttgcgagggccatggcaacggtgggtttctggttcctctctgctttgtcaggacggtggtgttggttctttgtccagagaccctgtgatagttgccctgngtattttccatataactgtnttatttgccttgcctgtgagccttcacttgcgacaaccgtgttgtcgccttctctcttccaggtgttgtggtgcttggcttntgctatttgtaccttctccatntgggtgtcaggcaaaacnccaggagccttttntgaagtttggtgatgtagaacagcaaaagctcctgtgaacggccataatatattttccttcttattccaaaaaaaaaaaaaaaa

SEQ ID NO: 4020 - DNA, 1431 bp, Triticum aestivum
  Clone ID: TRIAE-23APR03-CLUSTER11714_1
accacatcaaccatcaaatgcatccatcccggacttcctccctgcgccgcacgccccgccccccacctcaccgccccgcgtcgcgacgatctcaaatccccgatccgaccccaccggcggcgatggcccggcaaggaagctgagcgaggggcaggttgcctcgctgcgggaggccttctcgctcttcgacactgacggccccggtcactctagcgccctcctgcgctcctcagacgcactgcaccgccatcggcaggcgccccgcgtcccgagcacatgaaatccccggatccagacccccaccgagcagcgaacggccgcctaggagctgagcgacgagcaggttgcgtcgatgcgggagcccctctccccccttccgaccctgcacgggcgacgccccgccatccgcccccctcggcagctcgggcgttcctccatgcgctccctgggtgggaacccgacgcaggccgcagctccgcgacatcaccgcccaggagaagctcacggcgcccttcgacttcaagcgattcctcgaactcatgcgcgcccacctccgcccggagccgttcgaccgcccgctccgcgacgccttccgcgtcctcgacaaggacgcgtcgggcaccgtctccgtcgcggacctccgccacgtcctcacctccatcggcgagaagctcgagccccatgagttcgacgagtggatccgcgaggtcgacgtcgccgcggacggcaccatccgctacgacgacttcatccgccgcatcgtcgccaagtagtggattgatccgtctcccagcctgctcagacttcttcgtatttaataactcctccttcgcgtgattttatttcgtatcatctcatctgatctgctgcgcttctgttttgtgctttggtttcgttgtggttccccaaccgccctagggtttggataaaaatggtgtgattatggattaatggatctgtccgatggtattgcaatgtaaagcatggatcctgttactttctgtgattgattgattgcttaatcagaaaccagtgaaatgcgccagtttatgcattcatgttaatacagcctatgatttgttttaaaaaaaaaaaaaaaaagttcatatattctactctaggcggaaccgggtccaatttactaatgggtcccatgaattgttctcttggtattgcttccatcacccccgcccaatggccttgtccttggtgaacgcttaatgtaccctcgatgttaacgccacgtagcccgtcccgcttttcgccgcccttgggttccaatcactaacgtccgcctaccggcattgtcttcccatcgaatgcgcgcggccttaggactaaatgccaaattgggagcgattaaatttttggtataagatctccggttaatatttttggaaaaaatcgcttctttttatttaaccggtaagg

SEQ ID NO: 4021 - DNA, 1151 bp, Triticum aestivum
  Clone ID: TRIAE-23APR03-CLUSTER11716_1
ctaggtctaagcagagctctttttttggtcgctcctcgacctcggggtggaaatcgtaaaagctctgggcgaagagaaaccccctttcctccgcaccgatgttctccgctgttcgatcccgagccctcggccgatggcgcccgccgccgcaccttctcccgcgcctcctctcctccgccggcgcctcgtcggcccggccggcggagcttatcgagctctcggaggtggagaaggtgctgcacgacgtccgggcgggggacgtgcgtgtgttccccgtcggcgagggcgggctccacggcggcgcttgtgcggactacatggtcgtcgccaccggccgctccgactggcacgtccgcaacatcgctcaggccatactttacaagataaagcagaaacagaagggttctaatcgaatattgatgccgagtgtagaaggccagcaagctggaaagtgggttgtcattgattctggaagtatcatcatccacgcgcttgaagaaagagcaagagagtactatgatttggaaagtatttggacaaaggcggtgtcccctaacatttctgttcaggagttggagacctcacttgtgaagacgcgccgcagggacctgtcacaaaaacccatgaagagcatttgagttaatgtgctgcggtctgtagtgggtttgttcaaggtttgtcagattggcagcgtcaagcttgtttgtgtcaagaaccttggaaggataggcttgcaaggttgcttgtgaatgagaccgtctggattcatgccagcatgatgtctctctgtcaagtttgcttcagctatcttttatcatgtcgtcgtttgcaagttcaagccaagattgtggactttttttgcttctttcattttgttattcaccccttcgttggatggtaatcataatactatactatcttgaagccaaggtaacacgttggacaatttagggtgtgtttgtttgggctgcaacttctaagttgcaacggctccctctggaaggaggagctgtagttgttaggttgacgatgaggtgcagctgtttggtagttttgttgtagcagctatggctgatgctgaaatgtgccgtcatacttgtagttgcgatcacatttaaatacttagatatcaaaaaaaaaaaaaaaaaagc

SEQ ID NO: 4022 - DNA, 1408 bp, Triticum aestivum
  Clone ID: TRIAE-23APR03-CLUSTER117257_1
aagccacacgaccgtgccctgcctcatagctatctaggtgcaagcaagaggaagctcggcttcagcaatggcgtccagagcagcagccgccgttgttttagccctggccttggtctgcgccgcacattcggcagcagccgccgggaatctgtcccctgacttctacaagaaggcgtgcccgcagctggaccaaatcgtggcattccatgtggcggagaccttccggcgcgacgtcggcgtggcgcccggcctcatccgcatcctcttccatgactgcttcacccagggctgcgacgcatcggtgctccttaacgcaaccgacggtgagcagaaggtggggcccaacctaacacttcggcgggtggcgctggacctcatcgagcgcatccgcagcgcggtgcacaccgcctgcaaggacaacaaggtgtcctgcgccgacatcaccgtgctcgccacccgcgaagcggtcttcaaggccggcgggccgcgattcgacgtggagctcggccgccgcgacgcgctcgccccggcgcctgcccagatcaacaagctgccggggccctcctttcctgtgcccctgctcatccagtccttcaagggccgtggcctcgacgtggcggacctggtggccctctccggcgcgcacaccttcggcgtcgcgcactgctcgctcttccaggaccgcttcaagccgggcttcgggaacccgcccatcgaccccaagttcgccacgatgctcaaggacaagtgtgccaatgacttcgaccgcaaaaagacgcagagcctcgacgtgcgcacgcccgacgccttcgacaaccagttttacatggacctggtcgccaagcaggggctgttcaggtcggaccagggactcatcgaggacccggccaccaaggccttggccgcccagttctccctcgaccagcgcgccttcttcgagcagttcgccaagtccatgaccaagatgaccaacatggatgtgctcacaggcaagcagggcgagatccggaacgactgcgccgtccccaacaagcgcgtcaccgcccacggcgacgaggagggccatgccgccgacatgtgagagatgaaataatctagtgctcgtgagtgaacgctaggatgcacgcaccatgtgtttgtgtgtgagtgtgctgtgctgtctagtcaataagacgagtgtgctgcttagttcgtatgcttcctatagcataaggtcgaccgagcttccttttgcacgccggtgtaagatttctttcttttttttttgcgggaaaccggtgtaagatttcagtagcatcgtaatgtcgtcttttagatttccaaaatcgtaatgtctcactaagctgcaagaccaaaaaaaaaaaaaaaatgaaagaggagcttgatgacacgagagactaaacttgaa

SEQ ID NO: 4023 - DNA, 1006 bp, Triticum aestivum
  Clone ID: TRIAE-23APR03-CLUSTER117401_1
cctcccccgccacccgccctacccggaaacacgcttacacggtacagtctcgcactcaagactcaactcatcaactgaggctgaggctgacacttcccgcctctgcagcgacaccacgagacatgaagctggaggtgtcgccgaggcagaggacccaagaagcagagcagaacgagggccccgaggtatggaagcacccgaagcagctctgcgctagtctgggctacggggaggaggaggaggtgccacggctcgtgccgccgctcgacgacggcgtcttccggtcggggttccccgacgcggccaacttccggttcctcgcgtccctcaacctgcgctccgtcgtgtacctgtgcccggagccgtacccggaacagaacgcgcggttcctggggcgcagcgggatcaagctccaccacttcggaatccagggccgcaaggaactgtttgtcggcatccccgaagaaatgatccgggaggcgctcaaagtcatccttgacgtaagaaaccatccggtgctcatccactgcaagagaggcaagcaccgtaccggctgcgtggtgggctgcctgaggaagctgcagaagtggcgcctgtcctccgtcttggacgagtacctgcacttcgcggcggccaaggccaggaaaaccgaccagaggttcatggagctcttcgacacgtcaagcttggtgcatctgctggcctcgcagtgttgatgaaagcgagcgagcgtttttcgtttctcttttggcctgtcccgatcgtgccaccatgcggctgcgacgacctgtcttttcccgcggcgatttacagagaataatgttactagaacaatcatgggccatatctgtgagagatacaaggggaccaatgagagatgtactccttgaatgctcaaaaataacaattcaaagtgtatggcacagtatcattattcccgcaaaaaaaatggtagaacaccattgaatgatcgatctgataggattttccaaaacaaaaaaaaaaa

SEQ ID NO: 4024 - DNA, 954 bp, Triticum aestivum
  unsure (1)..(954): unsure at all n locations
  Clone ID: TRIAE-23APR03-CLUSTER117621_1
aaactcaatggcgggaatgctcggcgttggcgccacccgttcccgcctcctccgctccccgctacccctatttaccaggcgcgctcccctccacctcgcaccccaccccgaccccatctcccgccgcctcctcttcctcccatcaagaaccctcaccgccgcagcgacgacgatggccgccaccaacggtaccgccgccgcggaccccgtccaggaacagcccaaggcggcggcggccccctcgccggcgccgctgttgctcaaggtgaagaagctgtcggccaacgccgtgctgccctcccgcggctccgcgctggcagccggctacgacctctccagcgcggtggaggccgtggtgccggcgcgcggcaaggcgctcgtcgccaccgacctcagcgtcgccgtcccgcagggcacctacgcgcgcatcgcgccgcggtcggggctggcgtggaagcactcgatcgacgtgggcgcgggcgtggtggacgccgactaccggggccccgtcggcgtcgtcctcttcaaccactcggacgccgacttcgccgtcaagcccggggaccgcgtcgcgcagctggtcgtcgagaggatcgccacgccggacgtcgccgaggtggacgacctcgacgccaccgtcaggggcgagggcggcttcgggtccaccggcgtctgatggccggcctcgacggaaggcaaggcaggcgtatctatctaggtgctgatggttcatggtgaaagagctgctggctggaggcgacctgtagctatgtgttccaatgggaagcactgtcatttctgaatttacttccatgttagccagggtagatgtagtaagtatgcagtctcttttctcttggatggcttggattatggttatggggttttntcttggatggcttggataatggttatggtgaaagaactcaattgtaaccaaaaaaaaaaaaaaaa

SEQ ID NO: 4025 - DNA, 1989 bp, Triticum aestivum
  Clone ID: TRIAE-23APR03-CLUSTER11781_1
tgtttttctttttttttctttttatttattggtgtatagactgatactaggtatcacaagtctttcatgctaccccacaaatctcaacctatcgtaatctcgccagagctcgcccggagcccgtgaaagcatagagagttcgcgtggacccctggtcaaagtacctaccagctagtactagacattatacccgtgaatttcattcggctagtgttagatcaaaagtatgccgctatgctggagttgtgcaggcatcgttccgcgtcccggacgtcatctcgcgcatcccggacacgaccctgctccacatcctggttcctgtgccatgtccacagaccgtgcgtctccttcctcacctcggcgcatgccttagccgaagcggctgtcccggtaggcgctgtagtccggctgccggtcccagcagaacctgccggcggcggggccggacgtgaagggtgaaggcgcagaagccgccgatgaagtcgtcgggcgtggacagtggctccgggcagcccccctgggtcgtcggcgtgggtggtggccatcttctcgcggttcccgccgtcgcccaccgagatgtgcacggcgccgcacgggtccagcgtgtagttgaacacccggttggagcgctcgtacgcgtgcacatggccggtgaaaacgatgtcgaggccgtaggagtagagcagctcctccatggccactctcatgcactccgcctccctgtagtgagccttgtaggtgctgtaccatggcgcgtgccacccggcgaccagccacggggtcaccgatctgtccacctttgccaggtccttctccagccatctgtactgctcccctgatttgctgtagtcagcgtaggcagcgagcatgatgaaatggatgccgccagcgtcgaacgagtagtagaagggggagaaggactcgctctccgtcgacgggaacgcgaaccgcgcgctgtaggccgcgaacgtcttgttgccgatctgctgctccatctcatggttcccttccaccaccatcatcggcgtccccgacgtcaccgcctccatgtacctcccccagtaatcccagcgcggctggtacgtctcgtggatgggcgtggacttggcgaacgagcaggagtagcagtccgttccggtgccgttggtcaggtacaggttggcgtagctcacgtcgccgaggaggaggaccaggtcgggctggttgctcgccatgtgctccacggtcgaggtggtgttgtacgtgagcccgaggtccccgaccacggcgatcctccccgggtagctccgcggcccgacggccggcatcgtccggaacgcgtggacggcgctcatcgcccccgggatggatgggtcgccgcactggtagtagtacttcgtcccaggctcaagcccttggaggcggacgtggtggatgatgccggaggtgtagttctggaggccctcgaaggggtagagctggctgtacacgagcgcgtcgccggtggcctcgcggaccaaagaatcggcggcgaggccgtagcgcacgacgctgccgaccgtgccgggatccagcggcttgacggcgccgcccatctggaaatcccctgtgatccaggagacccaggcggaggtgggagcggcggagagcgcgacggcgatctgctcgggagcccagcctgtgacccggcgctgcacccgggggtccgtgtccggcaggtccaccgcgtggcccctgtcttcccgcagcggcaccgtcaccggccgagacgggccctccagcgtcgacgccggctcagccaccgccgccgccgcggcgagcagaagcagcggcatcgaccccctccacatccacatgtcctttggtgcgggcgttccctctttcgtcgggatcaacaggagagcagtgcgaggtgagtgtgggatgagattggcatggagagaattgggacgattttagagcaaaatttataggaatcgagcagagaaggatgggagtgaagtcgaatct

SEQ ID NO: 4026 - DNA, 2062 bp, Triticum aestivum
  Clone ID: TRIAE-23APR03-CLUSTER11784_1
cacgcccaataatttacctccctcccctaccatctcctctggaagcgtcgcgtctggtcctacccaaatccgccacgcaacccggcatttccgccacttgtgatggcggcggcggcgaggcaccggaaggaggaggaggacgagatgctgctggacgacggcgacatcgaggagagcccccgcgacagcttccgcgactccgacgacgacgacgacgaggcggaggaggcgcggggcgaggatggcgacggggtcggctccttcgagtcgcaccagtggccgcagagttaccgggaaacaactgacacatacacaattgctgcatctcccatcttcggttacctgggtccttcaaccagtaaatactcaatcgatggcggccgcagtggcctggcttctgacctcaggctgcctttcatctcggataagctagaatctgtcaagagcctgaggcgacatcttcttggttcagtcagagatgagaagctctcatttcagtatactggagagatttacgtcggtcaagggtgcagcgtgacacagacagtcttcaatggtattaacgtactcgctggtgttggccttctttccgctccgttcacgattcatgaagctggatgggctggtcttgcagttctgtctgtttttgcaattatttgctgttatactggagttcttctcaaacattgcttcgagagcaaagacggcattgcaacctatccagacatcggggaggccgcctttggaagaattggccgcttgatcatatctattattttgtatactgaattatattcatactgcgtggaattcattatactggaaggtgataatatgacatcaatctttcctgacgtcaatattaatttgtttgggattcatgtcgacagtaaacatttctttggagtgttaactgctctggtagttctgcccacagtatggctgcgagatctgcgagtgctatcatacctttcagccggtggtgtgattgcaactcttgtggtgtttatatctgtcgctttagtcggcaccactgaaggtgtagggttccatcagaccggggaagcagtaaagtggagtggcatgccctttgctatcggtatttacggtttctgctactctgggcattcggtatttcctaatatctaccagtcaatgtctgatcgcacaaaattccctaaggcactttttatatgcttcgtaagtttgcacagcgatatatggctcgtttgctattattggctatctcatgtttggtgacaagactctgtcgcaaataactttgaatcttccaaaagagtcatttgcctcgaaagttgctctgtggaccacggtgatcaaccctttcaccaaatttgccttgttgttaaacccattggctcggagtttagaagagttgcgccccgaaggatttttgaacgaaacaatcgtctctattatactgaggacgagccttgtggcgtcaactgttgtcattgcatttcttcttccattcttcggtttggtgatggctctgattggatccctgctcagtatacttgtggcagtcataatgccggccttgtgcttcttgaagatcgcacagaataaagccacacgcccgcaggtgattgcaagcgtggctataatagtggttggagtcatcagtgctgccctcggaacatactcctcggtggctagcataatcggatactactaattcttccaaagcaatctcttcgacagctctcagtaccgtcactcttggcaagagtttttgctgtgtatcatcgaattttaccgtgctctatgtacatccttcgacctagtatagtcgatttataaagactgcatctctagcaacaatgcactactgttaccatttagctgctgctatatcatttggtgtaccatatttctgccaagccctgcggtttaaatattgcctctttttagggctaaaaccaactttagtaacccgaaatattgtttgttgctattcatttatttttaggggaaacgtcaactttattaatccgaaatattgcctgttgttccgcaaaaaaaaaaaaaaaaaaaaaaa

SEQ ID NO: 4027 - DNA, 1474 bp, Triticum aestivum
  Clone ID: TRIAE-23APR03-CLUSTER117924_1
ccgttccgcaccctgtgcagccaaaacccaagaggaggctcagccccagctccccaccccccccatccccccgccccccccaccccaaccccctccccgggcccggacgtcgaggccggcggccgcggccgcggcggcgctgctggtggtggtggccgccgcggcggccgcggccgcgatggcgacgagcgcgaccgcctcctgctccgacgcgtgcgcggccttgcccctctacgccctcttgaacgacatcaaggtctccgacgcggcggcgcgcgtcccccgcggcgccgctcggcggccctggcggccaacgcgctcgccccccgcctcccccgccggcgcctacccgctggctccctccgccgcgtccccacccccctgcgcccgcccggagggcgcccccaagtccgtctcaagccggtccgccgcccctaccccgcgcgccccgccgatcgcctccccaccgtcgccggcgtccgtcgtcccgggctccgtctccagcccgcacccggcccgtgtggattacgtgctgtacgaatattattggatctatctgttccggacggggccctcatttgggcccggtggaaactcgacgacaaggttttcccagctcctctctcgctcctacgtcgtgccgggtcggggtacacccgtgcaattccatcgccgccacccacgccaccactgtcacggatctcagcaatgtgaatgccatggggagccccgtcgtggcacccggcgacatccttgcagttccattatcagcatgtgcgtctacatttcctaactttgcttcggactatggattgcttgtggcaaacgggacctatgcactaactgctggtaactgtgtagaatgcagctgtgggccaggggatctcaatctgtactgcactccagcttcattaggaacgtcatgttcaagtatgcagtgctccaatagcagtctaatgcttggtaatgtgactacccagcccaccagcggtggctgcggtgtctcgtcttgcaactatgctggcttcgttaacggaagcattaccacatcgctgtcctcgggtcttcaacctacatgccctggaccgcatcaagttcctccactcatggagccgtccaccgcggcaatccacgactcgtaccttgctccatcaccttcgccaggacctggggaggcaggtggtgctgttcccggctcgtctgaccctggagcgtcctcccattctcttgctggaagcctctcgccctcggtgcataaactgcatcaaatgatcctcattctttctctagtcttctacctgcatatgtgaattcttctgtaggaatattattggatgtatttgtatcggacggggccctcatttgggcccggtggaacctcgacggcaaggttttctggctcctctcttgctcaccgtagtcttaactacgtttggagtttcagtagggttctccaatttttaaaaaaaaaaaa

SEQ ID NO: 4028 - DNA, 1814 bp, Triticum aestivum
  Clone ID: TRIAE-23APR03-CLUSTER117_1
gacgagcgtattgtcccagcactttcggtacaaaagtaagttcgggagtctgggctgcggctccggctgcgaacctcacgagtccatatcggcggccatacgcccatacccatccatccaatcttcttgccccgcctgcttaaaaaagacaaactgctttgcattcgttgacctgcaactgcaagctccgctttccaatccctgctcttgccctccgtttcttcatcccagctcttgcagcagaggcggccaatggcgcaggacgacccggttgtctctgcgcagtggctgcagcagcacctagggcagcccgatatcaagatactggatgcttcctggtacatgccacacgagagcagggacgcatggcaagaataccaggtggcccatattcctggcgcgctctacttcgacatcgatggaatttctgatcggacgactcatttgccacacatgctgccattggaagaggcattcgcagcagcggtttctgcacttggtatcagtaaccatgataaagtcattgtttatgatgggaaggggttctacagcgcgcctcgtgtttggtggatgttcagaatccttggacatgataaagtttgggtcttagatggaggtttccctcagtggcaagcttctggattcaatattggaagcagctgccctgatgatgcagttctgaaatccaaagctgctaatattgctgttgaaacagcttataatggtgaattggcaaatgctgccacatttcagacagagtttcgacatcagctattgtggacactagaaaaggtcaaacacaatgtagctgctaaggctcaccaagtagttgatgcccgagtaaagggcagatttgatggtgtaatgccagaaccaagggaaggagttagaagtgggcatatacctggaactaaatgtgttccgttccctgagatgtctgatggtgcacaaacgctcctccctgcagatgagctatctaaaaagttcgagcaagcaggcatttcccttgatggcccgattgtcctcacatgtgcatctggtgtaactgcatgcatacttgccctggggctttatagaattgggaagcatgacgttccggtttacgacggatcttggacagaatgggaagcgctgccagataatgattacccaatagttacttccactggctcttaaatcgatcattctgaggtgatgaatgcagctgtcacatcctgtggcattcagcgcagattgtgagcgcaatgatatttctctgtggcaagctttgtaccaaagtcaatacaaaggttataggaaaaataaaatacagtaccattgatgttataggaaagtgtcaacattaagtttatattgatgttgtacttaacgctattattgaagaaatcgtgacttgaaaacaacaataagtttgtattttatatgcagtagtgcagccaaaaaaaaaaaaaaaaagcaagtgcggagtgattgatcaaaatttcaacctgtgcaaatttattttgtagcccaaggaaatcaaatcaaacatttaaaaaggtccgctctgtgaccatgaggatgaaaaaaaaaaaaaaaacactcgagacctcccccgaccccgctctcctcaatcgtaaacccccccctggctgggccccggcgcccgggcgcccaagactcgggcgggcccccccccccctttttttctctccttcttaagaaaagggggcggggggcgccccgctgagagaggcggtggtttttttgtgggacgtcccccccccccccccccccggggggggggggggggggggggggccgcccgcctcccc

SEQ ID NO: 4029 - DNA, 1584 bp, Triticum aestivum
  Clone ID: TRIAE-23APR03-CLUSTER11815_1
actgcgaccacgcatccccctcgcctcctgtcccctacgtcaacggccaaacttcctgcccctcctccctcctcctggtacaaatccatagccttctccggcgacgaatcgggggctgtgctccttcgggccgcccatggcattcgcggcccaggcggcgcggctcgccgcctccgcactcgtcgccggcgtcgtggcggcggtggtggcgatgccggtgccggcggccggaggggtgtgcttcgacaggatattcagcttcggggactcgctcacggacacgggcaacttcctgctctccgtgccggacgacttcccggaccccgcgcggagcctcccctacggccagaccttcttcggccgcccctccggccgctactccgacggccgcaacctcctcgatttcttcgctgaagcatttgggatgcctttcgtgccaccctaccttggcggtggtgacttcctgaatggtgccaattttgcggttggcggtgcgactgcgctcaacaactcgttcttccgagagcttggtgtggagcctacatggacaccacactcccttgttgagcaaatgcagtggttcaaaagactgcttccatccatcgcctccacggagtctgaacacagtgttatcatgtcaaaatcacttttccttgttggagaggtcggcgggaatgattacaaccatctaatggtcagggggaaatctcttgctgagctacgcgagcttgttcctcaggttgttggtgccataagcttagctatcacggagcttataaatcttggcgcgaagaaattcgttgttcctggaaatttcccgatagggtgtgtcccattgtatctcgcaatacttccaagtgaagagaaggattactataatgaagaaacagggtgcattaagtggctaaacgaatttaccgagtaccacaatcgtttgctccaggaggagctagagaaacttaggaatcttcacccagatgtatctgtcatttatgctgattattatggtgccacactgaacatataccgtgccccactgcagtttggtttcactgtcccattgaactcatgctgcggaagcgatgccccacataactgttctctgtcagtactatgtggaaaccctggatctttcgtctgccctgacccatcgaagtacgtctcatgggacggtttacacttcaccgaagcgacctacaaagttatcatccaaggagtgctggggtcttatgctgttcctcctctttcggaaatttgtcgggatggagagtacaaagtctcccagcttcatcaatgtacagacagcaatcctacaaacactgtaacatacgatgctatgagctcttttatttgataatgtgggctctgctacacgtagaatttcaagaggcaatacatagataatcacttcgggctcttctcaaagtcgtgaagagaagtggtgagcaaactcccatctgttttgctgctacaaggagaagtttctttttctttcttggagccaaatgagaagtgatttttgaaaattgcagctgatggttccatttctcggctccttttatattaacaaaaaaaaaaaaaaaa

SEQ ID NO: 4030 - DNA, 1967 bp, Triticum aestivum
  Clone ID: TRIAE-23APR03-CLUSTER11817_1
catctggtccagccgagcacaccccctccctttcgtcgcctaggtcgctccccgtcccccagccgagccgtccccagacttcataagacgatccgcgccgcgccccacccccctccgaaaccgcgcggctctcagcggagccgggtggagctcgccgcgaacgcggctcccctcctccaccacctcgtccccttgcgcctggccgtcggccactcgggcctggccgacaaggggccgccggccgtgcccgacctccgcctttatagccgaaccgtcggcccctcccgcgtcctgcaccgaggacgggggcagaaccgcagcgcagccgagccgagaccagaccagacgaaccgcgccgagccctaccctcctccaccaccgggtctccctgcgagggcggaggagcgacatggagccggccgagaagaagccgccggcggtgtccgacctcggcgcctgggggatgaacgtcgtcagctccgtcggcctcatcatggccaacaagcagctcatgtcctccgccggctacgccttctccttcgccaccacgttgaccgggttccacttcaccgtcacggcgctcgtcggatggatttccaaggccaccggctactccgcctccaagcacgtccccctctgggagctcgtctggttctcgctcgtcgccaacgcctccatcaccgggatgaacctcagcctcatgctcaactctgtcgggttctatcagatctccaaattgagcatgattccggtggtttgcttgatggaatgggtactcaacagcaagcactacacaaccaaggttatatcagcagtggttgtcgtcgcagcgggcgtcgggatttgcaccgtcaccgatgtggaggtcaatgctaagggcttcatttgtgcttgcgtggctgtgttctgcacgtcgctgcaacagattacaattggctcctttcagaagaagtacaacattgggtcatttgagctgctgagcaaaactgcaccaatacaggcagtgtcacttattatactgggtccctttgtggattactacctaaatgggcgttggctattgaactacagtttttcaacaggggcaactttcttcatactgctttcatgctccttggctgtcttctgcaacatgagccagtatctctgcatcgggcggttctctgcaacctctttccaggtcctgggccacatgaaaacggtgtgcgtgctgatcctcggctgggttctgttcgactcggctctcaccatcaagaacatactcgggatgctgctcgccatcatgggcatggtggtctatagctgggccatggagtctgagaagaaggccacctcggcgatcccgcggaacaagagcgacatgctggacggggaggacgtgcccctcaagtcgagaacgagcggcattccgctgtcctctgatgacctcgaggaaggcccgatgaagagctagcctgtcgctgttattcattcattcttcttggttcttttgtatgtgtttgatccacaatgtccgccagtccagtcctcgaagctatcgacagtcttgttaattttgcctcttgcttgctgggtggagttccatcataggtgatgacgaccccggccggccggcctcggcgtagatgaccaccacttaggaaatttgtcaaggccgatatgggccgagccatggtgattcgtgatggctgttgttatagacgacagcaaattatacttatataatggaatacaggtgttcccccgttgtaaaaaaaaaaaaaaaaaaaggccggcctcggcgtagatgaccaccacttaggaaatttgtcaaggccgatatgggccgagccatggtgattcgtgatggctgttgttatagacgacaacaaattatacttatataatggaatacaggtgttcccccgttgtagcatcccggtgaaaaaaaaacctcggccgcgaccacgctaatcactagtgaattc

SEQ ID NO: 4031 - DNA, 1889 bp, Triticum aestivum
  Clone ID: TRIAE-23APR03-CLUSTER11834_1
gtgcaccataaacaggagccgcgcttcagcggcagcaaccaaagcgagcagaggcaaaaggccattctgtcctgtgcggcattgcaccgccccggccgcttcctctgcccgccgaggaagatgggcaaagatggcggcggcggcgacgggctggaggtgccgctgctgaagcggacgtactaccacggcaactgccccgggtgcaggctggagaagaggaacgagacgcggaggggcgtgccctacacagagttcgcctgcatgtggctcgtcaccgtctgctctaccttgccgattcaatcattgtttcccttcttgtattttatgataagggatctgcacattgctaagcaagtagaagatattggattttatgctggttttgttggcgcttcatatatgcttggtagagcactcacctctacagtatggggaattgtggccgataagcatgggaggaaacctgttctcgtagttacccttattgcagtaattaccttgaatacactatttggactcagctctagttattggatggcattaaccacaagaggtttgcttgggttgttgtctggtatgctggggccaattaaggcttatgctacagaagtatgccggaaagaacacagtcacctcgcattatcacttatttcttcctcacgtgccataggcctcattgttggtccagccattggtggttatcttgcacagccagcagataaatacccaggcatgttctctcaggaatctatattcgggaggtttccatattttctcccatgcctgtgtatatcaatcctcgccgttgctgctttaatttcttgcatctggcttccggaaactttacataaacacaatgaagcgacatattcaaataattcgattgaagccatggaagaatctctttccggctctaatgctgaagaaagtagtggtggatattggagtttgttcacaaactggccattgatgtccgctatcaccgtatattgccttttctctcttcaggatgtggcttatgcagaggtattctctctttgggctgttagtgacaggaaatatggtggattaagctttacttctacagatgtgggcagtgtccttgcactctcaggtctcttcctcctaatataccagattttgatttatccatcggttgcaaaagctatagaacctatcacattagtccgtgcaactgcgatcttgacattaccacttcttgcaagctatccattcatgactacattatcagggttcaatcttcagttggtagtaaattgtgcatcttctctgaagaattccttccaagtaactaccatcacggtgtgcaatattttgatgaatgatgctgtgagtcaagacctgagagcatcggccaatggactttctgtaacactaatgtccatcttcaaagctgtcgctccggctgttgcaggtgttatattttcatgggctcaaaggcgccaaactgcttcatttcttccaggcgaccaccttgtgtttttcatgcttaacgcggccaccgtcatcggtcttatgtgcaccttcggaccacactttgctaggggcagcacgaagcattgatgtagtaatattgttgcgacctgggaaagaacaaggaactattgttctgtcttgtgaccttcttccccttgagcatagttttgtgctccacgccacatgttattattattatttgtagtacagcggcatatagtgttgttagaaacatatatatgcccaagaggcaatcatagatgtaaacaatattcctttgtatttatggtttattcgctcttcttgaataaactcatgtgtatttatcagcatgtgtgtgacttgtttgcgggactccgtcttaatagaatatgcgttatagtgactcgtat

SEQ ID NO: 4032 - DNA, 1482 bp, Triticum aestivum
  unsure (1)..(1482): unsure at all n locations
  Clone ID: TRIAE-23APR03-CLUSTER11839_1
gtgtgtaactgccaactgccctcgacccgccgcttccgccctcccgactcccgaccggcggagatggcggtcccgggaggaggtgccgccgccgcgctcgctctgaccctcctcctcctcctctgctcctgcgtttccggcgcggcccacgcctcctccgccctccgccacgccgtgccgcgcggcgacggcggcggcggactctgcgggcagctgctcctgccgctgggctacccgtgcaccgagcacaccgttgaaacaaacgatggctttcttctgtctcttcagcatattccacatggcaaaaatggagttgcagacaatactggacctccagtttttcttcaacatggtctttttcagggaggagacacatggttcataaattctgttgaacagtcgcttggatatatccttgctgataatggcttcgatgtttggattggaaatgttcgtggaacacgttggagtaaagcgtccgcaactttcactgtgcatgataagcttttctgggattggagctggcaagagcttgctgaatatgatcttctggcaatgttaagctacgtgtatacagttaggcagtccaaaattttgtatgtggggcattcacagggaactattatgggtttggctgcttttacattgcctgaaatcacaaagatgattagcgctgctgcacttctttgtccaatttcttaccttgatcatgttagtgctagttttgttctcagagcagttggcatgcatcttgaccagatgcttcttaccatgggcttccatcagctgaacttccggagcgatatgggagttcaaatagtagattctatatgcgatgatggacatgtggactgcaacgatttgctgtcttcaataacaggggaaaattgttgcttcaatggatcacggattgaccattacttggagtacgaacctcatccatcttcaactaaaaacttgcatcatctttttcagatgatcaggaaaggcactttcgcaaggtacgactacggattgtggggaaacctaaggcgctacggtaagctgtcgccccctccgttggacctgagcagcataccggaatcactggggatgtggatggggtacggaggtcttgatgcattggctgatgtcactgatgtcgcgcgtaccgtcaaagagctgagatctacgccagagctgctatacattagtggctatggccacattgatttcgtcatgagcgtgaaggccaaagatgatgtttatgtcgacttgatgaggttcctccgccttagggcaaatggatcattgcacagtagctactaggacatgtcctgcacgctggtgtgtgtaatacatatgtacagttcttctcttttctggatttacgagattgacggtaccactatttatgtatattatgagattgtacatctcaagaaatagtatgaaactgtatataagcttgctgggttgtgcaaaaaaaaaaaaaaanaaaaa

SEQ ID NO: 4033 - DNA, 1146 bp, Triticum aestivum
  unsure (1)..(1146): unsure at all n locations
  Clone ID: TRIAE-23APR03-CLUSTER11905_1
gtacagtggcaaattattttcagtcgataattggtggattgtctgaccctgtgaccgagtgcggaaacagcagtcagtagacgacactgaatcgccaacaactgcgttcatcatgtcgccggcgacttcttccgcggtgggtaccctatccggcggcctcctcccccacgctgcacatcgccggcgacccttcccaaccgcccgcctcctcccgccgcgctggtctaggctccaggtcaacgcggcccgtcatcgccgcctggccactcccgcgcgcgcccagagcgctccctccccagggtacctgccggactcggagttctacaagatcgaggccatcctgaggccatggagggtgtcgcatgtctcgtcgggtttgctagaaatggggatcagaggtgtgacggtgtccgatgtgcggggctatggggcgcagggcgggtcgacggagcggtacgaagggtcagaattttcagaagatacatttattgctaaagttaaaatggaaatagtcgtgtgcaaggagcaggttgagccagtaattgacaaaataattgaaaaggccagaactggagaaattggtgatgggaagatattcttgatacccgtcgcggatgttgtaagggtacgcaccggcgaacgcggagtgcatgcggagaggatgatcggcggtctgtcagacaaactgcctccggtgatcacaatctcatgagtagagcttgactgctcttgctgcctgtaactgtaagcgcatccctcgggctggttgcttgtggccgtgtgtgtcttgacctttggggaataatgtgtatgtaactttgcgtgttggcatgaataaatcggcaccagcatccatgcggtgggtggtgttgctgaatggggtggttactgtggttcgtgtgcggaatgcagtcattgcaaaatccctcctggagagaaggtgccggatgtaacctgtgccagttcaatccaactttcactttccgtcattcgacaattcgatccanntttcgcannngcnctgnnncngnacnanangnacatnngnnnnnancnaccggtgcnngtngcnantnacngngnnacanangangcacnngcacganacacnccantcanaancnancaaagtccngaaacgaanan

SEQ ID NO: 4034 - DNA, 568 bp, Triticum aestivum
  Clone ID: TRIAE-23APR03-CLUSTER119144_2
ccgttcggctcttcctaacgtcaaggcccgctttcctcaccctctcggagtatcgcggcgtccgggaagcgccatcagcggaggcgcggcaagggcggccgcggtcgcgtggtggctacagcgccaccagcgactgcctccgccggcggacctcctgccacgcagcctccttgaccacgcggtggagctcgccagcaagaccgccgccgccgccgccccggatctggacccggacctgccctgctccctcggctcgtcctccctccctgacctctgcgacgacttattggttggtaattagtgcctacgggtctggcaggagggtggcggattcgttgtgcgattccgcgatgttctcagattggatagccagagctagactaccctaaatgtaatgttgttctagcatgtcaataacggtccctggttatgcttgattccgtccttgtttgaaactcatgtctattcaccgagttaactgtgggtccttggaatacctgatttctgcctatgtctttatataaccccatatgtatactttgttttggtaaagaaagctgctacctag

SEQ ID NO: 4035 - DNA, 1473 bp, Triticum aestivum
  Clone ID: TRIAE-23APR03-CLUSTER119372_1
gctcgacactctcgccaagccacaaccccacactcttgagctaagctaagcaagccagcacctcgatctagcaccactccagcaatggcgtcgtccaggagagcgctcatcctgctggcggtggtgctggcggcggtgccggcggcgctccgccacactcttaagctaagctaagcaagccagcatctcgatctactcttcctccagcaatggcgtcgtccaggagagccctcatcctgctggccgtcgtgctggcggcggtgccggcggcgctgagccagaagacgacggccccggcgcccgaggcggcgcccgagacgccggaggcgcctgcggcggggacgacgcccaaggcggcggcggcgccgaacgtgacggcggtgctggagaaggccgggcagtacaccaagttcatccggctgatggcgtcgacgcagcaggacacgcagctgaacgcgcaggccaacgactcggacacgggcttcacggtgttcgcccccaccgacagcgccttcaacagcctcaagccgggcaccctcaactcgctctcgcagcaggaccaggtgacgctggtgcaggcccacatcgtccccaccttctactccatggagtccttcgagaccgccagcaaccccgtccgcacccaggcctccggcaccgacgggccctgcaccgtcaacgtcaccgccaccagcaacagcgccgtcaacgtctccacggggatcgtccacaccaccgtcggcgccgcgctgcgcgccaccaggccgctcgccgtctactccgtcgacaaggtgctgctgcccatggacctcttcggccccaagccgcccgcctccgcgccgccggcccacggcaagaagccctcgtcggccaagggggcagccaaggcgccctcgggcgacgacgaggacgaggaggaggccccgcccgccggagccgccgccgccgtcggcgccggctggaggagcctggtcgccgtggtggccgccgccaccgccgcgtgcctcttgtaagatgaagaaaaatggagctcggaggatcatggttgttcatgagaccgacagatcgatggagactagctgcgtgcgtgcatgttgtgcatggatttggataggttactactagtagttcttggtggctgctgcttctcttctttcttttgttaaatgttcagttttgctgctccttttcttcttctcttgttatattgaaccggcgagaaagtttgggctgaaatgtgatgaaatgtttcactgttgaattaagccgtcgttggatgaaaaaaaaaaaaaaaaagcttatcgaacccggcttcccctcccccgccgccctcgggggggggggccccgggacccaatttcccccctaatggggggggcaattataccgccggcccctttggggcgccggttttttaaaaaaggggggggagtggtggaaaaaaccctggggggtatcccaccaatttattat

SEQ ID NO: 4036 - DNA, 1809 bp, Triticum aestivum
  Clone ID: TRIAE-23APR03-CLUSTER119584_1
attcccgttccgatcagacaactccccgggcaaggctcctcgaaaaaaataaattgaaacagcctcggtcgtccgtccccaccttcccggtccctcaaccaagaccggaaatcctccccgcggcgtcgtcgggggcagcgccgcccagatcctccggccatggacgggctcctgtccaagctccggagcctggacgcgtaccccaaggtgaacgaggacttctacagccgcaccctctccggcggcgccatcacgctcgcctcctccttcatcatgctcctcctcttcgtctccgagctccgattgtatcttcatgcagttacagagacaacactaagggttgatacctcaagaggagaaaaacttcgcataaattttgatatcacctttccagcccttcagtgttctataattagtgttgatgtgatggacatcagtggacaagagcaccttgatgtgaaacatgatgtattcaagcagcgaatcgatgcacatggcaatgttattgcaactaagcaagatgcagttggtgggatgaaggtggaaaaacctttacaacatcatggtggaaggcttgaacacaatgagacctattgtggctcatgttatggtgcacaagaatctcctgaacaatgttgtaactcgtgtgaagatgtccgtgaagcatacagaaaaaaaggttggggcgtatcaaatccagattcgatcgatcagtgcaaaagcgagggcttccttcaaacaataaaggatgaagaaggtgaaggatgcaacatttatggcattctggaaattaacaaggttgctgggaatttccactttgctccagggaaaagcttccagcagtcaaatgttcatgttcacgatctgcttccattccaaaaggatagcttcaatctcagccataagataaataaattgagttttggagaaccctttcctggtgtgatcaatccccttgatggggcgcaatggatccagcattcatcatatggaatggctcaatactttgttaaggttgttcccactgtatactctcacctaaatgagcaaattattctctccaatcagttttctgtgacagaacattacagaagtggcgatagtggtcgggtacaagctcttcctggcgtgtttttcttttatgacctttcaccaattaaggtcacgttcacggagcgccatgtgtcattcttacacttcttaactaatgtatgcgctattgttggaggtgtgttcactgtttctggaatcatagattcgtttgtctaccatggccagagggcaatcaccaagaagagggaactcggcaaattcacctgagttttcaatcaagccttcctattgccgcagaacctccttttgagtgactctagtctgtagctgcagtagaaagcgagtcttctccaaagtcctaaaagtgtacaactgaaccaacaggcaggtctctttgtcacagcttgtgctctggaactcctggtgcgctgcctgcttacttccggctgaagctgccagcatacaaaatggctcatctggcgtactgtgatgttggtatatcgctcaggcaaatgggacatttcagaggtgctcaatttttgtacactcaagtccacaaggacaaaggttttgtcgttctaaactgcaagtttttgtatctttgtaaatccgtgtaagcgggctgtagactgtacaatactcatgacaggttttatttttcttagacattttgtagctcttacaggcgaggtcaaaaaaacataaagaccatttgaacgaaactaagctcaatttgtcagggtgtttttcgtaact

SEQ ID NO: 4037 - DNA, 1689 bp, Triticum aestivum
  Clone ID: TRIAE-23APR03-CLUSTER119740_1
acatcagttctccatcctcctcttccaaagcacagctaactagagctcaagataatcatggcgaacaaacacccgtccctctccctcttcctcctccgtcctcggcctctcgtccagcttggcctccggtcaagtcctgtttcagggtttcaactgggagtcgtggaagcacaatggcggatggtacaacttcctgatgggcaaggtggacgacatcgccgcggccggcgtcacgcacgtctggctgcccccggcgctcgcagtccgtctccaacgcaagggtacatcgcctggccggctctacgaccctggacgcctaccaagtacggcaaccaaaggcgcagctcaagtccctacatcggggcgctccgacggacaagggcgtcaaggccatcgccgacatcgtcatcaaccaccgcacggcggagcgccaaaggatcggtccgggagcaatctactggcatcttcgagggcggcacccgcggcccgcgcctagtcgcatgtcccaacgtgggaggacccgagggcctacccgaccggggtccgcgcaggatctgcagcgaccacttctaggtctgcgacggcacgggagaccatcgtaccggctgggcctccaccagcgcgcccgacatgcgatccccaagaacgagcgcgtcccgaagcagcggctcgcccggcgtcatctaccctcacgtctgaccctgggctggcgacggctagcgcctcggcctgcggccagggagtactcggcctgcgtcgcgaggacgtaggtgcagaccacgaggcccggcttcctcggcccggaaacatggagcacccgtgagctacgacggcgccgggcaagccccgccgtccaatccaggacggcgcaacgtcagagacctggtgaatctgggcgaaggcggtggggcggccgtgccagggcgtgcgcacttcaggcaccaagagggccatcctgctatgttcggcggctgccagggcggagcctgtggaggatgcggcgacaaggagggcccaacgctcccctgggcatgatcggcctattgccggagaagggcggtcacgttccgtggacaaccacgacactgggtctcgtcgcagaagaaatggccgttcccggccgacaaggtcatgatgggctacgcctacatcctcacccaccctggagtcccatgcatcttctacgatcacgtgttcgactggaacctgaagcaagagatcaacgcgctggcggcggtgaggaaccgcaacgggatcaacgccgggagcaagctgcgcatcctggcggcggagagcgacatgtacgtggcgacggttgacgagaaagttatcgtcaagctcggaccgaggttcgacgctggcagcgtcatcccgtcggacttccacgtcgtggctcacggcaataactactgcgtctgggagaagagcggccttagggtgccggccgggcggcgctagctacctagtagacgttagcaacttcgcaccggcggccagaccgttgtactcctacaagaaatgtttgttccagttcgtcgtagactaggcaataaagtttgtaccaccaccgctctccttccaaccttgcggaaggagcgtgagctatcaaatatattattaattttacgcgtttgtaaaaaaaaaaaaaaaagccctgtgctggttttcgtgtttttttcttttgtttgg

SEQ ID NO: 4038 - DNA, 2203 bp, Triticum aestivum
  Clone ID: TRIAE-23APR03-CLUSTER11985_1
gacacccagcaaccaccaccacccgtctcctctcctctcctctcctcctcgtcttcctccttcggcctcctcctttgcagctaacggaaccgaagaaagcctttcgttgacatggctgctttcatcctcttcctctgcttgctcgtgccgctcgtcctcgcgtgcgccgtccgcgccaggaagggcgccgccgggcgggcgtcgtcgggcggcggcggcaaaaagggcggcaccagcctgccgctgccgccggggtcgatggggtggccgtacgtgggcgagaccacgcagctctactcctccaagaaccccaacgtcttcttcgccaggaagcggaacaagtacgggcccatcttcaagacgcacatcctcgggtgcccctgcgtcatggtgtccagcccggaggccgcgaagttcgtgctcgtcactcaggcgcacctcttcaagcctaccttcccggccagcaaggagcggatgctgggcccccaggccatcttcttccagcagggggactaccatgcccacctccgccgtctcgtctcacgcgccttctctcccgaggccatccgcggttccgtccctgccatcgaggctatcgccctccgctccctcggctcctgggaagacctgcaagtcaacaccttccaagagatgaagacttacgctctgaatgtggcattgctgtccatcttcggcgaggaggagatgcagtacatcgaggagctgaagcagtgctacctgacgctggagaaggggtacaactcgatgccggtgaacctgccgggcacgctgttccacaaggccatgaaggcccgaaagcggctgggcgccattgtggcccacatcatctccgcccggcgcgagcgcgagcgcgggagcgacctcctgggctccttcatggacggccgcgaggcgctcaccgacgaccagatcgccgacaacgccatcggcgtcatcttcgccgcgcgcgacaccaccgccagcgtgctcacgtggatggtcaagttcctcggcgacaaccccgccgtcctcaaagccgtcaccgaagagcacgctgagatcgcgagggagaaggcgttgtccggcgagccactgtcgtgggccgacacgcggcggatgcggatgacgggccgggtgatccaggagacgatgcgggtggcgtccatcctctccttcaccttcagggaggccgtggaggacgtggagtaccaagggtacctgattcccaagggctggaaagtgcttcccctgttccggaacatccaccacaaccccgaccacttcccctcccctgaaaagttcgatccttcacgattcgaggtggcccccaagcccaacacgttcatgccgttcgggaacgggacccactcgtgccccggcaacgagctggccaagctggagatgctcgtcctctgccaccacctcgccaccaagtacagatggtccacctccaagtccgagagcggcgtccagttcggccccttcgccctccccatcaacggcctccccatgaccttcacccgcaaggacgacaagaacaaagcctgagccatccatccatccatccatccatcgcctcctcctcgttcccaaagggaaatcaacagcgcgatagaggcgacggcgtggcacatgcgagcgagctggatcggctccgtccgtgtccgtgccggtcgccgtcggaggggacacttgtagccgtgggcgccgcggcgggagcgggagcgggctggcggaggccgatcggagagagcacgggccgtcaaagtcctttgtacagattcttcagccaggaccatgacggctgggcgagacaagaccaagaaaaatcccactcttcaaaaacacacacacgtaggcattctcagctagggagatccggcgccacaaagaagtggcgccgaactgtaaaaccaaccattttttatccttttttccttcagatttttatttttttggcaacacctatactagtataggaggaggagagaagacagcagactgacaggccctgattgggatgtaagataggctgcccgcctgaaagcaggctggcagctaggccgaataatcaatggatcgatcgctcgcggcaaagggccaaaaggaggcccccgggagagcgacccctctgtattgtttgttacacgtcaatgcagctggaaatgcctttcttgtggaaaaaaaaaaaaaaaaaagctta

SEQ ID NO: 4039 - DNA, 787 bp, Triticum aestivum
  unsure (1)..(787): unsure at all n locations
  Clone ID: TRIAE-23APR03-CLUSTER11989_1
tgccggcacgggtgtttttccccagttccgcggagcgttttataaaaacgaacgggtcccaataaagcgggcgcttttattacacgctcccctctattggggcggaatttggaggtgacccggggcccccgcccctcgtggttggtgcggggttttttttttaaattaaccttttacttttttttttttttttttcccgttcaaattcttacaaaacacaagtatttttattccgatggaagacaagtacatcggtacatgcatgcatacatacacagctcgttatttatttgtaaaagcgtggctgagctttttacacgtagtgccagaggctgtgtggtacatgtagctcagtgactcgacgctctcactgctgcccgccggcgccgggaagcttctccttgatattttccacgacgcccttcttctcaccggcggcggccgcgccgacggcaggagcaccgccgtggttccccgtgggcccgccggaacggcccaggccaccgtcggtcttgcggtcgtccctcgtcgcctggagctgctgcacgcccccggcaccagcaccggcaggagccccgccgtggttccccgcggggccggtggcgccgccgtgcccggtcgccttgttggtcgcgtccattatccttgattttcacgcactttactccgatcgatgtgctacaagatgaactggtggtgtatcgtgttgtattgtattgtcgtcgagttgctgcgaattggtatgcaggttgaacccaccccccgcccgcctttagcccccggncnc

SEQ ID NO: 4040 - DNA, 1983 bp, Triticum aestivum
  Clone ID: TRIAE-23APR03-CLUSTER119_1
tccctcctggtgtggagtccaggtcggactcaccgcgcctccgattcgatccccccacgccggggttcagcaggaatcctaagcttggaagggcggaggaatcctgcacacacatagctccggaatcccgcaagcgcgagaacgcccggagctacacccgagttactgcagcgacatgaagcccaaggttaccgcggttcaagtgccaggaatgccaccgggcgctcgtcgtcgtcggcgtggagggattccccgataggttgcgcgctcacgccaactccggtatacatgcatcctctgttcagggcagcattatgggggcgagcaggatggacagttcttgcgttgtgttgtccaaacacaacagatctcaaagccgcagcatccccccacggccgcctagtgcagcagcccggcatgttgagcctaaccaatcatcaagagtaatagaggcgtcatatttaatgcttccacctgccgctgcttccatatacaagacatctacctccgaaggaggtggcgcgcatctgtcgcctccaaatgttaactctactagcccttcaccaggcaacaattctggatttcactctagtgtgactgtcttaaagcgggcatttgagattgctagttcacaaactcaggttgagcagccactctgtctggcaatgcatgagggtgctttctgataagatggacaaggagattgaggatgtaaatactgacatcaaaagcttatgatgcatgtcttcaacgtttggagcaggaatcctacaacatccttagcgaaactgatttcctcaaggggaaagagaagatagaggaagaagaaaagaaactaaaagctgctattgaagaagcagaaaagcaatattcagaagttagctctgagatgaaggatctggaaccaaagtctaaacaatttgaagaattagaagagcggtattggcatgaattcaacagcttccagtttcagctgacatctcaccaggaagaaagagatgcggttttggccaagatagaagtttcacaggtccacctggaactgttaaagcgcacaaatgttctcaatgatgcattctatatttcgcacgatggagtgattggaacaataaacaatttccgtctcggtcgtctgcctaatgtacaggttgagtgggatgagataaatgctgcttggggtcaggctgctcttctgttacacaccatggctcagtacttcccgaaatttcaatatcgaatcaagattcaccctatgggaagctacccaagagtaacagacatcaacaataatacctatgaactgtttggtcctgtaaatttattctggagcacccggtttgacaaagccatgacatggtttctcacttgcctgcaagagttctccgagtttgccataagtttggataaagagaacaatgttccatctgataagtcattgaagctcccctacaagattgatggtgacaaagtagggagctacacaatcttcttaagttttaataaactggagaactggacaaaggctctaaaatatatgctttgcaacctgaagtgggttctctactggtttatcggcaatacaagtttcgcgccgccatctgcatctttgtacttggcgcagtctccaaacaagaagggttgatgtgatgtttaaatgcagacggaatcactgacctcagaagctggatcgttgattgtagccgcatgttgaccaatcacaacaatatgaaattgatgtacataaataccaggcatagctagttttcttgttgcttccaagtcatccatgtgtgtacctgcccaatgtatatgaatatggactggagtgagttccattaatatgtactccctctgtaaagaaatagatcgtttagatcagtatttatcagctttgcgctacaagtgcagagaaattggaatgacagcgaatgcagtttcaatgtaaaaaaaaaaaaaaaaacacctaaaaaaaaaaaaaaaaaa

SEQ ID NO: 4041 - DNA, 1475 bp, Triticum aestivum
  unsure (1)..(1475): unsure at all n locations
  Clone ID: TRIAE-23APR03-CLUSTER120547_1
atcaccctcctttctctctctccatctctctctctctctctgccccgggccgcggactttctctctctctctctccccgtcgtcgtccctcccaccgagtcatcccatcccaccacgcaccgaacgaaacaggggagacgcccgtaaaaaagtatcgatttcctcgcggaggcatggaaaagtcggagtttttatgcctgcgggggtgctactagtagtagtagtagtcggctcgtggtggtggtggtggtggaccggtggcgctgcgaatccgagggagtagaaaggcgctcctctcctctcctccgtttcgcgagtcagagagagagagggagagggagagggagagtcagagaaaggttctagtcagagagagagagagaggttgggagggaagaaggaggcggcggcggcgatcccgtctctgagtctctgcccgtcgggcctgctgctctctccggccggccggccagcggcacagcgcgacctcgtgcgcggctgtcatgaaaagatacatttggtaggcaaagttcatccagcatgggttcaggaaatctggtgatgaagaaggtggttaagcccagctctttcgacctcgacatacaacttgataaaagttgggcgaaggcatctgctggcgggatctcactcggtgacgccccggaagcacccttgccgagctgcaaatcttctgagaagagttccgggcctcttgtgttcgcaaccgccaagtgccgttgaaacaccctcaggcgatttaagagagcccacgggcagccgatgtctacgacgctcgcggcgttgaccatggcaactcctagcagtcgtcctacattctcggataacatgagcacgctacccgcgtacccgttgaatagcggcgatgtcatagagtgggctgtcatggacggggaagggcaggaccttaaccagaaggaaaggccctgcgaggagagctgctgctcgtatgttggcaacttccatgagcttcagaagcacacccagcagaggcatccgaattcccgcccataggaggacgaccctgctcgcggaatcgactgggaacatttccagcagtcgtccgatatcatcgatgtctggagcccgccgcacgcgcacccgccgtccagcgtactcctcggggtctaggcccccctctcgccggtcgtcctgcctcgcgccgcctctgaccggctcctcatggtcatgcgcaacggctcccctcccggtgtctcccgctggccttcgggccttcnaaaaggccgaagaagacaagncaaaggaaaagganttgttggaaggaggaaccgcaacagtctggtcaggaaactcacatcgactttcaacaaactgttnacataagggaatcaatttnatngataaatatatnccttttaaggggatccnatgcacatccagaaaatggcatcattcaggatccaatattccgccgacgccaacgctaggttcaatga

SEQ ID NO: 4042 - DNA, 1845 bp, Triticum aestivum
  Clone ID: TRIAE-23APR03-CLUSTER12066_1
ccccgacggcacctgctcgactttttctccacgttcacacatgagccgctctgattcttcttcaagctcggcctcggcgtaggacaggccctcctcaccttccgccgccaccaaacgcttcttggtgggacaagcaaggaattgccggaaaagcctcttccctgccccccgttctcttcttctttaactagccttggcgattgcctagcggttcacaagggcggagccggacggagaggtgctggggatcgagaggatgatggcggggcgggtcttggttgccattgcggttcttgcggcggcggcggcgcgtgtttgttgcgggcggaggcccagcaggcgccggcgccagcagggccaccagacaagagaggatctcagggagtgctggtgatgtgctggacgatgaccctgttgggaggctcaaaggtgtattatctatgatcgccctggcaaaaatacaacaatgaagctgctgaagaaagaccctcggtgcctgaaccacatgttcgccgcgggagatcttcatgcgccgtcgcccgctgtccagcgcggttcgaaccactaatcctgaggatgcagattggttctgcacacccgtttatccgagatgtggcctgacgccctccgggtctccccttccccttcgagtctccgggcacgatggggggcgggatgccgttgattggtcccacctgacgacattggagctggctaagaaggtggctgataataaccatttgcaagagccatcaatgacttgcgtcgccttgccttccttatcaaggcgatgagacaattgaaccaggactccttcccttgcttcagcgtgctacacgggtgctgaccttcggtcaagagaaccatgtctgcttgaaggaaggctccgtcaccacgccccctcttccgccaccgccgtggtcgcatcttcgcctccggcccggagccacccctcggtccctccgcgtgtgctgcccgggcctctgcctgggcgaacttcaagagctccccgctgttggacatctcaaccgatcacccaccgacatactatgaagatatgcagaggtctgtgttctgcctgtgcccattgggctgggctccatggagccccaggctggtggaagccgtggttttcggctgcatcccggtgatcatcgcgctccacggcgccccgccactcgcggacgcccccccatgggcggaggccgcccggtgtgctccccaggcggctgccccctgcccttcgcggaacgccatcccatgggagggagatcggcgtgttggttcccgaggaggacgtcccaaggctggacagcatcctgacatccattccgtacagaggacatactgaggaagcaaaggcttctcgcaaacccttcgatgaagcaggccatgctgttcccccagccagctcaagcaggagatgcattccatcagatactgaacgggctcgctcgcaagcttccgcatggcgaagatgtcttcttgaagcccggccaggtccgcctgaactggaccgctggcccggtgggtgacctgaagccgtggtagcatctctcgcatcgcggtttggagatgtataaaaacctttttgaaaataaacattttcagacctgatatactttgcgcctttataccaccatggttgcacagtgctgaccataagtcaaatgtacatctttttcatcttctttgctgatagctagtataccatagagcttcatcttttcttcttcttcttcttcttcttcttcttcttctttttcattagttgatgaaaaatgtcaaccattgtgcactttgttggttatatgtggatatcgtaatgcaaaaaaaaaaaaaaaa

SEQ ID NO: 4043 - DNA, 2131 bp, Triticum aestivum
  Clone ID: TRIAE-23APR03-CLUSTER120_1
actgcccctctcatggccagatggcgatgggaacgggagagggtctccactccggaacaccaccccccgccccccctcacgtctccgtccaaactgcccaccgggccgacgaagctcgcctcgcatccagactccagacctttctctcctctcctctctcccccacaccccctctccagatccccgcggactgtcaagcagctgaatctctcgtccggcccaggctgccggaggccgggggagaccgggatccgccgaggtggcgaccggcatggggctcgatttgggagccctcgctctcaagtacaccgggctggcggtgtcggaccacgactccatcgtcgccatcaacatcttcatcgcgctgctctgcggctgcattgtcttcggccacctgctcgaggggaaccgctgggtcaatgagtccaccaccgcgcttgtcctgggcctcatcaccggtggtgtcattctgatctgcaccaaaggggtgaactcgcgcatccttatcttcagcgaggatattttcttcatctacttgctcccgcccatcatttttaacgccgggtttcaagtaaagaaaaagcaattcttccgcaactttgcgacaattattttatttggtgctgctggaacactgatatcctttgtaataatcacgttcggtgctatgggattgttcagcaaacttgatgttggtccactcgagcttggggactatcttgcaattggggctatcttctcagcaacagattctgtttgcaccttacaggtgcttaaccaggatgaagcacccctactgtatagtctagtttttggtgaaggtgttgttaatgatgctacatcagttgtgctcttcaatgcaattcaaaacattgatattaatcattttgatgtcttcgttctactacaattcatcggaaaattcctctacctattcttcaccagcaccgttcttggagtagctgctgggttgcttagtgcatacattattaagaaactttgttttgcaagacactcaactgacagagaagttgctatcatgatactcatggcatacctttcgtatatgctgtcaatgctgctggatctgagtggcattctaaccgtgttcttctgtggaatagtaatgtcacattacacttggcataatgtcacagaaagctcaagggttactaccaagcatacttttgcaactttatcattcattgctgagatttttctttttctctatgtcgggatggatgcattggacattgataaatggaaattagctagtagcagtcctaagaaaccaattgctttaagcgctgttatattgggtttggttatggttggaagagcagcattcgtattccctttatcttttctatcgaacttaagtaaaaaagagtcacatccaaagatttccttcaaccaacaggttatcatatggtgggcaggtctcatgagaggagcagtttcaattgcacttgcttataacaagtttacaacatctggtcatactgctgtgcgagttaatgctgtcatgatcaccagcacaatcattgttgttctgttcagcacaatggttttcggcttgctgactaagcctctgattaatctcctcatcccaccaagacctggcaccgcagctgatatctcaagccagtcattcctagacccacttacggcgagcttgttggggtcggacttcgatgtaggccagctcaccccccaaacaaaccttcagtatcttctcaccatgccaactcgctcggttcatcgtgtatggcgcaagttcgatgataagttcatgcgcccaatgtttgggggaagaggcttcgtcccatttgtgcctggttcacccatagagaggagcgtccatgggcctggcttgttgggcactgtgacggaggcagaagaccgtagttaagtcgaagcccagaaggtgcaagtgtatttcttgtaaatgctcagatatcactcagttttgctcttgggattctttcggtgtattatcgctatttgttggtgtatattgtgcagataatttctacaggaccatgtacgctgtgtagagttttgggagccattcaagatgtacaattaatctgtaaattaatctcgttcaaaaaaaaaaaaaaaaaaaaaa

SEQ ID NO: 4044 - DNA, 1747 bp, Triticum aestivum
  Clone ID: TRIAE-23APR03-CLUSTER12127_1
acgcaataggcagaggaagcagccgcagcactcgagcaagcgtagtagtactactctcagactcagtactctgctccagtcatctatcgtctcccttcccggcggtgccccctcccggcgagcgagcgaacggtcgccgccgcgatgcagcgccggctcccggcactcctccgccgcgcggcgggcgcggggcccgcgcggcggtggctctccgccgcctcctccctcctcttcgccgacacccaggagcagttcaaggagagggtgcacgggttcgcgcaggagcacatcgctccgcacgccgccgtcatcgacgcctccaactacttccccaagggaggggaatctgtggaagctcatggggaacttcaacctggccggcctcaccttcgcccgacggagtacggagcgatcgggctcggtcacatgtacccccgcatcgcaatatcggagagcagctcgtggtccgcgtcaaccggccatggccacggcctcgccacaggagtacggagcggcccgggggctcggttagatgtaccactgcatcgccatggaggagatcagcagggcgtcccgggtcggtcggcctttcctacggtgcacactcaaatctctgcatcaaccagctggtccgtcatggcagccctgcccaaaaggaaaagtatttgccgaagcttatcagtggggagcatattggggcattggcgatgagtgaaccaaactctggctctgatgttgtcagtatgaagtgcaaagctgagaaagtagatggcggctatgtcattaacgggaacaagatgtggtgcacaaatggtccgtctgctcagacattggttgtttacgcgaaaacagatataactgctggatcgaaaggaataactgcattcataattgagaagggaatgcccgggttcagtactgcccagaagttggacaaacttggcatgcgaggaagtgacacatgtgagcttgtctttgagaactgctttgtgcctcaagagaatgttcttggtgaagaagggaaaggtgtttatgtcatgatgtctggtcttgatctggaaagacttgtattagctgggggccctattgggctcatgcaggcatgccttgatgttgttcttccttatgttcgacaaagggagcaatttggccgtccgattggtgaatttcagttcttacaggggaaaatggcagatatgtacacctccttgcaatcatcaagatcatttgtatactcagttgccagggactgtgataatggcaaagttgaccgtaaggattgtgcaggagtgatcctctttgctgctgaaagggcaacacaagttgcacttgaggcaatccagtgtcttggtggcaatggatacataaatgagtacccaactggccgtctcctgagagatgcaaaactgtttgagattggagctggcactagtgagatcagaagaatgataattggtcgtgaactgttcaaagaggactgagattattcttctggaagccagctatcagtgcatattctaacttgaggaggtgagcaggattagaccattagtgaactgtccctgatgttcaatgtttgatgatgttctatccaatccttctcatacttctgtacatgtccaacattcttgcaaataaagttcaatcttctaataaaaaaaaaaaaatgttatctggttctagtcagtatctataagtttgttgctatgatatactgcaacttgacacataatcacatttggctcat

SEQ ID NO: 4045 - DNA, 1531 bp, Triticum aestivum
  Clone ID: TRIAE-23APR03-CLUSTER1213_1
atactgtcccagtcccccccgcgtgtcctcgctccccccgcgttgcgcgccgagccgacgacagggccgccccggcggccctagcgcgccccgccttccccccctgagcgccgcccgagccaggggcatgcgaaaaaagcagcattagctgagggggaggtgccaaagattggcgaagctaaagatgctccataaaagagctgcggaagatctacactggtcgacttagagggtgctctaggacaactatctggaaaatctgcactgtattgctcagatggttcaattgcgaggtacctgatagcaagaaactgggacgtgaggaaggctaccaaaatgcttacgaaaaccttgaaatggcgttccgagtctaagccagatgagatccgttgggatgagatatcgagtgaagccatgactggaaaaatttaccgaagtgattagtatgacaagaaggcacagggtctgctcgtctatttggtatactgtatggagaatgcaattctaaatcttccagctggacaggatcagatggtttggctgaattgattttgctggcttcagcttgcctaatgtatcacttctagtgacaaagttgacagcagatgtcttacaaggtcattatcctgaaagattgggtgtggcaattctttataatgctcccaagttttttgagtctttttggaagatggcaagtccccttcttgagccaaaaacgaaaaataaggtcaaatttgtgtactcggatagacctgaaactgacaagataatggaagaccttttcaacatggatgagttagaatgcgcatttggcggtagaagcccggtcacttttaacataaatgattatgctgcaaggatgagagaagatgataaaaagatgccattattctggagccccgagaactcggctcttgctgcagagccatatcgcatgaagaaccacgggtctcaacaatgtgactcgggtttgaagactgaagagactgcatctgacgtgattggggaaacagaggctgcatctgaaaagagtggagaaacagacactgcatcggacaaggaagataccgaggctgcatctgaggagagggaagagaccgagacttcatcggggaagaggggagaaaacgcgactgaatctgtaaaggaggaattaactgagaccgtttctgaaaagaaagaagaaacagagaccgaatcaagcactgtaaaatcgacaagctcgcaaggggaaggtattgcatcagcaggcaaaagtggcagttcatctgatccgtgaagctatcagcacaagaagtacattccaatgttgatatgagctcccaccacagtgaattcccaccaacagatgaacattaaaagtgataacaacctttttaacacacaagggggaagtgttgcctgacttattttgtagtcggcccccttgtgaccttgttcgaagaaccttttggcaacaaatgaaccaatcaaacggtaacaatgataaaatactttgctaccctcagcttttgcaaaaaaaaaaaaaaaa

SEQ ID NO: 4046 - DNA, 1482 bp, Triticum aestivum
  Clone ID: TRIAE-23APR03-CLUSTER12143_1
caaattcccctcccctccccagttctcctccccaaacccccaattccaaaaaccattggggatgacggcggcctaagctctccgcagatccgcgcctcccgccgggccgcccctccggcccggtcgctctgccgcccgtcggagcagctgaccggtccgcggcccgatttgcccggggggttttgtttcgggggcttttggttcttctggcggcgttcgcgctctcccactggcgctaccaccgcagccgctccgttccggtctccccggcccaccctcgcgtgccccgcctgcgatcggcggcttccccgacctcgaccagctcccccgcaggccgcccccgccgcgccggcagcggcgggacgggggggcgaggggccatgaacccggggtgcgtgctgcggggctgctcggtctcgggctttcctgcgctactaggcacgacggctccggcgacgggctgcggccgctgcccggcgacgtctcgcacctcctcatggggtcggggttccaccgcctgctcgaccagttctcgaggctggaggctgccgccccgcgcccgccggcgtccaaggccgcggtggagtcgatgccgtccgtgacggtcgccgggggaggcggggcccactgcgcggtgtgccaggaggccttcgagcccggcgccgcggctcgggagatgccgtgcaagcacgtctaccaccaggactgcatcctcccctggctctccctccgcaactcctgccccatctgccgcagcgagcttccggcggcagccgtgcctgaggcggaggcggatgccgggctcaccatctggcgactcccccgcggcggattcgccgttggaaggttcgccggcgggcccagagagcaactgccggttgtctacacggagctggatggtggtttcagcaacggcgtcgggccgaggcgggtgacatggccagaaggagaagggcaggtggacggcggcgaaggtcggattcgccgtgtatttaggaacctgtttgggtgctttggccggggcggccggcctgagagttcctcgcagtcccgtagtggctgagcaatgttcttcctggtaactcactttcaattgatgatagtggtgaataagtaggagttagtataaggaggaaaccccaggtggtgagttattggttagtttgatgtaaatgaagggcttgcattccccaccttttgtctcgtttttaaaaaaaaaaaaaaaaaaaaaaaaaaaaaaaaaaaaaaaagaaaaaaaaaaaaaaaaaagcttatcgataccgtcgacctcgagggggatagcagtgaattatgcgggaaatcagtcactggcaatattctaggcaaagagaacaatcggcgttctcacttctgtattgtttgtgcatatactggattcgttaagataaattttgattttgcattatgttggtcccatacatgaaatttcaatatacttgagtacttctatttttaaaaaaa

SEQ ID NO: 4047 - DNA, 680 bp, Triticum aestivum
  Clone ID: TRIAE-23APR03-CLUSTER121614_2
cccatcgccaccggctgacatcctctccatcgctccctgctaagctgccactgaccattgcatacacatccttatcccaaggcgacaatggccggacgcgtggcgctggcggcggtcctgctgtgcacagcggcggccatggccgcagcgcaatcggcgtccaacgtgcgtgccacctacaacttctacaacccggagaagatcaactgggacctcaacaccgccagcgcctactgcgccacatgggacgccggcatgtccttggcctggcgctccaagtatggctggactgccttttgcgggcccgctgggcccaccggccaggcatcctgcggcaagtgcctccaggtgacgaacacggctaccggcgcacagattacggcgaggatcgttgaccagtgcagcaacggtggcctggacctggactatgacacggtgttcagcaagatcgacaccaacggggtgggtatgcagcagggccacctcaccgtcaactaccagttcgtcgactgtggcgataactaaggaagaaataattggtgctccgatgctatgcaaggaaaaaaaagattctggattacaaataatgatgcatgtctgtgaattataatgaagtggaataaattttactgtgatgaatggatccaaaaaaaaaaaaaaaaaactatgcacttgataat

SEQ ID NO: 4048 - DNA, 1095 bp, Triticum aestivum
  Clone ID: TRIAE-23APR03-CLUSTER12164_1
gtctcgctttcatcttcctcctcttctaccctattcttgatccatctttattttgtgtagaacaacatcaatatcctagtattggagcagattatattgtcttctggatcttaacaaaattctagtttcaaacatattgcagatgcaatgcagtgacagaaagattcagtcattcatcgaccaccacatcaaccctgctttccttccattccataacaatgataaacagactgcaaccagccacaacattcactactgctgctcctagagtttaggccgagattcaggttgcccaggacagatagaacacctgccatttacaaaacgggaaaacgagcacccttcttcagctccgtctagatgtcatcatccagctcgttcttctcctcttcctcctcttcgtcctctggggcatcttctggcttatccacctcctgctccgcatcctccacctcctctgcatccgcatctgccttctcctcatctcccacattgttctccgcgctgccctcgccattggcaaactgggccttgagctccttggcctggtcattgtagggcttcttctcctcttcggtcatggatttccacttctcccctgctgccttgccaacggcggcaacacccttctcgtcagggtgagaggccttgaactcaaccctgaagtccttcatgaagaggaagaaggcagttggtgggcgctttgcctttggcttcttggcaccatctccgtctgccttgctcttcttcttccccttgcctccggcggcagcggagggcgtcttcctcttcttctcctggatctcgacggccttctccaccacctgcgactcgaggctgaggcgtatcttggagtcgaggctgcagctgtgcaggtcgatgaggacgatggctacgtccttgttgcacgcctcgcagcgggtgaaggcgcttccgtcgcgcgcgcgcttgaggacggtggcctcgacgcgcttgcgggagcggggggcgttgccggcggtcgccatggaactggacggatctggctggatctctcttgccgcgggggaggagtggaggggaggggaggtgattggatctcgattccttgctgct

SEQ ID NO: 4049 - DNA, 1249 bp, Triticum aestivum
  Clone ID: TRIAE-23APR03-CLUSTER12171_1
gaattcatttcgaaatgaggcccatgacgagcccactgctcctctccccatccccttgccgtctcctccgccgcctcttctcccgcgcccctcgccgccgcaaccctacgaccccgcggcccctcgccccacacctcggccgccgccttcccctccgcctcccggcctccatgtcctcctccagtgccgggacccccgactccgtcgtcgccgacgccgacgcgctcgctcgcaaggtcgccgccatccgcgccgccggcccagctaagctgcaggtgattgccgacttcgacggcacgctcactcggtactggtacgacggctcccgcggccagagtagccatgggctgctcagacaggggaatgaagagttcgactccaagagggaggcactgttcgagcactaccaccccatcgagatcaaccccgacatcccggtgctggagaaggccaagctcatggaagaatggtgggggaagactcatggtctccttattgaaggggggcttacacaagaagctataaagaaatcggtggctgatgctgcaattgcttttcgagatggagtggtggagctgtttgaatttttggaggctagagatattccagtgctagtattttcggctggacttgcagacatcattgaggaggtcttccggcagaaactccaccgatcattcaagaacatcaagattgtgtccaatagaatggtctttaatgaagagggttgtcttgtagcatttaaagggaagacaattcatgttctaaacaaaaatgagcattccttggacatggcagctccagtgcatgacagtctgggggatccaaatggttctattgatgactattcattggtgaaaaagaggaccaacgtgctgctacttggagatcacattggagacctgggaatgtctgatggtttaaactacgagaacaggattgctgctggattcctgaataccaacatcgagaaatctctgaaagattactccgaggcatttgacattgtttatctgaatgatgcgtcgatgcggggagttgttgagcttgtgtctgatctgtgtccttaaccgagtcatctttagctgaacctagaccctgaaatctgggttatctatctatgcccgaaacttgctaacttggtaaacttgcttcatgagaagcacttgtacagctaggcagcagcctgtatcaaatgattatgatgtacccaattcctaggcatgccgtaaatacatccattttatgc

SEQ ID NO: 4050 - DNA, 1624 bp, Triticum aestivum
  Clone ID: TRIAE-23APR03-CLUSTER12173_1
ccaacgcgggagagctcgggtaacaaacttgcagggcccgggcaaactggtttacagatcgcactaacgatcacacgaaacgaacgcgccccagttcctcgccccacacataccagctttataaccggtcctccataaacaagatgttgtcgtcgataaccgtgaccgggggccgcccagggatcgcacagcttttttgttgttttttctcttttcttgttgttcctttttttttttttttttttttttttttttttacacaaaaacacgcatgaaatcactggagagtgctcgagttacaaacttacagagcctgccaaacaaatttacagagttcactaaagaacaagttcctatctacaaacataaaagcatgaaaatggtcctcacaacactacgggttttcgtcgaaaaccgaaagaaggaaccgcctaggtatcgcacttccacctcgacgtcggcacacagttcaggtagtggcaccagtggcagccgtcattcccgttcttgcccttgaagagcatcaccaacgaaagcgtgaacccgacaagcagcaagacgagtgccacaacccacaggacatattggtatggtttgtacttggggggctgattggtatggggcagctcgctgcgttccaaccaaccgaattgtggccttgccagcagaacgaaccccaaaaggaacccggtcaggaatccaccaatgtgagcaaagttatcagcatgcggtagtatcccgattgccacgttgatcgcgattataaacagaagggttattatggctgcaaccttgttggagtaaatagtccagttcataagtagctcagaaagcatagatccaagcagcccaaataaagctccagatgcaccaacagagatgtagttatttcgtaggaagagtgcagacatcacgctgccaccgaaaccagacagtaggtagatagcgccaatgcgaacaaacccaaattgctgctcaagacgaatcccaataaacagcagacttagcatgttcacaaccaaatggatcaggccagcatggagccagatgcagctaatgagacgccacccctggtgctgatggacaaccttgttccagtccagagctcccattttccccaaagtggtggaggagggcccgaggagcgggttctcgcggagcggctggaaggagaatcgccggaggaatcccgcgacgcagccgccgccgagcgcgctgccgtgcctggggcagtcgttgacccacatctcgacgacgaagacggcgacgcaggcgacgatgacggtgggcacgagccagggccaccacttgcggtccccggccgactcgtaccctccgaaccctccccccgccgccgtcgccggcgccgcccggcccttcccctcgccgcccccctccatgctgtcccgctgctggtctcacgcgctcgtagctggctccggtgacgcgatgtgatgtgcaagccgaggacggaaggatggggagggaaggaaggagctggagtcaagtggcgctggctggctcgctctcgctctcgcgcgctcggggtagtagcttggaagcgaggggacggggaccgtgaccacacatgtcaatacatcccccccacccggctctctgaccg

SEQ ID NO: 4051 - DNA, 1693 bp, Triticum aestivum
  Clone ID: TRIAE-23APR03-CLUSTER1218_1
agcgtgaccagatttttcttttaacttcatccaaccccgaccccaatccgtttttaactccgaaacccctccactctctcgcccaccccgaatccgtcgccatgaactcgctccaatccttcctcgccgtcgcgcccgtcaagccggccgcggccgccgcgaggctcccgtcgtcccggcgggcgcgcgtctccgcctgcctcgcgaccccggcgcccgcgccgaccgcccccgcggcggcgccgtcggcgcggcgggagctgtccgcggcgagccgggccgtcatggcggacgaggccaagtacatcgtcggcacctacaagcgcgcccaggtcgtcttcgtggcggggcgcggctgcaagctctacgacatcgacgggcgcgagtacctcgacatggccgccggcatcgccgtcaacgccctcggccacggcgaccccgacgtggacgccgccgccgcggaccagcgcggacgcctggtccacgccagcaacgtcggctacaccgtgccccaggtggagctcgccaagcggctcgtggaggcctcctttgctgaccgcgccttctttgccaactccggcactgaggccaatgaggcggccatcaaattcgccaggaagtaccagagggtcgcgcaccccaacggtgacgcgcctacggagttcatgtccttcaccaactgcttccatggccggaccattggctcgctcgcgctgaccagcaaggtgcagtacagggagccctttgaacctgtcatgcccggctcaacatttgtcgagtatggcaatttggaggaggccaagaaggtgatacagtcggggaagattgctgctgtgtttgtcgagcccgtgcagggtgagggtgggattcacagtgctaccaaggagttcttgcagggactgcgggatgcttgtgatgaggcaggggctctcttggtctttgacgaggtgcaatgtggtctggggcgcacaggttacctctgggctcatgaggtttatggtgtagtacctgacataatgaccttggcgaagccactggccaatggccttcccattggcgtcgccttggtcacggaaaaggttgctgcagccataaattacggtgaccatggaaccacattcggcggaggcccttttgtgtgccatgctgcattagccacattggacaagatccagaaacctggctttctagcagaggtgaccaggaaaggagaatacttcaagcagctgctcaaagctaagctgagtggaaaccctcatgtcaaagagatccggggggccggtctcatcgttggcatcgagcttgacgtaccggctgggcctttggtcgatgcatgcttgaatgctggtgtctttttgctgacggcggcgaaaggtagtgtgcttacttgtatgctggtgcctatctgctgacggccggggaaggaaatgtggtcaggctcgtgcctgcactcatcacgtcggcataatgcctttgaccaagctggtgaacaaataatggtacgtatatgatgctcttgaagccatgaccaagtttctttcacaagttctaagggaatctacatgtttgaagtttctttcaaaatttggaagggaataaaatgtcatgttggactaaaataaaaaataaaagtccgtatcaaagatttgaaagaaaaaaaaaactctgaaaaaaaaaaaaacaaaaaaactcg

SEQ ID NO: 4052 - DNA, 1553 bp, Triticum aestivum
  unsure (1)..(1553): unsure at all n locations
  Clone ID: TRIAE-23APR03-CLUSTER121_36
gccgtccttaccctgccttcccttggctcctatcaactcgtttcttactttacctcctgggaggaaaacccaactggagcccctcctttttctgccttcggcttgggtcctatattataaaccaaagggaggaaggacagctatagctagctgcatcagagagctccatacctagtcgatcgtctgctctcttctgcctagctagagttcctgggctgagactaagaagaggtcgagatggggaggggaaggattgagatcaagaggatcgagaacacgactagccggcaggtgaccttctgcaagcgccggaacgggctcctcaaaaaggcctacgagctctccgtcctgtgcgacgctgaggtggcgctcatcgtcttctccagccgcggccgcctctacgaggtactccaacaacagtgtcaacggctacaattgacaggtacaagaaggcacatgcttgtggctcaacctctggggtacctctcatagaagtcaatgctcagcaatactaccagcaagaagctgcaaagctgcgccaccagatccagatgctgcaaagcactaacaagcacttggttggtgattctgttgggaacctgtcactcaaggagctgaagcagctcgaaagccggcttgagaaaggcattgcgaagatcagggccaggaagaatgagctcctatcttctgagatcaactacatggtcaaaagggagatagagcttcagagtgacaacattgatctcagaaccaagattgcggaggaggagcagcagttgcagcaggtgactatcgccaggccctcggcggcgctggagctgaaccctttcaccgcactggacatgaagtgcttcttccctgccaacctcttcgaggcagcggtgcaagcgcacgcgcaggcacggactcaggctcaggctcaggcgtcgcttcagctgaacctacgctaccagcagcttgctccaccgggcgccggcgatgtggctcatcagttctagtcaacctgcaggagctcttgcttgactacacacactgcaataaaactggaaggtcgtcggcagtgttatcagtactccactgttccggtcaaaccgtctggctaagatatatgtgtgctaagttttattgtctcaatacctctaaattgccgctggtgtagaaccaaatttctgagataaaacctattgattaataaaaaaaaaaaaaaaaaaaaaaaaaaaaaaaaaaaaaaaaaaaaaaaaaaaaaaaaaaaaaaaaaaaaaaaaaaaaaaaaaaaaaaaaaaaaaaaggggggggcggattaaagaaaaaaaaaaataaaaatacgggtaaatgtgaaagtaaaaatttttaatatggggaaaaggaaaaaaaaaaaaaatgggccggggtttaaaaatttaaaaaatgggaaaaaacctaaaagnttgccaaattaaatagtaatgtgggcaaatacccattttcccctagggggggtataagcaaaaagaggccggaccggaaccccctttcccaaaaagtaaaaaaaacgcgaaaggggaaaggggaaa

SEQ ID NO: 4053 - DNA, 1256 bp, Triticum aestivum
  Clone ID: TRIAE-23APR03-CLUSTER121_38
tgaacccgtctcttactttacctccttggaggaaaacccaactggagcccctcctttttctgccttcggcttgggtcctatattataaaccaaagggaggaaggacagctagctagctgtatcagagagccccatacctagtcgatcgtctgctctcttctgcctagctaggtttaccctccttatctgcgtgtttggcagagttccgggctgagactaagaagaggtcgagatggggaggggaaggattgagatcaagaggatcgagaacaccactagccggcaggtgaccttctgcaagcgccggaacgggctcctcaaaaaggcctacgagctctccgtcctgtgcgacgccgaggtggcgctcatcgtcttctccagccgcggccgcctctacgagtactccaacaacagtgtcaaggctacaattgacaggtacaagaaggcacatgcttgtggctcaacctctggggtacctctcatagaagtcaatgctcagcaatactaccagcaagaagctgcaaagctgcgccaccagatccagatgctgcaaagcactaacaagcacttggttggtgattctgttgggaacctgtcactcaaggagcctgaagcaactcgaaagccggcttgagaaaggcattgcgaagatcagggccaggaagaatgagctcctatcttctgagatcaactacatggtcaaaagggagatagagcttcagagtgacagcattgatctcagaaccaagattgcggaggaggagcagcggttgcagcaggtgactatcgccaggccctcggtggcgccggagctgaaccctttcaccgcactggacatgaagtgcttcttccctgccaacctcttcgaggcggcggtgcatgcgcacgcgcaggcacaggctcaggctcaggctcatgctcaggcctcgcttcagctgaacctaggctaccagcagcttgctccaccgggcgccggcgatgtggctcatcagttctagtcaacctgcaggagctcttgcttgactacacacactgcaataaaactggaaagtcgtcggcagtgttatcagtactcaactgttccggtcaaaccgtctggctaagatatatgtgtgctaagttttattgtctcaagtacctctaaatttgccgctggtgtagaaccaaatttctgagataaaacctattgattaataattatttttttccttttcttttttgatgaaaaggaggtcgaaacaaaaaaaaaaaaaaaa

SEQ ID NO: 4054 - DNA, 1992 bp, Triticum aestivum
  Clone ID: TRIAE-23APR03-CLUSTER12271_1
ctcaacgcccccacccccacgtcgaggcagcgtagcagaagcatttccggcaccgaaatttccatcgatctgaacgcccccaccggccggtcgaccctccacccaccacctaccggccccgtcgccgtcgccgtcgtctccagccccccctccgcccccaaaagaccctagccccggccccggccccgccgcccccagagcccccaccatgtccaccaacggcagctccccgagggtcagggacacggagagcagcctggagaaggtgaagcggcagctgtcgacgggatacgggaggtacctgctgcagggccccctggtgaagcgatctgagacgctacggaactggaacgaaagatggataatattggacccatcgtctggcaagatggaatacaaacttcggaggaatgaaactgctgttaagggaaccattctatttgatgcttcaagcaccattactttgtctcctgtaaattttcaaggcatgccaaagtatgacggatgctgtttctacattggaactcctcagaaaaaggattactttctttgcgctgaaactcctggtgctgccaaagcttgggtatctacattgcatgcaactcagttagtactacaagcgcataaagaggcagtaaattctttagctgggaatggctctccttctacattaggcacggttgctactgcagttgctaatgctaatgcaactgctttggaggcaatgaaggagatagatgcagcactgaaggtttcaatgagggcagctcttgggttgggtacaaataattcgaatgtgggtcaacttgatgatttgactatcatgaaggagactctccgagtgaaagatgaggagttgcagcatttggctaaggacattcgtgctcgtgacgccacaattcaggaaattgcagagaagttaacagagaccgcagaggctgcagaagcagcagcttctgcagctcatacaatcgatgaacagagacggcttctatgttcagagattgagcgtctgaaaaaagcaatggaaacacaaatggaacaatccatgcttaagctacggcaatctgaagagaaggtaattagcctgagcaaagagaacgaccagttgctgaaggaaagagacgccgcatttcaggaagcatatatgtggcgcactgaactaggaaaagctagagagcaagcagtgatacaggaagcagcaattgcccgagcagaggaaaaggtaagggtgtctgaagcggatgccgcggttcggatcaaggaagctgctgaaaatttgcatgctgctgagaaagaaaaagaagaacttctagcccttattggtgttctccaatcacaagtgcagagagaacaaagcagcacgaagcaagtatgcgaggagagatccgagtcatgctccggcgccgacaactcccctccgctgacgaagcacgtcgacgcatcggacgacgacgtggacaaggcgtgcgtgagcgattcgagatcggtcttggtctcgagcgagagcacggaggtccagctggccgtggatggggtggacatccgccccatcggcgacccagagtggggcagcttccagcagccggaagcgctgattgccgacgtgcgggaggtctccccggaggcggaaggcagcagcctggatatcccggtggtcaacccggcaccggccaatgatcatatgcagggaggggcaacacatccctgaaggcctggaggtcttggagctgaccattgctttcttgggtggtttgtgattattgaggagactggcagggatttgaatcctctcgagaattacttttgtgtttttctttttgcgctgtttccgggttgtgtctccgttgtatttaagtatgcaactcaataaaaagatgatagcggtttgtcgtgtgattgtaaattattattcacgtcaaaaaaaaaaaaaaaaaagcttatcgattgtttaaacacaataaagttggaacgggaggggggaaaggagtt

SEQ ID NO: 4055 - DNA, 2113 bp, Triticum aestivum
  unsure (1)..(2113): unsure at all n locations
  Clone ID: TRIAE-23APR03-CLUSTER12291_1
acgggccggccgcccgcactctccccccctttcgagcacccttccccacttccctccccccttctcgtcctcccagccacagcgggcccctgcacccccgttccctccgcacggtgctcgccacggggccgccgggtcttccgagcccggcggtcggtggcccccacgatgatgggcggctcttttgccggttgcggcttcccgccccactgccagtagagatccccaaacccgtcaaacctttgtgtgcccccggctcccctcccctctcccctcccctctacatgtcgtgcgccactgcggccacagcgcgctccggatcggcggatctcgtcgggcggacggccgccacgatgatgagcagcgtactccccgtccggcgcacgtcgccccccttccgggggttggaaggcttcttcgagagggtacacgaagctatcgcaagggcctcgccgttatattgcttctcgtgcacctcttggtcctagctgttcccatcggccgtcaactatctcgcgcttatccctcgcaaggacaatccctttcgcctggaacttgataactgctggctatgtcgagcaaaccattccaggggtgattatcagcatcattggtcttcttttatttgggaaattattagagcctttatggggcacaaaggagttatcaaagttcgtttttattgtcaacttctcaacttcaatgtgtgtcttcgtaactgctattgctgtgtactacgtaacacaacaagagagctacctctacactcctctttctggtttctatggggttctgtcaggattgctggtgggcatcaagcaacttatgccagagttggagcttaatcttttcgtgctgaagattaagggaaagtggatcccatcacttattgcactgatctccgttgttgtaagcttcttcatgaaggacttggtatcttacctcccagttatactgtttggcatttatatgagttggatttacctgcgttacttccaaaagaggctagagacaggcctgaaaggggatccaagcgaggagttctctttctcaagtttcttccctgcaattctgagaccagttctggatccaatagccacaatattccataggcttctttgtggaagatctgatagggcagaccggggtcagacattggaaacgtcatcattgccgggttcagattctactgaggcaaacaggaggagggaaaggggtcaaagggcactggagcaaagattggctgagaagctggccgcggtcaagagtacagagagcacgtctctcgacgcatccgacaaagtttgagccttctacaaagacgacctgccaaatgttgtgaattcccggtgctgcgttacccaagtgacgttgtctggaggacaagggagcatcgttggttcggccgcgagcttctaggggaggtggtgatgcgagaatgtgtgattttactgatttagggaaccatatgccgaactgtgcaatgatagcatcatgtttgttagcacaatttagccgcgcactgactgctgagagtttttcgcttttcatttttgaggcccagccagaggctttccttgagcatgaatgagttgccgcattggtttgtttgtcaaaaaaaaaaaaaaaaaaagcttatcgatccggtcnaacccccaggggggggcccgggaaccccatttccccccaaaaggggagccgaattaacgccggcttccttggccgccgtttttttacaagggcgggaattgggaaaaacccggggggttcccccactttaaacccctttgagaaaaatccccccttttttcccaagttgggggaaaaaaaaaaaaaaagcgcccccccaatatccccctttcccaaaattggtgcccccccccgagggggggcaagagaaaatttttacccccttaaaattttttgaaaaaaccccccggaaaaattttttgtgaaaaaacccccttcttttttttttaccaagagggggcgaaaggcggggaaacctctttttttttattcaaaaaaaaaaccccccccnggggggggggggggggttttctcccctgtgttaaaaaaaaccccctctcttattaaaagaagggccgccccc

SEQ ID NO: 4056 - DNA, 1582 bp, Triticum aestivum
  Clone ID: TRIAE-23APR03-CLUSTER1231_1
gcattgttttttcttggtccagagacccaggccgcccgcagccaccgagatttcctcgccctttggccccccccgcaagcctcctccaaagttcccccaccctcgcgccccccccctatatatcgccctccggcgccaattcggcgaccccccgcccccttttaccccgagccgatccaaaaaaggagttccgtcacagtcttcgctagcggccacgaaccgaggcggcggccgcctcagagagagagagagcggagaggatcaggctcgtggtggcgaaagggtaacggcggcatcgagaactcgcctgcgatgacgcggctggatggcatcagccagccggagcccgatagccagagatcggccgcgatgctcaggctgacgtgcttggtttgtgctggctcctaggttcagccaggtgtgcttagccgagatttttgccgcaaggattaagtcctttgcaattcgatacattaagtaaaaagcagtgactccatgaagataatactcgatgagaagaatcgatgctatacacctatgctaaatgagaaaattaagccagtaaacaatgtgaagaatggccacaaggaagggttttatgttggtgttgaggacccacagtcaaatagacaattttatggtccaaaccagtggcctcctgaagaggtattgcccaaatggagggaggtgatggagcaatatcacagggaagcattcagagtagccttgtcagtcgccaagatcattgctcttgctttggacctagacgtggacttctttgataggcctgaaatgcttggcgaatcgataggcacattaaggctctcgcattatgagggcttgcactatgaaggtcaagtgtcaaatccttctaagggagtttatggagctggtgcacattcggattatggcctgatcactctcttagcaactgatgatgtagttggtctccaaatttgcaaggacaggaatgctcagcctcaagtatgggaatatgtagctcctgtgaaaggcggctttattgtcaatcttggtgatatgctcgaacgctggagtaactccattttcaggtcaactttacatcgagtggtccttgatgggcaggagcgttactccattgccttcttcgtggaaccaagccacgactgcgtagtcgagtgcctgccaacctgcaaatccgagacgaatccgccaaagttccccccaatcacttgctcggtgtacctatcccagcgctaggcggacccacacgcagatctgcgcacttacagcgacggcaaagcctgaaagaagaagctgtggtttttgccctgttccacttttttttgccttcccatctatctagtatgacgtgtaatgttgcaagtggcaataagaatgcccttaggacggaggatggtaatgttggacggaggatggcaatgttgtactgctaatgtgctaatatacagtgtaaccattgcttgtgtagacatgaacaacatgaacaatggttgccttctttcaaaacgtctacaagaaccggtgcttgttccgcaccggggccctctctttctgagtttttgggaaaaaaaaaaaaaaa

SEQ ID NO: 4057 - DNA, 2036 bp, Triticum aestivum
  Clone ID: TRIAE-23APR03-CLUSTER1235_24
aacaaaaacgggggctctccccgccggtggggggcccgtttagaattaatgggatccccccggggctccgggatttcccccggggcccttttcttggaacatcctaaaaaaaacaacccgtgggcagcagcagcttctctgcatacaccaagaagtcgcctcccttgctttccttcctccagcagtgcgcgcccctcctctcgagatcttccccgagttcctgagatctggttgtaagcagccaagatggtgaagatctgctgcatcggagctggctacgtcggcggcccaaccatggccgtcattgccatcaagtgcccggcgatcgaggttgttgtcgtcgacatctccaagccccgcattgacgcctggaacagcgacaccctccccatctacgagcccggcctcgacgacgttgtcaaggcctgcaggggcaagaacctcttcttcagcactgatgttgagaagcatgtcgccgaggccgacatcatctttgtgtccgtgaacacccccaccaagacccgcggcctgggagccggcaaggccgccgacctcacctactgggagagcgccgcccggatgatcgccgacgtgtccaagtcggacaagatcgtcgtcgagaagtccaccgtgcctgtcaagaccgccgaggccatcgagaagatcctgacccacaacagcaagggcatcaactaccagatcctgtccaacccggagttcctcgccgagggcacggcgatcgaggacctgttcaagcccgacagggtgctcatcggcggccgggagacccccgggggccagaaggccgtccaggccctcaaggaggtgtacgcccactgggtgcccgaggcgaacatcatcaccaccaacctgtggtcggccgagctctccaagctggccgccaacgcgttcctggcgcagaggatctcgtccgtgaacgccatgtcggcgctgtgcgaggccaccggcgccaacgtgtcggaggtgtcgtacgccatcggcaaggactcgcggatcgggcccaagttcctgaacgccagcgtggggttcggcgggtcgtgcttccagaaggacatcctgaacctggtgtacatctgcgagtgcaacggcctgccggaggtggccaactactggaagcaggtgatcaagatcaacgactaccagaagagccggttcgtgaaccgggtggtgtcgtccatgttcaacacggtgtccggcaagaagatcgcggtgctcgggttcgcgttcaagaaggacacgggcgacacccgggagacgccggcgatcgacgtgtgcaagggcctggtgggcgacaaggcccaggtgagcatctacgacccgcaggtgacggaggagcagatccagcgggacctggccatgaacaagttcgactgggaccacccgatgcacctgcagccgaccagccccacggcggtgaagcaggtgagcgtggtgtgggacgcgtacgaggcctgcaagggcgcccacggcgtgtgcatcctcaccgagtgggacgagttcaagaagctcgactaccagaagatcttcgacaacatgcagaagccggccttcgtcttcgacggccgcaacgtggtcgacgccgagaagctcagggagatgggcttcatcgtctactccatcggcaagccgctcgacggctggctcaaggacatgcccgccgtggcctaagttcacctcgtcgccccgccggatcggaggaagagcaagaagtggtttgaccatcattcattatttatagtttgcattttgcaggagaagcatctacattttctctgtcggccataaaattttagcaaatcttcatgtcttgtcaagtttcgattcgatacatgtttgcgtctgtagatcttacttataatcaaatcctcgggcccctgtgctgcctgaggaggttttccgttgtatcccatgaacgaactttgtagcctgttttgctgaaatcattacagaatcaatgtgttttttcgccaaacaaaaaaaaaaaaaaaaaagcttatcgatagcatcgacctcga

SEQ ID NO: 4058 - DNA, 1546 bp, Triticum aestivum
  Clone ID: TRIAE-23APR03-CLUSTER123770_1
aacgcaaccaaaaagaactcgttccaaatcttcagcctccgtcccgcaatccaccccccgccaagaaccccccggcaaccgtccccccggcggcctccccgccggccccccggacccaccggggcattgcccagggtttgtggtggtatttttcggaaagttttgggtattaaattttattaaaactttcttaaatatggtttaattaaaggttggttgagtaccttatgattggaccctatgttagggaattttctttctccccagaaatttgggacccccctttttcccaagggattgggaagttccaaactttaattggtagggggggttgggaaacaggctttccccgaaagaaccttgcaggacctgccccccaatgcctttccgcccaaatggcaaacaagttggggggaaaagaaatctttgtctgcgagagggagttttccggcatcaacatgtgatgagcgactcattgatgcattgcctccagagggtcaccaatgcagggtcgcttttctttccccccaagattgtcgcacttggaagatggcttgcctggtccttctggcaggcaccggtgatcactcatttgagagaaggctccggcttggtggacctcttttgaaggacaatattgcaaccatggttcttgagagcccctattatggacaacgacgtcctagcatgcagcatggggccaagcttcaatgtgtgagtgacttgctactcttaggaaaagccactattgatgatgctcgcagtctcttatactggttgcaggctgagcctggttatggcaagatgggcatatgtgggctcagcatgggcggtgtacatgctgcaatggctggatccttgctttctacgcctatccccacactaccatttcttgctccacattctgctgtggtacctttctgtgaaggactttacagacatgccacagcttgggaagctctgagagaagatgcagcagcattagctaaagatgcaacttctttgaccgaagatgcggcatccggaatcaccattgagcaagtaaaagacagattacggatgacggttatattcctagacactcggtgatggagctccagaaggcatggccgggctcagaagtccggtgggtgacgggaggccatgtgtcctcttttttactccacaacgactcgtttcgcaaggccatcgtggatgcccttgacagattatagcagggcgattcttgtgtacccatggtcagggatacacaccaattgaactctgcaagctcatgacggattgcatctcttgttgtattttcttttataagaagagccgtgatatggcacattagttgttgtaacttaattaagagtttggattaaacaagtgggagaatgaggggcagtgagtatcaaaattagtggagatgttggcccattggctgtagatcacatttgtaacacaaatacagtgacttgttgattttttaactggcaataagatgattcacaatgctgagaagcaaaaaaaaaaaaaaaagagcttataaatgaaaggaaac

SEQ ID NO: 4059 - DNA, 1772 bp, Triticum aestivum
  Clone ID: TRIAE-23APR03-CLUSTER12380_1
caatccaacaatccaactaatcatcccctctgatggcctcgctgctgcgcctcccctcgctactcgtgccggcggcggccagaccggcggccctgctccgccaccggggccgctgcctccacacgtctccggcgaggctattccctgccgctacaaccgcgggtgcttcctcggcagcgcccgttaagatggagacacgcggcggcgacagggaggggcaggtgacgccgcggtcgacggacttcaacgcctggtacacggacgtgatcgctgccgccgagctcgcggactacgggcccgtgcggggcaccatggtcatccgcccctacggctacgccatctgggaggccatacaggattatttgaatgtaaagttcaaggagacggggcacagcaacatgtacttccctcagttcataccgtactcgtttatagagaaggaggccagtcatgtccaagggtttagcccggagcttgcagtagttaccattggaggaggaaaggagctggaggaaaagcttgtggtaagaccaacaagtgaaaccatcgtaaatcacatgttcactaaatggatccagagctatcgtgatctccctctcatgattaatcagtgggccaatgtgacaagatgggaaatgaggactaagccattcatcagaactcttgaatttttatggcaagaaggtcatacagctcatgcaacccttgaagaggcagagaaggaggcgatgcagatgattgatgtatataccaaatttgcttatgagcaagctgcaataccagttattccaggcaggaaatcaagagtggagacatttgctggtgctgatcggacctacactatagaagctatgatgggtgacaagaaggccttacaagctggaactagtcacaaccttggccagaacttctcccgtgccttcgaaacacagtttatggatgaaaatggtcaacttgagcacgtatggcagacttcttgggctattagcactcggttcgttggtgggatcatcatgacccatggtgatgatgctggtttaatgcttccaccaaggattgctcccattcaggtggtaatagtgcctatttggaaaaagggtgacgaaaagggtgttgttatggaagctgtagcttcagttcagaacacgctcaaagaagcaggcattagagtcaaagtggatgactcagagctgaggacacctggatggaagtttaacttttacgaaatgaaaggagttcccataaggattgaacttggtccccgcgatgtgaaaaacaggagtgttgtgctttctaggcgagatgtccctggaaagcaaggaaaggagtttggaatatctatggaaccatcaatattggtggatcatataaaaggccgtctagaggaaattcaggcatctcttctacagaaggccatcacatttcgtgatagtaatatagttgatgtcaactcatatggagaactgaaggaggtcatttccgagggtaaatgggcaagaggtccatggtcagctagcgatgcggatgagctgaaggtgaaagaagagaccagtgccaccatcaggtgctttccctttgatcagccggagggtgcgaaaaaatgtttcatgactggcaatccagccgatgaagttgctatttttgcaaagtcatattaggccatctttgtgcaaccagagatcagaatatttttattacagattcttttctctttcccacagtttctctgtggtctttactgaccatgaacgaagaatttaaaggttttttcc

SEQ ID NO: 4060 - DNA, 2370 bp, Triticum aestivum
  Clone ID: TRIAE-23APR03-CLUSTER12413_1
aaaaaaagaacaagaaaagtctcctcccccccccccacccctccactcctcacccgcccccttcgcagcccctagcacgccgccggcagcacgccctcgcccgcggccagtccgttcgccgccggccggcgggggcgcccccccctccggcgcttgccctgagcataagtgtgggggcctggcgccactgtctggcgccaaggcaagcccgcgagggcgtgccgccggggcgctggtccgccgccatgcaggccgcccagcgcgtccatctagcccgctccccccttgccttcctctgccggaactactcctccccgccggcctcgcgggctttgtctgcgccaacacggaccgcgggggcctgcgggccgcctatcttattcgccatcgcggccctcatcacgcgcctcctggcgccacccgtcttccccttagcagtcacccacgggctacggggcgtacgacgtgcccggccgagcctaccagcgagtaccgccttgatggcttctctggctggctgcgcgggtatgttgctggggatcccgggcggtgggagggggtcagcggcgtgcctcgtcgcgtcggacacctgcaagaacgctcaccatggagaccgccttcttcatcgcccccgagcagttctaccagtccgacctctccccgctccagtccggctgctgcaagccgccgacggcgtgcgggtacgcgtacgtgtccccgacggtgtgggccagcccggcaaacccggcggcggacgcggactgcggcgcctggagcaacgacccgcggcagctctgctactggtgcgaatcctgcaaggccggcatgctgggcaccctgcgcgaccagtggcgccgggccaacgtggcgctcgtcgccgccaccgtcgcgctcctcgtcgtctacgtcatcggctgcagcgccttcaagaacgcccagaccgaggacctcttccgccgctacaagtggagcaacaacacctgacgctgatagatgtaccaatcccgaacgaaggaaggagttctctggtggcagtaccagtgctagtatgctgacattgtgcactagtatgattatcggacgaaccagtgtagattatgtagtgggaagtactaaggttgaaagaagtttcactctcgtgagttgtatttggccactagacctggtgcattcgctagtgccatggtttatggctagagctatagtgtggtgagatttctcggttttcaggtcggttaatggagacattttcacccaaaattctcgatgaaatgcagtgtacgttcagatttgtgattgtttcaaggcaaaaataaataaatcatgattgtgataaaaaaaaaaaaaaaaggcatcgggttttcagtaagggaactatttggggtcgtgcggaagcaaaactagctagggtttattagtgctgctctagttccgcttgctattcctttcgcttgttcgtttgtttctttaaggattttattatcaagggttgtaaggctggggatgtgcagctagcttcagattcaagcctgccgtctcgcctgcttgtacattgtaaaacagaaccgctgctctccagtgactgaatgattataagcagctactgtagtggtatttggggaaaaaagcaggtaccaaactgttcggcagggatgagagcgggagacgcatggagattattgagctaccaacccataagtttttcgtgggcacgcaatttcatcctgaatttaactctaggcctggaaagccatcaccacttttcttaggattgatcgctgcatcatctggacagctagagcacctgcttcagcgtacttccggtgctgtcagctcaccgaccaggtgcatcgccggtcccggagcccctaagaccaagttaaggatgaacggcctggtgtcgacatacttcgcgaatggcagcagtattcacatctagcagcatggcagcagaccagttttttttcttttcctgcatgtgtttttcttttcttttttattttctttagtatggatctatctctctgatcaagcaagaagagatcggcagctccagcgacatgacgagccgtttccgggtttttatgaagggaactatttggggtcgcgcggaagcaaaattagctagggtttattagtgctgctctagttccgcttgctattcctttcgcttgttcgtttgtttctttaaggattttattatcaaggttgtaaggctggggatgtgcagctagcttcagattcaagcctgccgtctcgcctgcttgtacattgtaaaacagaaccgctgctctccagtgactgaatgattataagcagctactgtagtggtatttggggaaaaaatatgtaccaaactgttctgatctg

SEQ ID NO: 4061 - DNA, 1005 bp, Triticum aestivum
  unsure (1)..(1005): unsure at all n locations
  Clone ID: TRIAE-23APR03-CLUSTER1241_4
cgcagctgctcgcaaaggtgagttttttctggaacccacagatcttacgagccatcctcctcgaagaactccagtgctcatcttctactcgcccctggcctaatccatccaatctttcggttcagaaggcgaggagggtgcggtgcctgtgccagatctcgtggccgccatggcggatcagatcgcggagtcagctgaacattgttttcatcgaagaggtgtacaagggcttttaccctgtaatagaaagaaaggtcccagctgctcgcaaaggtgagttttttctggaacccacagatcttacgaaccatcctcctcgaagaactccagtgcttatctcctactcgcccctggcctaatccatccaatctctcggttcagaaggcgaggagggcgcggtgcctggtccagatctcgtggccgccatggcggagaagttcgcggagtcagcgaacaatgtaatcatcgaagaggtgaacaagggcctgaaccctggaatgatagtcctgcttgtggttgctaccaccctgctgcttttctttgttgggaactatgtgctgtacctgtatgcgcagaagacgctccctccgaagaagaagaagccagtctccaagaagaagctcaagagggaaaagctgaagcaaggggtttctgcaccaggggagtgaagagatccatcgatttcgcgtgtcgattgctttattctgggctcctctttacctgataaaaaatatataccagctggagctgcggtgttgagctactgtttatgtagaaaccttgtcttgagtggtacatcgtcggtattggacaccttatttaagcgaactgataaaccttagtctgaattgagctgctcctggttatagtttttataaatttaaaactttgcntggggaaaaaaaaaaaaaaaaaaaaaaaaaaaaaaaaaaaaaaaaaaaaaaaaaaaaaaaaaaaaaaaaaaaaaaaaaaaaaaaaaaaaggtttttcaaaaccgccaacccc

SEQ ID NO: 4062 - DNA, 1718 bp, Triticum aestivum
  unsure (1)..(1718): unsure at all n locations
  Clone ID: TRIAE-23APR03-CLUSTER1242_1
agtacccaccaaccaccgacgcggcaccactccacttcactgcgcgagcgcgcgtgcggggtgccggcgtcgttcggaggaattcggggggatggggatggagtacgagccggcgccgaagaagccggcggcgggcgggcgggcggccctgaagctgctgttagccctgctcctcgtcggtctcgcgatgcggctgctcgccgaccgctgcgcctcccggctcctgccgcccaccacccggacggaggaggccgcggcgctcgccgtgacggcgccgccggcgcaggaggaggccggcggcggggacggggtgcccgtaactcccagcggtgcagggatgtccgttctcttccatggggcagggagccatgatccctctcatggggaatgggtccatgattccactggcccaacttacaccaatgcaacctgtaggtcaaatggaaggccacagaactgtatgtcgaatggaaggtggaagcctggttatctttactggaaatggaaggagagcggctggtttctggcgcggtttgagagcaagacgttcttggaggacatgaggggcaaacactgggcactagtcggcgattcgatcctccgcaaccatgtccaatcgttgctctgccttctttccaaggttgaagatcctacagaggtgtaccacgacaaaacctaccagtccaggcgatggcacttcccgtcgcacaacttcacgctgtccctggtgtgggcgccgttcctcgtcaaggcggagatattcgaggacgagaaacggttctcgtcggcggagccccggctgaccttcaacgtcctcgacgccacctgggtgagccagtgggccaccttcgactacgtgatcatctcgacggggcagtggttcttcaagaaggcggtgtacctggagcagggggcggtgatcggctgccacttctgccagacaaagagcctcagggaggtgagcatcgactactccttccgcagggccctccgggaggctttccggttcatcacgacatcggcacaccggccggtggtgttctaccggacttggtcaccgtcgcacttcgagggcggcgagtggttcagcggcgggcggtgcgaccggaaggccccgttcaagccgcgggaggccggtgaccgcgcgctggacaacctcatgtggcgggtggagcgcgcggagttcgccaaggcggccgcggacgacggcggggagagacgccgcctgaggctgctggacacgtacgagatgtcgctgcagcggcccgacgcccacgccgggccgtaccgggcgtaccagccgttcgccaagggggccgacgccggcaaggtgcagaacgactgcctgcactggtgcctgcccggtccgatcgaggcgtggaacgacatcatcatgcagatgctgggcgaggactgaggactcgccgccgttcggcatgatcgggcgggcgggccaactggttttttgacgtggcgcgggatgggggggtgtctcttcttgctggcaggggttcatggtgcccagttagaggcttgagtgatgttaccaggtgtacgttgggacttgtgaaactgtgttgtcaccggtcgcacctggtttgtgcttggacttcagaatgccggcctttctatggacattttgtagcaagcatacatattagaataatgatgcaagaaagaaatcctacaccaaaaaaaaaaaaaaaaaagctatcgan

SEQ ID NO: 4063 - DNA, 1242 bp, Triticum aestivum
  unsure (1)..(1242): unsure at all n locations
  Clone ID: TRIAE-23APR03-CLUSTER124368_1
aatcacacggaatactgaatcacacggaaccttgaggcacacccacgggagaaaatggcagacacaggagacgagctgaagctgctgggcatgtgggcgagcccgtacgtggtcagggtgcagctcgcactccgcctcaagggcgtgagctacgagtacgtcgcggaggacatcgccaacaagagcgagctctacctgcggtgcaacccggttcccgcggggctcctgatcgacatccacaacggccaggccgcagcccgcgctcaggtcatcggccaggacgtcgccggtgccttcacgggcgtctccccagccagccccagcgcttcctccgccgcgcgccgctgcgcaagctagtgggcccgatacgcctccacaacgccaagggcgtcgtggagtccgaggtcatcgtccagtacatcgacgaggcgttcgccggcgtcggtcggcccctcctccccgctgacccctacgagcgcgccgtcgcgcgattctgggccgcctacgtcgaggacaagctgctggcgccgtgggggaaggtgttcagggtgaagaccgacgaggagagggccgagtggacgaggcagacggcggcggcgctgggtcctctggaggatggcctcagggagtgctccaaggggaagggcttcttcggcggcgactgcgtcgggtacgttgacgtcctgctcggcagcatggtgccgtgggtgcgcgccaccgagaggctctccggcgacaagttagtagacgccggcaaggccccgctgctggcggcatggatggagcgcattagcgagctcgacgccgccaaggcggtcttccaggacgtcgacagggtggttgagtacgccgggggaatacagacccggctttccgccgcggctgctgcaagcacccaataaagcggcatggtgacatggtgggtgggtggtgcatgcaaggagaaaatagccaagtgtgcaattagctgaaattactaaactggccacgtttctgtttcctttttctcgaataataatggcgacgtttctcaggaacacataacatacaagcatgtgatattaccagtttaaaaacttgtgtggtcatcgtgacagctcctcctctgtttttaagggatatttacatttttgtccttggctttgtcacattagtggggtttgtcttttgttttgcggtgtggggtgaattggggagtgttttatatatttttaattganaaaaataataataattattaat

SEQ ID NO: 4064 - DNA, 2032 bp, Triticum aestivum
  Clone ID: TRIAE-23APR03-CLUSTER12436_1
acgaactcgcgcacacagcacgacacaagccacaaacccctccccccctctctcccactccactcgccggatcggggcggaagcaggccggatcgaccctcgggccagcggcatgggcggcggcgagggcggggcgggcggcgagcccgcggcgggagcggccccggccgcggccgcgcaggcgacgctgcacatccgcggcaccagcgggaacaagttcgcggtgcgggccgacctgggcgccaccgtcggggagctcaaggcggtcgtcgccgggagctgcgacgtgcccgcgccgcagcagcggctgatctacaagggccggatcttgaaggacgaccaaaccctaggccagctacggtgtggaggccgatcacaccatccatatggtgcggggtgctgccccacccacaacatcggctgccctggctgcagccaaccgtaggacttcaactaggtcttctgcgccaatgggaatgtccatgccgcggtggagcggcttcttgcgaactttggccggtactgcacgctgtgggcctttcgggttacctgtagctgttcctatcgtgaggtttgactggctgtataccctacccggtcccggtcagattgaaaggcagcgtctactagattcctatgtgttttaagaatggaatgaaataaaccatgtctctctgctgtcaattctttgcagttcgcatggatgtgagatcttccgtggtaattcggatcttgctcatgtaatgaatgaaccaagcttgcaatgccaaacttatgaggcagataggaatcctgaacttatgagagagatgatgcggaacacagacagagccatgagcaacattgaatcttctccagaagggtttaatatgctgcgccgcatgtatgaaactgttcaagagccatttatgaatgcaacaacaatggctggggagggctacacaagtccaaacccatttgcagctcttctaggagaccaggggtctaaccaagccagagatccaactggagatgcaccaactactgctcctgctccaaataccaatccaggggctgcacaatggggagcaaatgcttgggctgccacaaggagcaccacgagcggttgctgctggcaaggagtgccacaagcggtgggatatgagctgtgtggtctgcatgattcttccatattgatggatgttttacaaaaccctgccatgatgcaaatgatgcaaaacattatgtctactcctcagaccatgaaccagtcgctcaacatgaacccgaatgtacgtaacatgatggaatcaaatacccaaatgagagaaatgtttcagaatccagaatttcttcgccagttgacatctcctgaaacattgcagcaattagcttcattccagcaggcattgacgtcacagcttggtcaacaagctgctggccaggagcggacccaagcgggcactactccaggcaacgttaacctcaacagcttgatgagcatgttcagtgggcttggagctggcggtggcctgggtggtgtcccaaatatcccgactgtgccaccggaagagcgctacgcgacacagctagctcaactccaagaaatgggtttcttcgacccacaggagaacatccgggcgctgttggctaccaatgggaatgtccatgcggcggtggagcgccttcttgggaactttgggcaatagtagtagttggcattgtgaggtttgattggttgtataccctagccggtctcggtgagattgaaaggcagcatctctagattctatgtggttttaagatggatgaataaaccagtgtatctactggctaccctttgcatgcatgcatgcatacatgagtcctgtgtcgtgtcgtggtggttaaactgtggtatattgctgttggtagtagtaccttgggtcgtcggtgtacatacatattgaatcgtggtggtctttgggtcgtcggtgtacatacatattgaattgtggtggtcttaaaagtacatcatgtgtccgcggtcaaaaaaaacggacgcggggtcgac

SEQ ID NO: 4065 - DNA, 1548 bp, Triticum aestivum
  Clone ID: TRIAE-23APR03-CLUSTER12441_1
tgccggctctaagaattaagtgggttccccccgggctggcaggaatttcgccggaggaccattactttggacagtcctatgcggaaagaaaaaaaaatcccaatcccaaacatcccaaacccaaagcactagctatattactctagcacaccacacaatcacaatggcatgcaaagctgccatcttcgtcgcgctgagcctcctcctctccgccgtcgccgccaacggctgcggaagcacctattgccaaccgccggtcgtcgtgccgacaccacccgtcgtcgttccgccgccataccatggaggaggagggcacggccacggccacggccacggagggcagtgctccatcaacgtgctcaacctgagggtgtgcgccaacgttctcggtggactgctcggcctcaagatcggcgttccggcgcgcgaccagtgctgcccgctgctccaggggttggccgacctcgacgccgccgtctgcctctgcaccgccgtcagggccaacatcctcggcctccacctcaacgtgcctgtggacatcagcctcctcctcaaccactgcggcaagacgtgcccgttctggatttcatttggccatgccccttacgcccaggtactgtgcatcggaacgtgccaattcaaagcagaaggacggaggaggagtgtgatagaccaaccaatgcggtcggtggcccatggcccacggagacacgctgccaaaacgcagtgcaagcgcttcccgcgcgggtcgtacgacaggtggcagtgcactgagaggtgccagagccatcagcaggacgacgaggagctgatgaaccaccacggcggccacgaaagcagcagctgcgagcagaaatgccagcagcgacaccgccacgagtacgataggcagcagtgcgtgcgagactgcaaaagcggcggtggcggcggcgccggtgggcgtggccgcgagggcgacgagcgccagcacgacagggggatggtggtcgaagccatcctcgaggaggtgtaacggctggatgaaagtagccagctctttccaggagctcgacctctttaccggtcttgcatcttgctatgcgtacgtggtaggtgcatgtgtgagctacaataaattgcggtaactagaagtggctctccagccttggagagagcctgtgtacgaggaatcaatctggaaagcaatgtggtgatgtgtcatgtgtgataaataaaataagcaaggtttcgaaattaaaccaccaaagctggtttcatttgcccagcccattaacggacgtattgttgcatgggctccgaataagatttgccttccgtactttgtttttttatttcatcaaatgtggatctgttccactcccacatttcaattgtgtaaccagtactacttttgttttttggcaaacagagcatatactcttcgtattgatgaaaacaaaaaaaaaaaaaggcttatctgaaaacccgccgacctccagggggggggccccgggaaacccaatttcccccgcatataagggggcctgtttatacgggcgcggcttaacg

SEQ ID NO: 4066 - DNA, 665 bp, Triticum aestivum
  Clone ID: TRIAE-23APR03-CLUSTER1251_4
tatcaagggtactgaattattatttgtggaaggttcatgtattaattgctaactgtaacttgtagcacttctgtgttagtgctgcattatttctgtgtgtgcttttgtaagtttgaaacttcattaccatactgcaatatgctgcattgcattgccatcgtctgttctaaatcagaactgacgattaatctggtggctgaagctccagaaagaaagggaaagggccgaaaagaaagagaaaaggaggaatgacaagaaagcttcccatcagggtggtggtgagacaaaacattcaaaacgcagccataagaagagaaagcatgaagatacgagcatagctggtccggagtccaaaactgcctccaaagaacagtttgagcagttggagaagagtggactctcagaagagtatggggctccttctttcattcagacaattcatggatcaccagagagctctcaggacagcagtaagcgaagaaaggtggtactcccaggccctagtcaaagtaagaatgggacagtacttcgcattaagataaaaagagatcaggaatctccgtcagccatgtcggatggttctagggttcttcagcaaccacctgtccaacaaatggctacacctttatccttgttgagtaagcagaatgccagtcaaccttgca

SEQ ID NO: 4067 - DNA, 1727 bp, Triticum aestivum
  unsure (1)..(1727): unsure at all n locations
  Clone ID: TRIAE-23APR03-CLUSTER125708_1
accaacccgacccaatcaccgtcgccatcgcggaccagagaccagcggagctaattaaactgctccatcctctcgtaccgttgtgcttctaagtttgctcctagctggcttgcttgctccttgtccatgccagccacggccatggagctctccagcctgccgctagtcctgctgctctgcttgatggcgggctcgtcgacggctgccctgccggcgctgcccgggatggacagggtgcggcagcaggtcgacagggcgaacaggcacggcccgtccattgggctcgtcatgtcgtacgtcgccgaggacaccgcgctccaggcctccggctacttcaggccttggcacgtccagcccttcattgacctctacggacggaggtttcacatcgggagtattcgaggtgtgaatgttatatacgcattgacagggcaacgcaggttgaatgcagctgtcactgtacaaactctcgtcgacgtctttaccgtgtctggtattgtccattatggcacagcaggaagctctaatgattcaatgtcatttggagatgtcagtgtccccaagttagttgcttatacaggcgcttggacatggaagaagtacaaatcacttaaagaagagtcaacagaactaaactttggacaatttaacgtcccgaatggaggagagaacctgctagggtctctgaaatacagaaatgaggagctatactcagttggcaagcccatggaagaagttttctggttacctgtagattcagcatggttcaaaatagcagaaggacttaaggtcaaccttgaaagatgtaatgacactttctgcttaccaaaaacgccacaagtggttcatgggctaaaaggagcatcagccgacatgtttctagacaatgcagaataccggaagttccttttcagagaatttgcagtgtcaacaatagatgaggagagcgcagcagtggtgatgacaacaacatctcctggcgtacctgtgattgtgttccggggagtatctgatctggctggagtggaaccaacatggtcatcaacaagcctgatgaacctggcatctattaatgcactcaaagtggcagtggagttcattgctacaattggcaggcagatgtcgacaccattagcacaaagttcaaaaaactgagacaaaagagagctgacatgtccatggagcaggactgtagaatagttttaaacagcaattgggaacaaaattcagagtgataagtgacccttagcttcaaagtacacaaaacattcaacagaagaattatgtattcaatatatactcaattgtacacaaaaaaaagtaaaaccgtttttaatgggattttgggataatgcgggaacaaagtggtgaataaaagacagaatgttcttacagtccttgattttcattacagaatacaagatgttgttacatactcaaaaaaaaaaaaaaaaaacgatnaaatccgcgccaaaccccgccggcgtatgaggagcggnctgtggcgaaattggtgcggcttcttccgacctgcctctcccncacctgcactcaactggcgcctcgggccgtttcggcctggcggcggagcgctattcagcattcattccacgcggngctattcaggtcatcaacccatttcaccgctctacccaacggtccaccctttgttacgccagggccagcacaacgtcaaggacccgtttagctgccgctggctcacgcgt

SEQ ID NO: 4068 - DNA, 963 bp, Triticum aestivum
  Clone ID: TRIAE-23APR03-CLUSTER125819_2
attgcaacttcgtctggataatcccggataagccgcaagcaacgccaatggcgccgccgctcctcctcctcctcctcctgctgccgctcctcgccgtggccgccgaggccgtccctcccacgccgacggcccggtccaaccccgcggcagcaggcggcggtgcaggtgctcccccagtcccgacgccgtggccggagcagttccacgcggtgatgttcaccaacctgaccgagagcggcggccgcctgcagctcatcgacctctactacgactggccccgcggccgcaacctgaatctcatccgcaaccagctctccggcgacccgacctacgacgtggagtggaccaacggcacctcctacatctttgactccgcctcctgccgcaccatacgcttccccgtcggcgtcctgcccccggactggctccacggcgccgtctacctcggccgcgagagcaccgacggcttcgactgccacctctggaccaaggtcgatttcgtctggtactacgaggacgtcctcacccaccgccccgtccgctggaacttcttcaatgggatgcagcagcatgtgatgagcttcgaggtgggcggggtgctagaggactcccactggcaggcaccctcgcactgcttcgctgacgacgccaccgccgccgccgccaccggaaccgatgcggcgagcagcctcctcaggctcgcacggacgaccgcagcggctgtaacatctgcagcttaaaaagtagagttggattcccaccggtcgtttttccatttcattatgaatctatctattcgataaatcacgagtggacatacatccacgcgaggatgatatctactccctccgtctgtgaataaatgtacatgtaataaatatacatctagcttttgttttaagtcaaagttttaaaactttgaccacctttcaaggataaagtaaaagtatttatggcaccaaa

SEQ ID NO: 4069 - DNA, 983 bp, Triticum aestivum
  Clone ID: TRIAE-23APR03-CLUSTER12599_1
aacccagaaaaagcacaaagcaaattagtttggaccgcctctcccaacacctcctctttgcttccagcttttccttcaacacctccgtccagcttcgtccagaaactctcgcggacatggcggcaacccagaaatagcaccaagcattactactacacctctcaacatctgctctttggttccacagcttccttcgacaccttcgtccagaaactctcgcggacatggcggccgggaagcgcaccatcggcctcgcgatggactactcgccgtccagcaaggcggcgatgaggtgggtggtcgagaacctggtgaaggccggcgacaggatcatcctcatccacgtcctacccaagggagcagacgccagccacaaggggctctggaagagcaccggttcacctctgatccccctgctggagttcatggagatgaacgtgcaggcgcggtacggggtcaatcccgacaaggaggtgctggagatcctgcaggctgagtccaagtccaagcaggtggaaatactagcaaaaatatactggggtgatgcaagggagaaactttgtgaggcagtagatgatctcaaggtcgactctgttgtgcttggttgcaggggattagggcccttaaaaagggcactccttggaagcgtcagcaattatgtcgtcaacaatgcaacctgccccgtcacagtggtgcgtggacccaatggatcacttgcttgaagatgtcgcttctagaatgatggcctagtttgcgtgttcattggtccgtcggcgtacgggcaaatggtgctatttaagacaatagtgatattttgccttttcggaacctttgctatccttgtagtgcaatctcagtgtgttctcctctgtcatctcttggttatacaacatttctgttgtttcttacatactatttgaaaaaaattgcctacagacttgttcagtgggccttttcgtttaaaaaaaaaaaaaaaaaaaaaa

SEQ ID NO: 4070 - DNA, 1618 bp, Triticum aestivum
  unsure (1)..(1618): unsure at all n locations
  Clone ID: TRIAE-23APR03-CLUSTER1259_1
aaaacacctccaaaatccccccaaaaccctagagtattgcacgccagatcccctcccctctcctcccggccacctctccccacgcccattccccgcacggccaagggaaaaatggcgccgtccacctcgtcggcctccgccctcctccacctcccgggtctgcctccccggggcccccatagaggcgggtgccggcaccacccgcggcggccgcgccatgcgggcgtgcggtgctccttcgcgtgcgcgcccgtggagacggcgaggataaaggtcgtgggcgtaggtggcggcggcaacaacgccgtcaaccgcatgatcggcagcgccctccagggaatcgagttttatgctataaacacagactcccaggctcttgtgtattccgaggcgcaacatccgctacaaattggagaacagttgactcgtgggctggggactgggggaaagccaaattcgggggcacccgccgccgaggagtcaaggggacgtgacagctgatgcccgccgagattgtgaccttctctgcaaaagtgatggggtgggtcgcacttttggctggcagtcgacagttttagctgggcatttttctatttagctgtgtaaacactctgaaaacttgtttcgcgtactaatcaggttcgcgcctagtgtatgtattgctcagtcacttgacgcggtcgatttacaaggtgttagttttggctctctgattgtgatcccaaatgatcggttgttagcttgcagataatgtccttcgccagggtgtccaaggaatatcagacattatcacgatacctgggctcgtgaatgaggaatatcagacattatcacgatacctgggctcgtgaatgttgattttgctgatgtgaaagctgtgatgaaaaattctggaactgccatgcttggagttggtgtttcttccagcaaaaaccgtgcccaagaagctgctgagcaggcaactcttgcccctttgatagggtcatccattgaggcagctactggtgttgtgtacaacatcactggcggggaaggacatcactttacaagaagtgaacaaggtctctcagatcgtgacaagcttggcttgatccctcggccaaccataattttcggagctgtggtcgacgaccgttataatggcgagatccacgtgaccatcatcgcaacaggatttccgcagtccttccagaagtcccttctggctgacccgaagggagcacggatactggaggcgaaagtaaaagcggctagccttgcaacggctgctgcggcgcaacaaccggcagcggccgtcccgacatggtcccggaggctcttctcctgaacactgttcagcaggcaaacaaccttgcgattgtgaggctgtggttcttactttctcgaggcagtagagagttttagccggtgttattctttttggctgtgtaaacactctgaaaactagtttcgcgtagtgattaggttctcgtctagtgtatgtattgttcagacacttgactcggttgttttagaaagtgttctgttcgttgacagctttggcaaccccagggctcgtctgggccggngnaaatggcntataaggggggnntanggggcgaaanggcggngttttaaa

SEQ ID NO: 4071 - DNA, 1759 bp, Triticum aestivum
  Clone ID: TRIAE-23APR03-CLUSTER125_47
acgctgctctctgctttctttctcctccagcacacgccgtcacgcactagttctcgctggcggcgatgcctgcgtctgcgtggtgggtttgtggattcctcccgctcctggcggtggccgcggccgccgcggatccggccaaggggagctgggagccgctgattcggctgccgaccgagaagggcgctgcccccgcccctgcccctgccgcgccggcggcggaggaaggggcgacgaagtgggccgtcctcgttgccggctcttctggctacgggaactaccggcaccaggccgatgtgtgccacgcctaccagatcctgaggaaggggggcctaaaggaggagaacattgtggtgtttatgtacgatgatatcgccaaaaacgacctcaacccaaggcctggagtcatcatcaaccatcctaaaggcgaagatgtttacgctggtgttcccaaggactacactggtaaacaggtcaccgctgaaaacttctttgcagttctattggggaacaaaaccgcggttactggagggagtaggaaggtgataaacagcaaatcaaaggaccacatcttcatctattacgcggatcatgggggtcctggtgttctaggtatgcccaacaggccatatatttatgctggcgacttcatcaaagtgttacgagagaagcatgcttccaaaagctattcaaaaatgattatatatgttgaagcgtgtgaaagtggcagtatatttgagggtttattgccagaagatcttaatatttatgttacaacagcatcaaatgcggtcgaaaatagttggggagcatactgccctgggatgaaatcatcacctcctgctgaatatgatacctgtttaggagacatctacagtgtttcttggatggaagacagtgaaactcacaatctaaagaaggaaacactcaagcagcagtacgaggtggttaaaacgagaacatcaaaatcaatggaattcgataagggttctcatgtcatggagtatggtgacaagacattcaaggacgagaagcttttcctttaccaaggtttcgatcctgcaaattccaatgtagcaaacaggctgcttttgcccgacctggagggtgcaatcaatcaaagagatgctgatgttcttttcatgtggaaaaggtatgagaagttaaatgggggatcggaagagaagcagagggttctcagggagatcaaagaaactgtggtacacaggaagcatctcgacagcagtatcgatttcatcgggaagcttgtctttggatttgaaaatgggccttcaatgattgaggctgctagaagctctggccaaccactagtcgacgattgggattgcctgaagaggacggtccgagttttcgaatcccagtgtggatcacttactcagtatggcatgaaacacatgagggcgtttgcaaacatgtgcaacaatggcatctccgaggccgaaatgagggaagcaagcatcagcgcttgtggcggttacggctcggccaagtggagcccactggctgtagggcacagtgcttgatccgctgcactgcagtacagaggagcaagtagcaaatgctccagaggttcctagacctcatatggtgtacatacatgcactgatttccaagaaaccacccaacgatgcgccccatgtcgtgttgggttaatcagtagtttgtggtcgtgcctttgtaagtttcagtgtttcactacaatcaattgaaaggcaattactaattaacaaaaaaaaaa

SEQ ID NO: 4072 - DNA, 1463 bp, Triticum aestivum
  unsure (1)..(1463): unsure at all n locations
  Clone ID: TRIAE-23APR03-CLUSTER125_49
aaggaaagacagatcggtgcgtgtgaggcagccccgctccgctaaacctcgcaacaacccccgtgggcgccgccacagcnaggtcaggtgcgcctcccccgtccccgccccgccccggccgcggcagcgaagccgccggatcgatcgaggggattgccgccgctctcccgctcccgagcttcagcatcatctgaagtgctcccaaaacaatggcggagcacttggcttcaatttttggcacggagaaggatagggtcaactgccccttttacttcaagattggagcttgccgtcatggggaccgttgctcccgtctgcacaacaggccaaccacatcgccaactattgtgcttgctaacatgtaccagcggcctgatatgattacccctggagttgatgcccaaggtgtggctattgcaccagagaagatgcaggagcactttgaggacttctatgaggatatctatgaggagctgagcaagtttggtgaggttgagaccctgaatgtgtgcgacaaccttgctgaccacatgattgggaatgtctatgtccagttcagggaggaagagcaggcagtggctgctcacaatgccctccaaggccgcttctactctggtcgcccgatcattgtggagtactcccctgtgacagacttccgggaggcgacctgcaggcagtttgaggagaacagctgcaaccgtggcggctactgcaacttcatgcacgtgaagcagattggtagggagctcaggaggaagctatatggtgggcgttccaggaggagccacgggaggagccgcagccccagcccgcagcacaggagggacaaccgtgaccgtggtggtgacttccgccgtgatggccgggatgaataccgtggtggcggtggcggtggtggcggcggttaccgtggaggcgatggaggtgatggtggcggttaccgtggtgggggcggtggtggtggctaccgtggaggtgatgggggtggctatcgcggtggtggtggtggcggttaccgtggtggcgggaggggtggaggtggtggcaggcatgacaggtacgatgatggaccgaggcgcaggtacggtggcagcccaccgcggcgcggaaggagccctccagcaagggagaacagcgaggagcgcagggccaagattgagcagtggaaccgtgagcgggaggagaagaagtgatgaaccgcgggtagttttactgcaagcattatttaccttttcattcatgtgtcgttagtttgctcctatgttggtttgctgtcagacattagtgtgtgggtcgatatagtactattgcttggttgagtggcctgtcaagtgcaggattctattagaggcgtacaagctgctatttgtgctcaatattattgccggacctgttcttgtattatctgaaaagtttaccgtgttctgcttttgttggtttgatctaaaaaaaaaaaaaaaaaa

SEQ ID NO: 4073 - DNA, 1365 bp, Triticum aestivum
  Clone ID: TRIAE-23APR03-CLUSTER125_54
ctctctgcctcctccgccgcgccgccacagccaggtcaggtgcgcctcctccgtcaacccccggccgcggcagcgaagccgccggatcgatcgagacgatagccgccgccctcccgctcccgagcttcagcatcctctgaagtgctcccaaaacaatggcggagcacttggcttcaatttttggcacggagaaggatagggtcaactgccccttttacttcaagattggagcttgccgtcatggggatcgttgctcccgtctgcacaacaggccaaccacatcgccaaccattgtgcttgctaacatgtaccagcggcctgatatgattacccctggagttgatgcccaaggtgtggctattgcaccagagaagatgcaggagcactttgaggacttctatgaggatatctatgaggagctgagcaagtttggtgaggttgagaccctgaatgtgtgtgacaacctggctgaccacatgatcgggaatgtctatgtccagttcagggaggaggagcaggcagtggctgctcacaatgccctccaaggccgcttttactctggtcgcccaatcattgtggagtactctcctgtgacggacttccgtgaggcgacctgcaggcagtttgaggagaacagctgcaaccgtggcggctactgcaacttcatgcacgtgaagcagattggcagggagctcaggaggaagctatatggggggcggtccaggaggagccacgggaggagccgcagcccaagcccacagcacaggagggacaaccgtgaccgtggtggtgacttccgccgtgatggccgggatgaataccgtggcggcggcggcggtggcggttaccgtggaggcgatggaggtgatggtggcggttactgtggaggcggtggtggtggctaccgtggaggtgatgggggcggctatcgtggtggtggcggcggcggttaccgtggtggcggcagaggaggtggtggcaggcatgataggtatgatgatggaccgaggcgcaggtatggtggcagcccgccacgacgtggaaggagccctcctgcaagggagaacagtgaggagcgcagggccaagatcgagcagtggaaccgtgagagggaggagaagtgatgaaaccgcgagtagtggaaccgcaagcgtcattttaccttttcattcttgtgtcgttagtttgctcctatgttgagtatctgttggtttgccgtcagacattagtgtgggtcgatatattactattgccttgttgagtgacctgtcaagtgcaggattctagttgaggcgtgtaagctgctatttgtgctcgatatttatctgcaggattctcgtattatctgccaagtttacagtgttc

SEQ ID NO: 4074 - DNA, 2387 bp, Triticum aestivum
  unsure (1)..(2387): unsure at all n locations
  Clone ID: TRIAE-23APR03-CLUSTER125_56
aaccaagggaagggaagggagaccgcacgcattgccggcggccggttactccacttgcctcctcctccaattcaatcggcggcgaggacgaggcggatgcgccttctccgcctgcgcctcccgctgccagcgctactcccaagcccaaatccaacaaccaaatccttcttctcattatcctcttgttggccaggagtcacgcgcaccagccccaccagccaccacaagcagatgtcgacgacctcctcctccgcggcggccgtcgccgagggctctgccgcccgccgcttctggatcgccgcctcctcgcgggaggccgccttcgccacgtacacgcccttcctcctctccctcgccgcggggtcactccgcctcgactccttccgccactacctcgcgcaggacgcccacttyctncacgccttcgcacgcgcctacgagatggccgaggagtgcgccgacgacgacgatgacaaggccaccatctccgcccttcggaaagccatcgtccgcgagctcaacctccactcttccgtactccaggagtggggagttgatcctaccaaagagatccctccaagcccagcaacaaccaagtacactgatttcttacttgcaactgcagctggaaaagtygatggtgggaaaggttctgataaaatggccacaccattcgagaagacaaaaattgctgcgtacactgttggggcgatgactccgtgcatgaggctttatgcatatcttggcaaagaactcggcgttttcctgaaacaagatgaaaatcacccatacaagaaatggattgatacgtatgcagccactgactttgagagtaatgcactccaaatagaagagttgcttgataaactaagtgtctctttaactggtgaggagctcgagattattgggaagctctaccaacaagctatgagattggaggttgagtttttctctgctcagctcctcgaagaacctgttgtagctccactttcaagatatcgtgatcccaaagacaagctcgtgattttttctgattttgatttgacatgcactgttgttgattcgtctgccattttggcggagattgcgattttatcacaccaaaaggctagtcagagtgggtctgataatgtccttgaccgtacaaaatcagcagacctgagaaattcatggaatatgctatctaatcagtacatggaagagcatgagcaatgcatacaaaagttacttcctccagaagaagcaaagtcagtagactacgatcaactatacaaaggtcttgaagtgctatcagaatttgagagacaggcaaattctagggttattgattccggtgtcttgaggggaatgaacttagatgatatcagaaaagctggggagcggcttattctgcaagatggttgtcgaaatttctttaagaagattggagagacaagggagaaggtcaatttagatatccatattctttcgtactgctggtgtgcagagcttattaggtcagccttttcatcagttggttgtcttgacggagtaaacatacattccaacgagtttacctttgagggatctgtttcaactggtcacatcaacagaaagatagagtctccactagacaaagttgagaagttcaaaatcatcaaaagtgacctggatagtataacaccatctttgtctgtttatattggggactcagttggagatttgctttgcttgttggaagcagatgttggcattgttgttggatcaagcacaaccttgcggagagtgggcaaacagtttggtgtttcttttgttccgttgcttcctggtttggtagagaagcaaaggcggctctggaagcaagaagcatccatcttcaaggcgcgatctggagttcttcatacggtttctagctggtcagaggtacaggccttcattctgggaaatgattccagctgattgttgctggctgcccttgtcactctcttttcctttgccaaaaagactggtaccagctcatgcaaatcagacgtgaaatccccgttgtggccattttatgaaagccacattgctattcacctcctatatgagtagcctgtgtcctgaaatggtttagtttgtatgatcaatgtgtcattgattacacttgagttgtctttccatttgggatcatttcttataatcgcgggagtggttcctgtactggcatcgctacagaacagagtggtatactgtctccaggtgtttcccaggtgcaagcgtagagctgtttttggcaatgaaatttgagattgctatatgtttgtttgtttgactacatatccttatcctgggactgatcatagctgagatgattggaggcagaacattcaagatgtaaaatcacataggatgataaacaaaatact

SEQ ID NO: 4075 - DNA, 1173 bp, Triticum aestivum
  Clone ID: TRIAE-23APR03-CLUSTER125_59
agccaagcaagcagtggtcaatacaaatccatcatgaagacctttctcatccttgccctccttgctatcgtggcaaccaccgccacaactgcagtaagagttccagtgccacaattgcagccacaaaatccatctcagcaacagccacaagagcaagttccattggtacaacaacaacaatttccagggcagcaacaacaatttccaccacaacagccatatccgcagccgcaaccttttccatcacaacaaccatatctgcagctgcaaccatttccgcagccgcaaccatttccgccacaactaccatatccgcagccgcaatcatttccaccacaacaaccatatccacaacagcaaccacagtatctacaaccacaacaaccaatttcgcagcaacaagcacaacaacaacaacaacaacaacaacaacaacaacaacaacaacaaattcttcaacaaattttgcaacaacaactgattccatgcagggatgttgtcttgcaacaacacaacatagcgcatgcaagctcacaagttttgcaacaaagtacttaccagctattgcaacaattgtgttgtcaacaactgttgcagatccctgagcagtcgaggtgccaagccatccataatgttgctcatgctattattatgcatcaacaacaacaacaacaacaagaacaaaaacaacagttgcaacaacaacaacaacaacaacagcaactgcaacaacaacaacaacaacaacaacaacaaccgtcgagccaggtctccttccaacagcctcagcagcaatatccatcaagccaggtctccttccagccatctcagctaaacccacaggctcagggctctgtccaacctcaacaactgccccagttcgcggaaataaggaacctagcgctacagacgctacctgcaatgtgcaatgtctacatccctccacattgctcgaccaccattgcgccatttggcatctctggtaccaactgagaagagaagaactctagtactagatatatgaaacaccgttttcttagtccatggtttggtcgttgtagcagtgaaaaaataaagtgacatgcactatcatgtaagaacccgaactatactagttcaaacttgggaataaaagacaaacacatgtcttgtctacatatgattgtttgtttg

SEQ ID NO: 4076 - DNA, 889 bp, Triticum aestivum
  Clone ID: TRIAE-23APR03-CLUSTER125_60
atgcgcattccgctgtacacacacccactcctccgccggtccctcttttatctcaggccccctccggcttcctccaattttcattccgaagtccctttcaacgagagagagggagagagagaggagcagttagttgagacccgagacggagatggatctgctggagaggagcgcagccactattaaggcggagcagggggaggcccagcgcaaggaagccgagaggaaggagcaggagcacaaggagcaggagacccagcagccagggctcaycggccgacccccgctcgccaacggcaggtctggaatgttgccaatgtcgagccctccagcaaatccgggacagcttaccattttttatggtgggtcagtatgtgtgtatgactcagtgccaccagagaaggctcaagcaatcatgctcattgcagcagcagcagctgcggcctcaaaaagcaatggcaccactgctgttaagcctccagcgatgtctgcgaccaatgctatccaagccatgcttacgcggtcgctctcactccagagcacttctgtagcaaatggacaacctcaggctgtcgcggatcctggctcgatttgcaagcttcaggctgatcttcccatcgccaggagacactcccttcagcgcttcctggagaagcgccgtgacaggttagcatgaatgaagagtacaagtagcagtctacgttcttctggagcgtattatgagtattatgacccccttacatttgttgttttgtgtttccacatgctgtgtatggtgtaccacagcatttagaaatgcatttgtatgaggccaagtcttcaaaaccaagtcttgtacttctgtgccccgttcatgatcaatccaaattatgataaccgttctattttc

SEQ ID NO: 4077 - DNA, 1131 bp, Triticum aestivum
  Clone ID: TRIAE-23APR03-CLUSTER125_65
gcacgaggcacaactagagcacaagcatcaaatccaagtacgtagtagttaacgcaaatccactatgaagaccttactcatcctaacaatccttgcgatggcaataaccatcggcaccgccaatatgcaggtcgaccctagcagccaagtacaatggccacaacaacaaccagtcccacagcctcaccaaccattctcccagcaaccacaacaaacatttccccaaccccaacaaacattcccccatcaaccacaacaacaatttccccagcctcagcaaccacaacaacaatttctccagccccaacaaccattcccccaacaaccacaacaaccatatccccagcaaccacaacaaccattcccccagactcaacaaccccaacaactatttccccagtcccagcaaccacaacaacaattttctcagccccaacaacaattcccgcagccccaacaaccgcaacaatcattcccccaacaacaaccaccgttcattcagccatctctacaacaacaggtgaacccatgcaagaatttcctcttgcagcaatgcaaacctgtgtcactggtgtcatccctctggtcaatgatctggccacaaagcgattgccaagtgatgcggcaacaatgctgccaacaactagcacagattcctcagcagctccagtgtgcagccatccataccatcatacattccatcatcatgcagcaagaacaacaagaacaacaacaaggcatgcatatcctgctgccactatatcagcagcaacaggtgggtcaaggtactctcgtccagggccagggcatcatccaaccccaacaaccagctcaattggaggcgatcaggtcattggtgttgcaaactcttccaaccatgtgcaacgtgtatgtcccacctgagtgctccatcatcaaggcaccattttccagcgtagtcgccggcattggtggccaatgaaaaatgcaagagccatactaataggtagatggatcatcgttgcttagttgatttacccatcgatgtaacgatgatagaataaactggcgtgcaccatcatgtgtgaccccgaccagtgcaatttcaagcttgggaataaaagacaaagaaagtcaagtttgcgaacaaaa

SEQ ID NO: 4078 - DNA, 996 bp, Triticum aestivum
  unsure (1)..(996): unsure at all n locations
  Clone ID: TRIAE-23APR03-CLUSTER125_69
gcggggatgcgcgtttgctgtacacacacccactcctccgccggtccatctttatccccgaccccctcccgcttcctccaattctcattcccaggtccctttcagcgagagggagggagggagggaggagcagttggttgagacccgaggcggagatggatctgctggagaggagcgcagccactattaaggcggagcagcagggggaggcccagcgcaaggaagccgagaggaaagagcaggagcaggagcagcaaggccaagggctcaccggcagacacccgctcgccaacggcaggtctggaatgttgccaatgtcgagccctccagcaaatccgggacagctcaccattttttatggtgggtcagtatgtgtgtatgactcagtgccaccagagaaggctcaagcaatcatgctcattgcagcagcagctgctgcggcctcaaaaagcaatggcaccgctgctgttaagcctccagcgatgtctgcgaccaatgcgatccaagccatgcttacgcggtcgctctcactccagagcacttctggtagcaaatggacaacctcaggctgttgcggatccgggctcgatttgcaagcttcaggctgatcttcccatcgccaggagacactcccttcagcgcttcctggagaagcgcccgtgacagggtggtgagcaaagctccttacggcgccgggaagccatccgaaggcatgggagcatcttctgggatggaagcggtcgcggagggcaaggcccagtaaccctgaaagaagaaagacggccctgcccctgatgtttggaaggaaaggggccgtgtgttagcttgatgtgatgttacaccgtagaatcatcatcgttcgtgacgataataatgatccgacgagaacctctattgtcaatgttnctgttgtcattgtgtagtttactctgtatctgaactcggtttagttctgcggaaccgtactgccnccccaaaaatgtgtcgnatgtaaat

SEQ ID NO: 4079 - DNA, 1407 bp, Triticum aestivum
  unsure (1)..(1407): unsure at all n locations
  Clone ID: TRIAE-23APR03-CLUSTER125_84
caggattcggcacgaggcacaactagagcacaagcagaaaatgcaaagtacgtagtagttaacgcaaatccaccatgaagaccttactcatcctgacaatccttgcgatggcaataaccatcggcaccgccaatatccaggtcgaccctagcggccaagtacaatggctacaacaacaactagtcccccagctccaacagccattatcccagcaaccacaacaaacatttccccaacctcaacaaacattcccccatcaaccacaacaacaagttccccagcctcagcaaccacaacaaccatttctccagccccaacaaccattcccccaacaaccacaacaaccattcccccagactcaacaaccacaacaaccatttccccagcaaccacaacaaccatttccccagactcaacaaccccaacaaccatttccccaacaaccacaacaaccattcccccagactcaacaaccccaacaaccatttccccagctccagcaaccacaacaaccttttccccagccccaacaacaattgccgcagccccaacaaccgcaacaatcattcccccaacaacaacggccattcattcaaccatctctacaacaacagttgaacccatgcaagaatatcctcttgcaacaatgcaaacctgcgtcattggtgtcatccctctggtcaataatctggccacaaagcgattgccaagtgatgcggcaacaatgctgccaacaactagcacagattcctcaacagctccagtgcgcagccatccatagcgtcgtgcattccatcatcatgcagcagcagcagcaacaacaacaacaacaaggcatgcatatctttctgccactatctcagcagcaacaggtgggtcaaggttctctagtccaaggccagggcatcatccaaccacaacaaccagctcaattggaggcgatcagatcattggtgttgcaaactcttccatccatgtgcaacgtgtatgtcccacctgagtgctccatcatgagggcaccatttgccagcatagtcgcgggcattggtggccaatgaaaaactgaagagctatactaataggtagatggatcatcgttgcttagctgatgcaccaatcgatgtaacgatgacaaataaagtggagtgcaccatcatgtgtgacaccggccagtgctagttcaagcttgggaataaaagacaaacaaagttcttgtttgccagcattacttgtcaaaaaaaaaaaaaaaaaaaaaaaaaaaaaaaaaaaaaaaaaaaaaaaaaaaaaaaaaaaaaaaaaaaaaaaaaaaaaaagggggnnnngatataaaaaaaaaaaaataaaggggggggccgttttaaagaatcaaattttatatacgggggcttggaaagaataacttttttt

SEQ ID NO: 4080 - DNA, 1488 bp, Triticum aestivum
  unsure (1)..(1488): unsure at all n locations
  Clone ID: TRIAE-23APR03-CLUSTER12619_1
gctagctatcatcccgcacccgcacgagcccaaccactctctcttctagctctgctccgtcctccatggaggggcgagcgagtgtgcgagtctgatcatgcatgagaccgcgcctacatccagcctccatccaccagacagaggggggaaagaacctggcttgcacttgcatgtgagcgagcctacggcaagcacacggcctattgacccatccgagacagagagagggagtagtctttgcttgcttagttgggttgtgtcttgctgtctgcacctatcgggctgccggcggacagacggtcgcaggcggcccccgacgtcgggcgggtccgcgagccgggcgggaagggcggtgtgcgcatcgtctgcctggcccgtgcccccgccgaggagcagctcacggcccatcctgcaccgcgaggcagtcagccagcggccgccccgctgattgcttcctcgtgctctgtccgtctgggcggtgcttcgcgtgggagttgctagcgctgcccgcggagaagcgcgcggactgaggccgcgggcgtcggcgggtgccgggcgccggccggccagggcgggctgcccatcgggttccggttccggcccaccgacgaggagctgctgctgcactacctgcgccgcaaggccctctcctgccccctccccgccgacatcatccccgtcgccgacctcgcgcgcctccacccatcggacctgccaggcgaggccgacggcgagcgctacttcttccacctgccggcgacggggtgctggcggaagggcggcggcgcgggcagggcgggcggcagcggcgtgtggagggcctccgggaaggagcggctggtcgtggcgccacgctgcggccggcctatcggcgccaagcggacgctcgtcttctgccgcccaggcggcgcgcgcaccggctgggccatgcacgagtaccgcctgctccccgccggcctcgccgcctacgccacacccaagagcctccacgccgccaaggactgggtggtctgccgcgtgttcaagaaggccacgccagcgcgccacggcacagcggggcggcgtaggggggacgccgacgccgacatgacaccggcgtcaccgtccccggcgtcctcctgcgtgaccgagtcgggcatggaggaggacgatgatgagaccgcctccaacctggcgcggcgagaggattagagcagctgacctgacctcaatcatggtccctgtaattttctaatgagtgcccctttaattcgtcgatccgctaatgtggtaccagtccgtagtagcagcagtagtaatcatcagccccaacttatcaggagaaacaaaccgagctcaagcaatcagcaaaccgagctcaagcaatcaaacacctcaccatgtttgacgagtgagctgagactgagagctcactgtgaatcaaagagttcatgttccaacgttaaattggagttcttttgcacaaaaaaaaaaaaaaaaaagcttatn

SEQ ID NO: 4081 - DNA, 1699 bp, Triticum aestivum
  Clone ID: TRIAE-23APR03-CLUSTER12627_1
gcaacaaatcaaatttaaaccaacccaggtcgcgcacaaatccgccgcgcacgcacacaacctccatctcttccccccttccgcagaaccctagctgtccacaagtctcttcgtcggcgatggcggcggcggagaacgccggggacgtggcggcgggggagagccgcaagctgttcgtgggtggcatcccgtcctcagcgcaggagacggagctgcggggtcactttgcccgcttcggtgcggtgcgctcaatcgtcgtgatgcgggacaaggagtcgggccacggccgcgggttcgggttcgtcgagttcgaggacgaagaagcggccgccaaggcgctcggcgatggggagaggcccaagcacttcatctgcggccgactggtggacgttaagagggcgcgtgctagacctcctcggaacttgggcgagcaacctgtgcatcaacatcagcatcagcatcagctggaacagggtccagttcagggtcaccaagacgctggggacagtaccgaggccagtagtgacagtatgagctatgcttcaaagaaggtattcattggtggtttgcgtgacaacatcacagaggaggagttcagagcttactttgaggcgtttggcactgtaacagatgttgttgtgatatacgacagcctgacaagcaggtcaaggggttttggttttgtcacctttgattccgaggaagctgtgagaaaggtgatggggcaaagctttcatgacttgaaagggacaagggtggaagcaaagatcgctatccccaaggatgctcagtattaccgtaatggccgaggtcgtggctcaagaacctttggcggaaggggtcctgttggctttgatggttcaacataccaaccgtacaataaccgacatggtttctacaatggctatatgccacaacctgttcccacacatccctactatcatggcctctattttggtatgggaggcaatccctatgcaaatgcatatccaaaccatgcagtcatggcaaatgttccaaacatggtggcaaggcgtccagtatatagcccatatcccccaatgtatcctggctatggttttgcatacagaagtggttatgcgggtgctgcaccttctgttcagtatggcgttaatggtggcagggattacatgaatgaccaagactctatggatgtacaagaacttgacagcactgctaccattgctacaaagtttgaatacatgaagctaggttcacaatgacgttctgggcaattatttctacactgatgacagcggaagtcgcaactgtgaagacatgagctgagattctttggttgacaagtacatcattggaaattatcaacttacccccattccttgtttcaactgcatgtagactgaaaacattcaagttccaactggctgttgagctcacatgccttgtaccaatgcttaaatccttttaatgtatcagaatcagaacatttgatgcaaaaaaaaaaaaaaaatgtatgggtgctggcatgtatgtaaccggggccacgatcaattgttgtgcaatagctagaccgtaactccccgcgtgcctagcccgcccctcgtcgtccgccggcctgcttcatcccctgccggcacccccattgatcccccgttggggcaatcccccggtgccccggtgggggaaataagaaaaagggccccccccctattccctt

SEQ ID NO: 4082 - DNA, 1896 bp, Triticum aestivum
  unsure (1)..(1896): unsure at all n locations
  Clone ID: TRIAE-23APR03-CLUSTER1262_1
gcgatcgccaacgcgtacacgccaccgtactcccgggacgtgggcgctcccaacattcgccagtggccgcggcggctgcgcccccccaccccgcagcccacccgccccgccgcccgggacgcgtacagcgggcgctggcggccccaccgctcctccgcgcaccccgcccagcgcctcaaaagccgctggccggtcccggaagggggcgccggggcgggtggcgcccgcgcaggcacggctacgggccggtggagtgacgagtaaattccttcatcaaggccccgcgcgcgcgcgttgggggaccgaatggggactgcggaggctccgtgcccttgttcgggcagcaggtcttggattcccacgaggcccaaagcgcgcaggatcccggggcggccggcagccttcaccggcctctcgtgcggggccgccaggttcccggaggaccgggagcgcagccacatcaaccgcctcaacaggccgcaccacccgggcttcgaccaccccgtcctcaagatcctcaccatccagaagagggcggtctatcaggccagctccatcaagagctatggcaagaacacgctcctcagcacccccaacccctcgtccgtcgaccctgccatgctcaacgagaacggccaccagcatgcgatagcatatgtggagcggaataagtactatggagacaagatcagcacgaacgcgaggcggcgctgcggccggaagcgcaacccgacggtcccctccccgatttcggtcgtggggggttcctttgggcagggcgtcaacagcattgaagcagggtggcaggtcagcccgaagttgtatggagacaacaacaccatcctcttcacctactggactagcgatgcgtatcaggcaacagggtgctacaacctgctctgctcggggttcatccagacaaacaaccacaacagccatcgcggctggctcttcggttagcccggcacctctatggggacaaatgatatcaacattttggtatggaaggacccgaagcagggcaactggtggctgcagttcggcaacgactacgtgctgggctactggccgtccttcctcttctcgtacctggcggacagcgcgtcgatgatcgagtggggcggcgacggtacgacatcagcatactcatgtggaaggacgtccacccaggatgggcagcggccacttcccggaggaggggttcggcaagtcgagctacttcaagaacatccaggttgtggactcgtccaacaacctcaaggcgccgcgggggatcggctccttcaccgagcagtccaactgctacgacgtgcagaacggcaacaatggcgactggggcacctacttctactacgggggccccggcaagaaccccaactgtccatagcctccaagaaatgaaatgaactgccactgctgctgcccaagccctaacaacaagacaacacgcacccccttgacgcctatgtattatccagtaaattagttcattcacaccccaagcctttcttccccggtccgcctcctgcctggggattgttttcgtcttcgcctaccgtattgaatgactgagtcagtgagttgattaactgcagtgtagtgtggtgcaactgcatcataggtcatgtttgttaggcctagatgatgataggtgtcatgtgaatgggtcctggtgttggctcctgatttatttttctttgtttgatatttctcttccggtgtgtcaatcaagccttctgaagagaagcatggcatgtggtgtggtctgtggtggtgcaccagttgcgtgatggcctaccaagggctcctttttcatactgtggtagtagattcattcacctgtccttcgttctttgnggctattattggatgggggnactctctcttcttttctgt

SEQ ID NO: 4083 - DNA, 1835 bp, Triticum aestivum
  Clone ID: TRIAE-23APR03-CLUSTER127024_1
gtaaatttcgtccatggatgcatccccttcccctggagaggaggtcctcccgtcgccggcgaggcgacagatgagatgagcctctccgccaccttccgggtcgccaaaattccccgcaccaccctccctccaaagtcttgcaaggccaccccctcctcggtatcggcctcctccgcccccgcgtccggagatccaccgcccaaggccgccaagaagaaaaaggagggcggcgccgtgcgtgcgtctacctcatctcctcctcccgggcccctccgtacatacgtcggcgtcacgactgacttccctccggcgcttggagacaacataatggcgagttaaaaggtgggtgccaaagcctcttctggctggaaggccatggaatctcgcatgccttgtcgaaggcttcacgaacagaagtgaagcatgcgagtttgaatcgaaatggaagaagatctccaagaagattacacggaagaggggtgagcggggcatgcagggagcaccgcaggggcgggaagagactctgcccgtcggaacagtcttactactgtggcaacggatcctcgtgtgagacctttcttcttgcaaacatgagaagctatactccaagtctccaaattcgtaaatttcctctatggatgcatccccttcccctcgagacgaggtcctcccgtcgccggcgaggtgagagatgagatgagcctctcggccaccttccgggtcgccaaaattccccgcgccaccctccctccgaagtcttgcaaggtcaccccctcctcggtatcggcctcccccgcctccacgtccggagatccaccgcccaaggcggtgaagaagaaaaaggaggcggcgccgtggtgcgtctacctcatcgcctccgccgggtcccccgcacatacgtcggcgtcacgactgacttccctcgccgcttgagacaacataatggcgagttaaaaggtggtgccaaagcctcttctgctggaaggccatggaatctcgcatgccttgtccaaggcttcaccaacagaagtgaagcatgtgagtttgaatcgaaatggaagaacatctccaagaagatgacacggaagaggagtgagcctggcttgaacgcagtgttgcagcaccgggaagtggcattgagcagagtaaaaacctttctggattgcaaccacctcaacatcaattggcactcaagctgacgtcgtttctccaattgttgtatgtacacatttcactatgcaagaaatttacccatttacttgtgaagttggcgaggcttttctgcttccatagttttgtacaaagaaggatcccatgtcttgcagctcaaatgagcatacatagcgaaatgatcatgctggcaattgtatttgctaaataagaagtcatctgaaaaaaaaaaaaaaaaaagcttatcgataccgtcgacctcgtcgggcccccccggggccggcccccccttcccccgtgcccccccccgcgcgcgccctggccgcgcgatacccggccgtccctgtggggccgtagtttattttcaaaaccgggcggggagggggagaaaaccccctgggggagtaaccacaaatttataatcccttttggggaaaaaaatccccccttttttctcaacggtggggggaacaaaaataaaaaaaagaagccgccccactccttattcccctttctaccaacaaaccgtccgaccccaccttgtgcggcgccagggtgacattcttttgtcgccccccccccttctttttctttctaaaaccctccccccaataatcttgttttgttacatcacccccgccctctttgttctatacaagaagagg

SEQ ID NO: 4084 - DNA, 1093 bp, Triticum aestivum
  unsure (1)..(1093): unsure at all n locations
  Clone ID: TRIAE-23APR03-CLUSTER12728_1
ctccccggccgatctcccccgttccccccacgttgtgcagtgcacccatagctaaatccaggtttcttcggccttcaccgtcgctgaatcagcccgcttcccgcatctgccgatctcccccgttccccacctcccccttcccgtcgggccgtagccaccgcaccgcccccgatggccgcctccgccgccggcgccggcaagtcactgatccagacattccgcaaattcttcaagaagccgtgggagatcaccggcctgtgctcctcgcccccgttccccacctcccccttcccgtcgggccgtagccaccgcaccgcccccgatggcctcctccgctgccggcgccggcaagtcactgatccagacattccgcaagttcttcaagaagccgtgggagatcaccggcccgtgctcctcgcccgagtaccgcagcgcggtcccgggtgcgctcgagtaccgtcaaacctgcccggccacccttcgcgaggactccctcagggccgtcatccccacctccgactcggagaccgtgttcgacatcaagtactacccgcgcgactgccgccgcaaccgcccgcccgtccgccgcaccctcctccgcaagcccgatctcgagcgctacatggccgccaagcagttcgaccccgccaaggacttccccgtcccctacgtcaattctgctgtcgagtacagcgaagtcggcggcggctacaccaagtgatccaggtcttgtggtcaagctgcagcagaagctgcactcacttcatttccgcttttccttgaaagtcccttcctcttttgtttcggagaaaaatttctggttgtaaaagatgatggtggcaataatatggctcttggggagtaaaccggatgcacctaccttgtaagttgtgttccaaaagtcagccagcctaatgctgatttgtggtttaattaaatttatgaaaaactcaaatcttctgctggaatccgtacatgatctactttcactgcgttttgacagaccaaaaaaaaaaaaaaaaagccgtatctatacccctcttttttgaaatgttacccaataccggttcggctcagtaangttggaactgga

SEQ ID NO: 4085 - DNA, 1308 bp, Triticum aestivum
  unsure (1)..(1308): unsure at all n locations
  Clone ID: TRIAE-23APR03-CLUSTER127384_1
acccgctccccactccgcatccctccctttcttccctcccccgcctttcccttccgccgtccggtcaggcggcgccggccggcctcggatccgccccgccgcgggggatgatgggcttcgacggcggcattggcgatcagagtgagatgtgggactggcagagtcaagagttcgatttgcagaaggatctgttaccagttccatctacctccctgtgggctgaagcaaaccacagtgaggttgattcttggagcctgttcgatgagcaaaccccaattaaagaatgtacagacatagatttacccttctgtgatataggagatattattatcaaggactttgatgaaggaaaggaaaccttacaagctaaacgaaggcgtatgctgcagttctgtccagacaattctgagatcgactgttctctgacagatgggctcttggaaaatctgcaagtggatttggatttctctagtgacgagcatttgttacagtgtgatgggacagaggaactacctgaacaatggctggttgattgctcacaagatagtgagaatcgttcgcccccggaagaagtgaaaagtcctagtgctgctgtggaagtaaatatctctgttcttcagaattcgttggtcgagctcgaggagcagcctatcatgaaagttgagaagaaacctccgcaggctaaacctacacctctgaaagctggaagaagcgtcttcagagcatagaagctgaaagtggcatcggtggcctacccattcgagctcatcaagccgtgcgggttccgcggagacaccaccctgagggacataaaccggaagatcctcgctcctccctcgtacaggatcaagcacaagatcgacgaggcgtccgccccgtaccaggaggcctcggccatntccgggaanccggtggtccncaagacaaagatccncnccgaaggggggaaaggcagcatcnccatcncaagaacganaggctgacgaagctngttcatattaccnccgngctagctttaggngtttanacgatttttgtggccaaanaagtgtgtatgggttggctgggttggttgttcntgctgcnatatttgacctntggtggattgttagggttggttgactggtagagcaggcctanaagtgtgtntctgtgtgtaggcagtgggtttggatagtgtgtgttttcatgttggtccaaaggtggaaaaagttgatgtgataatcaggttaatatggacatgtgtgtagtagtttggtgagatcnaattatatattttgcagnacctatngaaaaaaaaaaaaaaaa

SEQ ID NO: 4086 - DNA, 1564 bp, Triticum aestivum
  unsure (1)..(1564): unsure at all n locations
  Clone ID: TRIAE-23APR03-CLUSTER127540_1
aacaccagaaaacatagatatgtatatacagcggacgagagcgagctgagcagcgcagacggcccctgggggagagcttgggagaggagagggaccatggggacgtgctccggagaggagggggggagagagagggagaggcgacgcagccgcaatctccagcgcccaggcgcgccggagcccccggcagacgggccgtgccccggtagtccggggaggaggggcgggggctgtgggcagctcccggccggcgcccgcgcccgctgcgcctgccgcccgcgccgccccccctccggcccggccacggccgatgccttccatctcgccgcgggctcctagacggtatggaatttcacccgcgtctttacagaggcgctggatcccaacttactggctctgaaatgcattttgtggacctaaattgtctgaatctaatccaaaaaattaccaagtctggcgtcactagatatggattgcctggaggtaatagtatccagatactgcaaattgttagactgacttcacaaggaagatacttgctatggacgctaaaaactaccatgcttggtcccataggcagtgggttcttcaagcattgggtggatgggagagtgaactgcagtactgcaaccagcttcttgaggaagatgtcttcaataactcagcttggaatcagagataccttgtggtaacacgatcaccaattcttgggggccttgcggcaatgcgcgactcagaagtagattacacagttgaggccattatggtgaaccctcagaatgaaagcccctggagatacctcagaggtttatataaggatgataacaatttgctggtggctgataatcgcatttctgatgcttgcctcaaggtcctgaataaggattggacatgcgtatttgctttgagcttcctgcttgatcttcttcgcatgggtttgcagccttcggatgaacttaaaggaaccatcgaagcaatggagaactctgatcctgaaacgggacatgctgatattgcagtagctgtctgctcaatcctgcagaaatgtgatcccctgcggataaactactggtcatggtaccagaccactctttcttcttagacatctgaaaattcagctgaagatagttttagcagcatgatgtaaactcaatcgaaggggttgacgcactgtatgaaaaacctttcctgtgatcttggcgcggagcaaaatttgtattgattttactgggaaaaaatcaatcaatgacagcatgcccaacaatgtcttgtgtgaatatgttcctgcctgatattaaaatgttagcagaatgagaataaccaatcaaactccaatgagcagattgttaaagtaacagccactggtggtgtgaaaatcctgaaatntgcttcagtcactttgccttgtttacagttgagtctgttgttgtgatctgtacccaatgcatgtacacaatcatcaaattattagtttttttaccaatgtgtgctcgatgtaatcatcatgtattccctccttccaaaatacgagtcatatatattagttttgtnttaatttgaactg

SEQ ID NO: 4087 - DNA, 1949 bp, Triticum aestivum
  Clone ID: TRIAE-23APR03-CLUSTER127795_1
aggtgcgtcgtgcccatgcgaaaaagaacaagggaaaatggtcaagttgcagcacgctcaagttgtcacagcctgtagtttggcagcgacgtgcgcgcggaaagcaattgcggcggtcgcatggcgtcattccaaatcttcccccccaagctcgagacgccgccgcccccgatcagtcgaaccagccccctcactaaccaatctcccgaccgcccgctgccccccgccctcaacccccccttcgtgaatggaccacggctgcgacggcgcgctcccgctgcccccgcggtccagcttccaccccacggacgaggagccggcgatgtactacctgtgccgaaagtgtgccggcccgcccatcgccgcgccggggatcgcccaggtcgggttgtacaagatcgagccgtgtcggttgccgggcgaagggcggcgggaggagggccggacgccaaggaggggtccggccgctcgcggaagggaacgcacgtaccgcagcgcgacggcgagtaaccgaaccgcctcgccgccggtacctgcgccgcccggacctggcactagaacggccaccggcgccgacaagcccgtggggtcgccccgccccgtggccatcaagaagcgccctcggtcttctaggccgggttattcccttcttctcgaaggacttgggttcagtgtcgtggcagctggctgacgcttttaggttttgttgtgtcatgtgtaattgtaattgcgacgacgcatatgagctggatgatttcagtgctctgccgaatctacaacaagaagggcgtcatcgagcggtacgacacggcggactccgacgccgccgacgttaagccggcgccggcgccggctgccaagaacccgcggccgggccagtaccacgctgggccggcgatgaaggtcgagctgtccgactacgggttctaccagcagccgtcgccgccggccacggagatgctctgcttcgaccgctccgggtcggcggaccgggactcgaactcgaaccactccatgccgcgcctgcacacggactccagctcctcggagcgcgcgctgtcctcgccgtcgcccgacttcccgagcgacatgactacgcggagagccagcacgccgccggcctcgccggggggtggccgggcgacgactggggcggcgtcatagacgacgacgggttcgtcatcgacggctcgctgattttcgacccgccctcgccgggcgccttcgcccgcgacgccgccgcgttcggcgacatgctcacgtacctgcagaaaccgttctgaatgaaggcagcatccgtcagactcctcctcctcagcagccccccactaacatgttcatcaggtctcgtgtaattcggtttgcaagcttccgaaacctatgcagattagagaaaacttagtgaggattaacccgcacaaatctgatacccctagatcgatcgatcgatcggggttcggatgcagagttttcccaaacgtacgtacataccaggtgttagcctcgtcaggttttggatggcatttgggcgacttggtacaagctaggatcgttgtaccatgtgccctgctgcccctgctcctttggctgccgcttggacatggcaagcatgcatggtcaggtagccgtcgggtaatatttcaacttttgctgtggtcatattggtagattccaaattagtagaaagtagaggtcatcaaacgagaaaatgaaaccgaagttttgggttcaggagctgtggatcgtgttgtgtagctagtgtagagttggttcgggttattattttcttctcgaaggacttggttcagtgtcgtggcagctggctgacgcttttaggtcatgttgtgtcatgtgtaattgtaattgcgaagatggtgtgatagagtcgctttcagtggtggtcactcgggtgacctggaaatccaattttgtaatgcaattatcgtaat

SEQ ID NO: 4088 - DNA, 1180 bp, Triticum aestivum
  Clone ID: TRIAE-23APR03-CLUSTER12791_1
aggccccctgttctctcctcccagtcccgtgccccactgcacccccgccttgcctccccatccttgacccccgcggcaccacggtccaaaccaaaagactgcccactccgaccaggagtccaagaaactcgccaagaacaaagcaacgcgcacgccgccaccagagccaacacacacaacgcaagccccttccaatcctctgcaggcactccaactcttccgtccagtagcggcgctggccggcgagaccgtgatcgctaccaggcgcaggcgccgtgatgggctcgctgctcctgctctccttgctggtgatttctggggtcggggtcggcggcggcgtgaggctggcgggcaatggcgggtacgaggactggaggctgggcacggcgacctacatcaaggagtcccagggccacccgctcaatgacggtggcggcgcttgcgggtacggggacctggacatattcaggtacgggaggtacacggccgggctgagcggcgcgctgttcgggcggggcagcgcctgcggcggctgctacgagctccggtgcgtcaacaacatcctctattgcctgcggggcagccccaccgtcgtcgtgacggcgaccgacttctgcgcccccaacttcggcctcgccgacgactacggcggctggtgcaacttccccaaggagcacctggagatgaccgaggccgccttcctccgggtcgccaaggccaaggctgacattgtccaggtgcagttccgaagggtgagctgtgacagggccggcggaattcggttcacgatcaccggcggccccaacttcctccaggtgctgatcaccaacgtggcagccgacggcgaggtcgacgctgtgaaggtgaaggggtcgaagaccgggtggataccgatggggaggaactgggggcagaactggcagtgcgacgcggacctccgaggccagccgctctcgttcgaggtcaccggaggaaaggggaggacgatcaccatgtataacgttgcgccttcggactggatgtttgcgcaaacgttcgcaggcaagcagttcgtcgagtaggtgaaagaggattgcaagctccagcgactgtaattacaactacaagggttactaaaatgccgtgacccaagaatgaacgtgaatggttttcgctctgcccgccaaaaaaaaaaaaaaaa

SEQ ID NO: 4089 - DNA, 1937 bp, Triticum aestivum
  Clone ID: TRIAE-23APR03-CLUSTER12798_1
aaacaccatcgcagagccttcgggactcccgggaacgacgcagagtcctaggttagggtctccgggtcaagaaagcgaagggggtttaacgccgcagcagctgccatgggcgacggcggcgcgactcttgcggaggccatggcgagcaacggagcgattgttgcggttgtcacttagcgcaagcggggtagcgtcgcgtgttgcatctaccacccgaagaataattaagcttggtgcacacacacccagagggaatcctgagtgttgagcagctgacgcgcatatcccagccatgagtaattaactaataaatgtcctgcagaaagaagcttaagtgaggattacatatccagaagaaaaaagcttgtggatgctttaccagagaagagcttggccatgattgcatctgcagatcagcagatgatgactgatgtagttccgtactcattcagacagaaatggtgattacctgtacattacatgttgaaaatggtctgttcatgttcatgccatgataaacataaggaggatgtagtttgggaaggtcagactgctggagttgaagcagctgtggatttcttcaaggcagataaagcatttccacttagtgagatgaaaaagatccttcctgaaatgattgagcaatcaaaagtggtgtatcacaatgcaaaggcatccacatcttcttataggaactttgatgccttccgcagggcatcactcaacaataaagtaaaagatcttacgcattacactgatgaactgcggtggatcaagtcaaagtcggaaatcaagttgatgagggagtcagcatctattgtttctcagtctcttttgcagacaatgttgctctcaaggacccacagagaggaaagccagttagctgctaaaatagagtatgagtgcaaaatgagaggtgcccaaagaatggcgttccatcctgtagttggtggtggagtaaatggcagtgttgtacattactcaagaaatgataagaagatcaaatcgggtgatcttgtcctcatggatgttggatgtgagtaccatggctaccttagtgacctgacacggacatggccgccctgtggtagattttcagctgctcaggaagaactgtacagtttaatactggagacaaataaggaatgcataaagctttgtaaaccaggcacgagcattagagagatacaccatcattcggtcaagatgttgataagcggattccaagaacttggaattatacggaagggcaaatctatccaatacaattatttgaatccaacctcaataggtcattctttgggaatggatatacatgactccacgagcctcaccttagacaaacccttggagccaggcgttgtaataaccattgaaccggggatctacattccccaggtcccgatactcaacgagaatgccccggacaggttccggggcatcggaataaggatcgaggacgaggtcctcatcaccgagaacggccatgaggtgttgacggcgtcggtgccgaaggagatcccccacctcaccaccctgatgaacatgggcggcggtggctccacgacggaatcccatgaagcgagagctgcttgcaactgaggatcacgcagatagcggcgacacgatgatatcctttccaccggagatcatgtggcatcgacattacattcattacattttttccctgtcgttcctgtcaaagatgtagaaatcggaatcgcctgaaaaccgaaacggggcgcttttgaaaagtttcgccagttcatggcaaaacgcgcccgctgttagggtttgtaatatgttcattggacaaagttttgggtcttcattattttttgttgttgttgagggaattggatcttcatttgttggtgtaataactgtagctgaagacggctgttgtctgacaatcaatggtgaaagggctttccatg

SEQ ID NO: 4090 - DNA, 1482 bp, Triticum aestivum
  Clone ID: TRIAE-23APR03-CLUSTER127991_2
gtccgacgccgccccccgtcgcgagagctaagaaggttctagaaggaagagaggcgaggcgaaaccgccacagcctcggcgcctggattcccagtcctacccctccggcggcgcgcatggatcagaggaaggccctgttccgcgccaagctccgcgaggccaaggagaagcaggagaagcgcatcgacccctcgctcgtcaggtataatgaatatgatcagcccatctgtagggtctgcaacgttacgttgaaatccgaagcactttggcctgcgcaccaggtttcacggaaacatcatgaggcaaaagccgccgcagctgctaaagttacaccagctgcagctcctcgtggcaataatgtcagtcatgaacgaccagctgaccctcagaaagcaaaatcctctccgatgcctgccaatttttttgacaatcagggaatgaaaaggcaaagtgatggtactggttctgagggaaggtctgtacgtcatcaagtggctaatgctcaaccagcaaccaaagaagcaagtgcaaataaaccatctatcaggatggaccaagcgccaaataaagggagtaaaggcagtaccgacgtgaaaggaattcttccagggaatttttttgattatgcagaagaagatgaagatgaagttccaactcctgctccagctccaaaggagcccactaggacttcaggaaataccaccaaccccaataccgtgcaggtgaaaggtgtcccagatggcttcttcgatagcagtaacacacagcccagcgaaaccagtgcatcgtctcaagcggcgaataatctggaaactgctcaagtaaaagctctgcctgaaggattcttcgataacaaagatgcggatctccgtgcacgtggtattcaacctccaaaagttgacatcaacgacgcatacaaagaatttgaaaaggaaattcaggaagacctccaggaagttgatgaccgcctcgaagaagaggagattgatgctgctgccgagagggaagagtacttgaccttggagcaagaggagtacaggcagcgagtagatatgctgaagaaacagctcaccgagtccaaagccgcacggactgctaaagcgaacagcaaacccatcggcatggacacagattccagcgccagcgactcatcgagcgacgacgaagacgaaggcacagattttgctgttgactggagagcacagcatatgaaatgatgtagatagagattgctcgctaccgtgaacaaggactcggttctccaggattttgcataaaagaggtctttctccgttcctgtccttttactttgaaaacgcacgagcgactcttgaactaacgcggcgagacctgtgatggttactcattaatgtgaatagtccggagtcttaaccactgacaatttgtctctgcctgattgtactgcgtcggttgtagcgaattattattttcccaaggaaatgagtaaaacaaccaagaact

SEQ ID NO: 4091 - DNA, 2061 bp, Triticum aestivum
  Clone ID: TRIAE-23APR03-CLUSTER12853_1
agtagcacccccttctctgtccctcggcacagcagtcagttcatctctctctcctcctcctcgacccgtcctcctcccccacccgcgcggcgccccaatgccgtacgaaccctagcggccccacccccgatctcgcgcggccatgggcaactgctgccgctccccggcggccgcggcgcgggaggacgtctcgtcgtcgcacttccccgcctccgccgggaagaagaagccccaccaggcgcgcaacggcggcggcgcggggggaggcggagggcggggccggcgccggcgccggcggggagaagaagcgcctctcggtgctcggggaggagcgccgcgacgtgagcggcgggagcgacgacaagtacgcgctggaccgggagctggggcggggcgaagttcggggtcacgtacctgtgcatggaccgggaatccaaggagctgctcgcctgcaagtccatctccaacgcttcaatagcctaagcataaggcttatcaaggatggatctgtaaagatgggaaccgagtgaactcgcaggcttgtagctggcgctcttgtcccggtcacgtaagtccggccgttggcccactaagcatagaccctcttcccttctctgatgattattttggcggaaatttaattagataggctcccccccctgataggcttactcgtgtaacgtcacgcgcaccatcggcgaaggcgagcagcacgcacaccccgaatgatgcaccaaccccccctgcctgatgagagctccttttcttcgccaacaagaaggagaactccccgctcaaggccatcgacctctcactctccatcttcttcaagcccggtgagaagttctctgaaattggtggaagtccctactatatggctcctgagccactgaagagtagtgatgcaccgcaaatagacatttggagtgctggcgttatcttgtatatattgttatgtggtgttcctccattttgggctgagactgaacaaggagtggcacaagctatccttcggggaaatatagattttaagagagaaccctggccccatgtttctgataatgctaaagatctagttcggcagatgcttcagcctgacccgaaaatcaggctaacggcaaagcaagttcttgagcatacatggcttcaaaatgccaagaaagctccaaatgttcctcttggagacattgtaaagtcaaggctgaagcagttttcaaggatgaacagattcaaaagaagagctttaagggtcattgctgaccacttgtcggctgaagaagttgaggacataaaggagatgttcaaagtgatggatactgataatgacggtatagtctcatatgaagagttgaagagcgggattgcaaaatttggttctcaccttgcagaatctgaagtgcaaatgttaatagaagctgtggatacaaatggtagaggagcactagattatggtgaatttttggctgtctcacttcatctacaaaggatggcaaatgatgagcaccttcggcgggccttcctgtttttcgataaggatggcgatggttttattgagcctgaggagcttcaggaggccctggcggaggatggggcggtagatatcacagaagtggtgaaggacatattgcaagaagttgacaccgacaaggatggcaaaattagcttcgaagagtttgtagcaatgatgaaaaccggcacagactggcggaaggcttcacggcattattcgagaggacgattcaatagcctaagcataaggcttatcaaggatggatctgtaaagatgggaaatgagtgaaatcacaggcttgcagctgatgctcttattccggtcacgtaagtccggccgttggcccactaagcatagaccctctttccttctctgatgattattttggcggaaatttaattagataggctccccccctgattggcttactcgtgtaagtagctttcccggtatcgctgaggtgaggagcacgcaccgaatgatgcaccaactgctcctgcctgatgatatctccttttgctgtacctgatgctaagtgttgtacaatattt

SEQ ID NO: 4092 - DNA, 1579 bp, Triticum aestivum
  Clone ID: TRIAE-23APR03-CLUSTER12861_1
cacgagaccattacctagaacatcctaatcgaaaagaacatcctaatcgaaaaaacttttagcaaaccctctccttgtcctttgcttttggtccgctttctccttccaacccttcctcctcctctcgcattccagtagaatcgtctcggttgctagggtttgatcctacccttcctggcacgatggcgcatccgcccccgcggaactgggccatggcgccgccgtaccactaccacgggacgtcgcagcaggagcaggcggcgccagccgcggaggacgagagcggagccgggtccggagggcaggaggcagagtcgaggtcactccggatccgcgaacttttcccctggatggacgaggactacctgcgcagctgcttcacccgctcgcccgagcttgtgacagcagtgataacgcggaacaaggagaccaagcaatctgagggtttcggttatcttaccttttctgaccatgccactgctgaccaaatcctccagagctacaatggccagaagatgcctaatgctgacagggatttcagcctcagctgggtccagtatgctggtcctgatgatgattgtgccatatatgttgggggattgggctttgatgttacagacttcatgctacaccacgtgttcaagaatcgctatccatcagttaagagggcaaaagttatatgggattttcttgctagacgctcaaaaggctatgggtttgttgtgtttggagatgtcaatgaacgcacacaagcaatgactgaaatgaatggagcatactgttcttctaggcctatgcgtatcggacctgctaccttcaagagtgattttcgtacacaagggacatattctgattctaaccagaacaatagcagactttttgttggtcaacttgattcatgtgtgactgatgaggatctagataaagccttcagtccttatggagagcttactgtcaagggcatcagctgtggaggctatgacaattctaaatggaagccagctgggagataatatcataacagttaactgggctcgtcctgctcctaagaagcaggatcaatggaatggtgtggaccatggacaccctcaaagctctggtccaggttatggttgctgtcccgaggatcctaacattcttggttacacaggccatcctggatatgcatatcaccaacagcagcagccacagcagaccccagtacagtgaggacgccagagcagggaacgtctcagtcgcagggtgcagcgggattcttgtgacataaaactcagaaggacttttgctggaaataactgtattagttactcaagatgcctggaacaacattttttgcggcaagtttatttctctgggaaatagttgtccgtgctgctgctgtgtttctcattatgttgtgcaccatcacacaaattccctgagatgcctggaacaactttttttttggagagaattttcaggaataaaaaaaaaaaaaaaaccctttgttgtgcactgtcacgcgatgcctggaacaacggttttggcggagagatatttcttttgggaaaaaaaaaaaaaaaaaaaaaaaaaaaaaaaa

SEQ ID NO: 4093 - DNA, 1465 bp, Triticum aestivum
  Clone ID: TRIAE-23APR03-CLUSTER128702_1
ctcgtgccgcaggccgcccctccgcccccaaatgctcgcctcacgagaccattacctagaacatcctaatcgaaaaaattttatcgattatcaggccggcactccgcccacaaatgctcgcctccatctcccgatctctcgctcgccgcctcccgcgccttccgcttgccaccgccgccgccacaacagccatgtcgtcgtccgacaccgccgggagcgtcgccgaccgtccgatctctcctgataccacacgcatcgggtgggtggggacgggcgtcatgggccagtccatggccggccacctcctcgccgccggctacgcgctcaccgtatacaaccgcacgccctccaaggcccagggcctcgtctctagcggcgcccgcctcgtggacagcccgcgcgccgccgcggccgtcgctgacgtcatcttcctcatggtcggcttcccctccgacgtccgctccacgtccctcgacccctccacgggcgctctcgccggcctcgccccaggcggcgtcctcgtcgacatgaccacctccgaccccaccctcgcggccgagatagctgcggccgcggcgggggccggctgcgccgcagtcgacgcccccgtgtcaggcggcgaccggggcgcccgcaacgcctgcctctcgatcttcgccggcggtgacgcggccgtggtggcccgcctggcgcccctcttcaagctgatgggcaacgccctctacatgggcgggccgggcgcggggcagcgcgcgaagctgggcaaccagatcgccatcgcgtccaccatggtgggactggtggagggcatggtgtacgcgcacaaggccgggctggacgtgggcaagtggctggaggccatctccacgggcgccgcggggtccaagtcgctggacctgtacgggaagcggatgctggagcgcgacatggcggccgggttctacgtccggcacttcgtcaaggacctcgggatctgcctgtccgagtgccagaccatggggctggcgctgccggggctcgcgctcgcgcaccagctctacgtgtcgctgcttgcccacggcgagggcgggctcggcacgcaggcgctgatactggcagtcgagcggctcaacaacacctgccttgacaagaaaggggagtgaaactgtgaaagcctacgagagcttggttgatgcaatgcaacacgagagaattgtctcctgctgtgttcccttgtggatatgggacttctgcatgctctgtctgttcatgctttacagtgctctaaggttcaaataagattgcaaaaatggagtttttcacttgtattgataatattcaactactcctatagtcctatttggcaaatcagtctgtagtgattgtcgatcaacttggcagtgaaactagaatattgaatgtagctcaccctgtgttaacgggttatatttgccgcaaaaaaaaaaaaaaaaaagcttatcgatac

SEQ ID NO: 4094 - DNA, 1798 bp, Triticum aestivum
  Clone ID: TRIAE-23APR03-CLUSTER12877_1
ttttttttttttttttttttcccataacagtccaatattcaattgaagaaaatcttcggcagcgaaggcagctcttgcttttcaagccaacaaactgtataaacctaacaatagacgggatactgaattaacgatagttctagtatcaaatgcaaaatcaagggaagttaatgtattgtacacattgtatagctcactcatcgctcaggtacagttgacggtgcgactgatgaattattgggttttaccatgtaaagtatggcaatcgccaagcaatctatgtaccagactatcaatcaacctatcgagtatgcagatgacatatccctgtgactgagttacaacagtatgaagtccaatgtaacagaagatttgaggggagaatgtgggcccgaactccaacaatcaagaggatgcagctgtaaatggttcactagcctccagaagcttgtcaagcaagccggtgaacacaacagaatcagtctcattgggcttgaatttgaggagagcagaaggtaccaggccttcatcttgcaacgtgcgtgcccgctctcctgtatttggagaatgcggtagcacacgtgacctaggaacagctgggcagataagatcaaattccaaacctggctgcttcaaagcgtccgcgacaaactcatatagtgaaccagtagcctccgctggaaggaatacaccctggagaattactccatcaggaaactgaactcggatgacagcttgtttgtacttctgtcgagcagccagtgcctgcttctccttatatgactttggaattagcaaccgagattgttccagcctttccctccttcatctttgcctcattccttacctcctcaccactaagtttgtagaaagaatccggtgtatcaatttctgcaacagaacttccagggacattgaagaatacccgaatctgacgatcaacaatcttgttaacctccttttgctcatcgactccgctgcggcagctctctttggactcagacccggccagcgtcggtagcggtgccgaaggatgggacctctcaagcaggagcacagcctgcctgatcccgctaagtctcgcttcggcaggagtctcgtccatcacggcaaagagctccccgccctcatccccgatcgtgaacccgaccgcctcgaggagctcgagcccgccctccctgtccgccacggcctccttgatcctcgggttaccgagcctgaccctcctgtacttgtcgttgccgggctccttgagcaggttgccgagaagcttcttcacgacctcgacggccgcggggggtgggttgccggccaaggtacgcggccgcgcgggcgcgggcgccgccggccgacgcgaggcagccgtcgaggtgctccgagacggcgtgctcggaggagaaggcgtcgccgcagttggggcacgcgacggtgtcgccgccgttggcatctgggcggcgggaggaggaggaggagatgacggcggtgaagggggtgaattcggaggggccggccgggcgcgggggctgctgcttggggacggacctggggttggggttagggttagggtttgaggggcgggaggaggaggtggaggcggaggggggagggccggagccgaggacgtgggaggggcccttgaaggacggggcggaggaggaggtgaccttcttcatgagatccttcatcttgtccttcatcatggaggccggcgacgacgaggtgcaggcggcggaggaggtgggggattggcgtggacggggagtagacttggtggtggttgcctccgcggggttcgttc

SEQ ID NO: 4095 - DNA, 1213 bp, Triticum aestivum
  unsure (1)..(1213): unsure at all n locations
  Clone ID: TRIAE-23APR03-CLUSTER12886_2
accaccgcgtgccctaggtccgacgcctccactccccacccccaggcgcttcgccgccgccgccaccgccaccatcgccgttcctcaccgctgtcccaacccagccgcggtttctgggcatttgattttgtggctggagatatgaagcgagaaggagttcgcaccagaagccagactaaaaaacaaaaagcttccacaagtagccaaggtaattcgcttccggacaatccttttgaagaggaatttggcagcttaagtgattctggtcaaggtgtgtggacggaactcagtaaagaagtcgcctcgaacttagcaggcactgttgtatcgattgcttcattcgatgatggaaataataaactgttttttgcatgcaccggcataattaccgtgaacactccaaaaactttacaagttttctgacttcattaagtttggttagatctattgatgacaacagcaagatctttcacgacatgaggattgaagtgcgccttccagataacaaaattgaatcgggatggttgcaattctatgatttgaaacacaatgtcgctgttatcaacatcattccattctcttcaagtaacatgtctagatcatcagatgcaaattaagcctcagattaaggtagtagctgtagggcgtggctacaaatcgggtaaattcatggccacaagtgggatagtgatcgacaaaccaagtaagcttgattgcaaagagcttaagatctccacttgtaaaatcaccaaggctgggattggagggcctnttattgattttgatggaaatttaattggcatgaacttctatggcttggaagaaactccatacgtaccagtgaatataattgtagaagtcttgaagaattttgatgcacaagggtttgttgctgtcaacgatgatcatagcctaaacagatggcccgtgcctaagccgttttggtgctatccgacatggcacaagcttgaggaagaagtagatctggaggaagaacttaagtaccagcgggaacaatactaatgtgatgaactgtatctcgatgaatgctttctatcttgccctcaagctgccggccctgtatagcaagtatgaattgttctgtaacttaatttgaaccctgaaatactagtgtacgcatgcctctttatgtaatggacttgtactaaggccaaactaggtctattaagagatgggttcggttcaggctggt

SEQ ID NO: 4096 - DNA, 1470 bp, Triticum aestivum
  Clone ID: TRIAE-23APR03-CLUSTER1290_1
aactacccaacccatcatccgtcgagcgatcagtagtcccagtcccagaactccgagctaggcaacaatggcgtcctctccgctgctcgtggcgcttgtgatggtctcggcgtgattcccgcctccatccacccagcgatcggcactcccactctaacagctccgagccagccaacaatggcgtcctctccgctgctcgtggcgcttgtgatggtctcggcgtgcttcctggccgtgtccggccagaagttcaacgccatctacagcttcggcgactccatgtcggacaccggcaacctctgcgtcaacgggccccccgccggcctcaccctcacccagcccccctacggcgagaccttctttggccgtgccacctgccgctgctccgacggccgcctcgtcgtcgacttcctcgccgagaagttcgggctgccgctgctgaagccgtcgaagcagggcggcgcggacttcaagcagggcgccaacatggccatcatcggcgccaccgccatgggctccagcttcttccagtcgctcggcgtcggcgacaagatctggaacaacgggcccctcgacacccagatccagtggttccagaacctcctcccctccgtctgcggctcatcgtgcaagacgtacctgtccaggtccccgtcatttccggggtagctggccgggaacgactccaacgggctcagcccttcgccggctacacgccggagcaggcggccgggcagagccccaccatcgtggacgccattggcgccggcgccgagaagctcatcgggctgggcgccatgtacgtcgtcatccccggggtgctccccgtcggctgcttccccatctacctcacgctctaccagacctccgacgccggcgactacgaccaatacggctgcctgaagcggttcaacgcgctgtcggcccgccacaactcgctgctccagagcaaggtgaccagcctgcagggcaagtacccctacgccaagatcatgtacgccgacttctactcccacgtcttcgacatggtcaagagccccgctagctacgggttcagcacgaacctgagggcgtgctgcggcgcgggcggcggcaagtacaactaccagaacggggctaggtgcggcatgtccggcgcgtcggcgtgcggcaacccatcgtcgtcgctgagctgggacgggatccacctgacggaggcggcctacaagaagatcgccgacggctgggtcaacgggccctactgccacccggccatcctctcctagagcgagcgaccgagctccggctcgtcgtttggttgcttcctttcattcctcgaagctggggagggaatggattactattatttttagcagaagaagaagaagaagaagaagatgtgttgcgagaataagcatcgatttgattaattctcgtgtaatttgcgcttgggctgaaagagattcggcggttacaaaaaaaaaaaaaaaa

SEQ ID NO: 4097 - DNA, 1299 bp, Triticum aestivum
  Clone ID: TRIAE-23APR03-CLUSTER129125_1
tctagcggacggcattcctcctttcgtcatcctcctgccggcgattctcgtggagacgcacacgcacatacgcatgatggggatccagcccaacttgctcaaccagctggtgtcgctcctcctcggggcgtccgtcgccggggtgctcatcttcttcatgtcctcggacgggatcggcgccgggccgtccacgcccggcatatccagctgggtcaatggaaccatggcggtgccggtcgctcctgcgcaggaggctaaccacacgagcgcaagcaaggtcgacggcgttgcctctcccctggaagccagccacaacactagccaggcggcggaggacgagctggagcggctgctgcggacggtggcggacgagcacaagacggtgatcatgacgtcggtgaacgaggcgtgggcggcggagggctcgctgctggacctcttcctcgagagcttccgcgccggggagcggatcgcgcacttcgtggaccacctcctcgtcgtggccctcgacgccggggcgctggagcggtgccgggccgtgcacccgcactgctacctcctgccacccgtggccggcggcaacaagaacctctcggacgagaaggtgttcatgagcaaggactacctggacctggtctggagcaaggtccggctgcagcaaaggatcctcgagctcggatacaacttcctcttcacggacgtggacatcatgtggttccgggacccattcgagcggatgtcggtggcggcccacgcgtccggtcggacttctacttcggggacccgtacagccccgtgaacgccccgaacacggggttcctgtacgtgaggtcgagcgcgctcatggtgggcgtcttcgaggcgtggcgggcggcgaggctgtccttcccggggaagcacgagcagcaggtgttcaacgagatcaagttcgagctggtcgacaagcgcgggctccgggtgcagttcctcgacacggtgcacaacgccgggttctgcaacaacacccgggacttcaacacgctctacaccatgcacgccaactgctgcgtcggcctcgccgccaagctccatgacctcgggaacctgatgaaggagtggcgcgtgtatagggggatggacgacgcacagcgccggcgcggccccgtgcggtggaaggtccctgggatatgcatccactgatgattggttgatagcgatgcacatgtagtcgaccatttccttttgagatgtacaaatgtgtctgcagttgtgcgtaagacaagatcgaggtttatgtcgtcagctcgtagtttgctcaga

SEQ ID NO: 4098 - DNA, 1716 bp, Triticum aestivum
  Clone ID: TRIAE-23APR03-CLUSTER129230_1
gaaaagaccccacagccgggaggagaaaagaatcccgtcccaccccaccgccgcggccaaaaaccaatcacgcctcccggcggcggcccgcgcggcgccggccatggcggacgccgtcaagcagccgctcctccaccaccagcagccctacgcgtacccgtcgcacgccgcgtcggcctcctcccccgcgctcccctccgtgccccactccgggaccgccacccccacccccggggccgggggcgccgcctccgcctccttcgccgggggccgccgcttcccgggcggccttgacgtgcccaacctcaagaagcgcggcggcggcacgcgcagctggatccgcgtcgaggccgccacggcctccgtgcagacgctggaggtcgacaaggccaccatgatgcgccgctgcgagctccccgcccgcgacctccgcctcctcgacccgctcttcgtctacccctccaccgtcctcggccgcgagcgcgccatcgtcgtcaacctcgagcagatccgctgcgtcatcaccgccgacgaggtgctcctcctcaactccctcgacagctacgtcttccagtacgccgccgagctgcagcgccgcctcctccagcgcgccgagggcgacgagctccccttcgagttccgcgccctcgagctcgccctcgaggccgcctgctccttcctcgacgcccaggcagcagaattggaaattgaagcatatcccttactggatgagctaacatcaaaaattagtactctaaatctggaacgtgttcggcggctaaaaagtagactagttgctctgaccagaagagtccagaaggtcagggatgaaatagaacagctaatggatgatgatggagatatggctgagatgtatcttaccgagaaaaagatgaggatggaatcatcatctgtgtttggtgatcagtcattggcgaccttcaacgcggcagccgctgggacttcagtttcagctcctgtgtctccagtctcttcacccacagaatcacggaagttggagaaaacctacagcttgtgtagaggttgacacgctagtgtgttgggcccggagggcgcagtggcggtacatattgaggagcttgaaatgttactggaagcatattttgtagtcatcggcagccctcttaacaagctgacctcgctggaggagtttattgatgccaccgaagattttatcaccatccacctggacaacggccggaatcagctgatccagttcgagcttctgctaacaaccgcaacgtttgtcgtcgccattttcggagtggtcgcgggggtattcgggatgaacttcgagaccgacgttttcagcattcagaacgcattccagtgggtgctgatcattactggagtggtgggcgctttcatcttctgcttcttcgtctggttctcaaagtacaagagactgatgcccctgtagatataagctcccctcattatgcggactcaaccttctgttctctgttaaggtacttgatcagaaagcactgaatccatgtaaatcaacattctttcaggggcttgccatgtacctactacaaaatcaaatgaaaacaaatttttttccttactctgatgtaaatgggttatcatagaaatagttctcaagtcttaaccttccatccttccaaatatttcgcctattaataaaacaggtatttggtggggtggttatagacaaaaaaaaaaaaaaaa

SEQ ID NO: 4099 - DNA, 1233 bp, Triticum aestivum
  Clone ID: TRIAE-23APR03-CLUSTER12924_1
gtttctaataaacctcttccaaaacccaggaacccctcccagctcccctcccctcagcagccagatcaaacacctagggtttggttcgtgagagagaagagagggtgcgatgaagcttgcggggctcaagtcggtggacggagctcacgaggactcgatctgggcggccgcgtgggtgcccgctgctgaccaccgccccacggcgctgctcctcaccggctccatcgacgagaccgtccgcgcctggcaacccgacgacctcgccgccgcgtcccccccggcgggagggcacgcgctcggagtgatatccctcgcggcgcatcctgccggggtcatagccgccgcggtctccatcgacagccacgtccgcgtcttcgacgtcgactccggcgcatccgtcgccacgctcgatgccgcgccctccgaggtctggggcgtccagttccaccccaagggtgttgctctggctgcagctggtggtggcagtggatcagtaaaactctgggacacggagaagtggcaacctattgccagccttcctgttccgcgtccagagggagcccgcgctgataaaacaggcagcggcaagtttgttctttcagtggcctggagtccagatggcaagctcttagcatgtggatccatggatggcacgattgcggtgtatgatgcggtccgcatgaagttcctccaccacctggaggggcaccacatgccagtgaggtccatggtgttctcgccggtggacccccacgtgctcttgaccggatgtgacgactcccacatccacatctacgatgccaaggagaagggcctgatcggggccatgtcgggtcatgcgagctgggtgctgagcatcgacgtgagcccggatggcatggcggtggcgacaggctccagcgaccgcaccgtccggctctgggacatcaatgcgagggcgtcagttcagaccatgagcaaccactcagaccaggtctgggccgttgcattccggccgccgggaggggaaggagtccgtgctggccggctcgccagcgcttcggatgacaagagcatctccctgtacgattactcctagttttacagatttggcgagctgtgatacagccctctgttattgccgtctgttgtaccatgacctgtaccactgtacgatgctgactaaagccgacacttgcaagttgagcgggtttaattgtagtggttaaaagtgattttcctgcaaaaaaaaaa

SEQ ID NO: 4100 - DNA, 1088 bp, Triticum aestivum
  Clone ID: TRIAE-23APR03-CLUSTER12931_1
atggaagaactcaaagaacacacacgcacacatataccaagaaggagcacaaagcttgtccccgtgctgtgatgtgggccatcatcgggacggccgttcgtgtctgatgtttgagccgtggctcggaacgtcaacgccaatgctgatccgtggaacagaaaacgtgctttccgtcctcgtggggtcggggcgcagtcgatgcccattttcattgcgatagagcagagcagataagattaggttcctgttcctcgaagggcaggcgcccgaagaagacgacgccattgatgcggatgggattcctacagcagctaatcagccgatccccactgattgaagcggtggacgacactgaatgcatgcgagatccgctgcggcgaatggctgccttgacggttgttggtgtggattaggtgccggcgccggccgcgagtgcagacgcacagatctgctcgagcgtggtgtggttggcagaaggaagaactcgtcgccgccctcgcaggtctccacgggaaggccagcccacaagctcctcggtggttaaagagaacggctgcttcttcagtgcccaagcttgaaagatgttcatgtctatcgatgttgttatatgttgatcggagcattcataaacgaggtgagccgtggatcaggttctcgatttctgtctgatctgtggctcagaaaagtcgatgctccatggattcaatgcaaggtgactctgttcttccccaacgcggccgtcattttggaacttcagaagcaagggagggagtggacgaacacacgaccgaaagcgatggatttcctcctccaatcaggagatctactctgattgaggttggggagagtctagtgctggaaggttgccggcacatcgcaccaggcaaacagtggtcaaggtgacgctgcaggaggccgtgggtatgagcgccaaagggcggatctgcggcgttgctgaagcggcggcaatgacaaggggcagcttgcctctcacttccgagctgtcgacggggaagaagaatcttcaggttcctcgttggaacaagaggttgaggactggagcctctgccccaagcttgactccttgc

SEQ ID NO: 4101 - DNA, 1195 bp, Triticum aestivum
  Clone ID: TRIAE-23APR03-CLUSTER12948_1
attaatccaactctccaatttttcaagcttcataaactggcttagtctccgcccctctctttctctagaactagaaaaaggaagagagaacatggcgtcctggtcatcgtcgtccacgcagcggagcagcggcgcgaccatgccgtgctccgtggtaaagctcgacgacgacctgctgcaccacgaggaggagaccgccgaggagatccggcgcggcccgtggaccgtggaggaggacctcacactcgtcaactacatcgccgaccacggcgatgaccgctggaactccctcgcccgcgccgccgggcttaagcggacggggaagagctgccggctgcggtggctgaactacctccggccggacgtgaagcgcggcaacttcaccgccgacgagcagcttctcatcctcgacctccactcccgctgccggctccggtggcccaacttcccccggcccctcccggggcgcgccgacttcgccgccgacgaccaccggcgcacaagggtgcaaaagcacgccaagcagctcaactgtgatgctaacagcaccaagttcaaggatgccatgaagtatctatggatgcctcgccttgctgaccaccaccttcagcaagcatctacagttggtgatcatcttgtgcctgggctaccaacgagctacatggagagctccggcatggtgacatcatcgtccgactctttcgcatcggagtcatacgatggagcacgctgcacgaatgcgagcgtaggagagatgatacagggtggggattgggtgcaagagcagaatcaagggttttggcctgagtcaaaccagactttccagcctcaggactcggagttgtctggatgggttcaagggttctccgagtctgagagcctcgctgagaatttttggagtttggaggacatttggaagatgcaatgatttatgttctatatatgttggaaaagggtacgtgcatatatacgatttatggtcggcatggtggtgtagaattagatgcgtcacttctatggagaaaaaactagagttaattagtttattctaacttgaaaagtcactattttatataaaagtgattaaagttcttttggtttcttttttccttttttggtcacttgttcatcttttcctcataccgactttgttgtccgagaggttaaagggatggagttttcgccaaaacaaaaa

SEQ ID NO: 4102 - DNA, 1642 bp, Triticum aestivum
  Clone ID: TRIAE-23APR03-CLUSTER1296_1
aaaaacccccacacattgcttcagccccctccccttccccttctcccctctccccaccccctccgctccgctcccgattcccaatggcgtcgtcgtcctcgtcgccgccggcgcgccgctccgtgttcgacgccgcctacatccgcgcggagttcgacgccgccggcatctcccccaccttcatccctaccatctggaagtacgtgctgcagaaccctaggtgcagcgacctcgacggcgtcccgtcgctctcggcggccgcgtacgcgctcctgcggaacaagttccggccgaccacctcgaccctcaccgccgccgccgaatccaaggaccgcaccaccaccaagctgctcatccgcctccagaatggagaatctgtagaagcagtgatcatgcggtatgattcacgactggggaagtatgatgggaagacacgccctggaggagtgcgttcaaccctgtgtgtatcgtcacaggttgggtgcaagatgggctgaagcttctgtgctaccggaacaatgggattcaaaagcaacctttcctctggagaaattgttgagcagctggtccatgcaacccgttattctcaaattcgaaacattgttttcatgggaatgggggagccattaaacaactatactgctttggttgaagcaatccaagtcttgacaggatttccctttcagatttcacccaagagagttactgtatctactgttgggattatccattcgatcaacaagttcaacaatgatcttccaaatataaatttagccgtgtcattgcatgctcctgaccaagacatacgttgtcatataatgcctgctgcacgggcctttcctttagcaaagctaatgaatgcattacaatcgtatcaaaacgcgagcaagcagacaatattcattgagtacattatgcttgatggagtgaacgatcaggaggagcatgcccacaagcttggtaaactacttgaaaattttaaagcggttgttaacctgataccattcaatccaattggctcagcaagcacgttcaagacaagcagtgaccagagcatcaagaagtttcagaaggtcctgagaggcatctacagcatcagaaccaccgttcgccaggagatgggtcaagacatagccggtgcttgtgggcagttggtggttagcctgcccgacgaaagatcggcaggcggggccacccttctgtcagacatcgaagacctcaggatctgacttctgccctgcctgttgctcgatatatcatcgcaaagtcgagttatattaccaatcagcgtcatgacttgatatagtaactagcaccgcagttcccaagcaagctttaaaatatggacctggttttggccatcgtggcgtgtgtttcccttcgaacttgggaaacacaattttgctgctgtcggcacaaatgtcacaaacctggtttttgtggacagcaactggaaaatgctagcaactctttctaagccttgtgatggacatatatatatagtagcaccgcagtgctggccccgccttggatgtttttaacacgtgtcgaagttggatgtatacctggaagttctcgtttggatctcctgctgctattttgatatttgatcaaaaaaaaaaaaaaaaaaaaaaaaaaaaaa

SEQ ID NO: 4103 - DNA, 1444 bp, Triticum aestivum
  unsure (1)..(1444): unsure at all n locations
  Clone ID: TRIAE-23APR03-CLUSTER129787_1
cccccccccccccgcccgcgccccccccccccccccctccgcccccgtcccgcccggcccgccccgccgcgcccctctcctcccctcccctccgctccttccctccctttgccccccccccccccccccccccccccccccccccgcccccgcccccggcccccccgccgccggcgcctagatccgtgccccgccgcccgccgcgcccccgcccggcgcgcccatgtcgtcgtgcgagtgcctcgtggtcgagaaggtgtcggaggaccacgccggcggcggcgaggcgacgggggcgcggcggggcggcggccgggccccgcgctccgaggccatgttccccatctacgtcatggggagctcgcgggcgcgggccgtgctcctcgacccctccgccgccggggaccccatatgggaggccgtcaaggccgaggccaggtccgaggcagagaaggagcctattttaagtagcttcttatatgcgagcgtattatctcacgactgtctggagcgggcgttgagctttgtccttgcaaacaggcttgaagatccaaccttgcttgcgactcagctaatcgacattttcaatgatgtcatgatgaatgacgtagatatacgccgttccattcgccttgatgctcaggccttcaaaggaagagatccttcctgtgcacaatatagctgggccctattatacctaaagggttaccattccttgcagtcctacaggatagctcatgtattatggaatcaagggcgtaaggttctggcgttggcgctgcaaagccgtatcagtgaggtttttgcagtggatatacacccagctgccaaaattggagaaggaatattgttggatcatggaacaggtctagtcattggtgaaactgctgttgttggcaactgggtttcattaatgcagggtgttacgcttggaggtactggaaaggaacacggagataggcaccccaagatcggtcagggagctcttcttggagctggtgctaccatccttggcaacataactgtaggcgaaggtgccatgattgccgctggttcccttgttttaaagcatgtaccgcctcacagtatggcggtaggaaatcctgcgaagtaattggctatacagagaaagaagatccttcgttgactatgaagcatgatgcaaggagaattantttgagcatgttccggtagtttcctgacagtagatcaacggaatgtcntgaaataaaaactgcaaggaggaatggaatttggcattcacatctgtggactacgcctggatanttgcgacgccgattgtgctccctgccagaacctctctgtaaatatcaggcaaccgcaaggtcccgaacncaaattattacagtcctaacgacataagtaaanttcgaaacgagntgnataaaaccgtanttcacgaacnaaccattacgngccacnt

SEQ ID NO: 4104 - DNA, 895 bp, Triticum aestivum
  Clone ID: TRIAE-23APR03-CLUSTER129931_1
gcgcaaccagtgcccaatcgcagttagtagcgagagacatcgatcgatagccacgcttagctccttcatctactccatacagctaactccgagccttcacttcgaccatggcctcgtcctccgcgctgatcgcgctccttgttgtccttggctgcgctgcggcggcctccgcggccacgttcaccgtcggagatgggcaagggtggacgaccggcgccaactacgccacctgggccagcggcaagaccttcgcggttggagacaagctcgtgttcaactacgcgagccaggcccacacagtgaccgaagtcaccaagagcgagtacgacgcctgctccagcaacgccaacggtgacaacagcggcgccaccaccatgaccctcaaagccggcgcgaactactacatctgcaccatcggcacccactgcgccgccggcatgaagctagccgtcaccgccggcgactccagccccggtacccccgcggcggggacgccgcccaccaccccgtccgggtccggcggctcccgcgtgcgcatggaggccggccccgtcctcgcggccaccgccggcgtcctcctcaagctcgccctcttctgatcctccgatgattcgatgttggaaagtttcgtcgatcgttctacgttttcttctgacggccacgcacacgctagtttggaacgagagtggttgcctgtgcttcctgatgtgatatgattggttggtttcgtagtagttggcgtgagtgacttgtatggatcattatctcgatgtttctatctagtagtaataggactcctccatacgagggtgatcaaataagtttggattctgtcaaaaaaaaaaaaaaaagggcccatcgatccgctgaattttaattgttcttacatttgagg

SEQ ID NO: 4105 - DNA, 1698 bp, Triticum aestivum
  Clone ID: TRIAE-23APR03-CLUSTER12998_1
actacaataagcggcgcctttttcgtctagcatccctcgtgtgtgtgtctccacggtcaaatcgggataaagcaacggcgacgtcatggcctcgccggcgacgccgaggccggcgctgatccggccgcgggcctcgcgcagccgctcccagttgggcgccgtcagcctcgcttccgaccacgccgccgccacggcctcctcgggccgccgccgcgacttcgtcttcgtcgtcaacccctccggcgccaatggccggacgggcaagcagtggaagcagctgctccccttcctccacacccgcctcgccgaccaatgcaacatttgcgagtgcatcacatcgggcccgtcgcacgccatagatgtcacgagggaggctataaaggacggcgctgatgctgtgatcgccgttggcggggatgggacgcttcatgaggtggtgaatggcttcttttggaaaggaagcccggtccgtgctcttgatcgagggcctgaccacttgacggcgcttggtctcatcccacttggaactggctcagactttgctaggacatttggctggtcaaatgatccccatcaggcgattgatcgaattgtgagaggagttaaatcaaaactagacattggcatgatggaaggtccaaatggagatccacatttctttataaatgttgctgatatccatctgagtgccaaggcaggttattttgcttctatgtacaagagatttggcaacttatgttatgttctgggagctttaagaggcttttggggacatagtaatcgagatttgagaataaaggtgaatggaggggaatggagaacagttgataaagtcactgctctatgcgtaggaaatgccaagtactttggaggtggcatgaagattactccaacagttgatccttttagcggtgaccttcaggttgttattatacaagatttcaagtggtacagttttcttcttaagctacataggctttatggaggcacacacttaacggtgaatggcgtgtcatcaataagagttcaatcaattgaagtggtagaggtggtgcctaacggcgacgtctttgtgcaatctgacggggagcatttcggttttcttccgaccaaattctcagttctgcctggtgcagtagatttcttcagctagatcgctgtgctgtttcttcctgttggatgttgacagacagaagatgcatgatccttggccgacttgctctgttcacctagatcacgacgttcttcctcctgttacgctagcttaagatgacgcggcaatcaggttgctccactcactcatcttctggtctgatatggtagtacggacatgaaacaaattactgctgtgcagcggcacccaccatgtatttctatgcctgcatgcagcatacagtagccgagtcgtcgatgttcatagacaagccgtagagtcacagcacagcggccatgagtgtaaatttcacaattgtttcttcagtcttgtgagtaccgtgtgcaatgatacggctgcttgttgttcgaacagctgaagtgcctgcagatccagtgtgaagttgatgcatttcccaacctccaaggtaaatgctgtcgcgaaagctctgtaacttttactctgccccctggttgagtgtactccacaagtgtgagaaaataatctagtgcttcttttggagtagcaaaaaaaaaaaaaaaaaa

SEQ ID NO: 4106 - DNA, 1292 bp, Triticum aestivum
  Clone ID: TRIAE-23APR03-CLUSTER129_1
caaaaccaaggcggcggcagcggggcgggagagcggggagcaccgaccgacaccggccgacagggtgggctgcatgcggagctgaggcgaggcgaggcgaggcggggagagatccggcgcgggtgccaccgccggccggccgcgggagatctggttggtggcgccgcccggataagggagaggcggcgaggggagagcagccgggggagaccgaggcgagaggagatctctctcgtccctcttctcgctccatggagaccgggggtagcaagcgggaaggagactgccccgggcaggaaaggaagaagaaagtgcgcaggagaagcactggtcctgattcggttgctgaaaccatcaagaagtggaaggaggaaaaccagaagctccagcaagagaatggatcccggaaagcaccggccaagggttccaagaaagggtgcatggcagggaaaggaggtccagagaattcaaactgcgcttaccgcggtgtgaggcagaggacgtgggggaaatgggttgctgagatccgtgagcccaaccgtggcaatcggctgtggcttggttcattccctaccgcagtcgaagctgcacgtgcatatgatgatgcggcaagggcaatgtatggcgccaaagcacgtgtcaacttctcagagcagtccccggatgccaactctggttgcacgctggcacctccattgccgatgtctaatggggcaaccgctgcgtcacatccttctgatgggaaggatgaatcggagtctcctccttctcttatctcaaatgcgccgacagctgcgctgcatcggtctgatgctaaggatgagtctgagtctgcagggaccgtggcacgtaaggtgaaaaaagaagtgagcaatgatttgagaagtacccatgaggagcacaagaccctggaagtatcccaaccaaaagggaaggctttacataaagcagcgaacgtaagttatgattacttcaacgtcgaggaagttcttgacatgataattgtggaattgagtgctgatgtaaaaatggaagcacatgaagagtaccaagatggtgatgatgggtttagtcttttctcatattagggttttagctatgagggttgcagtcatgcggagcaatagggataactttcattctagctgctaggaaatacttcaaatctgcaacccgaagctttgtagtcacttatggttttcatcttactggagagaatagctttataccataagtcaacgggtacaagaagttgtcctgtgcgttgagttcatgtactatggtaaaagttg

SEQ ID NO: 4107 - DNA, 1258 bp, Triticum aestivum
  Clone ID: TRIAE-23APR03-CLUSTER13001_3
tttcgggggggggagtccagcgccgacgcccttccgggggcggcgaggccgggcggctgtaccgccgtccaaggctggagggttcttcttctattgctccggttaagggccccggtcaaagcgcaggcgccctggcgcctttgttatttcggcccgaggtcaccgtcgcgccggcggtgatggaggcccccccgcggagcggggtggacgaggtgcggaagcagggcgacggcttcgcggccttctgccggaggaggaagggccgtaagcgggtcgagatggaggaccgccacgtcgccgccgtcgcgctcggcggggaccgcgcgcaggccctcttcgccgtgttcgacggccacggagggaagagcgccgcggagttcgccgcggagaacatgccacggatcgtggcggaggagctggagaggtcggcgcgcggcggaggggcagggcgcgcggcggtggagggcgccgtgcggcgggcgtacctgcgcaccgacgaggagttctcctccacctcctccaagaaccgggagcaggcgggcgggggcgcctgctgcgtgacggcgctgctccgcgagggcgggcggcagctggtggtgtccggcgccggggactgccgcgcggtcctgagccgcggcggcagggcggaggcgctcaccgacgaccaccgcgcgtcgcggcaggacgagcgggaccggatcgaggcgctgaagggcgggctggtgctcaactgccgcggcgtatggcgggtgcagggctcgctggccgtgacccggggcatcggcgacgcgcacctcaagccgtgggtggtggcggagccggagacgaggacggtcgacgtgggcgccgactgcgagctgctcatcctcgcctccgacgggctgtgggacaaggtgggcagccaggaggccgtcgacgcggccgccgcctcctccggcgacctgcccgccgcgtgccgccggctcgtcgacatggccgtgtccaggggctcctccgacgacatcagcgtcctcgtcgtccagctccagcgccgtcctctccgataagactgcagtagtagtagtagtagtagtaagagtttaattaacacgcgagaagatatgcatcggcggcgccatggatgatcaccctacgtgtagatagagagctttttgacgtctctttctcgtccccggccgctcgatccggctgctggtgcttgtaacaagatcaagcactgttagtgctaataatcatcatccggttgagattgcaaaaa

SEQ ID NO: 4108 - DNA, 1990 bp, Triticum aestivum
  unsure (1)..(1990): unsure at all n locations
  Clone ID: TRIAE-23APR03-CLUSTER13013_1
aatccattccggccgtgcccacacagatacagcccgaaactgccgacgccaaccgtcctctcctcgggaaccgaaccatcccccaaaccccaccacctcacgatctcctccacccttccgcggtcccgcccatggccgccgccgccgccgcggtaactcctcacgtcgccgcggtcgggactggatcccaccatcaccaccagccgccgcatcgtccgcccgtgtccatctcggccagaccgagggcgcgcctcgtgcccgtcgccgcggcggccgctactccggccaccgacggcgtcgcgccggtgccaccccaccccaggcgctcggttgtaaagcgacacacgatatcagtttttgttggggatgagagtgggatgatcaatcggattgccggggtcttcgcgagaagagggtacaacattgagtcattggcagttgggctgaacaaggacaaggcgctgttcaccattgtagtgtcaggaacagagaaaatactcacacaggtcgtcgagcagctctacaaacttgttaatgtcatacaggttgatgatttgtcaaaggaaccacaagttgaaagagagctcatgcttataaaactaaacgtagagccagaacagcggctcgaggtgatgggtttggttgacattttcagagccaaagtggttgatctttcagaccatacactaactgttgaggtaactggcgatcctggaaaaattgctgctgtacagaggaacctgagcaaattcgggatcaaagaagttgccagaactggcaagatagctttgcggcgtgagaaaatgggacagacagctcccttttggagattctccgtagcttcctatcctgatcttgaagtaaaaatgccttcaaaatctacactaagcactgcaaagacaaccagtggggattctgaggaatcatcccagggcgatgtttatccagtggaatcttacgaaagcttctcgatgaatcaaattcttgatgctcattggggtgccatgactgacagtgatcctacagggttttgttcacatactttgtcaattcttgtgaatgattcccctggagttcttaatgttgtaacgggtgtctttgcccggaggggctataatattcagagtcttgctgttggcccagctgaaaaaacgggcacttctcgcatcaccactgtcgttcctggaaatgatgaatctatcgccaagctagtacaacaactttacaagctcatcgatgtttatgaggttcaagatcttacacatttaccatttgcggctagagagttaatgatcataaaggtcgctgggaacacctcagctcgcagggaaatcctggatattgctgaggatgttttcagggccaaaacggttgatgtatcaggccacacaataactcttcagcttactggagaccttgataaaatggttgcactacaaaggttgcttgagccctacggcatctgtgagattgcacgaactggcagggttgcgctgtgccgtgagtcaggagtcgattccaagtacctccgtggctattcccttcctggatagcgtgtcagttggtgagacatcacactcgatcagttcatgggttgccatgattctcctgatctcgggtctcctaaacaccctctgcgatggtgtttcattcctttcggagcatacagcaagaacgccagctgttatagtttacgttcactagatttacactttatcctcaggagtttttggcatatataccacagagaaatgagtttgggatgtttgaatcccatgtgagctcacggaggcagaagaaacccatccatagtttctgcgctgaggttttctggctttgaagttcgttggtcgatgaagactctttttttacgttctgaatacctaaattaagtatttatgcatttcttttacctctaaagtcatctagaattcaggcctgctactttgaagccttcaattagcaccaatcgnaatataattttnccctg

SEQ ID NO: 4109 - DNA, 737 bp, Triticum aestivum
  Clone ID: TRIAE-23APR03-CLUSTER13031_3
ggacagaggcaaagttctgttctcccattggcaaacacggatttcccaaaaacccaaagtacaatcactgaagcacacacatacgcacgtttacatgcacaggattacatgcaaattcttcctcttttattctgccaccctttattggaatccggtgcctacgaaaggctctatactactattacaagaacatgatccagggggccacgaagcactgtcatgttacacacccaatagcgacactccgcgttccccttccgctctcgcgcatctgggatcgagcaagacaataatcctctcgccgtcgtcgactcccaaattaccacctcgcccccaatcgtcttcggttcagatcggcgtcccagatcgtcggagcatcggattcgcggcgagccgacggcgaagaccatggagacgccgccgccgttccaggagtcggcccactgcgacgtctgccgctgcaccttctccactttccgccgccgccaccactgccgcagctgcgggaggacgctctgccacgagcactcttcgtaccacatggccctgccgcagtacgggatatacacggacgccagggtctgctacgagtgcttcaacaaatcatcatccagacgcgggggtgttgataacgtgagttctgccgggaggcgtttcgggtgctgcagactccttttcagggctgaatttggataaagatgatgattcgttacccacgaaaaagttcggcagttcag

SEQ ID NO: 4110 - DNA, 1853 bp, Triticum aestivum
  unsure (1)..(1853): unsure at all n locations
  Clone ID: TRIAE-23APR03-CLUSTER130638_1
tcggctcgtaccgcaccacacagtttgattacagtataagaaactaatggaggtcgccgtagcagcaaccacactcggagtcggaggtgacgtgtcttctccttcatcgctgagcctgctctgcggtctctctgcgctgctcgtcctcctgtgggcgctctcccgggccgccgagacatgctggctgaggccgcggcggctcagccgggcgctcagggcgcagggcctcggcggcacctcgcaccccggtgccctcgcggacaccggcggactaaaggaggaggctcggtccaagcccatgccgaggtgccacgacattgtgccccgtgtggcgccacacctcctcaacatcgtcaaggcacagcggcaacgtttgcatcacctggtttggaccagtcctaacgatggtcataggcagagccaaagctagtgagagagatcctatcagacaagtcgggccatttcgaaaaattcaccaacaaacgtctgggaaaactgatagcccttgggcttgcgagctacgacggtgagaaatgggcgacgcacagagggtgtgtgtgtgcgcgcgctaactgaagctgtttacagagcatgttgccggctttctccacatgctgcaccgagttgataagcagctgggaaagtaaactagccggttctgatggatcacatgaaatagacatatgggaggatttccagaacctcaccggagacgtgatctctcgcacgtcgttcggtagcagcttcatggaagggcgaaggatcttccagcttcaggcagagcaagcggagcgaattatcaaggccttccagtatatgtacatcccaggctacctcttttttccaaccgaaaacaacaagaggatgaagcagatcaaccgagagattgaagggctcctgagaggcatcatcgagaagcgggagcgcgcgatggagaacgatgggcttagtagcggcaacgacttgcttggcttgatgctgcagtcgaacaaggagagcggggcgtcgaggatgaggatgagcaccgaggatgtgatcgaggagtgcaagctcttctacttcgcggggatggagaccacgtccgtgctgctcacctggacgctggtcgtcctgggcatgcaccccgagtggcaggatcgggccagggaagaagtcctcagcgtcttcggcaaggacaagcccaacttcgacggcctcagccgactcaaaacggtgacgatgatactgtatgaagtgctcaggttgtacccaccggcggtcacgctgaaccggaagacatccagacagatgcagattggaggcatcacctaccctgccggcgtgctgctggagctgccgataatcatggttcaccacaacccggatgtatgggggaaagacgtgctggagttcaagccggagaggtttgcggaggggatctccaaggcaaccaaggaccagccggtcttcttcccattcggctggggcccgaggatttgcatcggccagaacttcgcgatgctggaagccaagatggcgctgagcatgatccttcagcgtttcgagttccagctctcaccttcctacacgcatgcgccgtacacggtcatcacactgcatcctcagcatggagcgcagattatactcaagagtctctgatcgtcatcttgtcttgcggctttgtcgacctgtcgtcgggtaacttggtaagtggaagaagtaaattgaatcaagtgaactagactctttcatttgatcctaaaactgggtatttgcaaaaaaaaaaaaaaaagttgttcacaccggcccaggggaacacaactgttgcacacagttggccccacccatgaaaaaaaaaaaaaaaaggnnttnaa

SEQ ID NO: 4111 - DNA, 1464 bp, Triticum aestivum
  Clone ID: TRIAE-23APR03-CLUSTER130730_1
acttccccgcctcgcaccactcggcgccagctgctctgacttctcccccaccccactgacactctctcacgtcggcgactcaccccccacccctcgagtcacgcggcacctactaatggccgcgggatctcgccgcccgcaccgccggagatgaagccccgccatctcccgccggtccttgtactcgccttgctttccctcctctcactttccctccgccgccaactcacccccctacagccgccgcttcgccccgcggccggggacccgctccttcgtcgcctcgccgcggtggaaggtgtgggatccgagcaagtccttgccgacgcggctgcactgctcgtgaatggctcgatatccacgttccccagccttggcaaccgccagcgcctcctctacctccgcctcccgttcgcccgcaccgcccgcggcccgcccaggccgaggaccgtgtcccgcctccgcatccccgccgaggcactcccctcggacgaatccctgctcgcgtccttccgcacgtccctccactccttcctcctcgcccaccaccgccgccgccggggcggaaccagtaatgtggccagcgtcatgagcgagctcgccggcgtcctcggacggcgcttcccgacctgcgcggtcgtcgggaatagcggcgcgctcctcggctccggccgcggaccgcagatcgacgcgcacgagctcgtcatccgcctcaacaacgcacgcgtggccggctttgtcgccgacgtcggcgccaaaacctcgctctctttcgtcaactccaacatcctccacctctgcgcgtcccgcagtgccgccaccgccgcaggctgcgggtgccacccgtatggccccaccgtgcccatggccatgtacatctgccagcccgcgcacctcctggacgccctcatctgcaacgcaaccgccacccacgcctccccattcccgctccttgtcaccgacgcgcgcctggacgcgctctcggcgcgcattgccaagtactactcgattcagcgattcgtgtcggacacgggtgctccggcgagcaactggacccggaagcacgacgagaggtacttccactattcctcaggtatgcaggcggtggtgatggcgcttggggtgtgcgaggaactgagcctattcgggttcggcaagccggcaggggccaagcaccattatcacaccaaccagaagaaggagctggacctgcacgactaccaggcggagtacgatttctacggcgacctccaggcgcgaccggagatggtgccgttccttgacgaggcccaaggcttcacggtgccgccggtcaggttgtactggtgaggtgccttaactgtgtgtattactgtgttgttgttgtaaaattgatactactacacttgattgacaaaatgtcaatttagccgacagagaattgtaaattagggcaatggactgaaatttgtaagcagaaatgta

SEQ ID NO: 4112 - DNA, 906 bp, Triticum aestivum
  Clone ID: TRIAE-23APR03-CLUSTER130789_1
aacgaatatatcctagctactcgatcttgtcccagccaataggtagctgcttctgtctgcctagtgaacttttctcgctagctaccagggaaaagaccacctcaccggtcaccaccatggctgggctagtgctagccaagtgccttcttctgttctccctctccgccgcgctcctctctctgctcggcaccggcgcctccgccattggcctgccccagcctcatgcgccagtgaacttcaccatcggcgtgcagggcatggtctggtgcaagacctgcaggtacatcggctacaatgccaacatggacgcctccccactcaaaggcgtggaggtgtacctgcagtgccggcacggcccggggcggctgaagaaggtgcaaggggcatcggggcagggcggctactttgtcatccagtcggcgcagatggcgtccttcaccaacgacgagtgcaaggtgtacgcggagagctcgtcgtcgaccgcgtgcagcctcgtcgacgaacccgctgccggcgaggggctgccgctcaagttcgactccttcgtcaagcacggcgatggcctgcaggcgctctactccgtcggcaacttcttcttccgccccagcaaccccaacaagtgctactgacgcatccatccgtcatgtacatacttgtgggacttgaataaatgggtcaggaactcaggatgaattagttgttggagtagctggggatatgcatccggtgctgtaatgttgatttaagtttcttctattgttgcagtagttttgtaagcttcttttaattagcaaccgcatgatcgaaataactcgaatatgattagggcagtgtatgtcctgtcatgtgatgactaaccgatgtgctacaaggctctatgtataactaacaaaaaaaaaaaaaaaa

SEQ ID NO: 4113 - DNA, 861 bp, Triticum aestivum
  unsure (1)..(861): unsure at all n locations
  Clone ID: TRIAE-23APR03-CLUSTER13088_1
gcaaagacttcgcaaacccccttttcacctcaaaggaaaacaaaggcacaacaggcctccgcatcccggacggtcgcggccgccgccgggatggaccgcgaaccaatttccctatccatcgaagagcaaaaggcctccgccataccctcaacctcaccggcggcggcggcggcagagatggaccccgactcagtggcgaaggcgttcgtcgagcactactaccgcacgttcgacaccaaccgggcggcgctggtggggctgtaccaggagggctccatgctctccttcgagggcgagaagttccagggagccgccgccatcgccaccaagctcacctccctccccttcaccaagtgcgtccacaccgtcgtcactgtcgactgccagcccgccggccccacgggcggtatgctcgtcttcgtctccggatccctccaagtcgacggcgagcaccacatcaagttctcccagatgttccacttgatgccactcggaccagggaacttctatgtgcacaacgacatgttccgcctgaactatggctaagaatcttaccagaggtcgtgcttccccatggaagacagaatgttctgcaaaacaaacaattcggttgtggtttttgtgtttgatggtgaaaaactttgtggtgctttcatgccaacagcttatgagatccaccggggatgaaacataacaaaacgccccgtattatgggtctgggtctgaaattgtatcgtggttattctcgtgtcaatgttgtgtggggaggtcatggaaaaaacttagcagttcagtccaaaaaaaaaaaaaaaaaattccatcgtgaccattttttaagggaaaagggtaatagtnaaaata

SEQ ID NO: 4114 - DNA, 1097 bp, Triticum aestivum
  Clone ID: TRIAE-23APR03-CLUSTER131310_1
tttttttttttttttttttttttaggtgcataatgcacaggaggatgaatttgtatgctcacaccttgttaccatcttacaccagcatgtggaaaatgaaaaggagacaaaaaagaagttagaaactacagatagccaattacatatctgtgggctgtggctgtggtggctggggagaccaccaagaagaggccggcggggatcattggacggggaatggggggcggcggctagaaggagcggagccagtccgagtccggcaggttgagcggcggcagggagtggcggccgcgcgtggagctgccgctgcgcacgtcctgcatggccaggagcgccgacacggtgttgcggaagatcctctgctccgcggcgaccagggcctcgcggtcccgccgcgccgccgcctgcccctcgccgggcgccgtggggaacaccgcctccatcatggcctcgcactccctcaccatcagggacaccgcctccgccgtgaagaagggctgcactagcacggtctcgatcacggcgagccggatcccggcgcccgtgcgcttgtcatacttcttgagaatcttggccaggccgatgtagttgacgctgctgtagttgagcagcagcaccatctcgccgtggaagttgacgatctccctccggatcgccgcgatctccgcctcgtgcgccgccgccggcaccgccggcttcctctccagcgcgctcctgatcgccccctgcagctccctgtgcgtgatgatgaagaactcctcctgctcgatgaagaaggcgttgatcttctcgatctgaacgtcgaggcgggcgacgaagtcggccggcgagacggcgccgatgacgggcttgagctcgttgtagctcaggaactcgtccttccacgccgggaggctctgctcgatctgcctcttgagccactttccaaatttcatggcgtccaaatcaatcaagagatcaccgactgccttcggcccaattaatccgcaaccgatcggcagctggtaatcaactaatgacctcgtctcctcgagagcaatgcaacaacaatctacgatatgaaggggagcaagcggtggtgttgatggattaatgag

SEQ ID NO: 4115 - DNA, 1836 bp, Triticum aestivum
  Clone ID: TRIAE-23APR03-CLUSTER13133_1
accaccgatcattttggcgggagagcagcagttcgccgcctccacggtcccccgccgagcaaacccgcaatcgaccgcggcgcccccttccagcccgtcgcggccgccgcccccatgcagctggaggagtacctcaacgcggaggccgccgtgcaggtgcaggaggacctcatcttgtaccaccccgcgcagttgccctaggtccccgtccggtcactcccgcgcgggtagccagcagtcgccgcccctccactccccctcttcgcccgcgccgactgcaatctcgcaccggaccgccgctggcggctcctcctcgtccggcccctagcgccgggccgccgccatgcagatggaggagtagctcacccggaagaagcaccgcgcctgtcctctgcgacctcgtcatgtcccacccgctcgagtggccctcgctcgccgtccagtggctcccctcggggtcgccggcctccgcccgctcccaccgcctcgtcctcggcacccacgcctccgacgactccgccaaccacctcatgctcgtcgacgccgtgctcccgctcccgccgcgcctggccgccgcggccgccgccgaggaccgcgccgtcccggccccgtccgtgtccatcggccgctcggcgccgcatcagggcgaggtcaaccgcgcccggtgcatgccgcagcggccgtacaccgtggccaccaagacctgcgtcgatgaggtgcacgtgtaccacctcggggaggacggtgagaagggcggcgcggatgtcgtgctcaggggccatggcgcggaggggtatgggctggcgtggagcgccacgaaggaggggttcctgctgagcggctcgtatgataagaagatttgcctgtgggatctcaaggccgggaatggagccccggttctggacgcgcagcaggtgtttgaggctcatgaggatgttgttgaagatgttgcttggcaccttaaggatgaaaacctatttggatctgttggcgatgactgcaagttcatgatgtgggacctgcgtacgaacaaaccagaacaatctatagttgcgcaccaaaaggaagttaactctctgtccttcaatccatttaatgaatggatcttggctacagcatctggtgatggaactattaagctgtttgaccagcgaaaactatctagaagcttgcatgctttcgacaaccatgagggcgaggttttccaggttgagtggaatccaaacatggagactgtattagcatcccatgctgcagacaaaagggtgatgatatgggacgttaacaggatcggcgaggagcaggcggacgaggacgcgggcgacgggccaccggagctgcttttcgtccacggcgggcacacggccaagatctcggagctgtcgtggaaccccagcgagaagtgggtggtggccagcgtggcggaggacaacgtgctgcagatctgggagatggccgagagcatatacagcgacgacaacagcaacaacgccaacagcgcctcgtgcctgtccacataagaagacgccgccaaccaacttcttccctgatgtgtggacgatggccgatggggacatggctcgttcgtagtctttgggtggacgcgtcgcgtgcggtttacttgtagtgcctcgtgcggtttcgtcgcttaattagcagctgctgctatcgtttggcgcctagatcctgtagacatggatggatggagaagtgactctggaatatttgtgcgtccaaaaaaaaaaaaaaaaaagcttagcgaatccaaaaaccggcccaaacccccaaggggggggggccccggcaaccccaatttcctcccccctaaaaggggag

SEQ ID NO: 4116 - DNA, 1282 bp, Triticum aestivum
  Clone ID: TRIAE-23APR03-CLUSTER13150_1
caacccatcagacattcaagtggaagctccccgatctccatcactacaaccagccacttgagctctgaatctttgaagctcagccagctcgccgcgaccgtcgagcctcaagtttcgccatgtcgagcggcggccggaagcagcagcagcaggcggagaagccggcggcggcggaggacatggagatcaagaaggtcttctcccgcttcgacacggacggcgacggccggatccccccgacagacaaggcggcgaagccccgggccctccagccgcccaccaccccacttgagctctgactcgatgaggcgcagacggtgggcgcgcgacccaccgagagcgctcgctgtgtcgcctctggcgagggccggcccctaaccagcaggaggccgcagggggcgagagaaggcggcggcggcgggaggacgtcggagatcaagaaggtcttctcccgcttcgacccggtacggcgagcggcccggatctcgccgtccgagctggcggccgtgttcgcgcgccatcgcgccgccggccaccgagtccgcgcagggccgcgaggtggcgtccatgatggacgagctcgacaccgaccgcgacggctacgtggacctcggcgagttcgccgccttccacggccgcggccgcgaggagcgcgagctcgacgccgagctgcgcgacgccttcgacgtctacgacatcaacggcgacggccgcatctccgtcgccgagctcagcaaggtcctgagccgcatcggcgagggatgcagcaccgaggagtgcgagaagatgatcgcctccgtcgacgtcgacggcgacggctgcgtcggattcgaggagttcaagaagatgatgaccgccggtgacgccggcgcaccacctcaacccgaagcgatcgccgtgcctgacagcaacaaacccaagaaggagtgatacatgtgcttttgcttgtaaaaaaattgtaatccgagggagcgaattagttgtcagtccctgttggccatagtcttctggtctgaaaaaaaatgggaataaggatcaatgtgcaattgccattgtcgtgctgtacctctacgataacggttgtgtgtgcacggtagcagtactagtactagatattttctccgagtatggtcatcttgctacttcattttcacatgaaaatgaagtgccatgttgatgttgaagggtgataagcatccattatcaatgttacttgtaatcgcattcggcaataaatgtattgtcatcttatgatgtttgctattcaaaaaaaaaaaaaaaa

SEQ ID NO: 4117 - DNA, 1391 bp, Triticum aestivum
  Clone ID: TRIAE-23APR03-CLUSTER13177_1
cttttttcctttccagttcctcttctcttctcttaccgccgccgccgccgggggagtgagcagcagcgtgagcgcgttgccgacggtcgtgcgaggaggggccgatggggttcgagtcgtcggcggggaccgtgcggttcctgtgcgagcggccgccggacccgacggagccccgcgcggagcgcttcttcgcgctcttctccctccgcgacctccgccgcggcggccccctcctcgaggccgcccaggctgcaacggatccctttaacttgcttgcccctgtggctgcatttccgcttgaagacacgcaggatgtccaagctatagctgcattagagggagttctctagcttcttccactggatccaattgtccgtgacgaagctcctgaagctctgggagttattggcttggaggaagtgctcaacgatctttcactacatgctattgtcctgcacgtgcctgctaagtgccagggagctattggcttggaaaagagcatttccctgttgaaagagagtttagcagctgatcctgccgtggaggtgcaagaaacatgcgagttggctcttagacggatagaagggcagaagaatgccagtggtgctgaaagcacaacaatttcgccttatctatcagttgatccagcactgcctgccaagcagggactttcggtagagcaactaagggagcttctcctcaacgagcaagaaaagatgtatgaacgttatgcagctctttttgcgcttaggaatgacggtggagactatgctgtttctgctgttattgaggctcttggtgtgaaaagtgctcttctgcgccacgaggtcgcttatgtattaggtcagctgcaaaataaggctgcttcagatgcactttctggtgtgctgaagaacgtcaatgagcacccgatggtcagacatgaagctgctgaggcccttggttcaattgcagatcaagaaagcattgcgcttctggaggaattttccaaggaccccgagcccatcgtctcccaaagctgtgaagtagccctcagcatgctcgagtacgagagatcagggaagtcgttcgagtttctgttcctccagactcctcatgtgcagcaggagtcctgagcccagctttggatacatactttgatggacctgtcagagtcgacggttcggtgtggtagtggacatgatgtctgaatgaagtgtcgtcgcccttttcccgttcttttttgggtgttcttgcttgacaccgggatagcaaaaacggcgaaagataccactgtgaattgctctctgatgagaatatcatgtacgcgtgccccgtgaaaacagaaactgatactttgacgaatttgtttgcctgtggattgtgcctatcttctgtggtggtgtaaacac

SEQ ID NO: 4118 - DNA, 2069 bp, Triticum aestivum
  unsure (1)..(2069): unsure at all n locations
  Clone ID: TRIAE-23APR03-CLUSTER13179_1
agcaacgtactccctttctcttcttgccttcctctctttttgtgaccttccctggtagagagggggcggcggcggcggcgggcggaaggacgggagcaaagagccgcggcgacggggctggggcccgctcttgaaccggcagcgcaacacgcaggccttggcccgccaaggcgaggggcccgccgctccgtgatcgcccgccccgcgcagcaggcgctgccgctcgagtccgtcatcgaggtccgccacatcgacggccgccgaggaggggctccccagcggcagcgccgcgacggccgccgcccggacagccgccgccgccgccgaccgcctcgccccgctcgggccgcagggatctggggaggagggggggcacctacggggggaggaggaggctgcgcgaggcgccggcggccctgcgcgccgccggcctccgggggccccgccgggacaagcggacagctcagctccacaccgaggagctccgaccccaactagaaggggggtttcccgaggttgcaagggaatgaagaacagatccttacgccatgtgagaagagtcttgatatctggagacaactgtggagtggacttgaacgcagcgatgtgctcgtgatggtcgtcgcttcgagtaaccccttgttttaccgttgccctggacttcacttgtatgcaaaggaaattgagatgctcaagacaacagtacaggaaattgactagaccaagccaatactgctccttgtaatgtaagctggtctttggcggtccagtttaaggcccatgatgttagctgtctattctgatctacgaaatctgcttcttttgtattagatgcaagcggatagggcagccttaccatggaaaaaatggattccgctatcgattcaaggatgctagaccggtcataacacctagtgaggtggcagggaagagctcctggtgaggtggcacggcgaggaggagtagctgttgagccgaaacctgacactagctgttggagaggaacctgaatctagttctgagtctgccttggtgctacccaagcgtgtggttgttggatttgttggttatccaaatgttgggtaagagttcaaccatcaatgctctggtcggtgagaagaagactggtgtaacatctacccctggcaagaccaagcatttccagacactgataatctcagaagagctcatgctgtgtgattgtcctggtctggtcttcccttctttttcaagctcgaggcatgagatggtggcatgtggtgtcttgccaattgataggatgacaaagcacaggggagcaattcaagtggtggcaaatcgtgtgccgagaaacatcctggaacaggtttacaaaatcaccctgccaaagcccaaggcatatgaggaagcatctcgaccaccaaccgctgctgagttgttgatggcgtactgcacatctcgggggcatgtcagccatgctgggctgcctgatgagaccagggctgctcggcagatactgaaggattacattgatggaaagattccacactttgagcttcctcctggtgagatagatgatgaaactgatggagaggacaacagtgacctagaaggctcaagcactgcagcaggntgatcaatcagacgatggtgcttctgatgaagatgatgaggaaatcaatcgagctgaacctaacatcagtcatgccctaaacgaccttgcatcttttgacatgaatggccaaatgaccaagggttccccaaagaagaagaagaaagaagcatcccacaagcaccaccggaaaccccagaggaagaaggatcgatcatggagggttggaaacgatggtgctgatgggtcgggggttatacgggtggtccagaaacccgccgttaatcttgctgccagtacactagcgtcgtaggttaatgcttgagttttttgatggcttgtgtgccgcgcccgaacccctttctgtaaccctccctcacattacaagtatccatgatgttcggatggaaaatgttgccgaaactaaacctatcattccaaaaatatttctctactttgtttaaaaaaaaaaaaaaaa

SEQ ID NO: 4119 - DNA, 2422 bp, Triticum aestivum
  Clone ID: TRIAE-23APR03-CLUSTER1318_1
ccaggaccccttccattcctcacctgttcgctccaaatctgatccccccccaccattcccacgaaccaactccccgttcccctcgtcttggcacgaggcgcgtcggccccatcgccccggatcggaggagaggcggctccggtgctgcctggcgccgacccccccgctcagattcggattagggtttttggacgtggtcgtcgtcttgggtttgcgccgctggtttgaaaatgtcggcggccgtgtcttgcgcagagagggcgacgaccgagatgctgagcggccccgcctgggccgtcaacaccgagctctgcgacatctccaacgttgctcccggacaagcaaaggacccactcaagctcctaaagcagcgactttggaaaaagagttctatagtcaaaattctggccctttacgacttagagactctaagcaaaaattgcggggatattgtttaccaacagatcattgaagcgtgatatactaagatgatatggttaagatagtaaagaaaaagacagacataaaagttccggagataatattgcggctgattgacacgtggctgatggcttctgggagggccttccgggagatatcctcagtaccacactgcgtaccaagaactcagggcaagctggtgtcgattttccgcctcgcggaggcagcttacaattccactgtttacaccccctctgcccctcctcttgaacgaagccagatctatctacacctggataaacctgtgcaaagatgtagctatacaagcttctctccaatctagtacccctgctgcacctcccctgagtctaagcgagatccagagtgctcgaggaattggggatgttctggatgagatgttaaatgcacttgaccacagacacccagagggtgttaaggaggaggtcattgttgagtttgttgggcagtgtccttcctaaactgctcgtgtgatggatcttgttagcgatactggtgatgagagccttttgtttcaggctctagaactaaatgatgagttgcagcgtgttcttcagcgttatgatgacatagcaaaaggagtccctccaaatataccagtgcctgttgctggtaacataaaccaagggacagcccctcctcggcctgctggggcttcatttgccccccttcttaatgtacaccatgaggacgatgaaccagaagatgagttctccgtgctttcccgcaggtctgcaagggatggcgcagcagcacagggcaacatgtcttctgttccaagaaatgaaaggccatacccaagcccacttcttcctccaccaccatcgacaaaaaggcctgtttacacagaggcaagcagtgtcgactatctaagtggggactcctataagtctgaaaaagtaccagatgattttgtcaacccaacggccccagccaatatgtctgcaccatctcattcaaaaacagaaacagatcaagtgccaaattatgatagcaggtcagaaaatgtgcctgatgacttcataaacccaactgcagcacccagtttttccatgccttctcgtcctacgagtgagccatctgtgaataagcttgagagccttcctgacgatgactttataaaccccactgcacttcctggtttttcttcgtcttcaactagtgaagatcttccaaaagctccatgggaagcgcaggctccagtttccctaccgcctcctcctgcaaggtatggccaaagacagcagttctttgagcaacagcatggctttcctggtgagaacaatgaaggtggctacgatgagatgctgacgcggacaggaagcctttctcttaatcaaaggaacactgagaatgggaagagcgcatcagtgtcgaccgcatcccgccagcccaaacctgaggatgcccttttcaaggatcttgttgattttgccaagaagaatccatcttctccatctaaaccagccaacagccgcaggactcgctgagtgatgagtgtttcagtcatgtaacacacataattgagttgccaggctgctggttttgctacaggtcggcgaattagatataccatcaaataagagggttcggtcggtctgttctttattgcctcagggaattatttggtttgcgcattggacaattagagtcacaggtgtcagatacgtagtcatgatactgggtgtggtgtgtagcgagttgcatttctcacctttttcttgtgtggtattggttatcgattctggctttattttacttagctgtatatatttctccatttgacagcagtattctactttcatagttgagtttgcaatttgatcttgtaagacttgctccctctgtaccaatatctaagacggtttttgcagttcactttgaactgcgaagcgttttaaattttggacgtagtatttcataggtccttttcaacgtggag

SEQ ID NO: 4120 - DNA, 3386 bp, Triticum aestivum
  Clone ID: TRIAE-23APR03-CLUSTER131_1
gccgtttgcccgacgaatggcaccgtgccacgcccacggccctcctccgcctccgcccccgcctcgcccgcgcgcggagcacgagacacgccacgcgctggcccccggccaccgccaccgccaccagtccaccaccaccagtccaccaccaccactcttcagccccactccactccccgccgctttccggcccgccgcccgcttcaagctcccctcgccccaccagtcgccctgcctctccctattccccatggcgtgctccgcggcggcgggcgtcgaggcgaccgccctcctgtccccgcgctgccccgccccttccccgcccgacggccgctcccgccgccgcctcgccctcgcttcccgcacgcgccaccgcagcctcagggcggccgcgcagcgccctcacaagagcgcaaccggcgccgaccccctttataacaacagggccaatgtgcggagcgacgaggcgtcggtttccgctgaaaaagaacggcaaaggaaatacaacgatggagatggcatatcaaaccttaagctggaagatttggtaggaatgatacagaacaccgagaagaatatacttcttttgaatcaagcccgtcttcaggcaatggaacacgctgataaagttcttaaagaaaaggaagccttgcagagaaagataaacattttagagacgaggttgtcagaaacagatgaacaacataagctttcaagtgaagggaatttcagtgactctccactagcattggagcttggtattctaaaggaagagaacattctactgaaggaggacatagaatttttcaaaacaaagcttatagaggttgccgagatagaggagggtatattcaaattggagaaggagcatgctcttttagatgcttcccttagggagctggagtctaggtttatagccgcccaagcagatacgatgaaacttggtcctagggatgcctggtgggagaaagtagaaaaattggaagacttgcttgagaccacagcaaaccaagtagagcatgctgctgtgatattggaccacaatcatgatctgcaggataggcttgacaatttagaggcatcactgcaagcagcaaatatttcaaagttctcttgttctcttgttgatcttttgcagcaaaaggtcaaattggtagaagaccgcttccaagcatgtaacagcgaaatgcattctcagattgaactgtacgagcattcaatagtggaatttcatgatactcttagcaaactaatagaggaaagtgagaaaagatcactggagaattttacaggaaacatgccttcggaactatggagcaaaatttcccttttaattgatggatggttactggagaagaaaatatcttacaatgacgcaagtatgttgcgagaaatggttcagaaaagggacagtcgtcttcgggaagcatacttgtcatacagaggtaccgaaaacagggaagttatggacaacttacttaagatggcattaccaggaaccagttctggtttgcacatcgctcacatagcagcagagatggctcctgtcgcgaaggttggtggcctggcagatgtgatatctggtcttgggaaggcacttcagaaaaaaggccatctagtagagatcattcttcccaaatacgactgcatgcaggttgaccaagttagcaatctaaaggttttagatgttcttgtgcagtcctactttgaaggaaatatgttcaacaacaaaatttggaccgggactgttgaaggcctacccgtgtactttattgagccacagcatccagcgatgttcttttcgagggctcagtactatggagagcatgatgacttcaaacgtttttcatacttcagccgtgcggcactagaattactttatcaatctgggaagaaagttgatataatccactgccatgactggcaaactgcatttgttgcacctctttattgggatgtatatgcaaatctaggcttcaactcagctagaatttgcttcacctgtcataattttgaataccaaggaactgctccagctcgtgatttagcatggtgtggtcttgatgttgagcacctagacagaccagacaggatgcgggacaattcgcatggcagaataaatgctgttaagggagcagttgtgtattcaaacatcgtgacaactgtctcgccaacatatgcactagaggttcgctcagagggtgggcgtggactccaagatacacttaaagtacattccaggaaatttcttgggatacttaatggaatcgacacagatacatggaacccttgcacagataggtatctcaaggtccagtataatgctaaggatctccagggaaaggcagccaacaaagcagccctcagagagcaactaaacctggcttctgcatatccttcacaaccactggttggttgcattaccaggctggttgctcagaagggtgtacatcttatcaggcatgcaatatacaaaacagctgaattaggaggacagtttgtccttctgggttcaagtccagtaccagaaattcagagggagtttgaaggtattgcagaccattttcagaacaacaacaatatccggctgattttgaagtatgatgatgcgctgtctcattgcatatatgctgcgtctgacatgttcattgttccctctatatttgagccatgtggcctcactcagatgatagccatgagatatggttctgtgccaatcgttcggaaaactggtgggctgaatgacagtgtctttgacttcgatgacgaaacaatacccatggaggtgcggaacggctttacatttgtcaaggccgacgagcagggcctaagcagcgcgatggagagggcgttcaactgctacacgaggaagcccgaggtgtggaaacagcttgtgcagaaagacatgacgatcgatttcagctgggacacctcggcttcgcagtacgaggacatctaccagaaggcggtggctcgagcgagggcagtggcgtgagcacacacacacacggtagttggttccctgatgcctctctcccctgccctgccctcatgatacaaacggcactggacgaaatcgagggatcatggaaacagaatcatatagcaagctccatgctctcggcgcgcatttccggtaagggtgtgacggtgtatcgctggttatatgcgctgtttattgaaggcagaacgcgagctaaaaatggagtagctaccgtgaaccctcaagatcgtagtatgcgcgctgttgttggcataatattggtgtaaattgtagtaggctgtatattttcttgaggggttgcaacggagctgtatgcgtgcagtgcaggctgcagagtcgcacgtatgtactgtattatgcagaaaaaaaaaaaaaaaaaaaa

SEQ ID NO: 4121 - DNA, 1408 bp, Triticum aestivum
  Clone ID: TRIAE-23APR03-CLUSTER13269_1
ctgctgtcctctgacctctcctctcctcctcctctccggacacggcaaagcttccttcccaaaatcccccaaatcgaagcgaagccgaggaaactctctcacgcacgacccaacagcccccgtcccccccgagcccccccgcccgccccacccgccccgccgcccgaccggccgcccggcttcggttcccccgctcggcgaggcatcggggcggattggagcggcggtgtactggagcgcggtgacggcggaggacctggtggccgcagctgcgggggggtgcgactggtccacgccgcccgcgccccgccccggagttcttctccgcgcttcaccgtccctcgcccctccctccaacgtggaccagccggacctcaagctgcaaccgctaactcaatacagaacaaactaaactactctagatcatgtttattcttggtcttgttttttcttttgggaaggccagttgtctattcttgcgctcttatattggcctggattaagccttgcttttacttaatgactagtttaatctgtcacttttaatgagaaagtcacaagaactgtcaggcagttctcaccacatttagctgcaaagatgagaccaccgataacccctgttattcgtggtcgaccaagctcaaagagatcaattcatatttgtgggcggcctcgctggttgtttgtccttttattttcggcagttagctgcatgctctggttgacctcatgcagcctcctcacagttctatgggctcttctcattgctctgcttacaacggtacttcatgccagcttcagaacacctaatttgaaagcacgtctgaatacgttcagagaggaattccgagcagtttggcgaaattatagtgagctctagagctccctcggtttcaaggtgataagatgtgcttagtgctgaagcttccctgctgtctgtgcattgtgtctgtgggagatgaacaaaggtgatatgcagttgtgattactggctcatttggaggtggacctagactgactctctgggtgatgctacgcctcggtccgcggtcctcctaatcacagtagttttttcctttggacttctccctataaccaacgctttggaggaagaacagcatgtaaaggatgtaaacaaagtattcagatctagacaaaaagcatatgttgtttgttgatacgcctgcttcatgctctgtctatacttcaaaaaaccgttgtggatatattttccgctaagctccaaaaacacaaaaaaaaaaaaaagccaatgggccccctcttcctggccccctgctcgcacgttacccccaacccatattgaaatgacctgtcaaaggccccccgggaccacaccatcaactaccaaatccccaaagggttctgtccccttggggccggctctcat

SEQ ID NO: 4122 - DNA, 1120 bp, Triticum aestivum
  unsure (1)..(1120): unsure at all n locations
  Clone ID: TRIAE-23APR03-CLUSTER1327_4
aacccaatatacacggagaagagatcgtcatcatccgccaaaccagatcggctcggctgcttcctcttcttcaacttcgcagaatcgctggtcttctcgtcctctagttaagtccctcgacagcaatgggaggaggcaacgacggtcatgggtacccacccggtggccaggggggataccctccgctttgttacccgccgcagcagggaggttaccctccacagcaaggatacccgcctgcacctggagcttacccacctgcacctggggcataccctcctgcacctggggcataccctcctgcgcccggagcgggtggcagtgacggggagaaggggctcctctccaacatcatgcacggtgttgccggtgctcatggtggtggccatggctacccatctggtggccacgggtaccccccgcagcagcatggataccctcagcaaggctaccctcctcagcatggctacccaccgcaacagcatggctaccctccacagcagcatggctatccccctgctggctaccctggctcatctgggcacagtggtagccatggnaggagaggcatgggcatgggcggcatgctagctggaggcgcagcagctgctgccgccgcttacgagcacacaagattctcacgcgggcaacgggggagtggaacatgatgggcagcatgatgggcggccatggaggtatgggggcgggaacgccaccaacgggcaagtcaaggacgggagcacggccacggcagttcagcacggaagatgggaagggaagcacggccacggcaagttcaagcacggcaagcatgggaagcacggctagatcgcgagcggcggccagttcaagaagtggaagtaatgctgctagctggtagcttcaccatggctgatgaatcaaaaaaaaaaaaaaccctaaactcttcgtgtaggcttccggaacttggtttggtcagggaaagcctttgagatgtatctaagcagggtgtggtgtggttgctgctcgatctcgtggagcttccttactttgctctatatgatttggcactctagtttgcgtctgtgacaagatatgacttgctctaataagtacctgaattctgtctggtgctatgctt

SEQ ID NO: 4123 - DNA, 1116 bp, Triticum aestivum
  unsure (1)..(1116): unsure at all n locations
  Clone ID: TRIAE-23APR03-CLUSTER1327_5
aacccaatatacacggagaagagatcgtcatcatccgccaaaccagatcggctcggctgcttcctcttcttcaacttcgcagaatcgctggtcttctcgtcctctagttaagtccctcgacagcaatgggaggaggcaacgacggtcatgggtacccacccggtggccaggggggataccctccgcaagggtacccgccgcagcagggaggttaccctccacagcaaggatacccgcctgcacctggagcttacccacctgcacctggggcataccctcctgcacctggggcataccctcctgcgcccggagcgggtggcagtgacnggggagaaggggctcctctccacatcatgcacggtgttgccggggcttcatggtggtggccatggctacccatctggtggncacgggtaccccccgcagcagcatggataccctcagcaaggctaccctcctcagcatggctacccaccgcaacagcatggctaccctccacagcagcatggctatccccctgctggctaccctggctcatcctggcacagtggtancccatgggaggaggaggcattgggcatgggcggcatgtctagctggaggggcatcagctgctggcggcgcttacgaagcacacagattctccgtgcttacggagcacacaagctttctcacggcggccccggtggaggtggacacatgatgggaggcatgatgggcggccacggaggctacggcggcgggtacggccaccccggcggtaagttcaagcacgggaagcacggccccggcaagttcaagcacggcaagcatgggaagcccggcatgttcggcggcggcggcaagttcaaaaagtggaagtaatgctgctagctggtagcttccccatggctgatgaatcaaaaaaaaaaaaaaaaccctaaactcttcgtgtaggcttccggaacttggtttggtcagggaaagcctttgagatgtatctaagcagggtgtggtgtggttgctgctcgatctcgtggagcttccttactttgctctatatgatttggcactttagtttgcgtctgtgacaagatatgacttgctctaataagtacctgaattctgtctggtgct

SEQ ID NO: 4124 - DNA, 1211 bp, Triticum aestivum
  unsure (1)..(1211): unsure at all n locations
  Clone ID: TRIAE-23APR03-CLUSTER1327_7
aacccaatatacacggagaagagatcgtcatcatccgccaaaccagatcggctcggctgcttcctcttcttcaacttcgcagaatcgctggtcttctcgtcctctagttaagtccctcgacagcaatgggaggagtgttacgacggtcatgggtacccacccggtggccaggggggatactctccgcaagggtacccgccgcagcagggaggttaccctccacagcaaggatacccgcctgcacctggagcttacccacctgcacctggggcataccctcctgcacctggggcataccctcctgcgcccggagcgggtggcagtgacggggagaaggggctcctctccaacatcatgcacggtgttgccggtgctcatggtgggggccatggctacccatctgggggccacgggtaccccccgcagcagcatggataccctcagcaaggctaccctcctcagcatggctacccaccgcaacaggatggctaccctccacagcagcatggctatccccctgctggctaccctggctcatctggtcacagtgggagccatggaggagaggcatgggcatgggcgggatgttagctgaagggcagcagctgctggcgccgcttacggagcaacaaaattctcccgggggacacgcgggaggtggacaactctggcaggcatgaggtcggcccagagggttgggcgcgcgcaccgcccctcgggggaatcaaaaaatacctaaactcttcgtgtaggcttccagaacttggtttggtcagggaaagcctttgagatgtatctaagcagggtgtggtgtggttgctgcccggatctcgtggagcttccatcctttcctctatatgatttggcactctagtctgcgtctgtgacaagatatgacttgctaataagtacctgaattctgtctggtgctatgctttaaaaaaaaaaaaaaaaaaaaaaaaaaaaaaaaaaaaaaaaaaaaaaaaaaaaaaaaaaaaaaaaaaaaaaaaaaaaaaaaaaaaaaaaaaaaaaaaaaaaaaaaaaaaaaaaaaaaaaaaaaaaaaaaaaaaaaaaaaaanagggggggccctttttaaaaaaaaaaaattttactccccgggttttgcaaaattaaaattttttttatggggccccaaaaataaaattattgggccggtttttaaaaacgggggaaatggaaaaaacctggg

SEQ ID NO: 4125 - DNA, 822 bp, Triticum aestivum
  unsure (1)..(822): unsure at all n locations
  Clone ID: TRIAE-23APR03-CLUSTER13294_1
cggggggggaggggggggggccaccagggttgggggggggggcggggggagggagtttttgagaggcttctggaaatccgtggtgtagtaagcggctaggcggtagccaccgatgcctgcgacgccggcggccagccccgggtgcgctgggctgccggcgcaacctccgacgagctcactccccggatttgaaggcccccctagccggctgggcgttcggaggccggcatgggtcgtccgcaccgagtctaatgttaggagagaaagaccaaaacgacctgatcctccatgcaccatctgcaaaggcactgggacaataaattgccgcaactgtttcggtagaggaagaataaatcatgtcgatctcgccgtgctccccaagggagaatggccgcaatggtgccaaatatgcgggggtagcggcctagattactgccaccggtgccatggaacaggtgaatatcgagaacccatgggctttcacttcacagtcaataggaaatgagtgtcgcacaggcagtgttggaaggccggccaagtcaaatggtcaggaaaaaaaaatgtcccattgaggccataggattaacatttgaatgagctgtgtgaagttactgtgaaaactttgatcttatgctaatgctgcagaattttcttgccagcaaagaaacattagatgtagattatgatcagaggctaagggtcttcagttttatcaaccggctaaatttgtgtacgaatgacagtgtgcatctgaatgctttgttcgaaagaagatgccgatttaccgcaaaaggccggggagnggggangggggnaggaaga

SEQ ID NO: 4126 - DNA, 1758 bp, Triticum aestivum
  Clone ID: TRIAE-23APR03-CLUSTER13309_1
agtgaaacaaagacaaagagaaggagaaagcgagaggagaggcggacgcgagaccgccactccattccacttccctccctcgcttgccttccttccttccttcctagcgtagcattccctatagaaaccctcgattctgatcgccgggatgaggttctgacccccgattcggtccgtcgattgtgatttcccctcgatttcgtgcgggattagtggccggaattaatcgccatgacggcgtcgtcgccgatggtgctgtccctcctgctcttcgcctcgctcacggcgctgctcgtcctggcccctcgcacggcgtcgccgccgctgccgctggccgtggtggttggggacgaggaggcgccgccggccgccgctggtggtgctgcggggatcagcggcggaggggcgggagttgaggagggaccggaggacctcgcgctataccggcgcgtgacgctcgacgccggcgagggcgcggcggtggcgtccaaggtggcgttcatgttcctgaccaactccgacctcaccttcgcgccgctttgggagcgcttcttcgcggggcacgctgaccagttcaacgtctacgtgcacgcagacccggcggtgcggctgcggctcccccctacgccttccttccggggccgcttcgtcgcggccaagccgacgcggcgcggggacccgagcctcatcgctgcggcgcggcggctgcttgtcgccgcgctactcgacgacccggccaacgcctacttcgcgctgctctcgcagcactgcgtcccgctccactccttcccgcggctctacgaggcgctcttcccgcccaaggccgcgcaccaccaccgcctcccgagctatatcgaggtgctcaccggcgagccccagatgcccgcgcgctacgtggcgcgcggtgacgacgccatgctcccggaggtgcccttcgaccggttccgcatcggctcccagttcttcacgctggcccgccgccacgccgtgctagtcgtccgcgagcgccgtctctggcgaaagtttagggagccgtgcctgccggagtcgcagggctcgtgctacccggaggagcactatttcccgacgcttctcgacatggccgaccccgccggctgcacccggtacacgctcacgcgcgtcaactggaccgacagcttcgagggccacccgcacacgtattccgcgccagaggtgtcgccgcggctcatcgccgagctacgccagtccaacagctccacctatgagcacatgttcgcgcgcaagttcgcgcccgactgccttggcccgctcatggccatcgccgacaccgtcatcttcaaagattgatcgatgcggtgctctgcatcatagatacacgtaggaggtctatccgttgagagttgcgcgtgcgagaagacgaaagcagtgtcgttattctccgttgaatcttcacacggttcagactggtgctttgcctctgtgccctccaccgttcttctcctcctggtacttctatgtagacttaagtggcaacaacctaatgcaaagcggcaggtgttgcatctgatggtcagtccatccatccactgtatttttcctacctcgtgcggctgcctaaggctgctgttctgttgaaatgcgtaaaaggatggattgtggcggtgttctgttcagctgaaactgaaaaggaactttgtaccggtttatttcagcttgtgtacataaccaaggaataaaataatcattctgcaaaaaaaaaaaaaaaaaagcttctcg

SEQ ID NO: 4127 - DNA, 1093 bp, Triticum aestivum
  Clone ID: TRIAE-23APR03-CLUSTER13314_1
ccatcccttcccctcccaccccctccccacctctcaccaccccccaccctcccccccggagagggccccccccccccgcccccccgcgcagccactgcagccgcccggccgcggcgccgcccgcgccccccgccgccgcccccggacccccgccgcgcccccccccccggccgccgcccggccgcggcgccccccccgccgccccctcgccggggggcgccggcgggggcggggcgccccccgggccgcggccgcgccccgcggcccccgcggccggccgcccccccctccgccgccgccgcgggcgggcgcggcggccggggcgccaccgagccggtcccgatggccccggcggaccgcgggggcggcggggaccgcgcgcgcaacgagatggcgacgcagtgctccgcgtgggacgacgagaacagcttcaatatccagattcacgcgcggcgcggagggggcgaaggaaaacacgatgagaaccaagtctaggaagaccctccccgggggttcctttatgtggttgcggattcctatggttgatgctgagaacaaggactatggtgccgagttatttgtgaacggagagatcgtccaacgatcaccggaaaggcagagaagggtggagccggtgcctcagagagctcaagatagaccgcgttacagcgaccggactcgctatgtgaagaggagggagaaccaggcctaccaacggtgacatgtccccgtcggtgtaccgcacaagtggcccactgctatcgctccttgccctagatatagcaactgctccacgcccgaaatgcccctcgtcgtctttgctgcattgtagcctcgccatatctgggcgtttattttcttcacgaactgtaggttaaggactgcatgtactactgtgagtgacttgttccgttgttttggtaacggtatcttggtttgcggcgcaaaaaaaaaaaaaaagactctgtttgttttgcattgtttccttcttggtaactgaacattcgtgttccctagtaaatccaatttgctgaataacctgctatgttaaaaaaaaaaaaaaaaaaaaaaaaaaaaaaaaaaaaaaaaaaaa

SEQ ID NO: 4128 - DNA, 1018 bp, Triticum aestivum
  Clone ID: TRIAE-23APR03-CLUSTER13314_2
gtaggtctccgtcccggctccatcccgatcccgaattccccattccccatctccctccctcaccatggccgccgccgccgccgcttccatggcccgcaggctgctctcccccaccaccaccacctcctactcgaccaccgcccgcctcctcatctcccgccgcctcgcctccgccgcgtccgtcccgcgcgccccggcggcggcggcgaaggagatgctgcgcccggcggccgtcgcctcctcctccgccctcttcctccgcggcgccgggggcgccaggggcatggcgcggcggcccgggggcggcgacgggtacgcccccgcgcggggcgggggcggaggggaccgcgcgccgacggagatggcgccgctgttccccgggtgcgactacgagcactggctgatcgtcatggacaagcccggcggcgagggcgcctccaagcaccagatgatcgactgctacgtccacaccctcgccaaggtcctcggcagcgaggaggaggccaagaggaagatttacaacgtctcgtgcgagcgctacttcgggttcgggtgcgagatcgacgaggagacatccaacaagcttgaagggattcctggtgttctctttgtgctccctgattcctatgttgaccctgaacacaaggactacggagcggagctgtttgtgaatggggagatcgtgcagagatctcccgagaggcagaggagggtggagcccgtgccgcagagagcgtcggacaggccgaggtacaacgacaggacccggtacgcgcggcggagggagaaccagcagcagcagcagccgcagcgatgatccatcacatgaccgaggcggaggccagagctggaggcaacctgctgtgctggtttcatcccctcgacatagcgagcagttgttattgcttggttttagtaatccgtttcatgttgccactactctgttatctgtatgtatttgacatcttggaacctgaaactgtgaatcttgatagcataaaagaattttagagccggg

SEQ ID NO: 4129 - DNA, 1459 bp, Triticum aestivum
  Clone ID: TRIAE-23APR03-CLUSTER133471_1
cttcggctcaccggcgcacgagctgatacagagcatcctaggcaagaggaggagagacccaccgcctcagagctgcggcaatggcgtccttcggttccatggcgatgaccggttcacgagctgaaacagagcatcctaggcaagaagagaagcgacccaccacctgagagcagcggcaatggcgtcctttggttccatggcggtggcgctcgtggtatcaccggttcacgagctgatacagagcatcctaggcaagaagaggagagactcaccacccgagagcagcggcaatggcgtccttcggttctatcgcggtggcgctcgtggtgtgcgcaatgctgctgcagacctgcgtggccacgaggaggctccaggcgctggtgcaggagcagcccatcaccatgaagtaccacaagggagcgctcctctccggccgcatcgccatcaacctcgtctggtacggcaacttctccgcgccgcagcgcgccatcgtcaccgacttcgtctcctcgctcgcctccgcgtccgcgtccccggcgccgcagccggagccgtcggtggccacctggttcaagacggcgcagaagtactacgccagctccaaggcccgcttcccggcgctggccctcggctcccacgtcttcgaccggtcctactccctcggccggcggctccgggagcgtgacctcgtcaggctggccgcgcgcggcgggcccagccgcgccatcaacgtggtgctcacggccgacgacgtggccgtcgacggcttctgcatgagccgctgcggctcccacggcgcctccccgcggtcccgcgccgggcggttcgcatacgtgtgggtgggcaacccggcgacgcagtgcgccgggcagtgtgcgtggccgttccaccagccgcagtacggcccgcagatggcacccctcgcgccgcccaacggcgacgtcggcgtcgacggcatggtggtgtccctcgcgtccatggtcgtcggcaccgtcaccaaccccttcggcaacggcttcttccagggccccgccgaggcgccgctggaggccgccacggcgtgcgccggtgtgtacggcaagggggcgtaccccggctacgccggctcactgctcgtcgacccggccaccggcgccagcttcaacgcgaacggagcccacggccggaagtacctggtcccggcgctcgtcgaccccgacacgtccgcctgctccaccttggggtaggctcgctcgtaggcgacatgatggtgtgtagttatagttgcggtggcgttgttgctgtgtggagagtgttccaccttccacgcgcgtgctaatattaatctgtgtgcctgtagaggcgttgagatgaaattctttcatttgttgaatgaaaaaaagtttactattaataaaaaaaaaaaaaaaaaaaaaaaaaaaaaaaaaaaaaaaaaaaaaaaagaaaaaaaaaaaaaaaa

SEQ ID NO: 4130 - DNA, 1515 bp, Triticum aestivum
  unsure (1)..(1515): unsure at all n locations
  Clone ID: TRIAE-23APR03-CLUSTER13394_1
ccaccgcaccgcatatccgacggccgaggcgccaccgcaccagacgcacgcgtgtaggcggcagcagcacctttgccggacggatccgcccgcctcctcggagcgtgagcaaggaagaaacacccgggaagcggcggagaccaacggggaacttcctcttcttccgccggtccgtccacgctctgcgacatgggcccgaatggcgcgcgcgatgacgcgcccgcggccgtggcgggggagcaggagaggccgcgggccgatggggaggaggaggaggaggagggcggggcgacggtgttccggggcaccaactactcgctgccgcggacgatcgcggcgctggcgctgtggctcggggggaatccacttcaacgtcctcctcatcctcgcctcgctcttcctcttcccgctccgcctcgcccgccctggtggtggcgctgcagctcattttcattgtcacccccctcaacgttgacgacaaaccgcgccgagaaagcggccggttcgtaccgcagtacggcatgggccacatccaagttagcttgcgggtggagcccgacgacgccttctttgtcagcattgctagagcacttaaatttactcccatcatcttctggggaagatacgggacaccgatcgccttctcgtcacctatgcatgtggttgttggtagacccattgagctgaagaaaaatcctctgcctaccattgatgagataaacgaagtgcacgggcaattcgtcggcgcattgcaagaactgtttgagaagtacaagacgaaagccggatatcctggcctccatctgagagtcctataacactttcgtgtggagaataagtggcttgtaatatcacggcaactcggcgacgcttgcggcctgtttgatcattgcacgatcactagtacgaagctggagtttgtccgagttgttaggccatgatgttggtactggcaagtgttgatgatcacacggcgcctttcttgtgacagaattgtcagttcccactggttgctcataatataaagcctcgtgcaagtcgatcctttataggaaactattcgtttggtctgttcgtatacctatggatgtgaggaaaagtcctcggcccaagatacatgcattagtcgattttcacgacatatccgcggacgacgtccaaatcctgtcagagaagtacaagacgtaagttttctataaaataaaaagatggatagtcctgtaacacttgagagtcctgtgccactttcttgtggcatctcggcggctcgccgtcgctcggcacttcggccacgcttgcggcctgtttgatcattgcacgatcactagtacgaagctggagtttgtccgagttgttaggccatgatgttggtactggcaagtgttgatgatcacacggcgcctttcctgtaacagaattgtcagttcccactggttgctcataatataaagcctcgtgcaagtcgatccttcagaggaaaaaaaagaactcctagttaaaagaaaaaannaaaac

SEQ ID NO: 4131 - DNA, 1885 bp, Triticum aestivum
  Clone ID: TRIAE-23APR03-CLUSTER133_1
ggcacgaggagttcttaacccatgggagaggaatgaaaaccacacactgtgcctcaactctgcaaaggccattggatgtactgttgttaacattggcacccagtttttagtggaaggaaggcctcatttagttcttggattaatatctcaaatcataaagattcaacttttggctgatcttaatcttaagaagacaccccagcttgtggaattgtttgatgacagtaaggatatagatgaggtgttgagcttgtcaacagaaaagatgctgcttcgatggatgaaccatcatctgaaaaaggctggctacaagaaaactgttaacaatttctcttcggatgtgaaggatggtgaagcctatgcttatcttctaaaagctcttgctccagagacttcccctgaaaccacactggagactaagaatcctgatgaaagggcaaaaatggtacttgaacaagcagagaagttggactgcaaaagataccttacaccaaaggatattactgagggttctgccaacttgaatcttgcatttgttgcacaaatattccagcatcggaatggtctaactagtgacattaaacaagttacactcacacagtcagcatcacgtgatgatgttctagtatccagagaagaaagggccttccgaatgtggatcaacagccttggggtcgagtcatacctgaataatgtttttgaagatgttcgcaatggatgggtacttcttgaagtacttgacaaagtttctcctggatctgtcaattggaagttggcatcaaaacctccaattaaattgccatttaggaaactggagaactgcaatcaagttgtcaaaattgggaaggagttaaagttttcattagtaaatttagctgggaatgatattgttcagggaaataagaaattgatagttgcacttctgtggcaattgatgagatttaatatccttcaattgctaaacagactgagatcccactccaaaggatcccaaggaaagcaaattactgatgcagatatactgaactgggcaaacagcaaagtgaaagcatcaggaagaacatctcgaatggaaagcttcaaggataagagcttatcaaatggagtgttcttcctcgaacttcttagtgcagttcagccaagggttgtgaactggaaagtagttacaaagggagaagctgacgaggaaaagaagctaaatgctacctacatcattagtgttgcaagaaagctcggatgttctgtgtttctactgccagaggacatcatagaggtgaaccagaagatgatcctaactcttacagctagcatcatgtattggagcctgctgagacaaccacagcctgaaatatcagaagcatcagagccatccagcatggcttcggacgcaacttccgacattggctcggaggatggtgcctcaacagcggcaccgtccgagagcgaagaggcaaactcactgtccgacagtctatccaccctgaccacagacgacgccacctcaaatgctccacctgcagaaaacgggaacggcgccaccccagatgctccacctgcagaaaacgggaacgacgccaccccagatgctcaacctgcagaaaacgggaacgccgccaccccagatgccccacctgcagaaaatgggaacgatgccacatgatcctgatggttatatgttcgtccgtagcgctgtccatcattagcttcatatacaagggttggtacccaaagttgctgctgctaccagaagtgaaattttctcctgcttttcaggtactagcataatagctcggtgccgaattccctgcagatcgtagccaccgtttgttcattaaattaaattttgctgaatactagtaagtactaaaaaaaaaaaaaaaaaact

SEQ ID NO: 4132 - DNA, 1535 bp, Triticum aestivum
  Clone ID: TRIAE-23APR03-CLUSTER13436_1
cccatcgagtccgtacaatcggataccgagaaagaccggcgcatgtccgtacaaccggaaacccggtcggggcgggcggttggaccccctgcccaaatcggcgcgcgggctggaggacctcgaggagatgcgcgcccgcacggcgcacaagctccagaagccctccctcgagatcgagcagcagctgcagcagctgctgaattccatcgcacagagcgtcaaccagctcgagcagctgttcgccgatatcactctcaagatcgacaacggcgcactagataagattgaaagacgcaataatgagcgtatcgctccagtagatgaacgcgcagacagccatttgtgtttctatgagattcttgcaaatcactatgtgaaagtccctcaaagtgggaggcgtatacttgagttgatagtgcaactctggagccaatcctttgcagccaacatatttgcgcttctttttcacagatggttgtttgaagcctctcttgaggggaccgaggtatcactaagatacagctctgctcttgtccaaccagctactaacgttttttcggattgacatacaatccactacaaggtacttcctccgattgtatcattatctccttgaagaagtcgctttagttccagatcaactcattaagatatcaccacaggctggtagaaatttattctgcctcctctccagattcatgctgttctatgatcaggatcacttgcttacaagttttcttgggcatttccctgcttttccaaattctttcttggttggtggagctgcagattactttgtgattgaactcaccgatcagctccagaagctaaaagtggagccagtactgctgcactacctttcccgcatgaccatccttcaaggctgggagttgaggatgagtacaagcaccaggctaaagtcatgcctgtatagcttcacatctcctggaggccctgcctatccaacaagagccgtccggcatgcagcctggaatacgttggatttactttttcctgtgggtcgctatccgaggcacgtgataagtctgttctttcggctgctctatccatggtattggccttcctcttgctggaacttcgtcatgacctgcgtgagcaccatctactactacatcttgaatctcctcgtctcgatctgggagaacatgaggaggcgcgaccatcaaaggatgcacagagaatgaagaaatcgcgaccaggcctaaaccgaggctacaatgttgtgttgttgttccttctgttttacctttaggatggttagcttcatgtgtgtgcgcatgaaatttgttgtataaatccaagtgtctgttgtgtttgttatacatggacagaggatgtgatgtggggcagagttgtgcagtgagagagggaaggaaggggcagtttttatgctcaccagtctgaagctgtaatttgtatacaacattcagcagcttctccaaatgccatcaaaggtttatatgctctaagaaaaaaaaaaaaaaaagcggaatacgttttgcccataccagctc

SEQ ID NO: 4133 - DNA, 1244 bp, Triticum aestivum
  Clone ID: TRIAE-23APR03-CLUSTER1345_2
aatccaaccgcggctttggcacctcctcgcccgccgccgccgccgccgtcgccgaccagatcccgcgccgccgcagccgcagccgcctccggccatggcgccgccatcctccgaagagccggccgccgcctccggggccggcgccatctccaaggtcctcgtcgtcatagcgatgcagacggaggcgctcccgctcgtcacccggttccagctcgtcgaggcggccgccgatgattccatatttcctaaaggtgccccttggactcggtaccatggcgactacaaaggcctccacatcgatctcgtctggcctggaaaagaccctgtgcttggggttgacagtgttggtacagtatccgcagctcttgtgacttatgcttctatacaattgttgaagccagaccttatcatcaacgctggtactgctggtggttttaaggccagaggagcaggtattggggatgtcttcttagcttcagatgttgctttccatgacaggagaatacccattcctgtctttgacagttatggaattggagcacgaaaaacatttgaaaccccgaatatagtgaaggaactcaatttgaaggttgggaaactgtcaactggtgattctctggatatgtccccccatgatgagacagcaatactgagcaatgaagctacagtcaaggatatggagggagcagcggtggcatatgttgctgacttgttctcgacacctgctatctttgtcaaagctgtgactgacattgttgatggggagaagccaacagccgaggagtttctgcaaaacctgatctccgtgacgatggcgcttgaccaggcagtcatgcaagtggtagacttcatcagcggcaaatgtatctctgatctctgaacgccgaacactccgccatgctgttctggggtccacaaactgagggagcctgaatatatattgttggatgtataatgtttcctggggggtttcacacacgattttacattatcgtaacccctatgtaaaaaattcttggcgattactcggagccattgtatgggattttgtagaattttacaaactgtgcagcttagtgaagctcggcttaataaggtggtgtattgttacactggaataaatgatgggcactggaactcccatggattcagtacaatggttgatggacgcaccttggcagcttcatcacatggcagctgaatactttccaaatggagtaagaagtaaaggctctcatgtttgc

SEQ ID NO: 4134 - DNA, 1217 bp, Triticum aestivum
  unsure (1)..(1217): unsure at all n locations
  Clone ID: TRIAE-23APR03-CLUSTER134877_1
ctcccttacgcgcacggacgcagcctctcactcccaaccctggcccccaagggcggccagggccgggccggcgcccctgccgccggccccccccccccctgccgccgcacccgcttccggttgccgcggccgcaccggctccgggactcccgcgccttcgctccccgtagacttgtgagccacattgcttcaaaaaaaaaggaagaggctgctacaagggcagcggcagcaactgctgaaagagcagggccgaccaattttgtcaaggcaatggcaatggaaatcagtacaagctttgactaagagaaagagaaagtcttacgcatgtagatgatataaatccgccagctcctgtgcatggtctagcctcacgtaactaggaggtgggataactggatgagataaggcggaacctgaggcatgctgaaattcgggggcgggctgctttacgctgggaaaggtggtggaccgagaaggaaggcgtggcagatggattccgggtcgtcataaacaacggagcagaaggatgtcaatcagtctaccatctgcacgtacatgtacttggtggaaggcagatgaaatggcctcctggttaagtttaagaacagtgtctgccttttttctgcttctgtatgatcgatcatactagactgctattgagtttctactacttgccacctgacttgttattaaaaatccacctgcttcttactaaatggttttacgttattaccaaaaaaaaaaaaaaaaaaaaactccntccgacgaagtaggggtgcattggcctcgcgaggctcgaacacgccccccttcaatntgaaaaacgggcaaaatccctccggtnaaaaanggggccgtacaatnnccaaangtcttaacccccnagctctttaantcnacggaaatggttctgcatataggagtatagtcgtactgcctatggacttgagtctaacagggatgcatatcgtccgacaaagtaaggcaatgcgattatgcactcggtaaggattcgagaaaccggcagccatttttcagttatgaaaagacggcgcacagagtcctcttccggttgagaaaaaaaaaaaataagaccagaatccatagacattatactgagccaagctgttatcttactgtttgaatgaaatgaactacttttccctttttccataaaaaaaaaaaaaaaatatggcttcttttttggggggcccttt

SEQ ID NO: 4135 - DNA, 901 bp, Triticum aestivum
  Clone ID: TRIAE-23APR03-CLUSTER135148_1
ttctctctccctcctcccctcacttccattagctagtattcaggttaactaggagggaagaggagaggagaggagggagtgtggagaagatgatgatgaggtctctagagccggcggccgagcacaaggcctcgtcatccttcggcaacctcctctccatcttcctccgggtcagctcctccgagcccaagccaccgaggcggagcttcgacgccgagggcgtcgtcgggctcggcatcgtcgcggccatgagccgtgcgtgcctcaccgcccagccaatagcgatcggcgctgccgcacgccgccgcgcgcacgaggaggacgagctctcggagagctacacgtgcgtcatcacgcacatggccaccggcgccggcgagggcggcagcatgcgcaagcgcgtgtacttcgggttcggcgacggcggggacggctggttcgtggaagccgctgaggaggcgcccgcgagggcagacgacttcttgagccggtgctgcctctgcaacaagaggcttgatgggctcgacatctacatgtaccaggggggagaaagccttctgcagctccgagtgccgatgccaccagatgctcatggacgaccgcgcagaaaactgcggatcagaagccctcagagccaacagctactcggcctcgccgtgctccgcgccggatgtccttctctcccaagcgtcgcggcggcctagccggccgagctgcgtgatgccgtcaagctgctcctcagtttgtagtagcagagagcatagagatctaaatgatcttttaagcgaatgaaaacatagagtaattactaaaaaaaggtttctgaactgtggctcgaataaaagagagggagaaagtttttggggtcatgtccactgcaagatgttcactgcttgagcgt

SEQ ID NO: 4136 - DNA, 1935 bp, Triticum aestivum
  unsure (1)..(1935): unsure at all n locations
  Clone ID: TRIAE-23APR03-CLUSTER13523_1
cagcgggagaagagagcagcacatcgcgccccgccacgcctcctccggccgctcccccctccctcctcctcccctcgctcctcctcgcagccccccccctctcgccggcggccgcggcccgccccacgtcctacgccccccgccgccacccctcggccggcacctgctatggggcctcgaggtagtccaacatctttgccgcggcaccagttacctaggacgactgccggctaaaccacatctctctcgccggaaaacatacgactcgtgctactaccaaaaaaagaatcaagtagttggatatggggctgcggctgctgggatttatagaagatggaggacaacaaggagacgatactgcttcggagaataaaccaccatggcggaaggaggggcaggcacctcgtaggggtaggagagtaggaggcggactagttggtggcggtgatgaagatctgcttggatctgctctcgcggaaaggttaccgtatcagggggcgagacgttaagacggacctgtagagtacaggcgaataagagcgacccgggttcctcgagcatcagctagtgcagtagcatttggtttggggctactttctgggaaaggaaagcttggagcaggaaataaccgtgccttctctgttctgagtgagagtcgtgcaagtgatatttgtctgcgattctttgatagctgtaaaacatacaaggactacaggaaaagaaaggagcctgatgttgacaagcaaaaggaaccaattctaggaacatgtcacatctgctttagtcagcccgttatcacctcaagtttacaacacaggatgtttcttccctctggttcctctgcaaacaggaagcatctttgctgaatattaccaatcaagcttgtcaacttttcaatgaagatgaggttcatttgctagagtggacagatgatttggagggttttgtgcttaaaggttatggtgagtcaataaactataaaatgggactgccattgctcaaggatgttgtccagtcgatggaagaagcaatcatagctagagaagaagactaccctgatggtacgtatgagaaagcaaggctccgatttgcacatgcagaaactcttgttcctttcacatgtctacttggcctttttcttgaaggatcagattttgagaagattcaacgggaggaaccattggatctacctccgatgccaccacagagaagaaattggaagggcgctcttgtagcaccttttgctagcaacaatatgttggctttataccaatgccctggcaaaaatgatggcaaaaaaacatctcaggaccaaaaaagctcatattttttgcaagttctacacaatgaagccccagtttcgatgccgggctgcagcaacaaggatttatgcccattcgaggagttcaaggaaaagatagtgaagccgcacctgaagcacgactacaatatgctatgcaagaagccgggggtggcagcagaggaggagccatcctctttcagctccaagctcaacttcttccttgatctgctctcgcggaaaggttaccgttttaaggggcaagatgttaagacggagctgtagagtacaggcgccttgtgccgcgacgaccttggattaggactgacatgtggacactaaccttggtgtttttgtacctaggtttggtgacttgtgagcgagttcagcgcgtatcaggctgtgatggcttgcaggtgccgccgtgtgcgagtctggcttaatagaaacgatagactactcatattaataaggaattcttttttcgcaaaaaaaaaaaaaaaagtgtactgtgggccttatagagcggccgcgggcccatcgattttncacccgggtggggtaccaggtaagtgtacccaattcgccctatagtgagtcgnattacaattcactggcccgcgntttacaacgtn

SEQ ID NO: 4137 - DNA, 1746 bp, Triticum aestivum
  Clone ID: TRIAE-23APR03-CLUSTER1352_1
acctgcccctttccccctccatggccgccgccgccgcctctcgcgccgccggccgcctcctttccccccgtctcctcatcgcctcgcgccatctccaagcaagtgcctcggagggatcggcgagggatgcgtccacgagcttcatccaccccgccgccgtcgtccaccccgacgccgccatcggccagggtgtcacaataggcccattttgcaccgtgggggcttcagcgaggatcggtgatgcttgtcagttacatacagggagtcatgtcacgggacacaccgagctaggagaaggatgtgttgttcacacatctacctggacgaacaattattggggaaaataatgtaattgggaactatgctgtggttggtgttaagtgccaagatctcaaatataagccaggagatgaatgctttctacgcattggtaacaacaatgagatcagagagtactgctctattcaccgatcttctaaaccttgtgactgcagagcggtaaattgagctattggtaatctccctctgtatcctatatggggtctgccatctattcgcacatcattggcagcaataacatcgtggaatttgctaatttactctatttggtgcatgttataagttgacagcccactgcactctatggactgctgggtttgaattctcgttgtccttcaattcccgatgcatggatacaccttacagacagcgagtgacctggtgccagtcaatccagatgaaacctgggttgtacattagatcattctcataccgattctagggaggttctgtggaatacgttccaagttttcttacctcttggatgcacaatgcttgcagtgatagatcagagttcgtggtctgcatcttgactcaggcgcaacggtttctcagaccaagaggtacggagcctaaggaaagcatataggaaagtatttatgccagccagtagttcccagagtaactttgaagaccgactcgctgaactggaacgggaaattgagctattggaatctccctctgtatcctatatggtggaatctattcgcacctcatttgaccaaggacgtcgtggaatttgcaaattcagaagttggaacatctcataagttgtaagttaccaagctcatctgtgcactgattgagttgcaggatagcatcgttgggaatatatgagctcattttatttctagatctaccaaagagataagccccatccctattaagcagagacttttccaggaaggtggatcacaattcacagtgagcatattgaaaatgccccagaagttgttttctggcatcactatatttctgggatctatatttgctggctattatattgattttagtttgttaaaactggtcccaatgttgattgtattatctgctttattgtaaggcttaaactgacctctatggaatgctcagtttcaattctcgttgttcttctatacccgatgcatggataccccttacagacagcgagtgacctagtgccagtcaatccagatgaaacctgggttgtggacaagatgattgtcgcaccgattatagggaagttttttgtaatacctatactagttttcttgcctcctggatgtacaatccttgtactatagctcatagttgtaagctacaattcgacatggcctttattttgttcagagatgtctttggatctcaggctcgaagctgtaagatctggatgccgttattgtggagatgcacatagtcactgtttgt

SEQ ID NO: 4138 - DNA, 1928 bp, Triticum aestivum
  unsure (1)..(1928): unsure at all n locations
  Clone ID: TRIAE-23APR03-CLUSTER13559_1
cacaacatgccaaacataactccagacgaacaaacgaacccaggtgaattctgtaagtcaagatgccttcgttacgaccgaccctgacccggctagcagggcgcaggtaggcgacattgaggaccgccggccgccccgggggtgcccttggatggctcgccatcatggctgggggccggcggcgcggggggcatcgggacggcgcccgaccggcgcctgggcggccgcagccgccgccgctggtcggccgccgccaccccgtcctgctcggccggcgtcatcctcgcgccctgctaggcctcccgcggcgccgcgtcctggcggtcgtgctcctgcacggcgacgaggagacggcgcatggtgtgcgctccggggggggggggcgcgggcgtgggagaacccacgccccgtggtcggcacgccggcgccgcgccccaccgggggcccggcctcccgctgcggccgagcgccctcctcctcctcctcaccgcgcgccgcgtgctctcgctccgcgacatccgtgtcgcggccgtcctccgcgcgccgcgtgctctcctttcgtttccgccccatccgcgaggaggaggtcgcccccgcggtcccccgccgcgcgcgagggcccgcccgccccgcgccgcggcgcgcggcgcgcgcaacgagcgcgacgcgttcctccgggcgcgccgtcgcatcgtgcagctcgcggcagcgtgcagcctggcccacacgtgccgatcgtcccggatcgccgcgtggttcagtggagctgcggggtgccggcacgccgtccgccctctcggcgtgggccgcggcgcggtggacctggagagggccggccgcggaccacgctcgggaattcaccagacgcgcgagaacctccgatcgaagcaataatcgagccgagttaggatccataacccatcgtccatggagaccgccaccgccagacggaacctaggcctcacctgccgcaccatctgggacaagtgagtggcccctaccaggacgcatgatccacgcgccggcgatgcaaaacgcgaaccctgaggtgcgacaagccttccatgctagtggaaccgtgtccgagcacgccctaagcgagctcccatacctgcgcttggtcatccgagagacgctgcggctacacccgcccctgccgttgttgttccgcgagtgccaggaaccgtgccaagtgcagggatacgacgtgcagcggggcacgcaggtgttggtcaatgcttgggcgctaggccgcgacgagcgctattggcccgacgcgcctgaggagttccggccggaacggttcgaggaagaagcagcaaaggcagactttgggggtggtgactttgcgttcttgccgtttggcgccggccgcaggatgtgccctgggatggcgtttggcctcgccggcgtcgagctcccgcttgcaagcatgctcttccactttgactggaagccaccagggccaggctcggcggagctcgacatgacagagacgttcggcctcaccgcacggcggacagaccagctcctgttgcgccctgtccttcgcgtacctattcccggagtctagtcaatatataaactataagaaatggaggtataatgtaaaactatacttgtacccacatagaaaataaattgcaaagttctacgactgttgcataacatcattagtattgtgcaataactagcgtagtggggctagatcaatatgtggttcctgaatatattgtaaacctatttgaaataatactatacttggacgttttatttcaaaataaaaaaaaaattcctgaatatattgtaaacctacttgaaataataccatagttggacgttttgtttcaaaaaaaaagaaaaaaaaatccttccccgatcaaataggcncactaagcnagcatgtttgtttattaagacaacaaaat

SEQ ID NO: 4139 - DNA, 2008 bp, Triticum aestivum
  Clone ID: TRIAE-23APR03-CLUSTER13574_1
ttcctcctcctccacgctcccgccgagatatttctttcccatcctgcaccccccatccgtcctcgcttgcttgttcaaacagctcttctcctccgtaccacaaccacctcaacggtatcctccctcaccttcgcctcgaaacgcagcggatggttcacctgccgcacatgggggagcagcggaggggggtgaaggaggaggcggtggacgacgacggcggggccgagggggcggccggggctgaggcggcgccgttccagaagaggtcctgcctcgcagggcagccgaagctgtagaaatcgcgcacagctggtcctagggtgctgaatgagcagtcgacgcaagatgatctccttaaggagcatagtccactaggcgatcggcttcagaagagcccctctctggtggtgatggtcaaaatgatgcgtgttgctggcggtaatgccacaaatgcgcatcttgagggcacggactaccccggcagggatcttaggagccactctcagaaccgggtcggtaccaacgaacgcatcctgggagtggcattctatttgctaaaacgctaacttgtgagggaagtactaggcggtggtcctgctggtgagaggatgataaggtgatgggatatttctctgtgcaaattgttccgggcagaaacaggcccaggccaggtagacattggggttcaccagtgataataatgagattgatgagcggaccccccacgcttgatgcgcactttgtggtaggaaagttgagaattgacaactggacagataaccatgcacaggcaagactttcttcagtgtgcgcctgaaacattgaataagcatgcggaatcatttcttcattttttgtgagtttggttcctagggagtgaaaatgtgcagtggggcctgtaggttgatgaactgttgtgtgcagaaatttttgccgggaatcgacatgactcctttatttcttcttttttgaatgtattttgtcgcataataaaaatgtatgacgatcagttaaccccccaaaggatttagggaactattacagcatcattctgcatccggtaggatagatgctgaagagagacaggaagctggaacatcagatggcttgcctcaaggtttctctaattcagttgctgacagtcaagtgattaaacaagacgatggttccagtgtgggtgaaccacatacaaacatccttcttagttggaacggttttaagttgccagggatccggcgctccatgtccaagagtgagatagcaaaccacattgggcaccacatctacagacatatgtattcaggggacctacccgcagctgatggtggtgctggcacatcaggtaaactggccatagatgacatcacccggtacctcctgaacgactctcagatcctcgacggtggcaatgactcaacgggtaaactagcatttgatgagatgacccggcaacttctgaacgactcccaaatcactattgctgctgatgagaggatgctcatgtcaagggtcaattctctgtgctcattgatccacagagattcaggcacaggccaggtaaaccctggtgttcacagtgataataatgagatttatgagagaaagccccaagcttatgcgcctcctgttgaaggagacagtggcaatggctcattgcctccaaggcaagaaccatttggggacctgcttacgcatctgccgcgcatctcatcatttcctcatttcttgtgagtttggttcctagggagtgaaaatgtgcagtggggcctgtaggttgatgaactgttgtgtgtagaaatttttgccgggaatcaacatgactcctttatttcttctttcttgtatgtacagtatcaggtaggataattttaggcaagcccttttggctccataacacgactgtcctatgttctatgctgtggttttggttgtttgaagtgtctatattgatccaagtttgtataaaacatcctgttattcttactcgtatactacaaattagtgttcc

SEQ ID NO: 4140 - DNA, 1505 bp, Triticum aestivum
  Clone ID: TRIAE-23APR03-CLUSTER135761_1
accctcagtgacccgtaacagcgccccctttcttcagctcacacccccagtaaccgtcccccgccttttaagcgcacccccggagcccggaccccgcccccgccgtccgagccaccttttacaagcctctctcgccacacagcagcgaagccagcccacgacgatccagctatggcatgcgttaacatgtacaacccggacggcggcgcggtggcgttcggtggcgggcagccgggcccgcgcatctccttctccagcgacttctccatggagccgccgccgccggtgcagaaccgggccatgggcctgcggtgccaggaggaggaccagaacttcgagttctccgtgggcagccaccccatgatggccgccgaccagctcttctccaagggccggatcctccccttcaaggtcgagggcggccgcccgccctccacgctccgcgacgagctccgtggtggcgccgccgacgaggagagggcgtccacgacgcccaaggggtccagccggtggagggagatgctcggcctccggaagtcgctctgcgtcggcggcggcgtcgctagtaatgccgcggctgccaagaagagcgacaaggtcgtcgccgtcgacgccgacgccaagatagccaccgacatggccgcgcccaagcaggagctatgagaggtgaccggccgatggggacgacggcgacatgatcggaaacctccggctcccgcgccatcgctcgcgccatgttcaccggtcttctctcatcgtgctcgtcagtcgttttgggtggcccgattgcctgcgtgctagctagctactctacatgggcagtgtccatgtccatgtgtgtgcatgtgttgaagagcaaacaattctgtaatttcacttctttttcccctcctttcaataagtgacccgctctcgatctctagctagcagctgtccactaccactagctagatccccatcacctcacttctccttgttcttccaagctttgttttttcctccaccaccatccggctctgcctgcccgcccatggccggcctgtacataacgcttgtgtgtagatgggaaatttatggtgcaatgattagccctcgccaggcggccagatctgtggcgacacgagctgagcccttgctggcctttgttgtagggatcatgcaacagtgcgctcccttgtcaccttgctccgctgcgcaccacatgcatgcttcctcctcctcttcctccacgcgatgtgcccggccgcatgtgggtttatatataaaggcagacaggcgccgcagagccggcgcgtgcgagcgagacgaagatcgatcgagccatcgagggaacatgtcctctgcacgttttgaacctttgcagcgttttggatgccggtcgtggaccgaacgtttattgttttgttttcagttgtatcccgtttaaacctgatgcccgagggctttattattaatttaaagccggacgtttctagcgtctccgttccataaaaaaaaaaaaaaaa

SEQ ID NO: 4141 - DNA, 1526 bp, Triticum aestivum
  unsure (1)..(1526): unsure at all n locations
  Clone ID: TRIAE-23APR03-CLUSTER13577_1
atcagacggcccaccagcagtctgcccatccacccagtcgccgccgccgccgccgccgtttccagctgaactcccagacccactgcgcgtcgtgcgggctgcgcaatcgcgcagctggatgccgctagtaagacttctcaagaggggtgctgagggaggtgcgggtgaagcccgtcatcgtatacaaagcgggcgggcgggcggagcccacgacccgggttgactcggccatgaaggtccccgaggcggacatcgccgccgccgaggccctgccgggcgtcctcacggtcaccagcgtcgctccgcagcacttccgcgctccccctgaaccccccgctgcccgcgcgcggaagccaggacagcccagctcgaagtggccctgtccgggtatgaacgccctcgcggtgaacggaggcgggagacagcagaggcatgcaagcaaaggtgaggtaactgtgtttgttggctattttcgcccttttggactgggatagggcctagaagacacacagtgggtgctacaccctcggttcaatctggttttggtgtacctttcttgctagcagagactggtgaactggtgatcctgtttgttttggcattggcaaactggtgtacgtgactaaccaaactcaaaccaagagatgtacgtgaatttgcactgaatttgtgatgttttcgtacttgatttaacggcggtgccatatttcagatatatgtagtgtttggttcttttcatttcaaaaaaaaaaaaaaaacaacttatcgctctggtggggatgaagaaacagccaaactgcttgaagacatcatttatccagaagagataacacactgtgcagctggcgttagatggtttagatacttgtgcctccggtccctccccagtgatccaattgcacctccagttccgcagcctaaatcccaatgtttgagctgctgaaaggtaggacaggtgacgataataagacttctcaagcggtgcatgatggattggcagataagccgacagaagatattaatagccatgacgaggcggttcaacaagtgggcgatggactggcaaggtgcagcctaggcgacgccgatgaaatggcaatcattgagagattccacagcatcgttagagagcatttccgaggacccctgaaggcccccttcaatgcggaggctaggaaggcagctggatttgggcctgcctggtatgaacccctggcggtgaaggaggttgagacacaagcaatcgagcaaagtgagtagtgtttgtgctgttttccctgttatactggtagggcagaagacacaaaatgggtgccacacctttagttcaatcaggttttggtgttcctttcttgctagcagagactggtgaactggtgatcctgtttgttttggcattggcaaactgcatgatgtacgtgactaaccgaagtcaaaccaacagatgtacgtgaactttcactgaatttttgatgtttcagtacttgatttaacggcggtgcaaaaaaaaaaaaaaaaaagcttnt

SEQ ID NO: 4142 - DNA, 1587 bp, Triticum aestivum
  unsure (1)..(1587): unsure at all n locations
  Clone ID: TRIAE-23APR03-CLUSTER135792_1
acgctccccgccccgaaagttggcaggcacgatctctctctctctgcccccttggactctcctctcctgctcctcctcctcctccccacggcgccatggagcggctcatctccaggacggcggtctcccccgcccagccccggatccacctgccgggcagatcccccttcctcaccacccgccgcgctccccccgcctccgcgggtgctgggagcgcgaaagttggcaggcacgatctctctccacccccttggactctcctctgctcctcctctccctccccacggcgccatggagcggctcatctccaggacggcggtctccccggcccagccccggatccacctgcccggcagatcccccttcctcaccacccgccgcgccgcctccgcctccgcgggtgctgggagcgccgcgccgtggacccggctgtgcgcgcagccgccgcgcctaggtgccgcggtcgccgctgcggcgcggcatgacggtgcttcggccccggcgcccgtggaggaggtggctgcggcggcggcagctgggcctccgtggaagctgctcgggagcctgctccccaaggcttctactgctgcccttgtcctgcttatgacacttactgcaagtgccttgcactctagcattccccatcctgcctatgcatcggcgcaaccagtaatcaaatctggtggactcctctcagcagagttattgagcagcggctgggctggtttcttcgcgggctgcttacataccttatccgggcctgaccatcttgtcgcattggcaccactatcaattgggagatcaagactggagagtggactagtcggtgccctttggggctgtggtcatgatgctggacaaataatttttggcctgctcttcttgctactcaaggatcgtttgcacattgaggttctccgtatatggggaacaagagttgtaggtctgacccttcttatgataggcgcgacgggcatccgggaagcttcagaggttcaagagtcggggctaattctggagggtgtagacatgagtggcagtgagcccttgcaacaggcccctgctgttgctcccaggaagaagaaagttggcttcacaacatttgccaccggagtcgtccatggcctccagccagatgcgctgctgatggtcttgcccgctcttgctctgccgtcacgctttgccggtgcggcctacctcggtatgttcttggtcgggactgtattttcgatgggtagctacactgcttttgtaggttcttgtagtgaggctctaaaggataggatacctaagataacggagaagctgacctgggctgcttcccttgtagctgtatgcttggggttagctcttttagttgggcagttctttgggttcaccctatattgattcatgtcctaggttcttgttactacttggcaacattgttttgattgttatttgttatgtttacggcagttgagctcagactacgacacggttggtattcttagactgcaacttatactatgttaatacatgtttttggggaaaaaaaaaaaaaaaaaaaaaaaaaaaaaaaagaaaaaaaaaaaaaaaaaancttat

SEQ ID NO: 4143 - DNA, 951 bp, Triticum aestivum
  unsure (1)..(951): unsure at all n locations
  Clone ID: TRIAE-23APR03-CLUSTER135856_1
aagaacatcgtaatcgggtgctttatttaggccgtgggccgggccctgagagcccatgtacttcgtcgtcttctgactgggcaacaaagccgccgggtctcacccaccagcggcggagatgggtggtggtgccgcgaggagggttctcgaggcgtggaagctcggggtggtcaagtacggcgacgccctcaggctccaggagaggctcgtcgccgaccggagagccggcagggtcccggacctcgtgctctcgctgcagcatccgcctacctacaccctcggcaagcggcgcaccgaccacaacctgctcgtgccggagtcaagcctcgcgggcatcggcgccgagctctaccgcacggagcggggcggtgacgtcaccttccacgggccgcgccaggccgtgctctaccccatcctctcgctgcgggacattgggctaggcgcgcggaggtatgtcgaggggctcgagtccgccatgatcgaggtggcctctctgtacggcgtcaaggcgcggccggggggcgcctgcgagaccggcgtgtgggtcggggacaggaagattgggaccatcggggtcaggatctcgtcaggttttacctgccatggcctggcgttcaacatcgaccctgatttggggtacttcaagcacatcgtgccctgcggcattgctgacaaggaggtcacgtcgctgcggcgggaggcggcagtggaactccctcctgacgaggtgatccatgatcagctcgtgcagagcttggcggcaaccttccggttcggtgatgttaaagtcaaggatgattcagagtgtgcaaacatgattagctcagctgcaactgggcaacactgatatatgtattttgctctttgtacttttgtatacaaaaaaaaaaaaaaaacaccctgttataaacttttgggtatcaaaaatttcctctgataaaaaaaagaaan

SEQ ID NO: 4144 - DNA, 1497 bp, Triticum aestivum
  Clone ID: TRIAE-23APR03-CLUSTER135_1
aatttttttttttttttgggataagtagttcctagtaaacctgtcatattgattgtatgccggctttcgctggagatctgctaaccgagaggaacacggcaagccgttggcagcttgtggacatcaccgcaggcctcttctagccgacatacacgcccaacttccaaagggaggcaacatggcagcacttactgtcgtgccaacactgggttctttccgggcgacaatccgggccctctgcccggcttgcgacgcccgcacacagaagtacctgtcggggactctctggcatgtcaccatgaccaagctacaaggacaatgtgcgaagactgcaatgcaaggtcagaagagtgcaaccacgcgagccccatgtcagtctcggtttcagacagggacggatcggaggttaggttctgtactcaaagcgcctggcggaagccatgcacgcgtgagcgccccggaacccggtgtagctcatggcatcgtcgtcctcgggcccggcgccggtcgtcggtgtcccacaggaaggcggcctgcgcggcgaggacgtggctgttgtgcgggtcggccctggccgcccggtcgaagtagctggacgcgcgctcctcgtcgccgtgcacctcccacaccagcctggcgtactccgacagcagctcgccgatcgtcggggtccgccaggatcgcgcgggagtagtactcctccgccctccggcgatccccttttactgggttgaggaactgcgcgtagtttctgaggaagaggccgttgcaggggtcctcgccgatgagcctcttgtagtggatctcgatgccggagcggtcccctcccccgccgccggaggccgccaggtagctgcccccggcgccgccgtcgatgccgcccccgcagtcggcgctcagcaggcccgagcccagccggtcgatcccgaggcccctggccaggaacagcgggtgctcctgcgcgtacgtgctgccgaagccgaactgcccaaagctcgtctcttggtcagcgtcgtcgtcctcctcctcctcctcgtccctggccccgtcgcgcgccgtgaacgactggatcgtctcgagcgccggcctggagcgcggcggcaggtggtggtggtggtcgtccgcggggccgcccagcgcggcgaggttgccgtccgagcacgcgcggcgcaggccgccgccgcgggagcggtcgtggtccgagcccgagccgccgccaccgccggcggacaggctgcaggagatggccggcgggtggtaggcgaccgtgggcgaggactcggcgaagtggacggccggggagtggccgccggtcccggatgccgcgtgcagcgtgccgagcaccggcgtggacgcgctcctgaccagcatcgctcctcgttctcgctgccgctggcaccggcacgagcagctgggttgagactacggcaccggcgtggtgtgaattcagttgagggtcttgtgggcggtggggactgttgttgctgacactggttt

SEQ ID NO: 4145 - DNA, 1312 bp, Triticum aestivum
  unsure (1)..(1312): unsure at all n locations
  Clone ID: TRIAE-23APR03-CLUSTER136025_1
aattattattccgtccatttaaaagggacgccancgccgtggcgttggttggcctccgttccactccacgcacgcccccctcatttccattccaccttcccacccatcgccctgcctgcctacctcttctctctctccctcgtccacgcctccggtcgttccccttcttccctctgctgtccactcaccggacgccatgacggaggatgccgagggctgtgttgcggtggcggtggccgaggcggcgggcatcatctgctcgctccgcgcggccgacctcgccgggtggacgccgccctggaaggccagcgggccgccgtcgtccgaagccgcggcgaaggaggagacggcctggccggcggttgcgcgggggaagcggacgcgggcgtcgcgctctggctcggcggccaacaagaacaaggggcgatgggcccgcggcagccccgcgtctccgctcgactacagcggcggctccggctccggcgcgtccaccagcggcggcgaggacggcgccttctgctcgccgccggcgacggtcgccctcgcccgcgggcacgccgtggtcacacccaccgccgccgctcttctgctgctgctgctgcatgttggctctgcgggaggagcacggcgcccattgatcctgccggtgccgccgctgccccgcatcgccggccagaggtcagggaagaagatgaggctcccggaggtgaagcagctggtgctgtccctgtcggcggagaacgtcggccttcgccaggagatggagtcgctgcagagggcctgcacggggctgtccaaggagaacggcaggctagagacaaggctggagcattcatcctcctcaagcaagcggaagaggaccgggtgcgaagaggaggagcggcggcaaaggaagccgcagcaagctggtggcggcttcgagctccctgacctcaacattccggcgcaggatgtcgccgatgcaccagcggcggttccctgatggctcgggaactcagtccatctccggtggtggcgcctgacggcttacctgacaagttcattaaccgtgtataggggaggaagctgaatctggggctggaaggcctgttctctgatcgtgcctgctggcagggaggcanagganccggtcttgttaccttagcttttttttcttcttctttcgnttagttttgactgtgcgttttaaggtaggtagcgagcncactttacagggtaatngcgagggtgcgatntccgataaaaaaacgggtaaatcgcccgagaggattacagaggaagatnaaatgtttaccgaaaaaaaaaaaaaaaa

SEQ ID NO: 4146 - DNA, 2369 bp, Triticum aestivum
  unsure (1)..(2369): unsure at all n locations
  Clone ID: TRIAE-23APR03-CLUSTER1362_1
gccagtggctgccctcccccctctctttctctcctccgcccgcgcccggggaaccagcgaccgctccccctttacctggcctccggatccagagcggagttcgtgtccgggcgctagggagacgaccgatccagtccaggcacgaggatggggaaggcggcgggggtgggcgcggcggtgggcgtgggcgcgggggtcggcgcggccgtggtgctgggccggcgccggcggcgcggggagctggaccggcgcggcgcggccgaggacgagaagaagctcggggccgccgccgtcgacggcgacgtcaagctcgcgcccgccacggccacggtcctgcgcaggggcgtctcgcacgccgtcgtgctggagagcgaccgcggcgcgcgcggccacatccagtcccaggtactgatcggcaacatccactcccacctcatcccaaccggaagttgaatatggcatgttttatgcattggagcttatggcttgcgtcttgcatgtgttcgggtggggaccatctcgacgggtctggggatcctgctggcgggagcgtacttacgtcgcaccaaccaacaactgcagctccagctccccgtacgaccggagcgtctgctccttcccgggcggggccatggcgccgaaggccttgccggagaggtcgatgtggtacggcgcgaggggctcgtagttcttgtccgtgatgaagatggtgatggggcttgtcggagcacggccgacggcttctggcacttgatctcgtagcaggagccgcatcccttgccgtccttgaagatggggaggttgccgcaggcgatcatgccgttgtagggagccaggttcacgtccttgatcccgcacgcgccgccgttgtctttggggccggagccggtgggcttgccgtaccggggggcctgcggccataatattgggcactggtacaaatgcagcatatgttgagcatgctaatgcaattcctaagtggactggactactgccgaaatccggaaatatggtaatcaacacggtaatggggaagctttaaatcggacaagcttccactttcagaatacgacaaagcattggacttcgaaagtttgaaccctggagaacagatatatgaaaagttgatttccggcatgtatcttggagagattgtgcgaagaatcttactgaaactggctcatgatgctgcattgtttgggggatgttgttccagctaagctggaaatgccattcgtacttaggaccccagatatgtctgccatgcaccacgatgcatcacatgaccttaaaattctgggaagtaagctaaaggatatcgttggggttgcagatacttccctggaagtaagatacattactcgtcacatatgtgacatcgttgcagagcgcggcgcacgcttggccgctgctggcatatatggcatcctgaagaagctaggccgggacaaggtgccaagggacggcagcccgatgccaaggaccgtggttgccttggacggtgggctctatgaacattacaagaagttcagcagctgcttagaggcgactctttcagatctcctcggggacgaggcctcttcttcgctggttgccaagctggccaatgacggctctggcattggagctgctctcctcgccgcctcgcactcccagtacgctgatatctactagtcttcttggtaacgagcccggtggatggattgaacccagagtgtagcaccctcttctcttcctttttttctttttcttttccctttgaacgttcctaatcgcctggtggtggaattttaccttcttcggctattctgcggacactctccggtgcgtctgcagcgggatgtagctagcatagcgccaaagagcttggaggtttatctaatggcataaaagtttcagtggcagcaacatatggagatggaggtttggacaatgccattcctgttctgccgattctttttcccctttgtctggtggtgttttgtaatccataacattttgttaatcttttttcttgtatttggtggttgcattgaaatccagaaccttttgttaatccttttttttgttttttctcctgccaataaagatggggaatcgacatcatccaatttaaccatccattttatgtcgcctggtttctccagtatatacatatatgtatgtctgaatgctcatctctgtcttcagaataatactagttttgtctggtgttgcctcttaacccccgccccattgggccgtncnttttanaaacgttnnngacctgggnaaaaaccctgggggnttacccaaactttanncncctttgcaagaanaaccccccctttccccaancttggggttaaaantcgaaanagggcccncnc

SEQ ID NO: 4147 - DNA, 1493 bp, Triticum aestivum
  Clone ID: TRIAE-23APR03-CLUSTER136339_1
attattcttaaccctctcgccccgcctccccgtctcctcctccggtcgcccaaccgagcaggggtgtcgccattgttgtcgcctctcacccgcaggccgcctccgcgtccgtcactaggccacgagacctaggatcccccgccccctcgctgtgacctcgccgcgatgtggtggagggcggtggccagggctcgccgccggatcccgggagcgcggcccgtgtcgacggcggcggcggggaagagcggccgcgaggtggtggtgccgcggttcggcgggccggaggtgctgcagctgaggcagggggtgcccgcgcccgatctgaagcccggcgaggtgcttgtgcgcgcgcgcgccgtctccatcaaccccctcgacttgcgaatgcgggctggctatggccgttgcatattcgagccactcctacctctcatcattggccgggacatcagtggtgaagtcgcagctacagggacttctgtgtcgtcattctatattgggcaagaagtgtttggtgccttgcatccaacagcgattagagggacatgtgctgattatgcagttctttcacaggatgagcttacttctaaaccatctacgctcactcatgtggaggccagtgcaattccctttgctgcgttgactgcgtggcgtgctttatatggtactgctggaatttctaaaggacaaagattacttgtgcttggtggaggaggagcagttgggctttctgctgttcagcttgcggtagctgcagggtgtagtgtttcagctacctgtggagcccaaagtattgagcaagttttggcagccggtgctgaaaaggctattgattacgccactgaggatactgaatcaacagttacaggaaagtttgatgctgtgttagacacaataggagtagctgaaactgaaagaattggtattaatcttctgagaagaggcggacattatatgacccttcagggagaggcagcttcactagcagatagatatggattatatgtgggacttcctgctgctaccgctactttactgaagaaacagatgcagtatcgttgttctcatgggatagagtactggtggacatacatgagagctgatcctgacggtctccatgagatccagaggctgtccggagctggaaaactacagatacctgtggagaagacttttcctatcagccaagtaagagaagctcatgaggccaaggagaaaagactggtgcctggcaaggtggttctagagttcgactagtgttagcaggggttcgtccgacgatcacggaaggaccgacgttccttcttaattgtaccatgatgtttattttttgtctttctcccaaagaaaagtcgtgcggctttgaagctctaaatttgctcgttctctaggtagtactacagggttattttgtcggggtttagtgtaaatgcagtaaataatgatatgcaatacgaagagacttatttcagtgaaaaaaaaaaaaaaaaaag

SEQ ID NO: 4148 - DNA, 1555 bp, Triticum aestivum
  Clone ID: TRIAE-23APR03-CLUSTER13669_1
ctcattctctcagagccccctccccctccctcccccttacgcgcgctcccttttcccccctgggctgggcaccctcgtccccctcctcttcctctcaggcgcccacctcctcccctgcctgcggctcaagcttccgttcccctccaggcctcgcgcgcagaggcagggcggcggcgttcggttgtcttctcggcggcgggcgggcaggcatgggcgccagcgggggcggggaagacaagcccttcaatttcctccagatcctctgcgagggcgtcatagccggaggagctgccggggtcgtggttgaaacggctctgtaccccatcgacaccatcaagaccaggcttcaggctgctcgagctggaagtcaaatccaatggaaaggcctgtattccggactaggtggaaatcttgtcggtgttctcccggcttctgctctgtttgtgggaatatatgagccaactaaacggaagctactggacatgtttcctgaaaatttgagtgctgttgctcatcttactgcaggtgctgttggagggttgggtgcttctctcattcgtgttcccacagaggtggtcaaacaaaggatgcaaactggtcaattcaggactgcgcctgatgctgttcgtctcatagttgccaaggaaggatttagaggtctttttgctggttatggttcatttttacttcgagatcttccgtttgatgccattcaattctgcatatatgagcaacttcgaattggttacaagcttatggcaaagagggagctgaaggatccagagaatgcactaattggtgcttttgccggtgcgattactggcgctataacgacccccctcgatgttctgaagacaaggttgatgattcaggggcaaacgaagcaatactccggaatcgtaagctgtgctaagacgatcttgagagaggaaggcccaggggcattcttgaagggcatcgagccgcgagttctgtggatcggcatcggtgggtccatcttcttcggcgtgctggagaagaccaagtcggtgctcgctgagcggagcagccgcaaggctgcgctggcggagaaggacgagtgaaccaaccgaccaaaccaactgtgcatcctatgctgactcactctacaccattacccgttccttaaacctgaagttttgctccaagtttatgtggtgggctttgcatttctcgttccagaactataaggcatacaatcagtttcaagagtctgttttgacgtcggcgatggttatgatcctttatgagtccctgtaaacattactctcctttaataaagtttagcagattgttcttcagaaaaaaaaaaaaaaaaggtttatccaacggcccaccccgcagggggggcccggaacccaattcccccttatgggggcccgtattccgcgcccccccgggccggcgttttccacccgcggggggggaaaccccggggggcccccttattagctcggcggggaaccccccccccccccccccgggggggaaaaggaaaagccccccccccccctcccccttcccaaaggggggggac

SEQ ID NO: 4149 - DNA, 974 bp, Triticum aestivum
  unsure (1)..(974): unsure at all n locations
  Clone ID: TRIAE-23APR03-CLUSTER137109_1
cagctgagcagagcaggagagctcgagggaaggagaaaaggaagaaggcgccctcaaacccagaaaagctccgcccagcttccgtcggccggagccggagggagggcttcaattgcgacggcaattcacaacaaatccagcataagccaatgtctgacaacagcattcagcgagcattgctacctgagaaccccgatgccaatgtgctccaaagaaagccgtcgcaaggagccaagcggttccgaagatgcaggtcggctcccagatcagagaccgatgaaaaaccacaagaaaatggctcgtcgcttccagccaaggagttgttcagcgtggtacggcccagcttcagactagtagggttcctcctatttctctacctgctagttggcgtcgtagtcttttaccttgtcatggatcagttatctggcaaggagaaccaacagagtgctcgacgcacttgtacttctgcattgtcacgatgacatcggtgggctatggagaccttgttcctaacagcgcagagtgcttgacgcactgtacttctgcattgtcacgatgacatcggttggctatggagaccttgttcctaacacagacacgacgaagctgctcgcctgtgttttcgtcttcacgggcatggcgatcattgctctcttcgtgagcaagtcagcagattacctcgtcgagaagcaggaggtgttgttcttcaaggcactgcacatgaatatgaagtgtggcgaggccaaaatgctcaggcaaattgagacaaacaagacaaagtacaaattctacacagccgctctgctcttgtgacggcattgttgtggggactgttttcctggaggtgagaagctgaccttgttgaccctttatgtgcgtgcaaacacaacctggtaggggataaagctccgtccaattgggncacttccgggttggaaatncagcacataatcgggcgtctatgtctcctgaat

SEQ ID NO: 4150 - DNA, 623 bp, Triticum aestivum
  Clone ID: TRIAE-23APR03-CLUSTER137701_2
tcctgacgccgagccctaaacgctcctactctctcctcggtcctctcccacccgcctctccctttcccatctccctccgccttcccccaaccctcagagatggcctcgacctgcttccgcgccgccgcccgcgccgccactgcggcctgccgctcggcggcctcccgctccatgccctccgtcggccgctccgccgcccgccgcgccccgttaatctccagggcgccgctggagctggggtgctgcgcggtaatgtcgctgctgccgctgcacagcgcggtggccgcggcgaggctgacttcgcggctgagcacggcgtcccggagctcctccgctctctctcaggagatgggtctctctgctccaaggtgataaaacgcgggaagacctgctcgtgtcgtgcaatcagtctgatagaatttgtagagtagtgaactaaatgaacttcttttggtagtggtaatttatttgtgacacggacaatcgtggttctgctgggcctttccaagttttgagatcatatcttttatcttgatataaatatgcaaggacaaattgcagagtgatggctgtgtttgtttacaacagttctgaatgccatttatatagtaatgatcgatgag

SEQ ID NO: 4151 - DNA, 1419 bp, Triticum aestivum
  unsure (1)..(1419): unsure at all n locations
  Clone ID: TRIAE-23APR03-CLUSTER137729_1
ttttttttttttttttataactgcaaactgaagggcctcaataaaacctagtagaaataacacactctgttcaaataatgcanaactacaaatggcagcaacgctacacggttattctcgaacagatacgactggggctaaccgatttactccacaatccaataagaacatagctacgtttattagagagtcaattttttttaatgtcaccaataattgaatattgngttcttattgccttctagcaccatttttcttcgaaaaggagggaaccccactgcctctgcaaccttctagagctcctcgttgtcgttcacggtagccgaagaggagttgggatcattgtccccaaatgactgttatttcttgccaggaccagggaggaatggggttatttctgggacgactctgtagatgtgtacttttatgttgtccttcgagaagagctcgaagacgcacacgtcgaacttctccagattattgtctagagaaaacttgccccagccaccactcaaaccgccaccacagcgttcgctgtagtagacatagttaacatcccaagactttccttgtggattccagagctttaacttcctgtgggcacggggaagacactcccttacaaattcacagggtagattcaagaaaaatcccacatatacataagactccttcattatctgaagaccgaaaggattcttggatttaaattgttttgcccttagcagagcattgtccttctgtatttcagttatcagtcgcctttgtgatagtactcttagttgtctcttacccgtcgcgctagtttgaccacgtctagcaacatccttactcactccggagccggaatgggtgatgtcaattcaggcttgatgcaagagatactttgttctaacatgctgcttgaggaatcagaatcttcagtactgtcaagacttgttgaagctgacttgtaagtaccgactgaagctgccggacaccttttcttatccttgtctgaggcaatacaggacttctgcaatgcagagtcatttgcatcgatttccctaacccttgaggacttctgcaacgcagagtcatttgcatcgatttctctaaccctcgaggacttctgcaacgcagagtcatttgcatcgatttctctaaccctcgaggacttctgcaatgcagagtcttttgcatcgatttctctaaccctcgaggacttctgcaacgcagagtcatttgcatcgatttctctaaccctcgaggacttgtgcaaagcagagtcatttgcatcgatttctctaaccctcgaggacttgtgcaatgcagagtcattttcatcgatttctctaaccctcaaggacttctccaatgcagagccatttgcatcgatttctctaaccctcttcctagtggtttggttgctctcttcta

SEQ ID NO: 4152 - DNA, 1695 bp, Triticum aestivum
  Clone ID: TRIAE-23APR03-CLUSTER13788_1
ctccccgtcccgtgcccccaaaaaccgccgcaaccgcaaaaaaccgcagcaaaggacgaacctgaaagcatcgagctcgccgcgacggatccgatgcatgccatggcggagcccggcggcgcgctcgacccccctcctcccccctctccggctgcgccgaccccgccggtccagtggcccaaggacggctcgctcgacccgcctccttccccctctccggtcgcgcagcccccgccggtcgagtggcccgaggacggcgtgctgacgcgggactgggtggccagcttcaccgcggcgctggactggtgctcgcggagcatcccgccggaccagctcccctcggtgctctccgcggatttcgtgcggcggctcgtcgtcgccgcggccgtcatcctccaccgcgagcccaacatcgtccgcgtcgacccgcggcccgaccagtccgtcgtcgtcgtgggggacgtccacggccagctccacgatgtcatgttcctgctccgggacgccgggttcccctcggaggagcgaatctttgtctttaacggggattacgtggatcgcggcgcttggggcctcgagaccttgctcctcctcctggcttggaaggtattccttccaaattgtgtgtttcttctccgaggaaatcatgaatccaagtactgcacgtcagtatatggtttcgaacaggaggtaatggttaaatataaaggtcaaggcactcaagtttatcggaagtttttaagatgttttgaagatctccctctagcatcaataatagcaggatgtgtgtatactgctcatggagggatttttcgtggggcggttgtactaccgttgaaaaggtcgaaaagggcaaagaaaggtcacaaatataaggcgggtcctactgatgactctactactttgaagcttggatccctggacgaattgttaaaagcaaggagaactgttcttgacaccccgtatgagggttcaaacttgattcctggagatgtgctttggtctgatccttccttagataagggtctttccctgaataatgaaaggggcattggtttgctttggggtctagatatcactcaacagtttctatatacaaataatctgaagttaatcatcagatcacatgaaggcccagatgcaagagataagcggcatgatctattagcaatggacagtggatatacaatcgaccatcatgtcgcatgcggaaagttaataactctcttcagtgccccagactatccacaatttcaggcctcagtggaccgttacaacaattctggagcatatattgtcctcagtccccctgattttgctacccctgatttccatacttttcaagctgtaaagcctcggcctaaggcgcatccctactatgattttgaagacgtaattgattctgatgaagagttaaatctaggcgccatggacactggcacgtcgagcagttgatcacaacctgtattgtaattgtacttagcatgcgaattgtcaccgcgaactggagaagtggtaacgagtagttcttttgattggtactaacattgcagacttcgtaactaatattttgtcacgtcctaaaaaaaaaaaaaaaagtgggttggtttgacctgtcacaatcacacacgtgacctcgtcaccacatccggcatgttgttgtgcccgaatgaggcgtgccgccaaccagcagga

SEQ ID NO: 4153 - DNA, 1555 bp, Triticum aestivum
  Clone ID: TRIAE-23APR03-CLUSTER137971_1
ggggtatttggactcgctataggggaaattgggtacggggccgcccttagaggtgggcggtatcgataagctttttttttttttttttcttcgtaactcactctttttatattaaatataacaagtattagtacagacatagacatggatacatcaaactcaaaaattcccattacaattctcaaaagagaaaaggtctgccacacaaaggaaagaatcaatagaggaagtcctgagcagttgccacagaggcaaaaatagatgtgggagaaaccccactccgcttgcaggataaaaagaggcctgaagcagagaaaccttaaatcagctgtagtccatctcatcctgtaattttatcatggtggaattgcaccacgatgcatgtaatattgtcagcgctgccacgagagtaggcaatctccgtcagtttcctggccgcagactctggcacatcttctgtttttgcaagggacacagcttcctcattttctacggcatcccaaagcccatcactggcaagaaccaggctctccaattctccattaatcaattcttcctgaatttcaggttctgccaccacaaatggcttcagtagacgattaccaaacgcacgggacattgccagtacgccacctaccctccaagtaccagcccagatgacaacacctccagcattttcaattctcttgcgttcatcagacctgttaggtttgtgatctactgagagtgccctagctttcccggcttttgaaataacagcacgggagtcaccaacatttgctacatatagatggccacccactaaaaccgcagtcgaagctgtggaaccatcatccctgaaagcacttgattctgattctaagaaatctgcatctgtcttctgatatgtttcacttatagcaagctttgtatcagtcaagaacttggggtgtttcataaggttctcgaacaaatgctccttcaaatactcagcagcacgtgaccccccatgaccatcgaatacaccaaataggctaacagcgtgtccatcaatttcagttagttttacatcatagaaatcctccattgtagcccttttccctctaaaacttgaatacccacatttcagtttaccatcttccctctgccaccccgcactggcgtaccctccatcctgcggctgggtcccagcagcaaccgcgcggcgctgcagctgcagctgccccgccggagcgccggagtcagagtcggaggaatcgagcatcatcttcgtcctggcgccagccaccgcccggaatccacgccaaccgtgcccgcgcggacggggtgtcacgcacacatcgaccgcccgaccgcacaggaccctggcccaccggcgcctgcccgcgcccgcgcccgccgccgcacgaagcaccagcgccctcagcctaccgatgcataccatctcatggctgggtggctctctctctctctctctccgctccgatgccgatgcccgaggagagatccactggcgctcggtttaatggccgcggatcccggggcgagggcgcggaaggggaggagcaagcggcgg

SEQ ID NO: 4154 - DNA, 863 bp, Triticum aestivum
  Clone ID: TRIAE-23APR03-CLUSTER1379_2
gaaactcgggtccattccaacagagagcaacacaatccaatcttctgccgtcccgtgctcgtagttggtggagtagggttttagccatggcgtggagcgccgccgccgccgtctccaggttcgccgcctccccggccgccgagatccgcctgcccttctcagcagctgccgccgcctccgtctccttcgccggccgccgccgcttcggccccgtcgccgcgtccctcgccacctccgccaccgttcaaaaggaggctgttcagacggagaaggcaccagcagcactaggcccctactcccaggcgataaaagcaaacaatcttgtgtttgtctcgggcgttcttggcctaaatcctgagacagggaagtttgtctctgaaagcgtggaggagcaaactgagcaggttatgaagaacatgggtgaaatattgaaagcaagtggtgctagctactcatcagttgtcaagacaacaatcatgttagccgacctacaggatttcaagaacgtgaacgagatttatgctaaatattttccagcccctgcaccggcgcgctcgacctaccaagtcgcagctctgccactgaacgccaggattgagatcgagtgcattgctgccctctagttacctcgcggctgaccatcaaaaacctcaataagcgttccatgcccgttgcagctggccactactattctgtagtgcactacatgacactgtaatccaattaaggtcttgaactgcgtgtgatcggtgtactgtctctcatcgtttggtcgcggggtatttctccctgtccaatcttatgcctcgtcgtataaggaaacgtgaaattaaaatggtcaaattgagcgtatgaattagccc

SEQ ID NO: 4155 - DNA, 2553 bp, Triticum aestivum
  Clone ID: TRIAE-23APR03-CLUSTER1384_1
gcggccgctgccccaaacccaaaccaactccacgcgcaccagaccgcgcccatccgcagctggagcccgaccgacgcggctcagactccaaacccaaaccaactcaacgcgccacacgcccccccgagacgccagcagaccgccaccatccgcaggctcaggcccgacacaacgcggctcggctcagcagtcggcgtcgtcttcctctccccccgctcccccggctgcctccctccagcccgccttcgatccccgcccgcccgggctgccgcgcgatcggatccggccagatcccgcgccggcggccatggagaacctgatcgcgctcgtcaacaagctgcagcgcgcctgcacggcgctcggcgaccccggcggtgagagcgccgtccccaccctctgggactcgctgccgtccatcggccgtcgtcgacggagagaagttcgggcatatattcggatgctgaagagcgttgttggaaacgtattccctgcccaggggctcatgcattgtcacccgtcgcccgctggttcctgcaactccataggattgatggagacagggagtatgcagagttcttgcatgtccccaggaagagattcaccgattttgccatgggtgaggaaggagatagctgacgaaactgacagacaaactggccatggaaagggaatatcatctgttcccatccatctaagcatgttctctcccaacattgtgaatgtgtctcttattgatcttcctgggcttactaaagttgctgttgagggtcagccggagagtatcgttcaggaaattgaaaacatggttcgagcattcattgaaaagcccaactgcatcattctggctgtttctccagccaatcaggatcttgcaacttctgatgctatcaagatttcacgggaagttgacccaaaaggtgaacggacctttggtgtgctcacgaaaattgatttaatggacaagggtactgatgctgttgatatactggaaggaagagcttacaggctccaatttccatggattggtgttgtcaatcgatcccagcaagatatcaacaagagtgtggacatgattgctgctaggcgtagagagcgtgactatttcgcaaacacaccagaatacaagcatctcgctcataggatgggatcagaacatttagcaaagagtctatcaaagcatttggagtctgttattaaatcaagaatcccgggtctccagtctcttataacgaagacagttgcagagctggaaactgaacttactcgtcttggaaagcccattgctaatgatgctggaggaaagctgtacacgattatggaaatatgccgcatgtttgatggcatctacaaagagcatctggatggagtgcgccctggtggtgagaaaatttaccatgtctttgacaatcagtttcctgtggcaattaaacggttgcagtttgataagcaactgtcaatggaaaatgtgaggaagctcataacggaagctgatggataccagcctcacttgatagctccagagcaaggatatcggcgcctcatagaatcttgtcttgttagtatcagaggtcctgccgaggcagctgttgacacggtccatggaatcctaaaggaactagtccacaaggctataaatgaaactcatgagctcaagcagttccccactcttcgtgtggaagttggcaatgcagcttttgagtcgttggaaagaatgagggacgaaagcaagaagaacacattaaagctagttgatatggaaacaagctacttaactgtagattttttcaggaagcttcctcaggatgttgagaagggtggaaatccaagccactctatttttgatagatataatgattcttatctaagacgaattgggacaactgttctggcatatgttaacatggtatcttcaacattgaggaactccatcccaaaatctattgtgtactgccaagtccgtgaggcaaagcgctcattgctcgaccacttctttactgagctgggagcaagagagattaggcaactttcgaagctccttgacgaggaccccgcggtcatggagcggaggacaaacctcgccaagaggctggagctataccggagcgcccaagcagagatcgacgcagttgcatggtcaaaataattttttgtcgacttatcgttccgtagtgtgtgttcacctttactccttgtttggtgacatgtctccccttattctgagggtcatatatagctgattctttcttcccgttctaggtcatattatattcttattagatgacagcagctgtgaggtgtgtcatgtgtttgtgcttttgctccttgtgcttgaggatctctctctaggggggacacctttctgctgtaccttgtctgtatcacgtacgagttcatgttattatgatttccataaaaaaaaaaaaaaaaacttccctttaaaaaaaaaaaaacaacaaaggctttaacgtactccccccccgccccttcgaggggggggcggcccgcgctaaccccccaattccccctccttaataatggcaagggcctcaatcg

SEQ ID NO: 4156 - DNA, 1253 bp, Triticum aestivum
  Clone ID: TRIAE-23APR03-CLUSTER139357_2
atcccgtgtgcgtcccgctgttcgcttctcccgcatcccgatagcaccagcaagcaaaacccccctcccctctccatccagttccccctccccctcccccgcccgccgtcccatggcgtctctcctccgcacggccgccgcgctcgcgcccccaccgtcgtccgcccgggagacgcggcggccgtcgtgcgccgcctccctcgcctgctcccggcgcgcgccggcgagtccgctgcgcgctccgcctctgcccgggccatggcgattggggcccgatgaggccgcgcgtacggccactcagtttctctgccgatacatgagaagagatgggcatgaaggtgatgggagaacgcaaggacaagacgaacctagtatgtttgggccagatgatgacgatggtgcaaagattcctactcaggtggaaactcttgttagaggcactgcaatagttgatgctccagaatacaagccgctcccagatctcgattaccttcaggaattgctggctattcagcagcaaggaccccgatcaataggtttctttggtacccgcaacatggggtatatgcatcaacaacttattgagatcttgagttatgccatggtcataacaaaaaatcatatattcacatctggtgcttctgggactaacgcagctgttattaggggtgctttgagagctgagaagccagaattgcttaccgtaattttgcctcaaagtctaaagaagcaacctcctgaaagccaagagctattatccaaagtacaaaacttgattgagaaacctcagtatgaccatttaccactaattgaggctagcaggttatgcaacatggacatcatctcgaaggtccaacaggtgatatgctttgcgtttcatgacagcaggctgctgatggagacctgccaggaggcaaagaacatgcggaagatcgtaacgctcttctacttggattagctagcacctcggggcgcttctcccctttttgtccgtaggccggtgaacgggatgctgtcattcctgtatacactaaagctctggagtaggttcaggtttggggcataacagtgcgtcttcgggcattttgcccattattcaaattcttggtagaaaccaaataagcttgtcgatatgtctagtctgtcagtaaagaaaataattcaagttcttattactagtaatttcaaaggctacagtattgaaaaaactgtttccactctcaatcaaaaagaaaaaggaaaaactgtttccg

SEQ ID NO: 4157 - DNA, 1390 bp, Triticum aestivum
  Clone ID: TRIAE-23APR03-CLUSTER14024_1
actgcattgcgtttctcacgagcgagagagggaggcagagtaggctcatggcggcggcgttggtggcgcgcgtggcgacggcgttggtggcgggagcgctccggcgggggagatccggcgcccgcggcgcggccgagaggacgctgcgtaggctcgtgagcactctggtcgtggcggagcatgaaggtgggctcgtgaagccctcatctctgagcgcattggcggctgccgaggccatcgccaaagagaacaaggtgtgtcttctcataggcggatccggaccgacgctgctcacgactgctgagcaagttgggtctagccagccgattgtcacggatgtgctcgtcgttgattcaggcgtttttgcgcatcctttagccgagccttgggctgagctgctcccctccgtgcagcagaaaggcggatactctcatgttatagcctcttcgacatcgttcgggaagaatttgcttccgcgcgctgcggctcttctagatgtctcccctgtcacggacgtcactgcaatctctgagccccgggtctttgtgaggccaatctatgctgggaatgcactctgcactgtacgatatactggggagtctccttgtatgatgagtattagatcaacatcattttctccagctaccgagtctgtgtcagaaactaaagttgcacctataacccaggttgatctctctttcctcagtgaagcaagctcaaggaaatcttcatgggtgaatcttacatcccaagatacagaacggccagatcttgcaaatgcacgcgtggtaatcactggaggcagaggtttgaagagcgccgagaatttcaaattgttggagcagctggcagagaaacttggcgcagcagtgggtgcgaccagagctgccgtagatgcaggatatgtgccaaatgaactacaagtggggcagaccgggaagattgttgcgcctgagctctacattgctttcggagtgtcaggggcgatacaacacttggcggggatgagagattccaagtacattgtggcggtcaacaaagacgcggacgccccaatatttcaggtcgcggattacgggatcgttggcgatctgttccaggtcctcgaggagctcctggagaagatcccagacaagaaataagtgtcgggagcgtgtggcaatcatccgtcatgttcctcgtcaatgcgtggaagggggtttcgtcgaaatgtgtcattgttgtatggttggccggttaataagcaccttgctggatagcggtgtgcaagcagcataactggaggaatgtgttcacagttgacattttcgaaactcatttccccagttttgtacatatatgcaccagaatattgagtgcatgggaataataatgaagtcgtggttaatcc

SEQ ID NO: 4158 - DNA, 1384 bp, Triticum aestivum
  Clone ID: TRIAE-23APR03-CLUSTER14096_2
atctccccatccgccattgcccttgactcgtgctccctgcctctcttctcccccgagaccccctctctctctctgtgcgcgcgcgcgctcgtgctccctcttcctgctcttccttctgcttggcagccatggccagcgcgctatgcggcggcggcggcagcgtggcggcgccgtgcggggacttgggcgccgcggcggcgctcgcggagtctttgccgatgggcgctgggtaccgctccaagagctccttccccgccgggagggtggcgctggcggacaggcccctgccccggagcctccaagcggcggccgctgctggacagatgaacgggaacctgacgattggcaaggccatgaggtggtgggagaaggtgacgcaccccaacatgagggaggtcgagtccgcgcaagacctcgcctactccctgctcaacgccggcgacaagctcgtcgtcgtcgacttcttctcccccggctgcggtggctgccgcgctctccaccccaaggtaggagttcttggccgaagccccctgttccgttccggcaatctgattctgaaactgcgacgtatactcaagcgaattcggttgttccgatgtgcagattgcgcagttcgctgagcggaatccggacgtgctgttcctgcaagtcaactacgagaagcacaagtccatgtgctacagcctccatgtccatgtcctccctttcttcaggttctacaggggagcccagggcagggtcagcagcttcagctgcacaaatgcaaccgtaagcctcactgattatgtttcttcttttgtccactacaaaaatatgttcttcagacacgtttaagatgaatgctgacatgcttgctgcaattcgttctgattacagatcaagaagttcaaggacgccctcgcaaagcactcgccggacaggtgcagcctcggcccggcgcggggcctcgaggaggcggagctcttggctctggctgcaaacagggacctggaattcacctacaacaacgagaagccgacgctggtgccgatcgccgaggccatccagatggaagctgcctccattggcggcccatggatgccattgcctgcggccgcgacgcagccgctcgctctgggatccgagaacggctcgctcatcccctctggaagatagtaatcggagaccaggcccaatccggccattcctgtacagattttcttctttttgttgtgtgttgtattgaattcgagaggcggaatcgcagggtaaaggttttagttttttgtaaacctgccgaagctctattgtgatcgtgttgctgcaaccagccgttgctcaacatggtaatccttcttgctttaatgacaaatgggatgatgcctccccagaattaattaagatc

SEQ ID NO: 4159 - DNA, 663 bp, Triticum aestivum
  unsure (1)..(663): unsure at all n locations
  Clone ID: TRIAE-23APR03-CLUSTER14124_5
atttgcactgggtactgcaatgctatgggttgataaagaaagaagggaaataaacgagaaagcaagncaaaattggcagaatcncgncaaaggacgtaccctgcagtgaattgagagtcgctactggaatatttctttttggttctgccnccgaagatgaagagagtgctcctgtgtttcttcggagcgaaatggaagagttgcctcaacgtatttaaggtcccactgaaccaggttgagaagtggaagaagcagagggagaaggagacatttgtagggtccctcgaaatcgtctgtttgagagtctcctcggttgcttttgtgtctgcgctactactgacttgtagttggaatttatgctcctgtcatgtactctcttccaacattcgctgcagaacatcaagtgatgcttttctctatgttgcataaatagttcagcatgcttatgtattctcagcatgcttgaatgtacgcatgtcttgcctgggacttgtgaatgccgagaacctatgagacatttttggttctaagtcatgctgatgtgagagaatatgttgttgttatgtgacagcgcaattatgtgatgatatattgattccaagtcaatagaattatgttgttcatgtganananannnnnnnnnnnnnnnnnnnnnanaaaaag

SEQ ID NO: 4160 - DNA, 1480 bp, Triticum aestivum
  Clone ID: TRIAE-23APR03-CLUSTER141294_1
tttttctccccccaccttccgcgtcccccctccccagcgagcaagctccgcccgtccgcccgaccccgtcccgtccgtccacgcgcccgccccctgcccgcccgcgccctcgccggaggccacccagcaagcgctggcggtgcgcccgccggccagcgacccggccgcctgccggcgccgaagccgatgcagaagccgggaaaactcgcgctgccccaagggcggtccaccattcgtcagttcgtgccggagagcggaacgtccaccgacggcgacctggtcgacaacacggccgtcctccgcatcggatcgcaatgcgaggaaggcgaggcgccaacttaaaagccgttccatgatattggtcagttgaacatagactatctagtttttagctctcaaaggttgtacaggtcaatattcaggacagcatacgcaagcagatggcccaggagttgaaaataagcttgtttacacagtgccagtatgttgtcacgtgctatcagtgtttctatgtcaatggtgttatttctattgctttggagtacatggatggtggctctctcgctgatttccctcaggctgttagaaccgttccagaggcctacctggctgcaatttgtaagcaggtgttgaaaggactgatgtacttgcatcatgagaagcgcgttatacaccgagatctgaaaccatcgaatatattgataaatcataggggtgaagtaaagatatcagattttggtgttagtgccatcatttctagttcttctgcacagcgagatacatttactggcacatttaactacatggcgcctgaaagaatcagtgggcagaaacatggtcatctgagtgatatctggagcttgggcctagttatgctggaatgtgccactggcaatttcccatatcctcctcgtgaaagcttttatgaacttcttgaagctgttgtcgaccaaccatcaccttctgcaccatcagaccagttttcaccagagttctgttcattcatttctgcttgtatccaaaaaaatgctgcagataggtcatctgcccaaaccctatcagctcatccattcctgagcatgtacgatgacctgaatatcgatctttctgactacttcacgaccgcaggatcaccgcttgccaccttcaagcaaatcgcgttgtgagacgacaaatgctcaaccatgtgtcatgagctggagctaactgaagcaagtgaatggagttatttttcttttcctgttattcatgaactgggctttgatgatatctttgaaccaaatatgatacaattggcttcataattatacaaatacaagtctgtaaagcatcagcgagcatcgaagttttgcctgtcaaaaaaaaaaaaaaaaccgcttcttgatcctccttgtccttggttgtgtagcggctgtgtgctttggcaattttactgtaatgaaaccatatttgctgggtcgctcgatgacctgatttggac

SEQ ID NO: 4161 - DNA, 1501 bp, Triticum aestivum
  Clone ID: TRIAE-23APR03-CLUSTER14131_1
tgttttttttttttgggattaactgcgacgaactgcaattattgatctgggcagtgtgcttttttacacaaattgaagttcgatggatggacgtctgctccgtcagaagcgggcgccgtccggtatgtgtggtggcaccctggagctgatggtgctgctttactgcttctaaaaagttcaggtgcaacaacatggcgcgtcgatggctttaccggaaaagggggatacgagtcggtcaactccatcagggtcacctcagtgtagttgcctagatacatgttctcatgcggaacgtctcccgcagcgagtcgtagccctccaggaagtcttccagcggctcttgcgcctgccggaaggggcccccccgggccgcccaagcgcttcggtcacgcccttggcgcccttgcgagcccccgatgtcggccttggacctcttcggggcattcagcgtcgcacacccactcaacatcgggaccactccgacgaactcgtcacacagctgcaggaactcttccctcggactggacggggtcgacaggacccgtcaggaacgcggcagggacgtctcgtccgcgttgtctttcgcgcctttcattgcggctctcgccgagttgtggtgcaccattctctgggtcggcatccgcatgggccttttcctggcgctcttggcactggactggatggacttttcgttgctcaccagaacattgtacatcatccagccgatggcgggggccctgagggttcctcgtagaagcccgtaccttgtttccatatcagaacctcggccaaatacaatgggaaggggtccagcccaagtaggtgcaacagcagcaaccgcagatggtctgataaggcccttcccagctgcacggatagctatggttgctgcatgaccacctccaacaactaccagttcaccatctgcatccgccacaggactatttggtgagttcagtagttgaaccagaaaattctccatcacatcagcattatagttcagtgatggcctgtctgaataacccagaccaggccaatcaacaatagtagcacggtagctgagttctcctttccgtgtcacaatatctttggcgaccaccctccattcctccactgtgctaacatcagaaatcgtagggatcataaggatgttcttcacattctcagcagtcccctgctcatgttcctcatagtaaacgcttactggtttatcctcaaatgtccactgccaatttccagtcttggagggcgagtacgcaggcttggaggcgggaggggcggcgacgcagcgtacggcgaagcgcctcgcccgccggagcggaaccaggcggctggaggccgtgacggcgggggctaggaaggcggccgtggccgccgcggaggggcgcatgaggggagtgggagccggaggcgggcgcggcgtggggagtggagaggaggcggacgacgtgggctgcggtggactctggagctcgacgactggagactccggacgcgtggg

SEQ ID NO: 4162 - DNA, 1539 bp, Triticum aestivum
  Clone ID: TRIAE-23APR03-CLUSTER141871_1
atcacattcttaccgaggcccagccggccggacgcagaagcagaagcagcagcgcagcccgcagcaaagaatcacgaggagatggcggcggcgacggcgacggcgacggtgcaagcgcagccaggactcgacgcccgcgagtgggacgaggcggcgtaccggcggggcatcctgcgggagcgcgacctctcctgccgcaccctcttccgcgccgtcttctacgaccagcgcgacgaacccgacccggacgtcctcctcgccgccgcctccagcgacggatccctcgcgtccttctcgctgtcctcctgcatcgcctcctccgcctccgcccacgccgccccacagctggctgccgccgcgctggtcgaccccgtctgcatcgtccaagcgcacagcggccccgtctacgacgccaagttctacaacgatccgattcagccgctgctcttcagctgcggggatgacggccacatccggggttggagatggcacgagatgcagagctgccttctgccactctctctgcaaggggatcatgttgaaccaatacttgacttggttaaccctcagcatgaaggcccttggggtgcacggtctccaataccagaaaataatgccattgcaattagcaaacaggatggatctcttttcgcggcagcgggtgatgcatgtgcttattgctgggatgtggaaagtggaaagtgtaaaatgacctttaaggggcatactgactatttgcatagtatcgcagttcgtgaggcaaaccaccaggtggtaactggatcagaggatgggacagcccgtatctgggattgcagaagtgggaagtgtacgcagacgatacgtccagtacagaacaagaaatttgagggctcgtgggtcggttgcattgccattgatgcgagtgaaagttggctggcttgtggtacttcttgtggtatatcagtttggagtcttctttcaaatgagtgcatcttcaacgcagattgtggtgctcctgttcaagatttgttgtttgacaaaaatcaaattttagcggttggcgctgaacctgcgctctcccgtttcacgatcaacggggttgttgtttcgcaaataaagtgcgctcctccgtcggcattttccgtctccatgcattcatctgggatggcagctgttgctgggcatggaggtctggtggatgtcatctctggattcgggagccatctttgcgcgtttcgttgccgtggcctggataggtaatcagttaccgagtgctgatgaagcgttactgtgcaatttccatttgccactcccacattagtcagtggagcgcgaaactgtatttcttttcccccctcactgttgtaatacttgtttcagttcagtctgcggaatgatttcctgacaaggatagattctttgtaaatgtccttgttctagatattctgttggaggtttcaatacaatccgtctcaatctgtttcacataaaaaaaaaaaaaaaacccccccccccccaacaaaaaaattaattgggggggggggggaggaacaaaca

SEQ ID NO: 4163 - DNA, 1828 bp, Triticum aestivum
  unsure (1)..(1828): unsure at all n locations
  Clone ID: TRIAE-23APR03-CLUSTER1425_1
aaaaacgcgtttcctgtttggcaaagcggacttcaatcttggtaaggagtgtggaaggcgactacccgcggtacccccgttcagcgatctccgtttacatctccgatcgtctcgccggcgtgagcgagaatgcagggcggatccagcggcatcgtctacggcggcctcaagtaccaggcgcggtgcatcaccgacgtgcgcgcggacgccggttccaccaccttcctcgccggaaccctcagcctcaaggaggagaacgaggtgcacctgatccggctgctgccgggggagaacgagctcgtgtgcgacgggctgttctaccatcccaacgagatctgggacctcaagtcctgccccttcgaccacaggctattctccacggtctacacctctggtgagggttatggcgcgtccgtttggaagatcccggagctgtatgggcagtccaactcaccgcagcttgagcagctcttcacgctcgatgaccacacggacaaaataagatgtgttctctggtggccactggggaagcatgataagctaattagcatcgatgacagaaacatttttctctggaacatagatccatcaaataaatcagccaaggtgatatcacagggatctgctgacatgcttcccaatttacgtggtggagcttgggatccacacaatcacaacgcagttgctacaataactgattcgtcactccacttctgggatctccgttctatgaagagatcaaatgcaattgaacatgctcatatccgggatgtggattataaccccaagaagcaaaacataattgcaacagcagaggacgaattcggaattcgcttgtgggatctcagaatgcttaagcatcctctgaaggatctccctggacattcacattggacatgggctgttcggcacaatcctgagtatgatgagctgattctgagtgctggaacggattcagctgtcaatttatggttggctaaagttggcactgatgactctggacccgaaagcccttctggttcgcccactaggcaagaagaaccattactgcactcgtatactgactacgaagatagcatctatggaattgcatggagctcccatgatccatcgttgtttgcttctttgtcttatgatggaagggttgttttagaatctgtcaagccccacctgcagagaaaatgaagcttgttggtctattttctccacttcatgtgcaggcttgtttgttgtgcatataattggtgttgtagagcttcgttcttgccattgtgtgttcggctataaggggctgatgcgatgatttggttctagtaaccctggtgcaatagcaagccattcatatctcaataatcatgacgacggaagtccaggatggttgctggaggaaaaagtgatgtagtcacagttgaaaagaatatagcgcagctgagatttcaacagttctcctatatcttcaaattttgtcactagttcttcactttggatttctggggaaactgtggatgtctcattggtagtggtagttaattgctgcttctgggcttattagaattctgatatccgatgaagcctggttggcatgtgttgcatgatgtgatgaagtataactgagctgaagtttgtactagtgttgtgatttacaatgtcaatggatttttctgtttaccggccaaaaaaaaaaattcttgtaggatgctgttctacaacagatcgcaatatgccatctgtattttacaaaatggcttagtctaggtcgagtatatttgggtcgtgagagtttttcaccnagttaaattgtactccaaatagtttctcgttcaggacc

SEQ ID NO: 4164 - DNA, 1965 bp, Triticum aestivum
  Clone ID: TRIAE-23APR03-CLUSTER143040_1
atcaaaaggggaaagggagggacagagtacacacgctggtatagacctaaggaaaacgcccccgtttgggctcgaccagtcgcaactcttcttctctcccccgcccgcccctgcccgccgcggccatcggcgccgctctactctgcgccgtcccccccgccgccgtcgccttcgccgccgccctctccgccgccgtcgccttcggccccccggacgccatccgccggccggtcgtcgtccgggaggccgtctcctggttcgccggcgcgtgggtcggcgcctccttcgcggcggcgtccgcggcctcgtcgccggcggggggcgtggcgctggcggtgggggtgcaggtgcgggtgcgggcgcgggcgctgctggtggcgctggcggtgtgggtggccatgtcggtgtgcctggtggtggaggccctgtacgactgcgtggtctgccccggcgcgtggtccgtcggctggcgccccgagtggcggttcaagtgggagcccctcgccggcgacgacgaggagaaggggggcccccactacccccgtggtcctcgtccagatacccgtcgacaggcgcggcaggtgagctccagtggccaaaggacaggataatcgtccaagtgctggacgactccaccgatccgtttatcaagaacttggtggagcttgaatgtgaaagctgggcggtcaagggtctgaacatcaagtatgccacgagaagcagccggaaggggtttaaagcaggagccctgaagaaaggaatggaatgtgactatgccaagcagtgcgaatatgttgccatatttgatgctgatttccagcctgaaccagacttccttctcagaacagtgccgttcttcgtgcacaatccagaagttgctcttgttcaagctcggtggtcgttcgtgaatgacaccgcgagcctgttgacaagggtacaaaagatgttctttgattaccatttcaaagttgagcaagaagcaggatcagcaaccttttccttcttcagcttcaatggaaccgctggagtgtggcgtacagcagccatcaaagaggcaggaggttggaaggaccgcactacagttgaagacatggacttggcagtccgagcaaccctaaagggttggaaatttgtatatgtcggggatatcagagttaagagtgaattgccatctacttacaaggcctagggtcgacagcaattccggtggtcctgtggtggtgcacatttattccgaaaagtagcaaaagatattttgactgcgaaggatgtatctctcatcaagaagttccatatgctctatagcttcttcttggttcggagagttgtggcccctactgtcgcgtgtattctctacaatatcatacttccaatctcagttatgatcccagaactattcctaccagtctggggcatcgcatatattcccacagtacttttagtggtcacagccattagacatccaaaaaatttacacattctgccattttggattttgttcgagagtgtgatgacaatgcatcgcatgagagctgccctctctggtctattcgaattatcagagttcaacgagtgggtcgtgacaaagaaaacagggaacaattttgaagataacgaagttcccttgttacagaaaccaaggaaacgattaagagacagggttaattttcgcgagattgtattttcggcgtttcttttcttctgtgcatcgtacaaccttgtattccctggcaagactcgctactattttaatctctatctccaaggactagcatttgtatgtctagggctaaacttcactggcacttgcagttgctgtcaatgacaacaactaaactgtaccaagtgatgttatacagtttgtttatgggtgtaagagtttcaaacatttcagatgatagccttagatgcataaacttgattgttcaactaacaacagtttccatagcaaaaaaaaaaaaaaaa

SEQ ID NO: 4165 - DNA, 1497 bp, Triticum aestivum
  Clone ID: TRIAE-23APR03-CLUSTER1432_1
atcagacgctaattgctgagtatgcccttggaggggaatgttgactttggtgatgaggcatggcttgccggaatcaccttcgcctagctagctacctactccacgtctcagctatcagccgctcatagctattgatcaccagcaaagctcgtcggaccgacggaaggatggcagagtccttcgacaagatgaaggtggagttcacgggccacgacgagagcgtgcaggcccacgccgcgaccgctcacgactccggcgacgtccccgggggctacttcaggccggtgatcgagggcgatccccccgccgccgatgcgggggggcatgctctgccgacgatcgacatgtccaggctgctcgaccccgagttctcggtggaggagtcggctaagctcggatccgcctgcgagcactggggcttcttccagctcgtgaaccatgccgtggacgggggcctgctggggcagacgaaggccgacgtcgccgagttcttcggccttcccctagaagtcggccgtggcgatacgcccaggagcggagcttggacttctggcctaccaagccctccaccttcagggacacgcttgacaagtacacgacggagctagcaagtgtggccgaacaactgttcaggttcatggccaaggacctgggaagttgaccaggaggcgctccttggcaccttcaagggcctgccccagtgcgtgaggatcaactactaccctccctgccgtcaggccggcaaggtgctgggcctctcgccgcacaccgacggcgttggcatgacgctgctcctccacgccaacgacgtgcaagggctgcagatcaggaaggatggggaatggttctccgtgcacgcgctgcccggagctctcgtcgtcaacatcggcgacgtccttgagatcctctccaacggcaagtaccctcctccacgcgaacgacgtgcaagggctccagatcaggaaggatggggaatggttctccgtgcacgcgctgcccggagctgttgtcgtcaacatcggcgacgtccttgagatcctcagcaacggcaagtacaggagcatcgagccccgggcggtggttaaccctgacaaggagaggatcgccattgcggcgttccacagcgtgcaccttccctgcacgattggcccgtttcaggagctgggtgacgcacgctataagacggtcgatggccttgacttcaccaaggggtacttcgcggcgaagctggaaggcaggaggtacctggagagcctgaagctataggcatatgatgatggtcactggtcagagtggtgagtgttatgataaattcacttggtttaatactactcctattgctttcctatgtctcagatgtgttgctttcagcgtgaatgttatgtgcaatcttctcatgggatgattttgtgaattttttctttcaagaacagaatgttttgtggtcatttttttgaagaacgtaatacatttgtgaacttaaaaaaaaaaaaaaaa

SEQ ID NO: 4166 - DNA, 985 bp, Triticum aestivum
  unsure (1)..(985): unsure at all n locations
  Clone ID: TRIAE-23APR03-CLUSTER144422_1
gaaactgagacccgagccactaggggaggcccgccacgcagcgacgctccaccgcgcgggggcgggcccgccgctcccccgccgcccccgccggcggccacgcccgcccgcccgcggcctccctccccttccgccccgacccctccctcccccacgcgcccctgcccgccacgcaacaacacggcacgatgcggcggtggtgttgctcctccgccggcggcctcgcccgccgcttcctctcctcccccatcgtcgtccatgcccgcccgcccgtgccctccctccccttcctccacgaccactcccacacccacgcgcctctccccatcacgggctcgctgttccactcggcggcagctgctgcgatcgtccggcctccggtgatggcgatgcagctgcgccactacgccatcaagggcaggtcccgcgcgccgaccacgcccaccatctccaaagtcaagaaatacaagatgaaggccccctcgtccatgaagttccgcttcagaacgatgaaggacggccagatccgcaggtggagggccggcaagcgccacaacgcacaccaaaagtccaaggaagcaaagagaagacttcggaagcctgctttagtgcatttagcttatgccaaagttataaagaagctcaacttctgcggctaggaaattgatggatggaggatggtgattggcacatgaatctgatcaatgaatactgattgccaactgttatcttgttacatttgtcctttgatgcattgccatcagatttttgtgcttccatctcttcaccgatgccgatgattattttattgtaccaccatccacttgttttctaaacaatcagttgataaaggctcccctgtgttttgtcaaaaaaaaaaaaaaaatcaccatagtgatgatagacaacctactgccagtaaggaaactctatgtcccttatncctagcttcagattcaatgnggttncacatgtncaatgtttt

SEQ ID NO: 4167 - DNA, 953 bp, Triticum aestivum
  Clone ID: TRIAE-23APR03-CLUSTER1459_1
gccgccagcacgcaacgcaacgcaagtcgtcatcgcacgggacgagacgagtcgaggtccaagtcgctcgagcgcaagcccgccgtctctctcgcgtccgcccctgctccgaccttccagaagcttccgggagccgtccatggccaccgcgcccgcgccgaccgcagccgcccccgcgcccgccgccgccgccgcggccgccccgtccgcgtcggtgccgcgcgggcaggtggatctggtcgacttcatcgactggaccggcgtcgagtgcctcaaccaggaccccgcccacggcatcgccaacgccctcaagcagggttacagggaggatgaggggctgcacctcgccagcgactcggacgagcagctgctcatctacatccccttcatgcaggtcatcaagctgcattccgcgctcttcaaaggccccgaggaagaaggcccaaagacagttaaactcttctccaacagagagcatatgggtttcagcaacgtcaatgacttccctccaagtgacagtgttgacctgtcatccagccatttactggaaagtaagcctgtcacgctaaagtatgtgaagttccagaatgttcgcagcctgactatgtttatcgaagacaatcaaagcggagctgacatcacaaaaattcagaagatcgcgctttatggaaccactgtggacacaacaaatatgaaggacctgaagaagatagaagaacattaagcagacccatctaagatagtggtgtttcagtgggtgtaaacatttaactgttgtggttgatgctggcaactttgtgcccctattttacacatgaggtatttaagagcccagttagcctcctgtaggctgcaatttctgcgtgtgggcttgtttgacaaacgaaacgatggtccttgctgagaaaattcatatccatatcccttttcccttgaaaaaaaaaaaaaaaaaa

SEQ ID NO: 4168 - DNA, 931 bp, Triticum aestivum
  Clone ID: TRIAE-23APR03-CLUSTER14689_1
accccgctcacgtacccccctgtcccccccccccccccgcccgcattttcccccccctccggcgcacacaagccagcgcgccccccccccctcgcctgcccgccgctaggtcgacccacccggctgcggccacccagctcacacgcatctctctcacctccggcgaaaacacaccagcgcgctcctctctcccctcgcttccccgccgcaatgtcgaccgacgccgctgccgccgacatcccggtgcctcaggtggaggcgaccgccgaccccgtcgcggagaccaccgctgccgccgccgccggcgacgcgaagccggccaaggcgaccaaggccaaggccgccaagacccccaaggcgcccaaggcgaagaagccctccgccccgaggaagcccaaggccacccccgcccacccgacctacgctgagatggtgtcggaggcgatcaccacgctgaaggagagaggcgggtcgagcaccgtggccatcggcaagttcatcgaggacaagcacaaggcgcacctcccggccaacttccgcaagatcatgctgacgcagatcaagaagctcgtcgccgccggcaagctgaccaaggtcaaggcctcctacaagctcgccaaggcccccgcagcgcccaagaagcccaagaccaaggtgccagccaagaagaagccggcggcgaagaagaaggccccggccaagaagcccgccgccaagtccccagccaagaagaaggccgccgccaagcccaaggccaaggccccagccaagaccaaggccgccgccaagcccaaggcggcagcgaagcccaaggcagctgccaaggccaaggctccagccaagaccaccaaggccgccgcgaagcccaagccggctgccaagacgaaggcgcccgcccagcctcggggccgccccgccaaggtcgccaaga

SEQ ID NO: 4169 - DNA, 2941 bp, Triticum aestivum
  Clone ID: TRIAE-23APR03-CLUSTER1471_1
ctcccctcctccgctggtcgctttcgatctccggccgcctgcttctttttgcgctccgctggctttagcttctgccactctatgtcccgttcttctcctctcgcccccgttgccccagcacaggctgctgctggaggcggagccgcggctgccggcctcctcctccgttgccctgccgctcagctgcgactcacccttcactgcccatcgcccccccggacggcgaaagcgccgcctgccaagacgctgggcccgcccccggtgcttgcgcgccccgcagtttgctcctttgcacacgctgccgttgactgccataattaccccgatctccactgatcatctcatctctttcttcttggtgcctccccccctggtttttgcttctgccactccatgtctcaatcttctcctttcttttccattgcccccgcacatgctggagcaggagggcaagctgcggctgccgctctcctgctccgttgccctgccgctcagctgccacctgccattcactgcttccgtctggctaaagtgtcgcctgccaagacactgagctcgcacctggtgcttccgcgcgccacactctcctcctttgcaaacgctgacgatggctccggtgcaaactcagatgcctcgggggagcagagcggaggatccgaactgtcagagatggcaaaggcattccatatttcaccacggatggccatgtcaatctctgtggtgattgcatttgcagctctcactgttcccctggccatgcgctcactgctcttccatgggacgaccaagatgaaggtgctggcatatctgaccctcttgtcaggattctacatggcatggaacattggagccaatgatgtggcaaatgccatggggacgtcggtcggatctggggctttgactctccggcaggcagtgttgactgcagctgtgctagagttctctggtgcattccttatgggcacccatgtcaccagcaccatgcagaagggcatcctcgtcacatccgtcttccaaggaaatgattctctgctctttgctggattgctgtcctccctcgctgctgctggtacatggttgcaggttgcttcctcttatggctggcctgtgtcaactacccattgtattgttggggctatggttggttttgggctggtatatggaggggtcaatgcagttttctggagctccttggctagagtatcttcatcatggcttatttctcctctgatgggtgctgcagtctcatttcttgtttacaagtgcatacgcaggttcgtgtacagcgcaccaaatccaggtcaagctgcagctgcttctgcacctattgcagtttttactggtgtcactgcaatctcgtttgccgctttccctctcagcaagacattttccattgccgttctgcaagcattagtatgtggggcaataggagctgtctttgttagcagggcaatcaaaaaacagcttggtgatctactgtcttcggaagcagaaaagatagcaacagctgacaatacagatgttcagcaaggtggatttgacgtcgctggccctagaggagctcaactgcagattgtctacggcgtatttggctacatgcaggtcctgtcagcatgcttcatgtcattcgctcatggaggcaatgatgtctccaatgccatagggcctctggccgcagctttgtctcttcttcaaggcgtagcaagcagcgctgagatagtcataccgactgaagtccttgcttggggtggttttggaattgtcgcagggcttacaatgtggggttatagagtcatagcaacaattggcaagaaaatcaccgaattaacacccacaagggggttcgcagcagagtttgcggccgcttctgtggtcttgtttgcatctaagcttgggttgccaatatctgctacacatacacttgttggtgcagtgatgggtgtaggatttgcaagaggtctcaacagagtcagagcagagactgttcgtgaaattgtggtctcctgggtggtcacaattccagttggtgctttgctatcagtcatctatacattaatcttgaccaagattctgaaatactttatgtgagtgctttgtgagatacagttgctgttttgagaggtccagccgttgtccctaaattttttatgctgtaaaagaatgtgtaacagtgaatagatgagccagctccgggagtttccagcagagaaattgaaaagatttgtcagagaaaataatcattttcctggcaacaaaacatgattaggataaagggtttacggtaaataatcatgtttgagactcccagcttcttcatcttttatctctaatgtaccacctatatgactatatctttatattttcttccagaaggtggaatatttcaatttcttgtagagatatgattaattgatcatacataatagacaatggttcgtctcactacccttgtaattatgccacattgacgattttgctgtttcagcgccactataaatgtgaatctttttctttgaaaaaaaaaaaaaaaagaaaaaaaaaaaaaaaagcttatcgatacgctggcatatctgaccctcttgtcaggattctacatggcatggaacattggagcgaatgatgtggcaaatgccatggggacgtcggtagggtctggtgctttgactctccggcaggcggtgctgactgcagctgtgctagagttctctggcgcattccttatgggcacccatgtcaccagcaccatgcagaagggcatcctcgtcacatctgtcttccaaggaaatgattctctgctctttgctggattgctgtcctccctcgctgctgctggtacatggttacaggtaacattccatcacagataattcttttgaggtttgttataccatgtcaatcaaatgacgaggtcccttggttccaccggacgcgtgggcggacg

SEQ ID NO: 4170 - DNA, 1757 bp, Triticum aestivum
  Clone ID: TRIAE-23APR03-CLUSTER14763_1
tttttttttttttttttggggctggcggaaatcgcttatccctctaacgtctgttaacagtgtgcgggctgcgctcgacttttgaatctccagctgcatcgaggtgcctcggagctgccaagagcgtgcatgtttgtcgttgtcagtctttgccgccttcagcggcctcctgctacggcgggcggcggccggcggcagcccgcaccgggccctgcggggggtgggggaaatcccttaaacggattataaaaggttacatatggaggacttcccttgggtttacaatctcaagctgcatggacgttgcaaagagcgtgcacggttacgaatgtcagtctttgccagtaaaaatggacttcagctacagctttatatgtacggcggcagcttgcagcagttcgtacagagcccagagagcgagccctatcaccgtatccctgaccaggcccttgacgacggagctagcccaggtctccgacgattccctgccgacgaggtcgcggaacctcaggtccccctggtcagagatcagcgcgtacaccacgccgttcatatgccccttcccgatgaccccaaccaccgtcttgctcttgttcacggccttgctcctctttagggaccaagccatgaacatgtcgcgctcatgtacgagaggctgtagcagtgaaggatatgagctgctaagcttctcgtacagctcgtacgggctaaccgcagctttctcatcctgcggcatatcagtcgttgaagtgattccacggaataatgagattacgagtttagtcttttcatcccagctgagggatttcaaagctcgttcaagagttatttcaatagggcgatccccaagaacgagctgagcgccaatatcttcagacaccctcctagctgctcggaactcctccccaaacggccggttcgcgccagaagaaatcttggacgaaaaaacagctaggagcaaacgcagagcaagagcactctgtccacccaggttgatgctccggttgacggctccgaagaacttggcgccgccgagcgagaacatgttggatttcaacagcggctcgccggaggcgtcgtcggaagcgtacatgatcccggctctgctccggcagagttcgacgacgacgttgtcggggcggacggcacggagcacgcgctcgacctcgtcggcggactccgcggagaggtgcgaggtcccgaggatccacacgtcctcgggctcagcgaagtccggcggccgccacgccggcaccggcccgaaccgccgccgcgggacgcgtaccagtgcgccggactcgaccaacccagccaacgctgggtccgccgcggctgcgctggcacgcgtgtcggcgagcgacgcggaccgatagtcgaagcacggcggcggaggcggcaggggcggccggaaggacgcggcggtggatggcgtggggcccgctgccatttcttcttctggtttgtggtgcccgcgcagacgcgcggcgcgggaggatattaggcgaaattattacctgtcctttctccctcctccccgcgtggcttccctcctcgtctcccctccctctccccccccgctctcccccctcccccccctccgccccccccgccgctccctccccccccccccccctgcttgcttttcgtccgcggggcggacccccccgccccccgccccccacccccctccccccgccccccgccgcccccccccttgaggcccgtgtccgatcgagtcctggtcaccctcgccttct

SEQ ID NO: 4171 - DNA, 896 bp, Triticum aestivum
  Clone ID: TRIAE-23APR03-CLUSTER147_22
agacagcagagctcgatccagagagagagagaaaagagcgagagtgataactgagagaggtctcgcgcgctcggcgatggcaaagtcgttcctcgcgatgaagacgggcccggcggccggcgcgtcggaggcgtcgcaggcgctgctggagtcggacctgcgggagctgaccatggcggcgcggaagctcgccaaccacgccatcgtcctcggcggcggcatcggcttcatcggcaccttcctccagtggctcgccttcgccgccgctgtatatctcttggtgctggacaagaccaactggaagaccaacatgctgacgggcctcttggtcccttacattttcttcaccatgcccggtctgctcttcggcttcataaggggggagattggcagctgggttgcgttcgttttcgtcgtcctgcggctattctttccgcgccacttccctgattggctggagctgcctgggtctctgatcctcctcacggtggtcgcccccgccatcttcgcggacaccttccggggctcctggctcatcatcggcgtcggcgtgtgcctggtcatcgggtgctacctgctccacgagcacatcaaggcgtcggggggcctcaaggaggccttccagaagcccaatggctggtccaacaccatcggcatcctcctcctcttcatctacccggtctgggccgtcgtgatgtggttcctgtagaccgttcgccgctgttttgcggttcatcgtgtgatgtttgctccggcgatttggtgtcgatgaaccatgcgctcttgtacctgttgaattttgatgaactgtctcggccatgtttcgatttggtgtcacttatttgtttccttcatctgtgggtacatagccatcaataaaaacatttgctctgttg

SEQ ID NO: 4172 - DNA, 1459 bp, Triticum aestivum
  Clone ID: TRIAE-23APR03-CLUSTER147_23
aaagcccgcgctccggtcccccgaactgggcattccgctccactatctcctcaaaatccatttcctcggctggtcgtcaatcccctccgctgttctaaagccttactactcgcctcggccagtcgcctccgccaccaaaaccctaaccctagccccggagctcaggcgacgcttgcgcctccaaatggacgggggagacacgcatcgcacgccggaggacgtgttcagggatttccgcgcgcggcgggccggcatgattaaggcgctcaccaccgatgtggagaagttctaccagcagtgcgacccagagaaagagaatctatgcctgtatggtcttcccaatgaaacatgggaagtgaacttgcctgcagaggaggttcccccagaacttccagagccggcactgggaattaattttgctcgggatgggatggatgagaaagattggttgtcacttgttgcggtgcagtgatgcctggttgctagcagtagccttctactttggagcaagattcgggtttgacaaagaatccaggaagcggctttttagcatgataaacaacctccccaccatatatgaggttgtcacgggaactgcgaagaagcaggtcaaagaaaaacaccccaaaagcagcagcaagataagtaaatctggcactaagccatctcgccagccagaacccaactcaaggggtccaaagatgccaccacctccgaaggatgaggacgacagtggaggcgaggaagaagagggagaagaacatgaaaaggcattatgtggtgcgtgtaatgataactatggacaggatgaattctggatctgctgtgatgcttgtgagacatggttccacggtaagtgtgtgaagatcacccctgccaaagctgagcacatcaagcactacaaatgcccaaattgcagcagcagtagcaagagggccagagcatgatatcagattcctccmcggctcatgtytgaagatccaaggatttgacttactgtaaaracgcatgtgggacggaatgcccaatggatgtgcattcagttgttgctttgagattagtaccagctttaggggtcttgctgtgttgttatttggtgtatgtcggtgatgttytaratttacttgtagtcgtagcaactaattgtaacagcttgtatgtcttggagccttgtcagggccctgttctggactctctgtgtcctaggttcagtgatgtatcacgtcatcatgtacccttgttgtaatttgttgaagaaccgcctgttatcttagcttttacagcctagttatatttggacatgttatctagcatytaccgattgttccmctgttttagaacttggtaaatagtcgggtgtttgtcaacttkagaaattagggttgcgggtgcaatgtttaagacggtggtgcttgccmcaattgtagggtgtatttccmcmcgaaaaaaaaaaaaaaaa

SEQ ID NO: 4173 - DNA, 1611 bp, Triticum aestivum
  Clone ID: TRIAE-23APR03-CLUSTER14852_1
aaattcgccgccggccgcccgcccccagcgaccacgaccccccccccgccccccccccccccccccgccaaccgcccgatgcccccttcgaccccgacactccccccccgccgcccgcccaccgcgcccctttccggtccaactcgacggccggccctccgcgctcggcgcgggaaaagccgaaacgacgccctgtgcacattgtatctcatctcgatcatcgaatctgtaattacagatggggactctgtgattggaaagcaagagggcagtgtagaggatcatgtgacttgatggtactgccagagacacggtccacctggtttttcaagcattcacatgggaccaaggcaccttcagtttggtgaatttgccggtcgccgaggtgttgaatatggtttaagtatgccgctgtgcgaatgcatgttgacggtttgtttaggcagtgtgacaggataagttgtgcgggttttaggttggaggtgcagcgaaaagtgggccccttttctattcttcatcgtacgattgatgtgtgctgcattacagcagaagatcgacctgctatgtgttggggtttgcggtagacatgttcccccattagggtgagtttgacgaattggtcaccacttcaattgggtagaccgcatgtaccgggtttatcccgcattgagcggaattgggaggttgacgaaccactaatccgaagaaggctttctgaactgaagtaccccaaggatcccctttggctcgcagtttttccagaaggcactgattatactgagaagaaatgcatcaaaagtcaagagtatgcggcagagcatggtttgcctattctgaaaaatgtcctccttcccaagataaaaggtttcaattgctgcctgcaagagctgaggagtaacttggatgctgtttacgacatcacgatcgcatacaagcatcggctcccaacgttcatggacaacgtgtacggcgtcgacccttccgaggtccacatccacaccaagatcatccaggtctctgacataccgacagcagaggacgaagtatccagctggctgacggagaggttcagactgaaggacgagctcctgtctgattttttgacacaaggccacttccccaatgaaggaaccgaagaagacctgtccacgctcaagtgcgtcgcgaatttcgttgcggtgatcggcatgacggccttcttcatctacctgaccctgttctcgtccgtgtggttcagggtgttcgcggcgtgcagcgcctctttcctcacgtatgcgaccctgtactctgtacacgcgccccagatcgtgtgtttgccggaggccggcgcccacgccaagaaagcttgagcttggcgttgtaagctggagctggaagctgtgtatgtgtgtccgcatgcagtagaaacatgtttactgcgtatacgcagcgtgtggtgtcattcttttgtatgtgtgtatgctgagtggcatctacagttgggggtagaatttttaactccactcttgactcttttttggagcaaaatacgaagactgcattgcgaaagtggacggagccaaaatcggtcgccactatcttttgtctaaaaaaaaaaaaaaaaaaaaaaaa

SEQ ID NO: 4174 - DNA, 1484 bp, Triticum aestivum
  Clone ID: TRIAE-23APR03-CLUSTER14915_1
atcattcattcattcatccatggctcccctcttcgcctcctgccacgcttcccacgcgtccctcctactcctctcccccaaccccgccgccgccgcacgtctccgcgtcggtggcctccgtctctcgctgctccgcggctcccctcttcgcctcctgccacgcatcccacgcgtccctcctactcctctcccccaaccccgccgccgccgcgcgtctgcgcgtcggtggcctccgagtcaggcggccccgccgcctccgcctccccgtacgcaccgccgcgggaggcagcccactcgacgccgagatccccgaccctacagtcgacgacgacgagtggggccgcgagccgcccgcttccgcgccgggttgctcgcgccccggcgtcaccgacgagtggggcgagccgggggtggccgagcctgagcagccctccggcgccgacacccctaccaacgacgacgagtggggcggggagcccacgccgacgccgcccaaggcgaaggaggctccggttacgaaggaggacgaggggagggaggagctgaagcggtgcttggtggacacggtgtacggctccggcctgggcctcaaggcgtcctcggaggtcaggggggaggtcgtggagctcgtggcccagctcgaggctgccaatcccacgtccgcgcccgtccaggcgccagagctcgacggaaactggatactcctgtatacagcatattctgagcttctaccgattctgcttgccggggcaacaccattcaccagagttgataagatatcccaagaaattgactcgagaatcatgacgataattaatgcttcaactatttcgactccatttgcttcgttttcattcagcgcaactgcttcttttgaagtccaaactccatcaaggatagaggtccaattcaaagaggggagcttccagcctcctgagatatcatcatcggtaaatctacctgaacagatcgccatattcgggcagaagttcagcctggggactgttaaggagctgctggagcctttgcagcgagcatttgctagcattgcagggtccatctctgggcagccacccctcaaggtaccgattcctggggacaacaaggccaagtcgtggcttttgacaacctacctggacaaagacttgaggatttcaaaaggcgatggaggcggcgtgtttattcttgccaaagaggggagccctttactagattaactgtacatgtgtaataggtgtcattattcatatctgcaaggttgaaaaccacagctacaagcctacaacggggcattcttctccctctttgatacacaattttctggtggttttctagagtctggcagaatcaactaaatattgtcagtatgcagtctccatacacttttttctccctggtaactagtgtacatcttttgtattattaaaaaggaatgtgcacattacttcatcataagagtaaaaacaaaaaaaaaaaaaaaaaaa

SEQ ID NO: 4175 - DNA, 1707 bp, Triticum aestivum
  unsure (1)..(1707): unsure at all n locations
  Clone ID: TRIAE-23APR03-CLUSTER15163_1
ttcgcccgcaaggccaggccccctacctccattgacaatttcctccgcctcctccccccacctccaccacccccgcccccgccgcgccgcgccgcggggctcacctccggcgcgccctcccccgatggccgcgcaggcgatccaccagttcgccgagtgcatcacctgccacgcctggagccccgaccactccatgattgccttttgtccaaataccacagaagtacacatttataagtttttcacagacaagtgggagaaacttcatgttcttgcaaagcatgatcagattgtgtctggaatagactggagtagatcttccaacaaaattgtgactgtttcacatgatagaaattcatatgtttggacacaagaaggacaagattgggtacctacgcttgttattctcaagctaaaccgtgcagctctatgtgtccagtggagtccaaaagaaaataagtttgctgtgggaagtggtgctaagtctgtatccatttgctactacgaacaagagaacaactggtggattagcaaggttattaggaagaagcatgaatcttctgttactagtgtcgcgtggcatccaaacaatatacatcttgcaacaacttcctactgatggtaaattgcagagtgttctccactatcatcaagggtgtagatacaagggggacctcctcctggtgcttgccgggttatccgtgcctctaagacagccggtacacattccaaatgctttagctgtctcatactttctctctttctgattaggggaccacaagcaggtgcctcagtggattggaaattcggagagcaaattgctcaacttgatctatcacctacatgggcatttggtgtaaggtggtcgccaagtggaaaaacattggcctatgcagggcacagttccatgatttatttcgttgatgacgttgaagggtctcctgctgcgcaaaatttggcactgcgtgatctgcctctccgtgatgtggattctttttgtttctgaaaagatggcgattggtgttggatttgactgcaatcctttgatctttgctgcagatgagactggactttggagttttgtcagatatttggatgaaaggaaagttactccatcaacttcaaaagcctcacagctcccagaggcccttgggaagttgtacggccaatcgaggcaagggtcgagcagcgacactgtcgaaccatcgaagcctcgaggcggcgctcacgagaactgcataacttgcatcgtgccgttgagaaaagggagcgagagtattgtcaaacggttcagcacatcagggctggacggcaagattgtggtatgggatctggaaaatcacatcaccattccaaaatagaccctcggcggatggcgggcgggccctgcgggttttggaagatccagggccagggcaaggtagattgcttattttttgttgtacctgtacacaaaaaccattcctttagccagctctttagcgtagggggccatcactactataagttggctttcatatttttggaaccagttccgtccttctctctgaatttcatcatctgtaacacctgtataatcctagttaggatgccataattccatacccccccccttctctcttctccgtgttcgattttcgctccatataaaaaaccccgggtggttcggaattcgcccgnaatgaatgaaaaaaaaaaaaaaaaaaa

SEQ ID NO: 4176 - DNA, 899 bp, Triticum aestivum
  Clone ID: TRIAE-23APR03-CLUSTER1523_2
gagccatactaaatcacttggttcccatctagccaaatattcattcagaggacagaagaactttctgtgagggctcgggaaacataacattcccagaattagaatgcatgacgaatacctgtgtaaatgaatatcctgttgatgctgttatatgtccagttgaaacaccgagaaattttacatttgtgatgacaagcagatttaacacactttaaaaaggaaatgaaaacagaacaccgttcgggctaacaaatggggacacagataattcttcctgaaacaactgcatatttgaatagtttgtgccgccttgctggctttgtagtcactgcaggcccctgccaacaatcccataactcggaaatatccattatttgcctgtttccttaacatcatctgaatctgagtcactagcattgtatcctgggcgtttatggctaactttccagactgtagaccgatatcttgatgctttctccatccaaattctagacttgtgctcgttcttgttgacgccgtagccgctgcggtacatctggccgacgaggacctgcatggcggcgtcgccggcgcgcgcctccttgagcgtgtcctggaaccaccgcttcgtgcagtccaaaaccacctccgcgagcggcacccggtcgtcctcctgcatcccgcatgccgccgccacatcccgcacctcggcccgtccagagctagccccggcggcggcgccggggccggcgttcctgggagtatccagcggagcggtcgggggcttcgctgccttgctagcggcgggggagaagcggacgtaggggcggacagcggcggctagggcggcggctgggaagcgcctgcccatgcaaagctggggtttcaggggaggaggggggagaatagatgggagcgga

SEQ ID NO: 4177 - DNA, 1737 bp, Triticum aestivum
  unsure (1)..(1737): unsure at all n locations
  Clone ID: TRIAE-23APR03-CLUSTER15305_1
ctcgccgccccgactcgacccgacgcgactcccctcccaagcccaaatccccaaatcgcccctaaaaccctagccgccgccgccatggccgccccccccaccgcctccgcctccggctccgccgccgcggcggcggcggccccctcggcggccaacgacgggcgcacgctctccgtggtcaccaagcggctccgcgcgcggcgcaggaagcagaaccgcatcgcgcagatggaggaggccgtcgcggccggcaagacggctaaaccaggagcagaaggaggtgatgcgctccaagcccaccctcgccgccgtcggtcgacgagctcgagcgccgccgcgcgcccctcgccgtcgccgtcgccagagggaggtcgccgtcgcccccggcccccgccccggccccggagccgtaccggctccgattcctccatcccggacctcctcggcgctcgtctacttcggcgccctacttcgacgctcaagccgcaagagcgacttcatcgccacgatggtcgcgcgcgagcatgagcggagcagctgcatcacctatgactgcgtcggggacggcaccgtggacctgctcctggggggcgaccgggacctcgtgtccgctgtggccgcccttgccgccgctcgccctggttctgcggtgggcgtctcccaccgcgacccgctccaggcctgtgcccaccatgcccgcttatggctcgcccgcgctgacgagcccatccatcctggctcctctgttacttatgctgcggtgagggctaagctggacaggatcatggcatcagactactacacagcagctgcagttggaggagggagctatggagctgaaggtgtgcaggcacaggagagtatgactgcctcaccagaggcatcagcagtggaggagaacctagctgctgaaggtcacaaggaggagaaggaagactcccatgctacggaaatttacaatgatcatcagtctgactcagcagacgtgcaaaatgtggatcgtgaagcccccgtgaaccctcccgaggaatatccctctgttcaggcagagcaggagaagtttgacatggaagagcaagatgagagggatgctgagccaaaagagcagcagttccagcaccctaggcggtctcatcagaaccagcggggaggtggtcgtggcaggaggggggcctaccccaatggccgtggcgggcgtggaggcggccgcggcatgggcggcggataccagaatgggcgtggataccagggtgggggtggcggataccagggaggcggtggcgagtaccagaatggccggggtggtggtggcggttactacaacaacaacaacgaagaagggtactaccagccgaggaacttcaacaccaggggcaggggtggtcggtctggcggcggcaactctcactacagcaaccagggaggaggcggcgcgcagggaggtggccacgcgtacgccgagagggttgaggcaaatgcttagttgttgaattattttgcttgggtggaggtcacgagagggagagagtctgggagccattttgttattatagaactaacttagcctgttattacgtcgcaatccgtcccccatctgtgagttggttttgttggtccaatccaatgactgcatatggttggtcgataaatgtggaatctttgtcgaaagtagcttcaaaaaaaaaaaataatacgctatcggcgtccccccccccgcgtaaaaannnannaaaaaaa

SEQ ID NO: 4178 - DNA, 1224 bp, Triticum aestivum
  Clone ID: TRIAE-23APR03-CLUSTER153_4
acccaccacaacaccatcatcgcatcccattagcatcgccagtttccttggagagaagtagccagaaacagcagcgccatggccggcatcatgcacaagatcgaggagaagctccacatgggcggcggcagcgacgagcacaagaaggacgaggagcacaagaagaaggacggggagcacaagaaggacggcgagtgctaagaccgtgcagggaaatcggaaggtggtgtttgggctgagggatgcgtttgttaagctcgaaaagggattggagctgtctggtgttaagatctctgagccagagtttcagggcactcaggtgccaatggtggcagtggtagaaaatggcatggatttggatgaggcaaaggtggaaaagaagaggaagaagaagaaggcaaagagggctgcattagttgaaggtggggaggaggaggaggtcaaggctctgaagcaagagaagaaggtgaagaaagacaagaacaagaaggagaaaaaagaaaagaagaagaaaaataaggttgaggatagtgatggaggggatagcagtgagcagagtatagatgccacatcagaggaccagcagatgggcgatgacactgatgccattacatttgatgaggctttgatgtccaatcttcaaaagcagtttgagaaggctgccgcagaagccgggatgccggtgacaccagttactgctaaagtggcaaagaagaggaagcgctcaaaatcttctgataggtcatcagaagtttctggaggtgtgggtagcgaaggtaatgttcctgctcaggatggagataagagtggtaagaaagtgaggttctcaatgaagagtaatctagtttggaaccctcctactcctttaccaccacagtgcttgaggctcccaccatctgctactccaagagggagtgcactaaaaagtggagtccggcctgggcctataaaggaaagctccacgccggtgaagaaggccaaggcaaaagcaaagtctgcaaagaagttgttgaagaagagcccttcctctgctgtgaagcgcttgcggaagttgcaaaccttctccgcgtgaaactcttgaatgcatgatggcatgtaggccgtaccattctgccttttaaattgtgctctcatcgtaacttgattcttctccattaggtagtcttatacactgttggcttgctgctacctttgcattatttatggattgcttaattacccccc

SEQ ID NO: 4179 - DNA, 1207 bp, Triticum aestivum
  Clone ID: TRIAE-23APR03-CLUSTER1541_3
aaatcccttctcaccctcactccctggctcaacgccgccacgctccccgatctctggccgccgcctgctccggcgattggatccgggtccctctccccccgaaaccaccgccgccgagccccgagcgcagcgacgcccccgctccgtcctagtatctcccgccgccgagcccagtcaggccgtcagaccaactccggtccgatccttcgcgccacagacgccgacgacgctgccgcccccgatccacctcttccccgagccctaacagctgcagcacttcgacgccgacaccacctctgcccgctttccgtcaagctcggataggaaaacaaggatttcgtccctgccgttgccagcggcctctaccagacctcatcctcctccgtccaggagacggcgatggcggcgagggcactcgggctcgctggccgagcgctcctgcgaccggtcgcctcaccaggcacccaacggctgctgtcgactgacaagaactcactgcagggccttacgaacggcgatccggtgagccgcctcatgcaaacacggaagcagaatgacagcatttaccgtcgctttgctgaaaatgatttcacaggcggcggtagcaggtctggccgattaaacatggaaataacgtggacagcggctctgcgagtaaagatagatgttctacgcatcacacccaaggagaaaaagacctttgtgaccgttaaggacgtcaaggagaacaggaaggcccgggcttctgctggctgcttggaggatcgaaaagggcggtctcgtcttgctcggtatgccggtgaagcaacaggggaacacatggggcgatccgccagcaagattggcctcaaatcaattgtcgtgaaagtgaaaggaagttcctttttcaggaagaagaagaaagtgctcttgagctttgcagccggttcccgtggtgcaagagtgaggagcccttctcctaaataaggttaacaatagacctgcaggaacaagcaagaagagtgaaaatcaatatcctgcccgaaggagaagcaaaaaagatcgactggttccctaataacatcatgagcctacaagtatttatgattattagccagtcttacatcggctcttgtataagacataaccattttgtcatttcctgtaatcctgctgaattgatggctttgttttgatacgacatggttgcagttccctctttctgtgg

SEQ ID NO: 4180 - DNA, 1549 bp, Triticum aestivum
  Clone ID: TRIAE-23APR03-CLUSTER15499_1
taggcacccccgagcgagaaaaaagctgagagcagttcgtcaataaataagttctccagaaaccccgaaaccccgcgaccaccgcctcgccgcttacacgaccgagtgcgccgacggacgacacctccactaccgcctgtcgcccctcgccgcgcgcgaccgacgcccaccgcgttacgatggtgaccgacgcggccgcgctggcggtcgtgaaggccgcgcgccccgtcttccgcggcgcccacgacggcgtggcgttcgccgcaaacgccgccttcctcgccgccggatactccttatgcgccgtcggccctgccgcgctcgccgaccccctccccgcagttgacgaggaggtgggaattgatgggtggaacactatggacaattgctatgcctttctgtactccaaggaggaggagggcaagaagaagcgcattttagtgaaatgtctagtgattgatgacttccttgctattgatgcgctggatcttgaggcacaacacaaggaaccctgcaatgttcagataaatgtgaaggatttcttctctgaagaacagcccaagaattataaggatatgtacaagaattttgcgggcttcatcaatacccttaactcaagcttgttagttgaattggatggtaagaatgctgctgctgctgccgcccagaagcctgatcttgagggcagttcatcaataaacagttctgaaaatgttctgccggatacaaggactactgaacctgctggcctgatatatcctccagtagctccgtttggtcatgatgacaccttccctgctcctggtgctggcttctaccctcacagtggtgggccgggtggtagtatgcacgttggcccaaatgatccacgcttctttccttcaaatccttttcctgctccttttggtggccctgggagtgttccacctggtgtccgttacgatccaatcggcccgcccgatgttccaggatttgaaccatctcgctttgtgaggcgttcgaggcatccaggtggaagcactcacccagacctcgagttcttccagcaaggcccagacttctgagactcggcttcatgccacctgcaccctgcgctgaatgactctgctttgtttgtgctgcgctcatgaactttttttcagtagaccctgcttgggaagttggaaacatgaatgtaaacttttgtatttaccttccagacaatgctttgtgacggttgactgtacaattgtatatagacctgtcttcgtatccctctgtgcttcttacctaaactattggtgcgactaccaacatctgcaatgtctgcctcgtagttatccagtagccccaaaatttgctcgcagtttctccgtatgcagtatcaccgcaaaatgttcctctgtatctacgggcgctccaagcgaaatcttgttttaatatatataaaaaaaaaaaaaaaagtttaaacacaataaagtcccaacaggaggggggaaaggtaccattcgcccctaatagtgagtcgtataccgcgctccacttgggcgtgtttttaaaaaagtcggta

SEQ ID NO: 4181 - DNA, 1853 bp, Triticum aestivum
  unsure (1)..(1853): unsure at all n locations
  Clone ID: TRIAE-23APR03-CLUSTER15513_1
gaccgctccttttgcgccgccaccgcngcatccgcgaaagcctcccccccgcgcccgccgccgcctccgccgcagctccggggtcctagagtcccagcggcgatggcgtcctccatactctccgactgctcctccttattgtcctcccacctcgacacgactttctcgcccgaccgctccttttgcgccgccgccaccgccgcatccgcgaaaacctcgcccccactcccgccgccgtctccgccgcagctccggacccctagaatccgagcggcgatggcctcctccatactctccgactgctcctcctgcgccacctcccgcctcctccccctccgccgcgccctccacccgccgccgccccgcttccgcccctcccccgccccggcgccgttgccgaggaggcctctcctcgccgccgccgcctcgctcccgctcctcccccgcgcgcgccgcatggccgcgctcgccgccgcctcttccgccgactcagccactgttttggctgatgcatctgccaagatcatcgacggcaagctggtggcaaagcaaataagggaggaggtcggcgttgagatcgccaggatgaaggacacgatcggagtggtgcctgggctggcggtcatcctagtcggctcgaggaaggattcccagacatacgtgcggaacaagaagaaggcgtgcgatgcggtcggtatcaagtcgtatgaggttaatttgccagaggacgcttccgagtacgaggtcatcaagcacatagcaaccttcaacgatgatccgtcggtgcatggcatcttggttcagctgcccttacctcgccatatgaacgacgagaacatattgaatgctgttagtattgaaaaggacgttgatggctttcatccagtgaacattggacgacttgcaatgcaaggtcgggatccattctttgttccatgcacccctaaaggatgcatggagctgctacacagatctggagttgaaataaaagggaagagagctgttgtaattggaaggagcaatattgtggggacgcctgctgctttactcttacaaaaagcaaatgcaacagtgagtattgtacattcaaaaaccaagaaccccgaggaaataacaagacaagcagatattataatcgcggctgttggagttgctaacctggtcagagggagttggataaagcctggagctgctattattgatgttggcatcaatccggttgatgatccagcaagccctcgaggttaccggctagttggagatgtctgctttgaggaggcctccaaggttgcaggagccatcacaccagttcccggcggtgtcgggccaatgacaattgcgatgcttctgtcgaacacactggattcagctaaaagaatccacaagttcaagtaaccggacaaccctgtactcagaacttgggagagcgcttaacctttggtttagtctaccaggcaaggtattgccaactgtttgatgcgccttttgttggaccagaaaaggtcaacaagagccgtgaaataaatttttgacaggggtgagaaatttaccccggcttcaaactgtaccgtattcgctaatgttccatgaaatcccagttcaatctgtggcacaacttaggtcaattgagatctcagttaagcttggacgaaccaaaaaaaaaaaaaaaaaagcttatcaataccctcaacctcgaggggggggccccggaccccatttccccccattagggagtggaataacgcgcgctacatggccggctgttttacaaaatttgtgacgtggaaaaacccggggctttcccaacattaaccgccttgccgaaaatcccaccttttgcccaaaggggggta

SEQ ID NO: 4182 - DNA, 1436 bp, Triticum aestivum
  unsure (1)..(1436): unsure at all n locations
  Clone ID: TRIAE-23APR03-CLUSTER1557_1
cttcctcctctcgaaatcgaaggccgcgaaaagaccagagtgccccgcccctcatccccgaagtctccaaacccctcgtcggaagaggtgagcttagcagccttcacgatggcggtcggcggcgctctgggagaccaggaagccggcgatctcagcgccgacgggccccacaccgcccgcctgattaactgagcagtgcttcacgccgccgcgctgcgcctctcggggtcgagggccgccaaaagaccagagcgctccccgcctcctgccccaggagtccacaaccccccgcgtggagaggggcgcccgcgctgacgatcgcggtggcggaggtctaggtgacgcagaagcaggcgctcgtaagcgtacacgccactggcccgaacggcatgcagcaccgcaccgcgcgggccgccgccggcgcggtgtaccgtcggatcggggggcttttcgccgcccgccgcctcccccggccgcggccggtcgcggagcccaaggcggagccgctcccgccgcccgtgcagctgggcgaggtcgacgaggaggagcccgggagtacgacgcctcgcgaccccaggaaaacccctcctcatggccatcaagggtcacgtgtctatgacgtcacgcagagcacgaatgttctaccgggacctggtggaccttatgccctattcgctggcaaagacgccagcacgagctctagccaaggatgtctttgcaggcccccaggacctgaacggtgatacctctggcctcgggccgtttgagctcgatcacactgcaagactgggaatacaagttcatggagcaaatatgtgaaggtcggaaccatcaagaaggcagctcccggcagaagacggcaccacaagcacatccccagaaacaaatgaaacagtcaccgccgaggcagagaccgagaaggcacccgccacggagcacaagcctgagggaggtgagctcggaggaggtaaaagagaaggaagccacagccgacgcagtcagcgccgagagctagagcaatcccatacccccttgtggtggcaataaatctgtgtcattcagtatgtaatctgtaccagcacgttggacatggggatatagtgctggtgcgctgttattgttagtcggtaaaatggagtgctggatattactggggtagcggggtgtgcgtgtgcctcccctttgttaagccgtcggttgatacttttgggtgaataatttagctgttgtctaaaggaaaaaaaaaaaaataaaaaaaaaaaaaaatattactctaaatagttactggggtgcgtttgcaaatcccccctcaaatcaaatcaaacccgctgtcctacatcctantggacggcgtgctcatcgacggcgangctaagcagacgccttcccgctggccgtgactccngtacacatggatcagtctangacgggcgatg

SEQ ID NO: 4183 - DNA, 1790 bp, Triticum aestivum
  unsure (1)..(1790): unsure at all n locations
  Clone ID: TRIAE-23APR03-CLUSTER15669_1
ggggatccgtccgggatcacgtggaagcagggctttttctgttcgcagccttttcccctcctgcgaaggcgcagttttgtctggcatgcctgttcttttttggctttcccttcctgcagtgcaaacaccagctattagccttttggggtgaaccgaatatctcatcggtgcagattcacttgaacgaatggctcagatttgttttgttttttttttttttttggcaggcaaagcatcatgtgataaatttttgaatgaaacgaatttgtcatcggagcaggttcacatgaatgaatggctcagatttgtttgcatgcctgtattatttttgcacctcaattgccaaatctaacaatttgaccaagctggaaaggaaaatctctatcttgtacatatatgataataagttgggaaaatgcctcgtcctgtagtatggtgacaccaagctggagaggaacgatggtgattaggttgtgccgtcctctggtccttttggaagtgtgtttggctgcttcaagggttctctggctaacgcgccgcgctaatcatccaatgagaatccctcggcaggatcaaactttgcacccaggctgctcagtttagcatgagcctccgcatagtcattaaagaatgcttcttcgtctgctgcatatttctctgcatagaccttgaatgctgggtcctcaaataatgcagcatctgtaggcaacacaagaagatcctgatctcttttctcttttatctccttgaagtaactgttatcaaacttcagccattcagctgtccatgattgtccaccaggtgcaccaggaccatttttagtatattttgtttcaggtttcccccagccactccgttcgggcctagaccttccaagtgtatgtgccccagacaaagcaacgatttccttgtcatcaaggcccattctgtagaataccagcctcaagtggtcagcaggagcactcgggccagcatcaggaagcttcccttcaggtggacactgctcaggtcctgtgacatcaacccgtccatatttcattggaatctttgggccaccagcttcctcaattgctgtagcacttgccaactggaataaatccgcataagttatactcgggtatttgtccttgataggttgcacaagctttagagcatttaccaaaccggcattggctccatgcttcagttcaacgtcaaatcttaaacttccattagccccacctcgttctggccagtccttaatatttttgtcatatgtgccagaatcatgccaacccaaacgaaccaggatggggtggcagtgggttgtgttgagcagctccctgatgtcctcgcgcgcggccttcagctgtgccgcgtccgacgccgctgctatgcacctcaccgatcgccccctccccgccgacttggccttctgggagggccgagacgacgcggcgcggaggctgacgaggcggagagccggggaggacgaggatgaggaggggaagaaggcagagctggatggcccggcgcggcggccgaccgggaagcggccggacggagcggcggcgcggagggtggcggctgcggcgagacgctcggccatgctgatgggtggtgggttggtgagagtaaaccgtagaccgtggccctttggaatgagggaggagctgcggctggttgactgctttgagagggagggcttgttttgtttttttttttttttttttttttttttttttttttttttttttttcagantatagatagtctttaagcattagatagaaaagcgggtatagatagaa

SEQ ID NO: 4184 - DNA, 2020 bp, Triticum aestivum
  Clone ID: TRIAE-23APR03-CLUSTER156_52
cggcgctacctgctcctcctccccgatccgtctgattccttccctcccggctcgcgtcgcctgccgtcgtacccggagcaggggattcgcgtgggcgccgacgaggcggaccggtcgccggcagccatggtcgggcggagctccctcccggatggggccctcttcctcggactggacagctccactcagtctgtgaaagctactgtgctcagcaatgagttaataatagtcgcttctgaaactgttaattttgactccgaattaccgcactacaaaaccgagggtggggtctacagagatcctacagatgacggccgtatatattcaccaaccataatgtgggttgaggctttggaactgcttcttgagaaactaaaaccaaagatcaacttcagtaaggttgtggctgttycagggagtgggcaacaacatggcagcgtttattggaagaagggtagtcaagctgtactgtcttccctggatcctggtaagagcttggtatcccagcttaaggatgccttttctaccatggactcaccgatatggatggacagtagcactaccaagcaatgcagagaagtagaaaatgctgtcggaggagcattggagttatctaagctgacagggtctcgtgcctatgagagattcactgggccccagatacggaagatctaccaaacagcaccccatatttatgaaaataccgagagaatatctttggtgagctcatttatggcatctatccttgttggatgctatgcaagtattgatgaaactgatggtgctgggatgaacttgatggatataaacaagaggacctggtcaaaagctgttttagaggcaactgctcctgatcttgaacagaagctgggaaatctggcaccggcatgtgcagctgcaggtcggatttcttcatattttgtagaaaggcatcagtttgacaagaactgtttcgttattcagtggtcaggtgacaatcccaatagccttgcaggtttaacactgaatacacctggcgatcttgctatcagccttggtaccagtgacacggtttttgggattactgccgaagctaaaccaagccttgaaggccatgtttttcccaaccctgttgaaccagatggttacatggtgatgctatgttacaaaaatggctcattgacccgggaagatgtgcggaatcagtgcgcagaaaaatcatgggatattttcaacaactatctagagaaaacaccccctctgaatggtggtaggttaggattctactacaaagaccatgaaatcctgcctcctcttccagttggtttccaccgatacattgtcgagaatttcagtgacgcctcatctgacaatctgaaggagtgtgaggtgcaagaatttgatccagaatctgaagttcgtgccatcgtcgagggccagatgttgtcgatgagaggtcatgccgagcggtttggcatgcccaacccaccaaagcggatcatagcaaccggcggagcatcctccaatgagagcatcctcaagttgatcgcgaaaatctttggctgccccgtcttcacagttgagagacccgattcggcttcgctgggcgcagccctgagagccgcccacgggtggctgtgcaaggaggaaggaggctttgttcccatctcccggatgtatacgggcaacctggagaagacctcgctcggcgcaaagctggcggtgccggcgccgggggatgagggcagggagctcctgaagaagtacaccgtgctcatgaagaagaggatggagatcgagagacgcctggtggagaagatcgggcgtgcgtagatacactataggacatatcatatggcgctggggccatatgagcatagggattataggaaatataataataaagtcattggatcaactgttgacgctcgctggtgtcgtgcgcgtcagccgtgaagaatgtgccgcggtcctgtgaacgaataatttgtgatgcattcgttatgaaaaaactgccacatgtttctacaaaaaaaaaaaa

SEQ ID NO: 4185 - DNA, 1576 bp, Triticum aestivum
  Clone ID: TRIAE-23APR03-CLUSTER156_54
ctctagtggtgagyaggagagcccgaccactgtccgccgctcgcgttgctcccgtgcgagcgacacgggcggaacccagaaacctagcgcccccaccgcgagatccacccctcctctcccgccgccgccggaggaagctgcagggcgaagccgctgcagccgacggcggcggcgggggccttgctcgcgtcgtgggatggccctggtcacggtcgtgcctccctcggtgaccgcggcggcggatttggcaagggcgctcggattcgactcgtccggctccggtggcctgcctcatcgtcgacatgaaggtgccgttgctcgagcgcggcccatggtctgctaggtggtggaggggcgctcgggggtggcgctggcgcccagatccacctcgtccttctcaggtgctaccggaagtgatcgaaggccttcagtatgggcaatctgtgctgctgtgttcaagttgaccagtctaccgtggccatcagggagcagtttgggaagtttgacagtgtgcttgagccaggatgccactgcctgccttggatctttgggaagcgtgtagttggccatctcacactgaggttgcagcagctggatgtgcggtgtgaaactaagacaaaggacaatgtgtttgtcactgttgttgcatcgattcagtaccgacctctggctggcaaagaaagtgatgcatactacaaactaaccaacacaagatcccagattcaagcctatgtctttgatgtgatcagggcaagtgttccaaagctcaacctggatgatgctttcgtgcagaagaacgatatagcaatggctgtggaggatgaacttgaaaaggctatgtcggcatatggctttgagatcgtgcagaccctcattgtcgacatcgagccagatgcgcatgtcaagcaggcgatgaatgagatcaatgcagctgcaaggatgagggtggctgcaaacgagaaggcggaggctgagaagattgtccagatcaagcgtgccgagggtgaagcagaggccaagtacctgtctggcctcggtatcgcccgccagcgccaggccattgtggatggcctgagggacagcgtcctgggcttctcagtcaatgtgcctggcaccactgcaaaggacgtgatggacatggtgctgatcacccagtactttgatactatgaaagaggtcggcgcgtcctccaagtcctcggcggtgttcatcccccatggccctggtgcggtgcgtgacatcgccacgcagatccgcgacggtcttcttcagggccagtctgcctctgacaactaagcagtttgcttcgccggcatgaactttgaagctggtggtggtttgtggtttgctagctattgcctacagtactgtttaatatgatgcgtgccgtatgattttgacttatatggaaccatatgtggatcttggcttaggtcgatgtgcggtaacaaaacctttaacctattgggaatgcaggacgatataagtgtgttttgaaatgctggtggtgaacttgatctaatgcttttgcctgccttttagtgctgtcagtttcatgtaaaatgcggtttaaggt

SEQ ID NO: 4186 - DNA, 2112 bp, Triticum aestivum
  Clone ID: TRIAE-23APR03-CLUSTER156_76
gtttttttgtttgttggtcgatcagtccacttcagcgctacctgctctccctccccgatccgtctgattcctcccctcccggctcgcgtcgcctgccgtcgtgcccggagcagcaggggatttccgtgggtgccgacgaggcggaccggtcgccggcagccatggtcgggcggagctccctcccggatggcgccctcttcctcggactggacagctccactcagtctgtgaaagctactgtgctcagcaatgagttaataatagtcgcttctgaaactgttaattttgactccgagttaccgcactacaaaaccgagggtggggtctacagagatcctacagatgacggccgtatatattcaccaaccataatgtgggtggaggccttggaactgcttcttgagaaactaaaaccaaagatcaacttcagtaaggttgtggccgtttcagggagtgggcaacagcatggcagcgtttattggaagaagggtagtcaagctgtgctgtcttccctggatcctggtaagagcttggtatctcagcttaaggatgccttttctaccatggactcgccaatatggatggacagtagcaccaccaagcaatgcagagaaatagaaaatgctgtcggaggagcattggagttatctaagctgacagggtctcgtgcctatgagagattcaccgggccccagatacggaagatctaccaaacagcaccccatatttatgaaaataccgagagaatatctttggtgagctcattcatggcatctatccttgctggatgctatgcaagtattgatgaaactgatggtgctgggatgaacttgatggatataaaccagaggacgtggtcaaaagctgttttagaggcaactgctcctgatcttgaacagaagctgggaaatctggcaccggcatatgcagctgcaggtcggatttcttcatattttgtagaaaggcatcagtttgacaagaactgtttggttattcagtggtcaggtgacaatcccaatagccttgcaggtttaacactgaatacacctggcgatcttgcaatcagccttggtactagtgacacagtttttgggattactgccgaagctaaaccaagccttgaaggccatgtttttcccaaccctgttgaaccggatggttacatggtgatgctatgttacaaaaatggttcattgacccgggaagatgtgcggaatcagtgcgcagaaaaatcgtgggatgttttcaacaactatatagggaaaacaccccctctgaatgatgggaagttaggattctactacaaagaccatgaaatcctgcctcctcttccagttggtttccaccgatacattgtcaagaattttaatgacgcctcatctgacaatctgacggagcatgaggtgcaagaattcgatccacgatctgaggtccgtgccatcgtcgagggccagatgttgtcgatgcgagggcatgccgagcggtttggcatgcccaacccaccaaagcggatcatagcaaccggtggggcatcctccaatgagagcatcctcaagttgatcgcgcaaatctttggctgccccgtcttcacagttgagagacccgattcggcttcgctggggcgcagccctgagagctgcccacgggtggctgtgcaaggaggaaggaggctttgttcccatttcccggatgtacacgggcaacctggagaagacctcgctgggcgcaaagctggcggtgccggcgccgggggaggagggcagggagctcctgaagaagtacacgctgctcatgaagaagaggatggagatcgagagacgcctggtggagaagattgggcgtgcgtagagatatactaggacatatcatatggcgctggggcccatttgaggcatagggattataggaaacatataataaagtcattggatcaactgttaatgctcgcttggtgtcgtgcgcgtcagccgtgaagaatgtgccgtggtcctgtgaacggataatttgtgatgcattcgttatgaaaaactgtcacatgtttttcccaaaaaaaaaaaaaaaaaaaaaaaaaaaaaaaaaaactcgagactagacctgcccgggcggccgctc

SEQ ID NO: 4187 - DNA, 2644 bp, Triticum aestivum
  Clone ID: TRIAE-23APR03-CLUSTER156_83
acacactgcgacatgtggatggatcaaacccaggtgggagattgccatttgaaacaggctccatctgagtcatggccgcggcggcggcggcggcgaggacaccggactgatactgctgctgctgcagcgcctgctgcatcaggagagcctgctgctgttgctgctgctgctgccggagcctctgctgctgctgctgttgctgctggctcgcgccggcgccattcatctcctctgactccgaccagatcgaaacaccgggggaccgagggcccgcgcgaaccgatcgacggatcggcggattggatccaacagatcaatagatttggtggcgaatttctcgcggcggatcgagcaggggaacggaggaagaggaggtgagatttttcctcgtattttcttttttttgatgaacaaaacaacccttttattatcaaaacaaagctggaaagttacatggcttatttgcagagttgtggtttgaggctaggcagctgtagtctacactttacactacagccgacgcacctcaggtcaaataagaagatgaacatactaaagaacggtgacacgaaacagaaccaaagaaccaaccataagaaacaaaattgtgagtatctctgatctagctataataactatatctaaaactgctgttatagcttcaatagcagcagccttgtaataggtgccgcgagatggcgacatgaaaaatcacttggccttgtgcttggggagagtgagagacacttccggtgtctgaaagcccatgaactgctgcctcctgatttccgggctcgggatcgggagccggcggccggtgggggtaggaaggcccatgtagtgcagccggggagacagcctgatcttggggctgggcccgaggtgacgggatgggcagccgattcgcgctcggagacggcaccactcttggtgacaggttgacatgctcgagagccatgctctggagatcagccgggtagtcgcggacacagccgatccgcgcgccagcagcggttgcccatttgaaggatgggagactggccatcttggtcgctgctgcctcggtctccgcgttgtcctcggcaaccatttccttgatgatgtccatctcaggcagttcaatttgcgagctgttgagggtcccatcatgttgcgcctcggtgggcttctcgtcatgttcttccatttcagtaggctcgtctgaggtcttcttgaacgatgggtactcgtcgtcgtccacggaacacctcttgacgttagctagatccacattgttctcctccaagaaactgatgaactccctgaagttctcctctgttgggaggtagtggccgctgtaaggccatattgccttaagaatgccatctttggcaaccaacctaccggcagcggttgtcgccgccccggccaggaaacttgagtgctgaaatttacccttcttcttctgcccgatgtatagtgatctagttgtgctcagcacaaatatccatttggaatcctcggtggtttctacgagaagcccgcttctcctgtacatgagcttcccttgatccacaataacctcataccttgccctctcgtttggtccgaggtacataatcaattgggaatacagcttgcttctcggacacttttggtgatgcacgtctttcccggctccgatatccagccagtagaagaagggctctgtgctggaactcgcggaccagatgtcgtagtagaggtgcaaattgtggccgtagcgatggcgcgggtcaatagcttcgagccaatgctgcagtgccagtttctgggccttctcgtctttggagagccccttgccgaccttggcaatcctcttcccagcccttgaccaccgggaagcagccgtctcctgcttggcctcgtcaaagaaggagatggacttgatgttgagtgatgcggaatcgtaagccttccaccagagctcctccacgacaatggcgcagtcggcgaggttcctccgggtccggtggcccttgaagagcttctggaccttggtggccgcgtcgtccagctcggcctgaggcctcggagagacgaagtgcgccttggacggcgacggccctcggggactgctgctgcttgcttcctgggctctggagcacgagggtcccggggcgcgcgccgttgatgcaccggctcgccgcctctggctcatcggcgccaacctccgcctcccagttcttgaagctgagcgacctctcgaagaggcctccggcgcgcgccatcctcttcttgggcgggccggcgacgaccctcggcgacggcgacctcagcggtgccccgcaggcatccctcgggctctgcagcttctgggagtggagaaaacttggctccgtgttgagcggcctcagcgaggacatctcaccgctgtggcaccccttttgtggaggagacttgttctcttgtctctgcaaccgctgtggcccagccagagggtcaacttgatgtttcaaggatggatggatggatgggcggggcgcagcagatgaagtggagcagagagcgggaaggtggaagaagcaggggaagaggcgatggatgggagttaaggttagggattgcgcagctatatactaggagtaggaggagcggcgtgggggcgggggacggggttgcggtt

SEQ ID NO: 4188 - DNA, 2746 bp, Triticum aestivum
  Clone ID: TRIAE-23APR03-CLUSTER156_88
gacacacgcagagagagcgagagacccgccgccccacccccctcacccgccgccgccccgtgcgtcctgtccgttccgtccgttaaggtttcggccgtccgccatggcgatcctcggggagctcgggaccgagatcctcatccccgtctgcggggtcgtcggcatcgtcttcgccgtcgcgcagtggttcatcgtctccaaggtcaaggtcacccccggcgccgcctccgccgccggcggcggcaagaacggctacggcgactacctcatcgaggaggaggagggcctcaacgaccacaacgtcgtcgtcaagtgcgccgagatccagaccgccatctctgaaggagcaacctcatttcttttcaccatgtaccagtatgttggtatgttcatggtcgtctttgctgcggttatcttcgtcttccttgggtcgattgagggattcagcacaaagggccagccctgcacctacagcacgggcacctgcaagccagctctctacaccgctctcttcagcactgcgtctttcttgcttggagccatcacatctctggtgtctggtttccttgggatgaagatcgccacatacgccaatgccaggacgaccctggaagcaaggaagggtgttgggaaggcatttatcaccgctttccgctctggtgcagtcatgggcttcttgttgtcatcaagtgggcttgtggttctttacatcaccatcaacgtgttcaagatgtactacggtgatgactgggaaggtctttttgagtccatcactggttatggtctcggtgggtcttccatggctctattcggaagagttggtggaggtatctacaccaaggctgctgacgtgggtgctgaccttgttggcaaagttgagaggaacattcctgaagatgacccaaggaacccagctgtgattgctgacaacgtctgtgacaatgttggtgatattgctgggatgggatcagatctctttggttcatacgcagaatcgtcctgcgctgctcttgttgttgcttctatctcatcttttggaatcaaccatgatttcactgcgatgtgctacccactgctcgtgagctctgttggcatcattgtttgcttgctcaccaccctgtttgcgactgatttctttgagatcaaggctgcaagcgaaattgaacctgctctgaagaagcagctcatcatctccactgctttaatgactatcggtgttgcggtgatcagctggttggctctcccagctaagttcaccatcttcaacttcggtgctcagaaggacgtgtccaactggggcctgttcttctgtgtggcagttggtctgtgggctggtctgattattgggtttgtgaccgaatactacactagcaatgcctacagccctgtgcaagatgttgccgattcctgcagaactggtgctgccaccaacgtcatcttcggtcttgcccttggttacaagtcagtcatcatcccaattttcgctattgctgtcagcatctacgtcagcttctctattgctgcaatgtacggcattgcaatggctgctcttggcatgcttagcacaatggcaactggtcttgctatcgatgcttatggtcccattagtgacaatgctggtggaattgctgagatggctggcatgagccacagaatccgtgagaggactgatgctcttgatgctgctggcaacacaaccgctgctattggaaagggttttgccattggatcagctgctcttgtgtccctggcactttttggtgcttttgtcagcagagctggtgtgaaggtcgtcgatgtcctatctcccaaggtgttcattggtctgattgtcggagccatgcttccgtactggttctctgccatgaccatgaagagtgttggaagtgccgctctcaagatggttgaggaggtccgcaggcagttcaacaccatccctggactgatggagggaactgccaagcccgactatgccacctgtgtaaagatctccactgatgcttccatcaaggagatgatccctccgggtgctttggtcatgctcacccccctcattgttggaaccctcttcggcgtggaaaccctgtctggtgttcttgctggtgcccttgtttctggagtgcagatcgccatctctgcttccaacaccgggcggtgcatgggacaacgcaaagaagtacattgaggccggcaacagcgagcacgcgaggtcccttgggccccaagggttcagactgccacaaggcccgccgtgatcggcgacaccatcgggagaccccctcaaggacacctcaggcccgtcgctcaacatcctcatcaagctcatggccgtcgagtccctcgtgttcgcgccctttttcgccacgtacggaggtgtgctgttcaagtacatctagaagactcgttgagcggacttagaatctacggacaccatcaccatcacgaataactctgccccgcccgcccgccgttcgtatgttgtgcgctgctgttatttttggttctcgtgtcattattccaggattgccgcagtttaccccccactttccctttggcctcttgggtgtgttacgttagtctcaccattaccggcttgtagctctatgtagtagaagagagagaccggatgtcctcggtcattattggtatgtgtctggcaaattttcctcgtcccatgatgacgacgataatgtttgaacccttgaacgatgatatcatgacgattgttgcatcaaaaaaggggggg

SEQ ID NO: 4189 - DNA, 1184 bp, Triticum aestivum
  Clone ID: TRIAE-23APR03-CLUSTER1576_3
gagaacagagccggggaggaaaacggagcgacggaggacggacggacggagacacaggagaggaaagtgacgggcaagtgctcttccttccctcgcacctggtgactggagcgtggagaggcaaaccccctcctccgggaccccgacgaacgccgacgaatccccattgtgaggcactctcggtctgcccccaaatcccgggaggggagaagaggaaggagcagatccatgggcaactgcaggagttcatctcatgcactcctagggaaaccccaagttgttccggattcagaatgggggattcaggacttcggaaagacccatgttccaggttttgaatggaggattcaggacttctcatcactgcttaagactggagctaagagcacaacatctggtgcttttcactgctctgggtataactggttcctgcaagtgattccaatgcataaagaagctggtgctggaactccatatgttgctcttcgtcttgtgccatcccaattgagcttggtgccaggtcacacggtgcacgcagtgtttgagttgtcaatatacaaccatacaaaaggaatgtactgtggatgcaaagcagctacctacaactttgacttcaagaatacctactcgaaggagcgttgcttgattcctcttcaggagctactgaaatcatctgcttttctagttgatgatagctgtgtctttgctgtggagatattgaagattgatgtctcttctcctgaaaagaaggctgttgtggttcagaagaaggctaccatagttcagaacctctttgtccagagtaagggattcatcaaagggacatacacttggaccatgaacaatttccttgaattggacttgaagcacttcatccagtctcctacatttgaagttggtggacagaaatggtacatcggcatgtatccgcgtggtgacaagtacagcacggattgcctcagcttgtacttatacccggatgtctcggatgagctccaactcgagtccaagaaggtggctgtaatgactctgtccatcctggaccaaaagaatgggaaacacttcactagaacttcaggttcaactttccttagcaagtatcagtgctactgatgtgtgattcaagcagctagtgtctgtaacctgatgatgattgcagttgatcttacttttgtggtgatcgc

SEQ ID NO: 4190 - DNA, 1824 bp, Triticum aestivum
  Clone ID: TRIAE-23APR03-CLUSTER15860_1
ttttttttttttttttattttaatgtggccccattgcaacgcacggacgttcttctagtaataactagttccgatgtttatatctggatacagttgagaagaggccaaaggactcgtcttctagtatatcttagttcccaacagcgtacaaaagagcacaccaatctttcattgacctaactatttgtatcttcgccgccacagcagcatagaaagcataagcaagtcagcagaaagcttcgcagcaagatgcctgagatatcgtccaacccattcagcttttcagctttaccagcagtgttccagttatcaaatgcacagagtatccatttcggcgttacaacatgtcatcagccatctggttacctacctacaatgtccaacctcgaaccgggtcaagcctgctcgtaccatgtcagggagctcgcgattaacagcctgcttggcaggtctcctgggcaaggcgcgatgtacgtcagcttcttcctttggatgtcaacatctgtgacatggatgaatccggcaacgttgctcgaaattatttcatcaggttccttcgcataagaaacagcaagcactgtgtggaccatatcagtgctgatgttgacagcaacaagccgagtgggatctgccacaggctctgcaccaattggtaaagctgaccgtggagcttgatgtccactaccaattctgaaaacagaaacatcactaaagttgactacatttgaatgtggtgccagatcgtttgcaatcccataaaagtactccttgatacgaaagctcctagtcttttgacgatattttgaattccttaggacaacaccctcagatttatgaagttttacgacatcgatattgggcttactttgtactgcatcttttaacatcttccagagcttctcctgtcccaataccagcactacattagccttgaagatgtcaattgcattaagaagtaactcatagccaaggccttcaacccaccccattgtgttaataaccataccggccgccctagattcagcattcccagagaactgtgtctctaatgtttgagctagctctctcatgagcgctttgtaaacatctggattaatacttggatttggatggccataaaagtatgcaagcggcatctccaaaggaatcccatcaactatatctatgggtttctctattggtgtagcagaaatacatccaggtatggttatggaaccctggccaatatctaaatccacatatgtaggcttccatcccagtttggcagcccagctaaggagcattttgcacagagtgctttttccagaatcagttggccccacaacaatcactctaggtccctgtgaggcctccaagtcgcctccctgcgctgccctcgccctcgccctccgtgcatcgagaatcgcatgcgtgttgacataaattaccatcggcgtctcgtcggacgtgtactcgctctcgctgaccccgtccagctccaccgtcgcgccgtgccacgtgaaaatggcgatcttggagcggggcgggatggtgagccagccctcgggcgggagctcggtgccgaagatctccgccgtgccggagacgaggcgcacgcggagggtcgcgtccgggagcacctccacgcggagctcgctctgcgggtcgagcttgaactgccgcggcggctgcacggccgcgggcgcgggcgcggcagcgccggtggcggccataggggggtttctggagagcgggcgagggtttggcgtcgccgagactggcgtgttggtgcggcagtggggagggggggagagtatcctgtgtttcgattagggtgttctaggt

SEQ ID NO: 4191 - DNA, 1450 bp, Triticum aestivum
  Clone ID: TRIAE-23APR03-CLUSTER15866_1
ttctcttttccccccgcacaacccctctcggaccgaactgctcatttgtttttaagtcaatgtcaacggtaatattcaccctatgctgtgcaacttgagcttgctgtctacacacgaacaagggctgctcgtcgcaaaccataatacaaaagaaatctgacaaactttccactatgttttctaacaacagctgtgcgatttcttctcaggcttactcacgcccgcgacacggcatctacagagggagggagggggttctgtaaggtgcaacaactttgactcttccaacatcctaaaaggattacaccaacatgctcgtcgcagcatcgcctaaacatccgtcagaattattgaccacacaatcatgacataggccaggaagaagaacctgacaatctggataaataaccggggattgtctctaaggcttggggcccccaccgatctacttgcgatgcgcatgccagagccgattgaagggcaggcaatgattaaaaacgacgccaagacgagtgtgacgatctggatgaagaacctggggttgtctctcaagcttggggcccccaccgatctacttgcgatgcgctgtgagagccgattgaagggcaggctctgaatgaaaacgacgccaggtcctgtgagagatgcttttagctggttgacacccccgaatacaaggactgctcttctatgtggggtagggttctgtaactgaaagttaatggtggttgtcatagccacaatacaagcacgaatcaacagttatactacttgtgagctgacacatcattgaccgagcagaggaaagaatctgcctggcaaagtagttctccaccaaagtttgctagatctataggcagtatcctcccaggaaatggcgcagaaatccccacatatccatcatcagggccaggattgaagaaaacagtgctggttatgctttttccaaatatccactgccacacgcctccatcgttttcaggcaagtaattgttgtccatctgaatgttcccggacatgtaacacattgtacctggtttcgcagtcaacttgtcctgcggcttcaccatcacctgcaggacctgcacatccccaccggatatctgaaacgccgtcacagatccctgttggctctggtagacatagggatggaagggggtggagaagaagggcgcggccatggcggcgggccggagctttgtggaagcttctagaagcgatcagtgggagccgactcggagcgtcgtcttcgggatcgggggagttgccatttgaggaggggttgcttcccgggccggggcgcgggccctaggcgtcgtgtagaagctccgaggcagttggtgggaccgaacagggggcgccggctccgcgcgtcctcttcccgcgtgccgccttcccgccagtttagctcatgacataacagaactaccagcaagttacagcctcgtgc

SEQ ID NO: 4192 - DNA, 2212 bp, Triticum aestivum
  Clone ID: TRIAE-23APR03-CLUSTER1590_1
acaatgtcgtcttcctcgccaccacaccacaccactgcagtgccgtcgcgtcatctcccacctctcccatcgggccagcggaagcagcagctgcgtgcggaaccaaccatgctccccttcctcctctccctccttctcctcaccggcgccgcggcgggggtacagggccacgacgacgcggcggcgcggcggacgatggaggagttcgccggcttccccgcctccgacgacggcgagggcggccgcgcctcccccttgcgcgtagactccgaaagtctccagcgccagattgatgaactggcctcgttctccgactcgccggcgccgtcggtgacgcgtgttctgtacagcgacaaggatgtgcaagctcgaaggtatattaaagggataatgaaacagcttggcctctctgttcgagaagatgccgttggcaacatatttggccgctgggtgggttctgaggcagaactaggagcagttgcaactggttctcatgttgatgccattccattttcaggcaaatatgatggggtcgttggtgttctgggtgctcttgaggcaatcagtgtgctccaaaggtctggtttccagccaaaaagatccttggaggttattatgtttacatcagaggagcctacacgatttggaattagctgcttgggaagccgcttaatggcagggagcgaagaactagttcgatcactaaaaaggacagttgacaaccacaatgtatcatttgttgatgctgctgactctgctggctacaagatacacccagacgatctacataatgtgtttttgaaccaagatgcatattttgcttttatagaattgcacattgaacagggccccattttggaaaaagaaggcatcccaattggcattgtaactgccattgctgctcctgcaagtattaaggtggaatttgaggggaatgggggtcatgctggagcagtgctaatgcccgcaagaaatgatgctggattggcggcagctgagctggcattagcagttgagaaatatgttttggaatcaggatcgatagatacagttggaacagttggtattctgcagctacatcccggagctatcaatagcatcccaagtaaatcacacctagaaattgatgtaagagatattgatgagaaaagaaggaattatgtcattgagaaggttcacaaatctgccattgacatatcaaagatccgtggagtagaactatcggaattcaagatcatcaaccaggatccgcctgctctgtctgacaaatcagtcataaacgcaatggaatttgctgcaaaacagctgggcctagaatacaaattgatgataagcagagcttatcacgattcactcttcatggccagaatatcaccaatgggtatgatcttcattccctgttacaaaggatacagccacaagcccgaagagtatgcgtcgcccgaggacatggcaaacggggttcagatgctagccttgacaatggcgaaactatccctggagtgagcacggcttggggagaaatcaagagggactagaatggtctaatttgtgatgtgatatcgtgtggcgttgattatgaacgtgaaaccactcaaggtcaaaatcctgtcagtctcattctgaatccattttctagcggttctctggggattttatctagaagaaagagcctccctgattcccgtgactcgaaaaaacatagtaataagaaaacataataattccacccccatgttgaatcatatgggaatgagaaatacgtgaaggtgcaatagaaggtctctggttgcagcatggtatgaactttactgaaggattaattgcctgtcacgggaacacgctaaatccaggggccccttcggctcaaataattttcataggaaatttgaaggactgaaattcattaataattttcctcggtgtcttgtttggtttgtaggattgacttctacatgttttatcttttctataataaaagaagattcatgtgcattatatttcatagaaatttcactattgacatagaccttttgttttctcctatgatgccatcattgctgtccctgtgatgtaatcaaacatattttgatgcaaattatatcaggtaggaaccaagtagatgtggctcctgcggggttttcttttccaaaaaaaaaaaaaaaaaaaaaaaaaaaaaaaaaaaaaaaaaaaaagaaaaaaaaaaaaaaaa

SEQ ID NO: 4193 - DNA, 1782 bp, Triticum aestivum
  unsure (1)..(1782): unsure at all n locations
  Clone ID: TRIAE-23APR03-CLUSTER15947_1
atgatcggccacgcagaacgcaccacctcagaatgatggtggaggcagagaaaatcacggaggggactgtgggcgcggcgccggagctgtgctcgctggcgcgccgccccaatctgccactcctcctttggcggctcctggcgtggcgcgtgccgggcacgtacaacgcgccgcccccgcggcgcacactctcatctcgtcggccactcagcaccacagaacggtgatggggggagcggagcacgcaatggattctgtggccgtcgtggcggtgccgttcccggcgcagggccacctcaaccagctgctgcacctgtcgctgcagctcgcgtcgcgcggcctggacgtgcactacgccgcggccgcgcagcacatccggcaggcgcgcacgcgcgtgcacggctggggcgaggaggcgctccggtcgatccagttccacgacctcggcatctccagctacgtctcgccgcctccagaccccaccgccgactcgcccttcccctcccacctcatgcccctgttcgaggcctacaccgccagcgcgcgcgccccgctcgcggctcttctcgaggacctctccggttcctgccgccgcgtggtcgtagtgcacgaccgcatcaacgccttcgccgccgaggaggccgcgcggctgcccaacggcgaggcgttcgggctgaactgcgtggccgtgtcgatgctcgtcggaagaatcgacgccaaccaccggctactgcgtgagaacggcgtcgtcctcagctccgtcgagcgctatgcgacctaggagttcctagagtacgccagccgggccagaccggcgaaacagatctcgaccggcgcgggcatcctggcaaacacatgccgcgcgctggagggtgatttcatcgacgtcgtcgccgggcacctggccgccgacggcaagaagctcttcgccatcggaccgctaaacccactgctcgacgacagcgcgtcgaagcagagcaagcagcggcacgagtgcctgaactggctcgacaaggcacctccggcgtcggtgctctacgtgtccttcggcacgacgtcgtctctgcgagcggagcaaatcgaggagcttgcagcagcactgcgcggcagcagacagaggttnatatggggtgtgcgcgacgccgaccgcggcgacatattcgtggaggccggcgagagccgccacgagaagtttctatcagagttcaccaagcacaccgaagggacggggctggtgatcaccgggtgggcgccgcagctggacatcctagcgcacagcgccacggcggcgttcatgagccactgtggctggaactcgaccatggagagcatgagccacggcaagccgattctggcatggcccatgcactgcgatcagccgtgggacgcggagcttgtctgcaactacctcaaggccggcatcctcgtgcgcccatgggagaagcacagtgaggtggtcacggcgaaggccatccaggaagtcatcgaggaggccatgatctccgacaaaggaatggccgtccggcaacgggcaagggcgctcggggatgccgttcgagcctccgtggctgacggcggttcgtcgcgcaaggacctagatgatttcactgcttacatcacaaggtgatcgacaaaatgccatgtgcgacgatggcttttcatgccgacatagtttctacctgctgatggtacactgtccgatatgtagttcttcactattggtgaatccaaaaatagtaataaaaaaattataggttgcaatggcgaaaaaaaaaaaaaaaa

SEQ ID NO: 4194 - DNA, 1214 bp, Triticum aestivum
  Clone ID: TRIAE-23APR03-CLUSTER16022_2
acgaagtcctgccataactgcgcccgatctatccccctctcctcctcctcctcctcccccccgtagcctccaaaaataactcacgcgtacgaacgccgccgcagcgaaggcagggtggaaaaataaacgaaaagaaagaggaaataaatcccgtgttctccgatcggaggcggcgacgggcgacgggcgacgatgagggcgtcgaagcggccgctcggcgtggtgatggcgtgggtgcgccggcagccgcccaaggtcaaggccttcctcgccgtggtcaccggcatggccgcgctcgtcttcatccgcttcatcgtccacgaccacgacaacctcttcgtcgccgccgaggccgtgcacgcgctcggcatcgccgtgctcatctacaagctcaccaaggagaggacctgcgccggactatcccttaagactcaggatttaactgcattgtttctagctgttagactatactgcagctttgtcatggaatatgacatccatactgtgttggatactgctacacttgtggctacactttttgttatctacatgattcggttcaaacttaggtcaacttatatggtggacaaggacaactttgcattgtactatgtggtgataccttgtgctgtgttggcactagttgttcatccttcaacgtctcacaacatcgcaaaccggtttagctgggcgttctgtgtttacctggaagctgtctcagtgctgccgcaactgcgtttgatgcaaaataccaagattgtggaaccgttcacagctcactatgtgtttgcgctgggggttgcgaggtttcttagctgtgcccactgggttctccaggttctggacacccgtgggcgtctgttgactgcgctgggctacgggctgtggccatccatggttctcctgtcagaaatcgtgcagaccttcatcctcgcagatttctgctactactatgtgaagagcctggtcggcgggcagctggtgctacggctaccctccggggtggtgtaggaggatatctgcagcgggagaaacgactcgtcgggtcacacccatcagaggaggatattttcagttacagcttacaagtgtcattagtgagaaaattgcagcagcagacataggcttgtcggtgtgtgtgttactggtaacagcagcgtatgtatgacctaacttgagggttaattttagcttccgtatgtttgtttgtcgcc

SEQ ID NO: 4195 - DNA, 2021 bp, Triticum aestivum
  Clone ID: TRIAE-23APR03-CLUSTER16031_1
aaagccggagcagagccatcaaaccgcggcgcaacccctccccctcccctgctcctgctcctgctcttgctcctgaagggaacccagcccggcagcccctttctgctgaccgctcatgggttgctgccgctcgtcgctgcgggcggtgacgcacccccacccggagaagccgccgggggcgggggcgggggcggcgccagccaggcggccgtccttctcggcgagcgcgcaccaggccgcgccggcgccggcggcgtcggcgtcgtcctccgagtccgaggcgggcttcgcggagttctcgctggcggagctgcgcgcggccacgggcggcttcgcggcggagaacatcgtgtccgagagcggcgacaaggcgcccaacttcgtctacaggggccgcccgcgccggcccccccccccccccccccccgcgagcgccgtcgcgaggtgccccggcccggccccgcccggttcgcggaggagccccgagggggtgggcaggctgcgccaccgccggctggccaacctcatcggctactgctgcgacggggacgagcgcctgctcgtcgccgagttcatgcccaacgacaccctcgccaagcacgtcttccactgggaaaaccagactattgaatgggctatgcgtctaagagtcgcttaccacattgctgaagcgctggactactgcagcaacgagggtagacccttatatcatgacctaaatgcatatagggtcctctttgatgagaatggtgatcctcgtctttcatgctttggtttgatgaaaaacagcagagatgggaaaagttatagcacaaaccttgcatacacacctccagaatatttgagaactggaagagtcactccagaaagtgtcatattcagctttggcaccgtactactggaccttctaagtggaaaacgcatacctccttcccatgctcttgacatgatgcgaggcaacaatatccaaatgttgatggattcacatttggaaggaaactactcaacagaagaggcaaccgctttggtagatcttgcctcccagtgtttgcagtatgaagctagggaccgccccaatacaaaaaagctggttaacatacttgagcccttgcaaacaaaattagaggcaccttcctacgagatgcttggaataccaaaccacgcggaagaagtagctccacctcctgctccacaaccaccacaacaccctctttctcccatggctgcggcctaatcgagaatggacctgacagctatccagcagatccttgtatcgacacattacagagacgacgaaggcagtaatgagctatcattccaggaatggacgcagcagatgagggacatgttggacgccaggaaacgtggggatctagcttttcgtgacaaagatttcaagacagccatagaatgctatacacagtttgttgatgtgggcacaatggtatcgccgacggtgtatgcccgaaggagcttgtgtcacctcatgtgcgaccagcccgacgctgccctccgggacgcgatgcaagcgcaatgcgtgtaccccgaatggccaactgcattctatatgcaagccgtcgcgctttcgaagctagatatgcagagcgacgccaaggacatgttgagtgaggcttcgcagctagaagagaagaagcaaaagaactcgagatgatgtcgagagcgtggtctttgtaaagatgtgtcggttcggtctcttttgcggctcaaatgtttacgtcgattgaggcgtgctattccgtcctttggaaaagaaaaaaactgtgagatattcgaggttgagttagggagaaactgcagggaagaagtgccgccgtagagtcgtgtggttgtaactatttggtttggcatttctgcgatgcattattttttgggtctatatatatatatatatgacatttttaaaagcaaaaaaaaaaaaaaatgcttaagctaatgccgtagcttccatgaaaaccatgtttttttttcaaaaaaaaaaaaaaaacctatagtgggtgtat

SEQ ID NO: 4196 - DNA, 2036 bp, Triticum aestivum
  Clone ID: TRIAE-23APR03-CLUSTER16044_1
gcggcggagatctatttctatcctcccgaagcctccgccgcttcttcccaactaaatctctccgccccctccgccgcctcgccaccctcccctcagcctcaccctcgccgccggcccccagcccctctcccctccccctgcccgatgaggtcaccggcgccgccgccgcgaggggcggggccggcggcggtcagcccccgcccccgcccgcctcgccggcctcgccagcctgggccatttagattcccgcccggtacaaccgggtgacggcgtacctgactccaagcacaaccgggacttcttcgaggcccacacctatctagcccagcgccgccgccgatggttcgccctcactgattggcctacgcctcgcgcagggcgggcaagtgaacgactttgccgccccctgacggaattcggtggttaccatatgtggtcttggtgactcggggtgatatctcttcgtggttctctttaatttatctattgctgtttttgcaatacgagatctgaattgtgtaccttgaataatgcagtgtcttgtgctgtatgcacctgaagaacatttgtgtagcttcaggttttctatggtttagatacacccagttttatccactcataagttcggaactcatggttttaatacctcacatcccaatgttgccttggaattgtgatttcaaagatgtcaatatggtggtaagagtggtgactgatgtttctctacttccatgaatctatttgaggttgtctagtgttgtaagatatttcatttcacctgctgtgctgtcatcctactgtggattgtggaagatagctctggtcctggggagaatatcatcttgttatgggcgtggccatgccatacggcatgtattcaaaaatatattaaagatggaagttctgtttgattgtgtggctgatccactggaggggagcaccagtggggcgctggttgacaagattcttgacaagaccgggatgaaggggaccgggaagtggacggtgcagcaggcggcggagcttgcagtcgctgcacccaccattgcagcatcactggatgggaggtacttgtcggggctcaaggatgagcgagttgcagccgcaagtgtgctagaggaagaggggatgccagttgggcttctggagaagattaatgtcgataagaaggtgctggtggacagggtgaggcaggcactttattcgtccaaggtttgcagctacgcacaggggatgaatctgctaagagccaagagtgtggagcagggctggaatcttaaccttgccgagctttcaaggatttggaagggtggatgcattattcgggcaaggtttcttgataggattaagaaggcttatgacaggaaccctgagctggccaatttgattgtcgacagggagttcgccagggagatggtgcagaggcagggcgcatggcggtgggttgtggcccgggcagtagaggctgggattagcaccccagggatgtctgcgagcctttcatactttgatacctacaggtgcaaccggttgccagcgaatctgatccaagcacagagggacttgtttggagcacacacctatgagcgcattgaccgcccaggttctttccacaccgagtggactaagctggcaagggagggcaagtgaatgactttgcagccacctgaggaatttggtggtaccatatgtggtctcggtgattcggggtgatgtctcttcgtggttctctttaatttatctattgctgtttttgcaatacgagatctgaattgtgtaccttgaataatgtagtgtcttgtgctgtatgcacgtgaagaacatttgtgtagcttcaggttctatggtttagatacacccagttttatccacttataaatttggagcaacggttttaatgcctcgcatcccaatgttgcccttgaagtgtgatttcgaatatgtcaatatggtggtaactggtaagagtagtgactgatgtttctctacttctatgaatctattttaggttgttcagtgtaaaaaaaaaaaaaaaa

SEQ ID NO: 4197 - DNA, 912 bp, Triticum aestivum
  Clone ID: TRIAE-23APR03-CLUSTER16154_3
aacaataagatttccccaaacgaacaaaaagaaaactctcgggcggcgcgaggcgtcacgaatcgaatcgaatcgagctcgagccggaggagagcgtcggaggcggcgggcatggaggatctcagcgtcgaggagctcgcctccaattctccacctacaaggaccagctccgcgaggttaggaagttcatcaaggagaaaaaagatgacgctggaatttctgaatatgttgatatggaaaaggagcttcaagaggtgagttatcctgcattttttattatgctgctgtgtgttgatatcagctaatcatcagatgccttttcttttactttgttgctagtatgagtaaactgtttgtaacaaaaggatgtttgctttcttttttgtaatttggggcctatgctatcaatccctttctcttctttgttacaaggagccatgcccggcaagctatcatgaaaaggcagcttggaacagtggatttgtttttgggccatttagattttattgtaatcttgaaaggtgagaaggtagattatgtcaatggtagggaccatctgagcaaccatatataacttatgaacactaaatataaaatttcatagcttcaaagttgtccattaccctttatcttgattggttgcaggtttgtgtctcatggtagagtacctccttcagattttgggtgttgatgctgctgttctgagtgaatcacaaaatttggacagtttaaatgatagcaggagtctagttttgtaattgcgctaatgtatttctctgcaacaactgcaggttattacattaaccgaagagcttttggcaactgcaaatccaagtgagagtgcgcagaatgatgtatgtctatcaccgccaaattattctgctggagtgcactcagaggcacttgatgacc

SEQ ID NO: 4198 - DNA, 960 bp, Triticum aestivum
  Clone ID: TRIAE-23APR03-CLUSTER1615_1
actgctcttctctcttccccctcggcccccctcccaaatcgaaaacccctgactccgccgagcgagcatcacctttccgccgctgctcgccgcacgccgccccgccgaccgagaccctcaggcccgccccactctagcccgcccgcccgcatggctgccgatcgccggcccggcgtctgagggagcgggcggctgcgctcgggggccagtccggcggcgcgatggagctgtccgggagccccggcacgtggagcggcctctcgctgcggctcggccagttcctcttcgccgccgcgtccgtctgcgtcatgtcctccgcgatcggcttcgccaactacaccgccttctgctacttgattgcatcaatgggactacaagcactctggagcttgggacttgcgtgtcttgatggctatgctttgagaatgaaaaaggaactcaacagtgctgttctcgtgagcttatttgttgttggagattgggtaacgtcgatcctgtcgttcgccgcttcatgctcagcaggaagcgtcgttgttctcttcgacaaggatgcgtacttctgcagcagggacccgcatctcccctgtgggacatttgagcttgcgaccgcgtttgcattcctttcctgggcgcttagtgccacatctgcccttgtgatgttttggctcctcgcttcatcttgattagatatgtaggagctctgtctgtacctagtgttgtttggtcctgtctggttatataccgactgatgtgtcaagcagactacataggaatagactgctaattccagagaatagatgggcaatggtcgcaagttccatggagtcttaaattttagagccatgcttcagtgtttcgggccaaagataacttggttcctggcaaaaaaaaaaaaaaaaaagcttaagtgtcgataccgtgccacctactagttagggtgccgaaatcaccttatctcct

SEQ ID NO: 4199 - DNA, 1355 bp, Triticum aestivum
  Clone ID: TRIAE-23APR03-CLUSTER16254_1
aaccggaaacgcccaccaaagaaattcgatggctgtctcctgctcttcttcctccctctcgggctccgccaaagcccctagcttccctccatacctcccacctcgcgccccaaagaacagcatcagcccgcttgcgcctacagtgtatcaagatgtgctctgctccggctgcgccaggggggtcaaagaagaccgtctgggtatggacagagaaccggcaggtgatgacggcagccgtagagaggggttggaacactttcctctttggatccaaagaggtcggcaaggactggtcatcaactgctcgcatccatcctctctttattgatggcctggagatttttgacgaggggaaccaaaaggttgctgcaatttctgaaatctcttccccaagtgagctgcaactcatacatgccagacaatgtggaaatacgaaaatatagtagctgccttcgaggggtgcggcaggattttacaggcggtttcgacaaactcaactgaggctcaagtttttcttcaggccttggagcctgggcgtgtgggagttgtacgtaatgtagaggacatggatgatattattaaactcaaggattattttgacagaaggaacgaggcaaagagccagttacagttgacaaagggctactgtatcaaaggttgaagttgttggtgtgggcgatcgtgtttgtgtggatctctgtagtatcatgcgacccggtgaaggccttctggtcggttcctatgcaagaggaatgttccttgttcactctgaatgcttggagacaaactacattgctagcagacctttcagggtcaatgcagggcctgtgcatgcatatgttacagtccccggcgacaagactagctacctctcagagctgcaatcaggcagggaagtaattgttgttgatcaaaatggattgtggcgaacttcaattgtccgccgcgtgaagattgaatcaaggcctctcatccttgttgaagcaaaggagaactctggaaatggcacatatagcattttccttcaaaatgcagagacagttgcacttattggtcctgacagaggatctggtggaaggactgctattcctgtgacttcactgaaagttggcgacgaagttctggtgaggaagcagggcggcgcccgtcacactggaatagagattcaggagtttattgtcgagaaatgagacacactgtgacatttacccgccttagcaggctggcatgctcatcgctgctgtttttgttctccacaacaaatttgtgcaagttcatcaaatcatcactaaacccaagagacatacgtctagtatctgtacattcctgaaattcaaggctcatttttccatttt

SEQ ID NO: 4200 - DNA, 1501 bp, Triticum aestivum
  Clone ID: TRIAE-23APR03-CLUSTER16463_1
gccccccgttcgcttctgtgtgtggccgtggaggggcgcgcgccatgacgaccgccactgccaaactggcgcccgcgaccaacgttagcttctgtgtgtggccgtggaggggcgcgcgccatgacgaccgccactgccatcgtcgccggccacggcatcgccttccgccggagcctccacctgcccaacccgccggggaagccctccttctccgtcgcgcggccccacgcgcactaccgcctcttagtcccggccacgccgtcgccgaggccctgccggtccatctcctcgcagagccccacggccgccgcggcggacaccgcggaggacgaggaggagccagccgaggagagtgaggggagtgaggaggagttggacccgctggcggaggtgtgctacctggacccggacgcggacgcggaggggatccgggagtgggaggtggacttctgctcgcggcccatcctggacgccaggggcaagaaggtgtgggagctggtggtgtgcgacgcgacgctgtcgctccagttcacccgtttcttccccaacacgtccatcaacagcgtgacgctccgggacgcgctcgcctccgtggcctcctccctcggcgtgccgctcccggaccgcgcgcgcttcttccggtcgcagatgcagaccatcatctcccgcgcctgcaacgacctcggggtcaaggccgtgcccagccgccgctgcgtctccctgctgctctggctggaggagcgctacgagaccgtctacagccgccaccccggcttccagaagggcaccaagccgctgctcacgctcgacaaccccttcgccaccaacctgccggacaacctcttcggcgacaagtgggcattcgtgcagctccccttcgacgatgtgagggaggaggtggagttgctggagaggaggtacgcgttcggggcggggctcgatttggacctcttggggttcgagctcgacgaaaccacactagtccctggggttgccgtggaatcttcgcgcgccaagcctctggccgcttggatgaatgggttagagatctgttcaatggaggttgacaccggcagagcgaacctaatcctgtcagccggggtttctaccagatacgtctacgccggctaccagaagagcgccgctacaacgcaggaggcagaagcgtgggaggcggcgaagaagacctgtggcggcctgcacttcctggccatccaagagaacctcaactccgatagttgcgtgggtttctggctcctgctggacctgccgccaccgcctgtatgatctgggtagtgcgtgttgtgacttccactgaaatcaccgtagtatgtgtagtgccaacatcagattttgcaatacaaggtcatttcattttttagctccttgattactgaacagaggtgtactttatgaaaagaaaggagaggaaaggtcatactttaagtttggtgccactttagcaaaaaaaaaaaaaaaaaaataaaaaaaaaaaaaaaaa

SEQ ID NO: 4201 - DNA, 1387 bp, Triticum aestivum
  Clone ID: TRIAE-23APR03-CLUSTER16465_1
ctagaaaaaactctctggcacccccaccccttctccgccgccaccacccacgccgaccggttctggcgagctccggccggaagcggagcattcaccggaaccagaatcatgtgcgttcgccgcaccggtaggggtgggaggtggccctctctccctcgccctctccgcttccagctcggcctccttcctcctctgcgccggcggcgactccctgcagcgtgggaggctcaggtttagtcctagatcatacgctcttaaattagagattttatttatcgtccgccttccgacgcgcagctgcctcgctgccccggtgctgctgctgctcccctcccgccccgccgacgcctccgccgatggaccgggaacaagtgacggagttcctgggccaggtgccgctcctgcagtgcctccccggctcctccatccgtaggatcgccgaggccgtccaggtaaagccccacgagccaggtgattgtgttgccccttacgctcaccctcttgatggcccgaggaggatacacaagcgtgtgactgcagtttattggtcgttaaacacaatcgaaaccccccctgcacatgatgttagaggtaattgtgactgcttgtatttccaaccgaaaaggagagtcccaccgtgacgctgacctgagaggcgttggttaggagggcttggatagcccgggcaaaccccaaggccgaaggctttgagatgtgcagaagagccatgcctgtactttaatattttctttccccttgctgtcccgtatttttatcttatatagtacacggggacaatggtgagatttatgcataggagtacagcttacagcttgaatttggcacacatgcttattgtgaacgattgtatcctcgcatgctgattcacattcaggttttcctttgcatatgtggatggcaattgccatcaaacacgccgcacatgaatgtagacagatgtacctcaaattcgaagttttgtaatcctgaggtcatgtagtaccatttcaaatatcaaaaaaaaaaaaaaaagcgagtcgcgccgtcacccgtccgagtgctgtagtcggcccgccgtgtttgcctacttcaggagagcgcagcctaaatctggcttgcgtcagctcagagtactctctactgttagcttactgaattactgaggatgctctctgtgtcagtcatgatttatagttcactgtacttcatatcgcgcacatgattctgtgtgcagctcactgaccacgaccgatttactaatctgtagtctgtattggcgctgcactgcagtgcgtactcattaactagatgatgtttagcccttaaaaaaaaaaaaaaaaaagcttatcgatgaaacgacctcgagggggggcccggtcaccaattg

SEQ ID NO: 4202 - DNA, 1098 bp, Triticum aestivum
  Clone ID: TRIAE-23APR03-CLUSTER16586_1
ggcctggtgggcactagcaacgccccagttttatctccaaaaccaaggtaaagggcaaacaaacaaatttgtggccgcgccccaaagcgaggtgttcacagacccgcagtaactcccggggctatagtacccctcaagggccagtggacagcgcaacgcggcgagccaccggcaacccaagccgcacgccgggagggggtatcatgccgggcgtccaagacatccagcagcgccagaatcgcggaaaggtagaactgctgcagcatacccgccagttggctcccacgaacccgcagacttgcagcagaacccaggggccgatcgacaacgtgcaggggctccagctccaggaccagcgtacagggggcgcggccgcagcagggcccaccgcccgcagggtggtcacttagccgcgcggaatcttgcccctgccctcgccccgcctccagcacctaattcctgccgagaagaatgatctgcctttgcctccatgactggtgagaatgaggagtggcgagtcattcacaacaggtcgaatgtttctggcagtggcgaggcggtcgtcggtctgggtcaccactaggttgtaatgttttttttcgttcccagggcttttgggccttagcgtgtgattgttaatttttccgaaggacatcccttgctacggtgagatgtgatgctttaattgtactaacggagttgattaagtactgggacgtgaaaatgctagtagtgtttgctaacgggaacagaagcgtccctgggctgctgggccgttgcgtgtcggtgcttgtttgtccttggcacgtcccgtgccccggggcggtgggttgcttgtctggtactatcgctgctgtttacgttctgggatgcgaaaatgctagtagtgtttgctaacgggaacagaagcgttgttttttttacttatttgttggtattcggtacatgaaagttggtgtcatgttgtgtttccgttgactggaagataggtttgtcaggaataattaacttcttttgtacaatatggttacaaaaaaaaaaaaacaaaacaaaaaaaaaaaaaaagcccacgcgtccgcccacgcgtccgcggacgca

SEQ ID NO: 4203 - DNA, 3036 bp, Triticum aestivum
  Clone ID: TRIAE-23APR03-CLUSTER16697_1
acttcttcctacgagagcattgcacccaacaaaaacgttcagactttagagaaaccaacgagaaggtccagacgtctgaaaaaccaacccgccctcggggcggcgccgtcgagagaggaggcctctaccgcctcgtcgcccaccggagatggccgtgtcgccccgatcgcggtcagcgcttctactacttctgacaccgccaaccagccgcaggccgaaagtgcgccggatcctcacgtgttcagggagatcgtcgccggggagaatgtcggcgacgtagacgcggaggaaatgcagggctgcaaggggatcttgttggccgggaaaacaaagaactacagggtggatgaaaaaaccaggcgcagctgcttggaagctgttccccagacggcgcttacacatcaacgctggagtcgaagaccccaagtactggacttggcaccccctgcgagaaggaagcgacgccgaagccggaatcgagacggtggcgctgcagaacgtctgctggctggaggtccaagggaagctggagctgtcccatctcacaccaggagccacctatgaggttttcttcgaggtgaggctcgacgacccggcttacggatggtcgatgccggtgaacctctggctcaagttccctgatggcacgatccagcagcacaaggagaacctggaggagaagcccagggggaagtggctgctggtcaaggttggggaggttaagccacacaaggggcagaatggagaggctgagatctccatgtttgagtatgatggtgggcagtggaagagggggctcctcatcaagggcatcaagatcatcccaaaagaatgaatgatctgattgtgctttgttacgaacaatcgctggctgttgtttgtcggctacgctaagatcagtttgatgcatgggaataatatcaagagttttgaatgaatccaaaaaaaaaaaaaaaaaagcttatcaccactgagtactggttggctaactacaaaaagactgtcattcattcagtgctgcactaataactgttctttctgtgacatatggcaagctgacaaaaaattactcaaatatttatctaaatactagtcgctacagaggacagcttagagaaggcacaaagcttaaaaaacaccactcagctaggtcaacacattacaagcttaacacgttccttgacatgtttgttgatcggatcatgtcagtaactgggtctgggtgttttcttgcctgctccctgttcgggcgtgttgtccttgcttaacagataacagtggcatggtcacattttattgtgtcaaataagcaagtatgattcaaattacattgtgacctcagagctcatgaaactgaaaacaaagctctaattgtcccaatttaatgggattctgttccgatttctcaaccgatatcaaatgaacagagaaaatctgttcaactgaaaatgtgggaaccgaacttgaaattgtacaacatggcttcatgcactgatcttccattttaagtggaagaaaattctaaaatgactgaatgctaggtacaggccgaggcatgggcttatcttgcaagaaatgctcaaaaagcttcaaggcttgccgtggacgatggaggggaacctcatgtcctgcacctcggattgtcaccaacgtcaaacctttgtacacttggcaccaaccagcaacctcttcctcatcataccacggataccaattagtgacagtcggaagatatagtgcatcaatggagtatcttgtaccagtgagcggtactacggaatcggcatcaccactgaagacccatattcttatgccagctgcaatcagttcacggtaaataggaagcatggacctcggcgaatctttccaatattcaaacaagacatcactgcagccggtccaggcatacggtattccagtgacattggcacgaaaagctttctgcacttctggtagattatagtacttcgtggagtactgttcagtgcagggatcatatcctcttggcaaccagggcctgcggcccttgatttgccttcgcctatgaagcgaggtcttcttacaggtaggtgtgtagatgctgtatgcgtcgatcgggccttcctcagcttcagcaacatcataaattttgttgcatgcatcggaagcgtgctcagatgaatcgaattcacaagccaactgcagcttctgataggtgtcatcagagatcagcccgtgcgtccaccaatactcgaatgttccaacgaaatcatggtaatcgtcaataaccgcatttccgaccatgaagcctttgaagttcaggatgggcttcctcactcccttgttgttcctgtacactagctgagacaactgagggacatagtgccctccatagctctctccagcgatgtagaaatcacggtacttgtactgcggaaacctctccagccaattcaccaggaaagtgtacgaatcatgagctgtcttgttgtcgccgggggcgagcagatcggagctggtgttggagtaggagtacccgacgccggcgggggcgtccaggaacagcacgttcgccattttgttccaggagtaggggttgacggagagcgtcctgccgtcggcgttgatccggaaggcgccgagctcctcggaggcgccgtagccgacggaggagcagccgggcccgccgttgagccagagcacgagcggggcggactcgggcttcgcggcggcggactcgaccagccagtagaagagggcgcggcccgcggcggcgtcgacggtgacgtagcccgagtacatggagaagttgaccggcggctggcccggcaggcgcgtgatgcggtcggccgccgccgccgcagagggggacgcgagggagagggggagcggggacagcgccaggatggcggccagcagcacggccaccgccattggcgctcgcggtggctcaacggagaccaggactgtgtgctgcgaggagtgagccaatggcgactcgtgagaggcgtgggggaagcgtgcaaggcgtggagtggtggtttggcttaattggac

SEQ ID NO: 4204 - DNA, 1523 bp, Triticum aestivum
  Clone ID: TRIAE-23APR03-CLUSTER1686_1
aaaaccaagatcccagaagcatcccacacaagccaagccaagacgacggctcccagcagcaggcagcagctgatggagatcaccaaggtcgacctccgcggactagagtccggcggggcgggctgggtggaagcccgggacgcggtgacggcgtccatggtggcgcacggcttcgtcgtcgtggcgcacgacgcgctcggcccggaggctccggcaggcgctgttcggccgcgccatgccggacatcttcgcgcccccgccgagcaggccaagcagcggaacgtctccacggctgggccccttcccgcgggtacatctccaacctccccggcaccaaatgcgagagaaagcgtcccccctaagtcaccgacggcggccgcgtccgcgacttcgccgacctccactggccacagggaaaccccatcttctcctacctaagcagtgcccaccattgtcctctacgtccgtcgcgcagctgtcgtgcatccattgtggtatggcatgcgcttggtgacggtgtccgtgcacttgcaggggctcggttatgtccgcggtcaatgaacgtgtgggagctacagcgcgcggtggagacgatgatcctggaggtcctgcggcgtcggggaggagcacatcggcgcgcatctggacacgctcgcccacgtcgtccggctgtcggcgctacgggcccccgccggacgcggagacgagcatgtccctgcaggcgcaccgcgacgacagcatcatgacggcgatcgtgcagcacggcgtggagggcctcgaggtgcaggctcaggacgggatctggctcgcggtgccgcctgagccggacttgttcaccttcgtcgccggcgagctgttcacggtcgtgactaacgggagggtgccgggttgtttccaccgcgtgaggacgccgagcaaccgcgagcgcctgtcggcgctgtttggctgcccggggaaggacggcgtccttctgagcgccatggacgagctcgtcgacgatgagcaccctctgctgtaccgtctctgcaccaacgacggctacacgacgttccggcactcggatgaagggcgcaaggccagtgatccattgaaggccttctgtggggtggagaaggacgatcaccgttcgtaagtcaagctcacttcacctcaccattctgaagtcgtcaagctctgttatccacaccattctgaagccgcaaatgctagattacccatgtaataatcgcgacaccattctgaagtcctactgctactgaactttactcaaatcgctgtcagttatctcttcgattaagcactttgtggatgataattactagtacgacattaccggctgatcttattcagtttactgttgtgcacacgttgacttgctgatggcaagcgcaataaaaaaaaaaaaaaaagggcgtagccaccccctaacccgcctctccggcgtccgccaaacccgccgtggtgaggaactccaccacctcctgggccgcccgggccaccgttgccaccgcccggacgcgtgg

SEQ ID NO: 4205 - DNA, 1605 bp, Triticum aestivum
  Clone ID: TRIAE-23APR03-CLUSTER1688_1
ccccccaattcgcccaacaccttgcgggaaccccaatggcgagctttaacgccgccggcgccggcgccgccaaccccaaccctaacaaatccctcgaggtgaatccgccgcccgcccgccccgccccgccccttccctccctcccttcctcccccaaattcgcccaacaccttcggaaccccaatggcgagctttaacgccgccggcgccggcgccgccaaccccaaccctaacaaatccctcgaggtgcgtgcgcttggccaatactgttgcccttggtctaaatggctaaaacctaatgtgtgggtcgattcgaccggggactgccttcgtttcgtgcaggtgaatccggcgcccggggactcggtttccagcctcagcttcagccccaaggcgaaccacctaattgccacctcctgggacaaccaggttcggtgctgggaggttcagcctggcggccaatgccaggcgaaggcgtctatttcgcacgatcagccagtcttgtgctctgcctggaaggatgacgggactactgttttttcgggaggttgtgacaaagtggtgaagatgtggccgctgctgtctggcggccaggccacggccttctcagggcatgaggcgccggtcaaagaactcgcctggataccacagatgagccttcttgtcagtgggtcttgggataagactctgaggtactgggacattcggcaacctaatccagctcatgttcagcaacttccggagcgctgctatgcactctcacttagttatcctctaatggcggtcggtactgctgatcgcaacgtagttatcttcaatctgcagaatccacaggctgaattcaagaggatcgtgtcacctttgaaattccagacaaggtgtatcgccgccttccctgatcaacaaggattcttggttggatcaatagagggacgcgttggtgttcatcatgtagatgattctaatcaaagcaagaatttcacattcaaatgtcaccgcgagggcaatgatatattctctgttaactcgctgaactttcatcctgtgcaccatacatttgctactgcaggctctgatggaggtttcaacttttgggacaaggacagtaaacaaagactgaaggcttttagtaagtgcccatcacccatcacatgcagcacatttaatcaggatggctcaatctttgcttatgcggtatgctatgattggagcaagggtgccgagaagcataatccttctactgcaaagacaaatatctttctgcatagcgtgcaggaatctgatgtcaaaggaaagccccgtactggaaaaaagtagacttggaaatggcaagctgcagatctgtgctccgaacctgatgagtttgccgtcgcttgatgctaattacccgcacgagtgttttaatcttttagatcttgactctgtagggcattccttcatctctgagactgcaggcgtatcttctataaacagcagttgcatttcttcgcaaaaaaaaaaaaaaaaaaaaaaaaaaaaaaaaaaaaaaaaaaaaaaaaaaaaaaaaaaaaaaaaaaaaaaaaaaaaaaaaaaaaaaaaaaaaagaaaaaaaaaaaaaaaaagatc

SEQ ID NO: 4206 - DNA, 1584 bp, Triticum aestivum
  Clone ID: TRIAE-23APR03-CLUSTER16907_1
gcaagcgtactctgaaagaaatttcttattctcatcaaacactggcgttcttcaacttccattgtcacacaccttccactgccgacataatcttgatccaatcatttacattctccattctctaactcccgtgttggacaccttacactaatttctcaattttttttcctgactcgtttgcttggctgcttaagagtcctttgaaaaactggcaaaataatttttatttgtttgctttccaacagcataatatgtaccgatgtctcccagtttcttaatagactaattcagacattctctagttcagtatttgaagatttactgacacaaaactagaccaagctttccagccaaaattaccttacctgctatgatgaagcagacatgaaaacgccaaattaaagttctgagctatacaaattcatggtctccagaagccgcattgcctaatacattcatgtccaggactgttcttggcgcttctttcaattcattgtcaagattcatgcttcctgcatcttccagttcatctctgtcagagtctctttttgttacttcttcagtactatcgtctggataaacccttatccttatgcgcttgcctttgatgtatcgatattcaaattttggcggtggatatttcctatttaacttttcgtatttgtccagcatctctagcttcataaatacatcaccgagcatcctgacaatcgaggtatcaggtcgaacacccagctcttccatatcagcaaaaacctcaaacatcttctcatatgaccccaatctgtaatataaggagattattttcatgaaaaaaacacgtggcaatccctccatatatctcgagaatatcttttgaaatagctcttctgcttcctcaattcgtccatccgcgacgtcgacctttaataaagtttgatagcttcccatggtcttcccttgacctttattgaacatccacttgataacctgaattattcttttccattccttctcatcctcaagcgtcttcagtgctttctttactgctatcaagggaaactccagttcccatgcaacgaatgaatcaagagcaccataaacctcctcctttacattagacaaacccttaatacatttgacaagcttctgcgacttggaaacggttccgattctcttatcggttttccacacgcgaggatatctcggcctcggacccctggcaccgcaaaccactaaggagttgaactttcgagggcgcagaacgacggctctctcgaacgctataccgaatgcgggcgcccaacacctcaaggaaagcatgatgaaatctgcagcagggaagcaggaatccccctccaatgtcactacccgcccgcctacttctccgcagatctttggaggcgaaagagcaggttcgtacctcgaaaaccggggtccaggagattgcggagggagggagggacgcgacgggaagaggagcggcggcgcgcgtcaggcgtcggcggcggcggaggagctccgggtcgggacgggaggagaagagggtcctcttcctcgtgcggacgggggtgggtggtggagagacaaaggtaagtttttttt

SEQ ID NO: 4207 - DNA, 2275 bp, Triticum aestivum
  Clone ID: TRIAE-23APR03-CLUSTER1691_1
aattcccactttttttcccctccgcgtgtcaggaagcaaaatagatagcaaggaatccatcccatcgctcgtcatcccaaggccggcggccgtcggtgaggaagcgggcggtgatgctcaggggggcctgactcggcctgagtccgtcctggccctccctggcccgggccggctcagccgcgcgccgcccgacccacgcactcgtcccggcctgcctgtccagcgtgcgcgcggcgcgggccggctacaccacgctcacctacgcagtcgagccgtccacgaagacctacgccgcccacgtctccctcgccatctacgcccgcttcctccgcttgctctacctgacctgcctgcccgccgccgtcagcaaggctcccagatagatctcccaaaacgagcctcccaccaaggtctgctccttgagaaagtcctgcaggtggctcctccaggcggacgcgcgcgccgaggcgatcacgaaggccacgaagcagcccgccaacccctccgccagcgccggccgggcgtgcggtggacgccctccagcgaggaactcggccacaaatcacgcgttcttcggggtggcacggcgggaggaatacggatcaaggatcgatgaagtgagggccctctccgggaaagcgaacaacggtagtttcactgctaacggtacggttgccaagggtggccaggagaatggtgctgttaaggacagttctcgcgccgcccgggctgttgttgttgacaatgatggcaaggagaacggggaccccaacgacggggccttcgatgtaaataccttgcgtaagaagacaggaggaaagaagggcggcggtggcggtaagaagaacgatgtgaagaaggcggccaagaccgagcccaagaaggttgtcaagcagatgagggtctgggatgacaaaccgccgaagaacgagaagctggacttcacggacccggctgacgagagaggggaggaggtgatagagaaggtgcttaccaaccagggggacagcatgatggataaggatgaagatctgagcagcgatagtgaggacgaagaggatgaggaagaggagaatgctggggctggccagaagaagaagggctggttctcctccatgttcaagagcattgcaggtaacaatgtacttgagaagtctgatctgcaacctgcactcaaagctcttaaagatagactgatgacaaagaatgtggctgaagaaatagcagaaaagctttgtgaatcagtagcagctagccttgagggcaagaagctaggatccttcacaagaatttcttctactgttcagacagctatggaggaggctcttcttcgcattttaactccaaggcgatccattgacatattaagggatgtacaagctgccaaggagcgtggcaagccatatgtcgttgttttcttggttggagtgaatgggagttggaaaatctaccaatcttgcaaagagtcgcttattggccttcttcagcataacctcagtgtcatgatggcagcatgtgataccttcagatctggtgctgttgagcagctgcggactcatgctcgcaggcttcagatacctatatttgagaagggatatgagaaggacccagcagttgtggcgaaagaagctatccaggaagccactcgaaacaaatcagatgttgttcttgttgatacggccggacgtatgcaggataatgagccactcatgagagcactctccaagctcatcaatctcaacaagccagatctggttttatttgtgggagaggcattagttgggaatgatgcagttgatcagctcaacaagttcaatcagaaattggcagatctttccactgttcccacagccagactgattgatggtatcctgctcaccaagtttgacactatcgacgacaaggtcggagctgcgctgtccatggtttacatatctggatctccggtcatgttcgtcggatgcggccagtcctacactgacctgaagaagctgaatgtgaaatccattgtgaagaccctcctgaagtaaaatggtagtgctagtacatgtcgtgctccgagatgtgctgcataccaaagagtctctgttatatctccaaatatcccccgtgacctcgttgttttctcgtttgatttggtgtggaactgtcgtccctagcgaactttaatggttgctgttaacttattatgttgtgtggatcttcgtgcgtaggttgcctcagaaattaattataaatacaataatatgtgacttgtttaaaaaaaaaaaaaaaa

SEQ ID NO: 4208 - DNA, 2646 bp, Triticum aestivum
  Clone ID: TRIAE-23APR03-CLUSTER1695_1
aaaaacacatggtatctaccataccctcctacacacgtcttttctattttgtttgaatcatcatattattccaggagcaccgaagaagccagcggcattgccaaacgaacaagacgaggcagcgagcggcggatttgcgtccccagcggtgaagatccccgcgggcaccggcggcctcgtcaccccacgcagcgtcgcgccgacggcctccggtagcgccatcatcaggttcgattcgctgtccccaccggcgcctggcctgatttggtgcgacggcggcggcggctcgattcggtgcggcggcagcttgattctcggagactgcggcccgattgggagggcgtgtagagtccccgcgcagcgccgcccgtgcgaggtcgagtggaggagatgtgcagcggccgtctgctccgcgtctcgcacgtgcagtcacgcggggaacaagtaccggattggagactgcggtaacctccaggttgcggaggggcccatgcagcagcaccggtgttaatgtgttctccacgaacgttaaggctatatgggctgactttggcatttcatgggaaggttttgaagatgacgaaccaccctcaaatcgcgcttgagcatcctcactagagtaagcaaatctcccagaaacaccctgttattcggaaccccctaaccctttcggaggtacaatggccagacctttggcttcccacgggaatcacgtcatggttggttcttcggcagttattagatgggcccaagttgggagattcttcgcaacaactctgtatactcttggatatgaaaaacgtggagctgttcttgaggaagaatcaggtattacattgcattctccgtcggtgaatctattcagaaagcaggtgcttgatggtaattgggacaatgcagtagctaccttgaataaacttggccttctggatgaaaacattgatgaagtctgctgcatttttgttattggagcagaaattctttgaccttttgagaaatgacaacttaatgggtgccataaagacgttgcaaaatgaaatctccccccttggtgttaacagaaaacgagttcatgaaatgtcaagttgcataatttcttctccgcagaacttcttgcttgcatttccaaagcttggaaccgaagcttctgactcacgccttaagctcctagaggaattgcaaaaggtgctcccacctgctgttatggtaccagagaggaggttagagaatatagttgaacaggcacttactgtacaacgtgaagcttgttatctccataattctattgatggcttgtcactttatgttgatcatcactgtgggagggatcagataccatctcgaacactgcaggttctgcgtgaacacggtgacgaagtatggtttcttcaattctcaaacaatgggaaatatttagcctcatcatcaaatgataaatctgcaattatatggaaggtcgatgaagatggagaactattgctgaagcacagattgactggtcatgagaaaccagtgatgatggttgcatggagtcctgatgatagccagcttcttacatgtggaatggaagaagccatccggcgttggaatattgaatctggtgaatgtattcatgtctacgaaaagcctggccttggtttgacgtcatgtggttggtttccagacggaaaacaaatattgtgtggtctatctgatcaaagcctttgcttgtgggatttagatggtaaagaggcagattgctggaaagggcagcggtcatcaaaaacatctgattttgctgtaacaaaagatggcaaatttataataattatgaacagagattccacaattcttttattcaatagggacacgaaacaggagaggctgattgaagaggataatacaatcacttcattttctctttctgatgatggagatttcttgcttgtaaatcttataagtgagaagatccatttgtggaacataaggaatgaccccagtagagtgaaacagtacattggccataaacgcagccggtttgttataagatcgtgctttggtggatcggatcaggcctttattgccagtgggagtgaagattcaaaggtctatatatggcacagagctacggaagatgttatcgagactctttctggtcactcctggcgcggtcaactgtgtaagctggaaccctacaaatccacatatgctcgcttctgcgagtgatgatcacacaatacgtatatggggggtgaagaaggccagcacaaagcggaaggacataggcagcagcagtagcagcaatgggactcacatgaacggcagtgccaacggcaacggtttcgttcaccagtgcaacggtagccgcagcaaatgatgatggcttgatccttggtagccccatgcaagcgatgatagcttgatccttggtagcccccatgcaagcgtcatttgtaaatcctcctttgctttgctttcctttcgccaggaagaacaccatagtttaaaacaaagctacagtaacaggtgtgagtgggtgaaaaacctgcttggttttatgcaccatctcccttgttccatcatcatcatcatcactgtggtcacattaatttaccaattcaagctgggtacaaattccggtgttatttcataaaaaaaaaaaaaaaa

SEQ ID NO: 4209 - DNA, 3640 bp, Triticum aestivum
  Clone ID: TRIAE-23APR03-CLUSTER169_2
ccctagaccgtcgctcgcctgcttccttcaccgacgcgacaggcgaatccaaggtttcgcggcggttgcggccctagcacgcgctggatctgacgcggcagctcccggcggccgcgtactactgcctgctcttcgctgcgtcggcggctgtcctcgggctcctcggcggcgtcgcgcgctatatgcttccccggaagcgggagatcgtcgccggcgaggtcgaggacttgcagaagaagacccgcgccggggagggggaggtcactagggaggaaggagacgcagccatggcagggagggggaacgagatcgacgaggacctgcacagccgccagctcgccgtctatgggcgcgagaccatgaagcgcctcttcggctccaacgtcctcgtctctggactccagggtctcggtgctgagatcgcaaagaaccttgtccttgcgggtgtcaagtctgtaaccttgcatgatgatggtaacgtggagctgtgggacttatcaagcaacttcttcctctcggagaatgatgttgggcaaaaccgtgctcaagcttgtgtacagaagctacaagagctgaacaatgctgtcctcgtctctgccttaaccggtgatttgaccaaggagcacctttctaaattccaggccgttgtcttcactgatatcagcttagataaagcaattgaatttgatgattactgccacagccaacagccacccattgcgttcatcaagtctgaagttcgtggtctttttggcagtgttttttgtgactttggtcctgaatttactgttttggatgtggatggagaggaaccacatacaggaattgttgcatcaatcagcaatgacaatccagcacttgtatcttgtgtggacgatgagcgtctggagttccaggatggtgatctagttgttttctctgaagtccatggaatgactgagctgaatgatggaaaaccaagaaaagttaagaatgcaaggccttactctttcttcttggaagaagacacttcctcatttggcgcatatgttagaggtggtattgtcacacaggtcaagccaccgaaggttattaaattcaaacccttgaaagaggccatgtcagagccgggagaatttctcatgagtgatttctccaaatttgagcggccacctcttctgcatttggcattccaagctttggataagtttaggactgagttgagcagattccctgttgctgggtccactgatgatgtgcaaagggtgatagagtatgctattagcattaatgatactctgggagataggaaacttgaagaaattgacaaaaagctcctgcatcattttgccagtggttccagggctgttctgaatcctatggctgcgatgtttggtggtattgtgggtcaggaggtagtgaaagcttgctcagggaaatttcatccactttatcagttcttctattttgattctgtcgagtctctccctgttgaccccttggagcctggtgatttgaagccgaagaacagtagatatgatgctcaaatcagcgtatttggatctaagcttcaaaacaaactggaggaagcaaaaatctttatggtcggttctggggcacttggatgtgagttcttgaagaacctggcactaatgggtatttcttgcagccagaatggaaatctgactctgacagatgatgatgtcattgaaaagagtaatctgagccgccaatttcttttccgtgactggaacattgggcaacctaagtccacagttgctgctacagctgctatggtaattaatcctaaacttcatgtcgaggcccttcagaacagagcaagtcctgagactgaaaatgtgtttaatgatgccttctgggagaaccttgatgctgttgtcaatgcccttgacaatgttactgcaagaatgtacatagactccagatgtgtatatttccagaagccacttttggaatctgggactctgggtgctaaatgcaatacacagatggtcatccctcacctaacagagaactatggggcttcaagggatccacctgaaaagcaggcacctatgtgcactgtacattcatttcctcataacattgatcattgcctaacctgggctaggtctgagtttgagggtttacttgagaagactcccactgaagtaaatgctttcctgtcaaatcctactacatacataagtgcagcaagaactgctggtgatgcacaggctagagatcagcttgaacgtgttattgagtgtcttgacagagacaagtgcgagacgttccaggattctattacctgggcccggcttaagtttgaggattacttctccaaccgtgtgaagcagctgacgttcactttcccagaagactcgatgaccagctctggtgctcctttctggtctgctccaaagcggttcccacgacctgtggagttctcgtccagtgatcagagtcagcttagctttattttggctgctgcaatattgagggcagagacttttggaatacccatacctgagtgggccaaaaccccaaacaagctggctgctgaagctgtcgacaaggtgattgtcccggattttcaaccaaagcagggggttaagatagttacacatgagaaggccactagtctgtcctctgcatctgttgacgacgctgctgtcattgaagagcttattgccaagttagaagaagtttccaaaacactgccatcagggttccacatgaacccaatacagtttgagaaggatgatgacacaaacttccatatggatgtgatagctggttttgccaacatgagggcaaggaactacagcattcctgaagtggacaagctcaaggccaagtttatagccggcaggatcatcccagctatcgccacctccaccgcgatggccactggcctcgtctgccttgagctttacaaagcccttgctggtggacacaaggttgaagactaccgcaacacgtttgcaaacctcgctatccctctcttctccattgctgaaccagttccacccaagaccatcaagcaccaggagttgtcgtggacggtctgggaccggtggactgtgacgggcaacatcacgctgagggagctcctggagtggctcaaggagaagggcctgaacgcttacagcatatcctgtggcacctcgctgctgtacaactccatgttccccaggcacaaggaacggcttgacaggaaggtagttgatgttgccagggaggtggccaagatggaggtgccctcttaccggcgtcatctcgacgtcgtggtggcgtgtgaggatgacgacgacaatgatgtcgacatcccacttgtgtcggtctacttccgctgaagaagcgctccttctgcgtttaaatgatcttgtggttggtcatgcttgatctactgatatgttatgagtgggggcttaagccacattaccgactgattttcctttctaccatctttgatgtcgatcggatcattgggggctgatctcgggttgttaccagacatcatgattcacgagactaggcacaacatcatcttgataattgttgcatgatgcgtttacagctaaaattgatcgttgtgggattgaatgcatgtcttaatctgtttgtccaataaaaaaaaaggcaacagaaagaaaaa

SEQ ID NO: 4210 - DNA, 3588 bp, Triticum aestivum
  Clone ID: TRIAE-23APR03-CLUSTER170_1
ggggcgcctccccccttgctcatccccctccctccccccgccgcccgccccacgaatcagtaccccctcccgaagctcccacgccgccccgcgccgaaacctagccgaccacgcgtcgcgcctcctccgatcccttccctcccccgcgccggacgaggccgccgccccacaggggcctgcgcgccatgctcccgtccaagaggccgtccgacgccgcggcgggggacgaaaacggccgcggaggggacgcaagaggcccaggctcggggagacggagggcgcgggcggcggcgggggcagtaacggccgcgccgcaggagatcgacgaggacctccacagcaggcagctcgccgtgtacgggagggagaccatgcgccgcctcttcgcctccgacgtcctcgtctccgggctcaacgggcttggcgccgaaattgcaaagaatcttgcccttgctggagtcaagtctgtcactatacatgatgtaaaaactgtgaagatgtgggacttgtctggcaatttctttttatctgaggatgacattgggaagaacagggctgctgcttgtgtagcaaagctgcaggagctgaacaatgctgttcttatatcagctctgacagaagaactaacgacggagcacctgtctaagttccaggctgttgttttcactgatatagatttagacaaggcttatgaatttgatgattattgtcacaaccaccagcctcctatttcctttatcaaatctgaagtctgtggcctttttggtagtgtcttttgtgactttggaccaaagtttactgttcttgatgttgatggtgaagatccgcatactggtataattgcatcgatcagcaatgataatcctgccctgatatcctgtgttgatgatgaacggcttgaattccaagatggtgatcttgttgttttctctgaggtccatggtatgacagaactgaatgatggaaaaccaaggaaggttaaaaatgcaagaccgttttcatttagcatcgaggaggacacaagtaactttggcatttatgtaaaaggtggaattgtcacacaagtgaaggaaccaaaggtgctatgcttcaaggcactaagagatgccatgacagatcctggagaagttcttctgagtgacttctcaaagtttgagcgcccccctgtgcttcatctggcatttcaagctctggacaaatttaagaaagaccatggacgctgccctgctgctggttgtgaggaggatgctcatagttttctgaagattgctgctgctattaatgaagcctcagctgatcgcaagctggacactattgatgagaaactattccgacagtttgcaagtggttctcgagctgtattgaaccctatggctgcgatgtttggtggtattgttggtcaagaagttgtgaaggcttgttcagggaagttccatcctctcaaccagttcttctactttgactctgttgaatccctgccaacatatccgttggaaccccaagacttgaagccatcaaacaaccgctatgatgctcaggtctctgtatttggttccaagcttcagaagaaaatggaggaggctaatacttttgttgtagggtctggtgctcttggatgtgaattcctgaaaaaccttgcgttaatgggggtgtcttgtagcagcaagggaaagttaaccataacagatgatgatatcattgagaaaagtaatttaagccgtcaattcttgttccgtgactggaatattggacaggcaaagtctactgtggctgctacagccgctagtgctatcaaccccagccttcacattgatgctctccagaaccgtgcctgtccagataccgagaatgtcttccatgacacattctgggagggcctagatgttgtcatcaatgcacttgataatgtcaatgccaggatgtatatggacatgaggtgcctgtacttccagaagccactactggagtcaggtacattgggcgcaaagtgcaatattcaaatggtgattcctcaccttactgaaaattacggggcttcaagagatcctcctgagaagcaggcgcctatgtgcacagtccattcttttccacacaacattgatcactgcttgacatgggctcgttcagagtttgagggtttgctcgagaaaacgccaaatgaagtgaactcttttctgtctaaccctgctcaatatgctgctgcaatgaggaaggcaggtgatgctcaagcaagagaattgcttgaacgtgtctctgagtgtcttaacaaggaccggtgcagtacatttgatgattgcataagctgggcccgactgaaatttgaggattatttctcaaaccgcgtgaagcagctcacattcacttttcctgaagatgctgccactagtatgggtgctcctttctggtctgcccccaagcgcttcccccgtgcactgcagttttcagctgctgatcaatctcaccttaacttcatcatgtctgcttcgatattgagagcggagtcatttggggttgctatacctgaatgggcaaaggatactagtaagctggctgatgtagtaaacaaaattgcagttcctacgtttgagccaaagcaaggggttaatattgtgacagatgagaaggcatcgaatctttccagcacctcagttgatgatgtcgccgttattgaagatcttctggctaagttgcaagaatatgccaagatgctacttccaggattccaaatgaaacctatccaatttgagaaggatgatgacaccaacttccacatggatttaatatccggattagcaaacatgcgtgcaaggaactacagcatcccagaggtcgacaagctgaaggccaagttcatcgcaggcaggatcatcccggccattgcaacctcaaccgccatggccacaggactcgtgtgcctcgagctgtacaaggtcatcgccggcgagcaccccgtcgaggactaccgcaacacattcgcgaacctcgccctcccactcttctcgatggccgagccggtcccgcccaaggtcatgaagcacaaggagacgagctggaccgtgtgggaccggtggtccgtccagggcaacctcaccctcgccgagctcctgcagtggttcgccgacaagggcctcaccgcctacagcatctcgtgcggcacctccctgctgtacaacaacatgtttgcgaggcacaaggaccggctgaccaagaaggtggtcgacatcgccagggaggtggccaaggtggacgtccccgagtaccggaggcacctggacatcggcgtggcctgcgaggacgaggacgagaacgacgtcgacatccccctcgtgtcggtttacttccgctagtctgggtctcgagataagaagccttgccgcatctccagaactctgttgtctcgcgaaagccactgatgtagtagtagtttagccgccgctctcgcgctgatagctctatcatggtcacctaagatgttctctctttgtggtatactggtcctacagttatctgctggttggtcgcagtcaaatagttggagttggaggaatgaacaacagacacatcggttacggttaaaaaaaaaaaaaa

SEQ ID NO: 4211 - DNA, 1865 bp, Triticum aestivum
  Clone ID: TRIAE-23APR03-CLUSTER1712_1
gccattggcattggcaccagcaccactccactccaccaccagagacccattccaatccccatctccattctcatccccgaccttctccatcaccacccccgtgccagtccagctctccagtcccccctgtacccatctaacgacccacggctccatcccgttgcttcctcctcgctcctcggttcgacagtccgccacgtcaggccatggcctcccggctgctgcgtcccgcggccgcgggccccgggcggagtccgtcgccggcggaggcggcgccgagggcgggcgtccccgggggccgcgccggagcaggcccgaccgcgccctctgcgggacatgccgccgctcgagcagcggccgaggtcgtacgccgggctggtctgcttctagatcctctagccgctcaactacttccaagggcccacccactaccgctactgcgaagatgccgtgcgataacgtcgaaggaaggatgcgatacctctacgtcgaataaggatagagacactgcgattgtcttcgaagggatcgtggccacctcgttggggtagagcccccccactgacaagaacgacgtgcacaagcagaccaaggctgagtccgctcatcactttcgagagacttaacggatgctgttgtttctaatcaggccaggggatggcctccatgtggccacgtctacatgagtaaaaccagctatttgcttctccatgggactgtgccgactgcatggtggacgtcatggtattatgcgatgtaagggttctgaggaccgtgagcgttctggaacctgaccccgaaccggcatcgcggacgcggaagtgcacgattcttcggagtgagagtcgtcatgtgctgaatacggatccttaccgtggagcttttaggtctgatgctgcagcttatgctagggaagtcgaagaacatataaattttggcagttcaggaagggttggaggttttatcgcagaaactttccaaggtgtaggaggtactgttgaactagctcctggatacctgaagtcggtatatgatactgtccggaaggcgggtggtgtctgtatagctgatgaagtccaaagtggttttggccgtactggaagtaactactggggattccagacgcaggatgtcatccctgacattgtaacgatggcaaagggaatcggcaacggtctaccactcggtgcagttgtaacaactcctgagattgcaagcgtgatggctcagaagatccagttcaacacattcggtgggaaccctgtctgttctgctggtggattggctgttcttaaggttctcgacaaggagaaacggcaggcgcattgcgcagatgtcggcgctcacttggtggaacgtctgaaatctcttcagcagaagcatgaaatcattggagatgtcagaggaagggggctgatgcttggggtggagctcgtcactgacaggacggagaagactccggccaaggctgagaccgctgttctgtttgagaaactcaaagatcttggcgttctagtcggcaaaggcggtctgcacggcaacgtcttcaggataaaaccaccgatgtgcttctccaaggacgatgcagatttcttggtggacgccatggactacgccatgtcagggttctgaggaccctgaacgttcttgtgcctgcccctgaaccgtcaccgggcggcggcgcagagtgcatggggatgccctggtgctggtcgcatggtacgtgcccgctgggctgcgtcactgcgtgtttgcacgcaacgcatgtatgcgtttttccagtgcgtgcccgggtgactatgttcgtgatggtgaaacacaacccctacccagggatgaataaatggaggaaagcatcaaaaaaa

SEQ ID NO: 4212 - DNA, 1050 bp, Triticum aestivum
  Clone ID: TRIAE-23APR03-CLUSTER1718_2
atcaccgtaccatactcgcatcgcatacagcagcgccacaaggaaggccaaagcgaaaacctagcaacggaatcacatcctacctactagaccgctcaccggcaatgtgcagagggatggtggacgacctccgcccgctcgggccccggcggctcgatgtgcgcgccttctacctccgcctctcttcctcctactcatccacgtcgccgccgcccgcggagctcacgctcgtctaccgcccggccatcggcggctccgcactggagcttgccagccgcgcgctcccgccggcgtgccccgccgaggccaccctcctgctcgtccgcggcgcggacgacgcgccggcgtacgcgagcgccgatcgcgtctcggccgccgagggcgcgcgcttcgaggtgtacgccgggaaggagctcgcggcggagggcgcctttttcccgcggcggcgcctcgacggaggagggtggcgcgtcgagtgccgccggccggccgggtcgcgctcgcgggtggcggaggtgctggtcctcgcggagggcggcgtgctcataagggccagggccagggcggcgaggcggatcgggtgcgcgacgccgctcgaggggataccggaggaggatgcgtcctcctgggggtcgtgcgagtgcggggcttgtggggatgagtggcagatggtcggagacagcagcagcgatgatgacgacggcgacaagctgaaggaggaggagttggaggccgagacgatgcggtgggcgctggagatgggcgcctgggcggtgtgcgtcggggtcggcctgctcgccaccgcccgccggttcagccggaggagggccgcgctccggtgatccctgcctgtcaagagaaatttgtttttgttttcttcagtctcacttggtcaaagtgtattcagcagtagcttcttcttcttcagtctagtgattttgtttcgtgggagttgtcaatcaaagcttgtagcgtatatgtacatacactcgaaatcatactggtcagtagtgatactggtgtatgaactttgcaaaaaaaaaaaaaaaa

SEQ ID NO: 4213 - DNA, 1239 bp, Triticum aestivum
  unsure (1)..(1239): unsure at all n locations
  Clone ID: TRIAE-23APR03-CLUSTER1718_4
atcatactagcatacagcaccaccacagggaaagccagcaagggaatcacatcctacctagtgtagagtacgtgcttgtgctcaccggcaatgtgcccacccccgcgccgcccgattcgcccccaatccccaacccgcgcccccaaatcgcccaatccccgagcccccgcgcccgattagctgcgacgggaccgcgtccggttcgatccgcggcgccggctcgatcgagcgggggggacgcgcgcgcgggtggtcggattcgggcgagctaggggttcggacggtggccggcgcggccgcctagggtttacgccatggccgacaagggctgcctcaagcgcctccagaaggagtaccacgcgctctgcaaggagccggtgccgcagatcgtggcgcgcccgctgcccaacgacatattggagtggcattttgtacttgaaggaagtgtagccacaccctttgaaggtggatattactatgggaagcttaaatttccctctgattacccttttaaacctccaagtatcagcatgacaacccccagcggcaggtttgcccctcacaaaaggatatgcctatcaatgagtgattttcatccagaatcttggaatcccatgtggtctgtagcaagcattctaacaggactcctctcatttatgatggatgatgctcttacaactggaagcatcagaagtacagatggagagaagaagcgtttagcaaaggcttctcttgcttacaactgtgagagcaaaaattgcccgcacttcaggaaactgtttcctgagtatgttgagaagtataaccaacaacaagaaaaggagcaaactggagcggaaccagaaccccaggagaaccatgccccagctccttctcatgccgccgtcctgcaggcggcagctatggtgaacaatataggaagaccagtggccggggtccgcggcgaaaagaagctgaagaagcgagtgcccttttggctgatggtggttatcgtctctgtttttggcgcggtgatggccttgcccctgatgcaactttgacagtaaaaagtcgaataaagtgtgacagtggtgccgtaattttgtatagctttctgttggtttgtgcaactcaattcttcatccgtggactaccaccttggagacatggtgatgaactcttgtgatggtaaaactgtagaaccgtattctcactcccttgacgagaaactctacaagctgctttatttgagcttcntgg

SEQ ID NO: 4214 - DNA, 1341 bp, Triticum aestivum
  Clone ID: TRIAE-23APR03-CLUSTER17316_1
actccgccgatcagaactcagagtcaccacttgcatttcttcccccctcttgcttttcttccccgctccaaatccccaattttcttcgatataatctaacgtatccgtccatcaatctcacctccgatccgtcgccatcaacctattcatccacggataggcacctctgatttggaagctccaacggggagcatcgccggcgatgctttgctccggcccgcatgctagcctgcagcggcctgagccccggggaggctccggccgccgcgcgcctacgctgaccgggctggcgtccccccgcctccccgcccgagcaggtgggcggggtcgccgtcctccgctcgcggctcccggcggttccccagacctgccgtcgtcgtcgtcgacacccccgccgtttggcgccggggacgaccaggccgcggccgcggccgcggccgcctcctcctcctcatcagggttttgcatcattgaagggcctgagacagttcaagattttgataagctagatttgcaggagattcttgataatatcaggagccgccggaacaagatactctttgcatatggaggagatccgcagattgagaatacagcaaagaatataaaatgctgcacttgcaaactcttagtatgggcggcaagtcttatgccgatttcatccgtaatgttcatttgcctttgctcctcagacaggtagatcctattgtggcatccttctcaggtggagcagtcggagttatctccgccctaatggttgttgagataaacaatgtcaagcaacaggagcataaacggtgcaaatattgtttaggaactgggtatctggcttgtgcccgctgttcaagcacgggagctgttgtgcttactgagcctgtttcgacattcagtgatggtgatcaacctttatcagcaccaaaaaccgagagatgtccaaactgctctggcgcaggaaaggtgatgtgccccacatgcctctgtacagggatggcaatggcaagtgagcatgatcctcgaatcgacccctttgattaaaggcatatatcagttcagaaattcttgtatcgctatgtaagttgttgtttgtagataatagtatggacgggcatgtcagggattcaaggcctataatcatgaatagggactatttgtatactagtgaatctgagtagactactacaggaatctgtaacattataccatacccatcgtgtgtactgatcagtcgcttgaactgaacgatgcaggagtgtatgtttgccaaagcaaataaatcgtttcacgtttgtaccaaacaatttaatctcattaatgaatgttatgtgccttttgagtccaaac

SEQ ID NO: 4215 - DNA, 2719 bp, Triticum aestivum
  Clone ID: TRIAE-23APR03-CLUSTER1736_1
tcccgcgcgcgtctcctcctcccagacctccctccccccctcccccgcccgctctcgctctcccctgcgcctctccctcctccccccgcgctcctcctgatcttggccgcccttgccccccgttgcctcctccatggagccgtgctaaatgcagggcgagcccgagaggtcgtagcgtttctccccgtccggtctgctgcatggcgtattctgggtctctcagtacgcgctcccactccttggtgtttccgaagaaatggaggagagcttcgtcccccgccgaggcatcaagaacgacgtccgcgggcggctcaccctgctacaagccggactggacgggaggcctcagcgccggtctcaggatcctggcgccgaccacctgccgcgactctgcagccgcggtaccagggatatcgctcggcgagccaaaagcttggagcaccccgcgagtcccgagtgatctgcagacgtgggagtccaccgccccacgtgagcttgtcccatccctagtccgaggtcagcatctactgacccctgttgcggaagcccctgccctcagaatgtctacccccctatgcctcttcgccaaggacaggcccgacctccgtgttaacctcttccttgcctggcttggttgcgccggtgggtgggactgccctcgtcatggtcttgctggcggtagatggcgtgcctttcgaggtcaacgagcacaggctcatcaactttcagcaggtcgtgatgcttgtgggctgggtcgccgtcctgcagttactgaagaaaatcgctacagagtttctgtggccgtagagggagaacatagaagcactacagtttgttccatcatggagctttgcccacggaatgctccccatcgtgttgtcatttggccttttgctcaccgcgctgcggagcaggaaagcgcgatcctggcgctatggagcaggttggctgcccggcttcacccccgtccccggcctcccaccggcggggctgctgtgggatcacatggactcccaatagctggggttctcttcccccgtcatgatcatgctcctggttccagtcaaggcagtacatcctcccaaagctcttcaaaggtgcacatctcaatgacctggccgcagcggggtatgaggagtcacggtgccttcatgcctgcaacaatgattgctgtcctgttctacttcgaccacagcgtggcatcccagcttgctcagcaggcagagttaaatttgacggcggtgagatcttgccactgaatagtccttctcctacgcttcctgacgttgatgtggtgcctgattggtatccctccatccaatggtgtcattccacagaggccgatgcatacaaagagcttggctactctaaagcatcagatactccgtaaccgactagtggccacggcacggcaaagcatgcgccagaacgcgagcttgagccaactgtacaacaacatgcaggatgcttatcatcagattcagacaccgctgatccaccaacaacagaccgtaagcggcttaaacgagctgaaggactccactgtgcacggagtgtcaagcatggataacttcgatgcaccggttgatgagacacctttgacatagaaaaagaggaagtatgactattggctaatgtgtatctatctgaagcctccagatctaagggagcaccggttgtgtaatcggcggctgggcagccatgcccttactgaagaagatccctacagcagtgctgtgggggtattttgcgttcatggcgattgagagcttgcctggtaaccagttctgggaacgaattttgctgctcttcactgctcccagcagaagatacaaggtgctggaagagtaccatacaacatttgtcgagactgtgccattcaagacgatagccatgttcacactcttccagaccacatatctgcttgtttgctttgggatcacatggatcccaatagctggggttctcttccccctcatgatcatgctcctggttccagtcaggcagtatatcctcccaaagctcttcaaaggtgcacatctcaatgacctggacgcagcggagtatgaggagtcaccggctataccattcaaccttgctgcgcaagatattgatgtggcactgggacgcacccaaagcgcagagatccttgacgacatggtcaccagaagccgcggtgagatcaaacgcctgaatagtccgaagatcaccagctcaggtggcactcctgtcacggaactgaaaggcatccgcagtccttgtatctctgagaaggcctacagccctcgcgtcgccgagctgaggcatgaacgcagccctctagggggacgagacagtccacggacgggtgaggcccgaccatccaagctgggtgaaggctcaacaccaaaatgaagcaataatgctgcatcgctcatataagctatggagctactggaagtaaattatatcgataatttaagcatcagtgctaatataagatgtctacttatgcacggtatgatgccactatatgatggccagtgatgaagtatgaggcccctatatgatgcctactgatgaagtatgaaaataggctaatgtgtatctatctgtagcctcctgtgtgtaatctctgaatgagtagaagatattatagcgtccactttgaaacttttttgagtctcacttttctacataactgcaaattgttcatattattctttattttgcaccaaat

SEQ ID NO: 4216 - DNA, 1509 bp, Triticum aestivum
  Clone ID: TRIAE-23APR03-CLUSTER17464_1
ccctcccttccagcttccaccacacaaccgcccgccgctccgagctccggctcgccccctcctcctccacgcgcgccctagacctgcgccccagggtcgccggcgatgagcagcctccgagccacctccgccctcctccacacctactacacttcgtccgccgctgcctgccgggtcggcgccaggcggctcggcgggagcttccgcgtcccgtccaaggcgtcgtccgccttcgtgctcgacgaggtcgcgagggcggccgggggcgtgcggaggagggccgccacgcgcgcggcgagctgggattcggagaagtccccgtacgagacgctcgagctggaaagggatgccgacgaggaaaccataaaggtcgcatacaggagattggccaagttctatcaccctgatgtttatgatggtaagggaacccttgaggaaggagagactgctgaagcccgtttcatcaaacaagcagcatatccggagctgttgatcgatgacgaaaggagaaaggcatacgataaagagcattttgtgaatccaatgaaggcttctcaggcatggatggagtgggtgatgaaaaagcgaaaagcttttgataaacgtggcgacatggcggtagctgcttgggccgagcaacagcaacgagaattgacgcttcgggcgcgacgtctctctaggtcgaaggttgacccagaggaggaaaggagattactcgccaaggaaaggaaggcatcgatggagttctacagcacaactctaaaagaccataccctcgtattacggaagagagacatcatgcgcaagagagaagaggaagacaagatgagtgagatcagtagacttctagctgccgaggggcttgagttagatacagacgaagatgatgatgacacaactttcttgaagtaattctatccagtatttaccccaaccctcgtcccagaaagccctgcaaggtttcgctgaagttacttccatccatcgagctgcagtatataaggctaagtgaaacccggccttgttggacacgattagtcgtacactgttaactgttggatcaggaaatcctatctgcgctgatgtaggattgtcccatggagcagagagaggaggggagtgaagtgattcttcagtgctgattgatacagttccgcagtgtaatcggcgaaggatggatgcaagacttgcaatagctacgactatcagatgtgtatacttgttacatgcaagatgtaattatgttaaggtggtatccaggcgctgttaccagctgcgtgtaaccgtggccctgtgttatactgtagaaggcagatgaagcagccaggtttgtgtttcagcctagattcttcccgtggctgggcactgtttcattacctgttatactactacaatgcatgattcgcttgtcgtccttgttaaaatctgaaggcttctgaatgatgatgaatactaccaagtgattgctagtaacgtgaatatacacattgtcgcaaaaaaaaaaaaaaa

SEQ ID NO: 4217 - DNA, 1067 bp, Triticum aestivum
  Clone ID: TRIAE-23APR03-CLUSTER174_18
accactcactcatccaccacctcttagcagcaaccaccactgccatagaaactctagctcatcagtcctagctagacttgttgcatagccagcaatggggtactgtaaaaccctagcagttggcctkttcgccatgctgctccttgctccggccgtcctggcgaccgaccccgaccctctccaggacttctgcgtcgccgacctcgacggcaaggcggtctcggtgaacgggcacacgtgcaagcccatgtcggaggccggcgacgacttcctcttctcgtccaagctggccaaggccggcaacacatccaccccaaacggcttggctgtgacggagctcgacgtggccgagtggcctgggacgaacacattgggcgtgtccatgaaccgtgtggactttgcgcctggaggcaccaacccaccacacatccacccgcgtgccaccgagatcggcatcgtgatgaaaggtgagctcctcgttggaatcctcggcagccttgactcggggaacaagctctactccagggtggtgcgtgctggggagacgttcctcatcccgcgcggcctcatgcacttccagttcaacgtcggtaagaccgaggcttccatggtcgtctccttcaacagccaaaaccccggcatcgtcttcgtgccgctcaccctcttcggctccaatcctcctattccgacgccggtgctcaccaaggcgctccgggtggaggccggggtcgtggaacttctcaagtccaagttcgcgctgggttttaattcctgggagccttcccataaataatcaatacataattctatatatgcatgctagcaaaatttaaataattctcagcagatgacatgtattcaagcttcgggttaatctcgcatgcagttgtaataagattgaataagttagcctcgtggttcagtcatcagagccaatacgaggaattgaaatgtactactttttattgtcttcattgttcttttcattgaacggaatatataataagcattttcataaaaaaaaaaaaacctgcccgggcggccgctcgaaatcacttagtgaattc

SEQ ID NO: 4218 - DNA, 1040 bp, Triticum aestivum
  Clone ID: TRIAE-23APR03-CLUSTER174_19
actcagaactgcactcactcatcctccatagcttagctcagctaccaccagtgccttagacactcttgatcttgaacaaccatagcaagcaatggtctactccaaaaccatagcttgcatgttcaccatgctgctccttgctccggccatcatggccacggaccctgaccctctccaggacttctgtgtggccgacctcgatgacaacgcggtccgggtgaacggatacccgtgcgtgccccagttggaagccggcgacgacttcctcttctcctccaagctagccaggggcggcaacacgtccaccccgaacggctcggccgtgacgaggctggacgtgacggagttccccggcgagaacacgcagggtatctccatgaaccgcgtggacttcgcgcccgggggcwccaacccgccgcacatccacccgcgcgccaccgagatcggcctcgtggtgawaggcgagctcctcgtgggcatcatcggcagcaacgagtccgggaacaggctctactccagggtggtgcgcgccggcgagaacttcctcatcccgcgcggcctcatgcacttccagttcaacaccggcgacactgtggccaccatgtttgtctccttcaacagccagaaccccggcatcgtcttcgtgccgctcacgctcttcggctccgacccgcccatccccacgccggtgctcactagggctctccgggtggacgccggggtggtcgaacttctcaagtccaggttcgccggtgggtctttccaggcctcctaagagcctgcccaagatgatcaatacataatccgatctgcatgctacgctagcgaaatttaatactagttcacagcacgagacttgtatataagcttctggttaagctcgcatgcatgcagttgtaatacgattgaataagttagcctcgcagttctggccgtcaaaaccgacacgaggaattgaaatgtattactttctattgccatatttcctctatatattgaacgctatttccaattaaaaaaaaaaaaaaaaaaaaaaaaaa

SEQ ID NO: 4219 - DNA, 1027 bp, Triticum aestivum
  Clone ID: TRIAE-23APR03-CLUSTER174_20
atccaccacagcttagcagcagcaacaaccagtgccatagacactctccatcaacaaactctagctgatcaatcctagctaagcttattacatagcaagcatggggtactccaaaaccctagtagctggcctgttcgcaatgctgttactagctccggccgtcttggccaccgacccagaccctctccaggacttctgtgtcgccgacctcgacggcaaggcggtctcggtgaacgggcacacgtgcaagcccatgtcggaggccggcgacgacttcctcttctcgtccaagttggccaaggccggcaacacgtccaccccgaacggctccgccgtgacggagctcgacgtggccgagtggcccggtaccaacacgctgggtgtgtccatgaaccgcgtggactttgctcccggaggcaccaacccaccacacatccacccgcgtgccaccgagatcggcatcgtgatgaaaggtgagcttctcgtgggaatccttggcagcctcgactccgggaacaagctctactcgagggtggtgcgcgccggagagacgttcctcatcccacggggcctcatgcacttccagttcaacgtcggtaagaccgaggcctccatggtcgtctccttcaacagccagaaccccggcattgtcttcgtgcccctcacgctcttcggctccaacccgcccatcccaacgccggtgctcaccaaggcactccgggtggaggccagggtcgtggaacttctcaagtccaagtttgccgctgggttttaatttctaggagccttccctgaaatgataattatataattccatatatgcatgctagcaaaatttaataattctcaccagaagacatgtattcaagtttcaggttaatctcgcatgtagtcgtgtaataagattgaacaagttagcctcatggtgtagccttcgatcagaaccaatatgaggaattgaatgtactactttttattgtcgtctttgttcttttcactgaacggaatatataataagcattttcgt

SEQ ID NO: 4220 - DNA, 1036 bp, Triticum aestivum
  Clone ID: TRIAE-23APR03-CLUSTER174_25
actcatccaccacagcttagcagcagcagcaaccagtgtcttagacactctcaatcagcaaactctagctgatcactcctagctaagctttgcatagcaagcaatggggtactccaaaaacctagcggctggcctgctcgccatgtttttcctagctccagccgtcctggctaccgaccctaaccctctccaggacttctgtgccgccgacctcgacggcaaggcggtctcggtgaacgggcatccgtgcaagcccatgtcggaggccggcgatgacttcctcttctcgtccaagctagccaaggctggcaacacatcgaccccaaacggctcggccgtgacggagctcgacgtggccgagtggcccggtacgaacacgctaggcgtgtcgatgaaccgcgtggacttcgcaccggggggcaccaacccgccacacatccaccctcgtgccaccgagatcggcatcgtgatgaaaggtgagcttctcgttggaatccttggcagccttgactccgggaacaagctctactccagggtggtgcgtgctggagagacgttcctcatcccgcgcgggctcatgcacttccagttcaacgtcggtaagacagaggcctccatggtcgtctccttcaacagccagaaccccggcatcgtcttcgtgccactcacgctcttcggctccaacccaccgatcccgacgccggtgctcaccaaggcactccgggtggaggccggggttgtggaacttctcaagtccaagttcgctggtggatcttaatccgggggagcctacccgaaatgataaatatataattcaatatataaatgctagtgaaatttaatatttctcagcagaagatatgtattcaagcttctggttatgaacctcgcatgcggttgtaataagattgaataagttagcctcgcggttcagccttcagaaccaatacgaggaattgaaatgtgctactttttattgtcgtctttgttatttcatagaacagaatatataattatcatttttgtaaaaaaaaaa

SEQ ID NO: 4221 - DNA, 1193 bp, Triticum aestivum
  Clone ID: TRIAE-23APR03-CLUSTER174_27
gcacaacacgcaccgctttttgtactctgatctctcccatcttgtgcgcccttcgcgtttcgcgcccagagtgctctttgcttacgttcacgtccgttgccttgcacccacccacccctcgacgggaaacaagatagagaaggaagaaaaaaaagctcgtctgccggccatggagagctcctcctcgtctctgctgctgagctcgtataccggcggcaacaagagggccagggaggccgacctggacgcggcctcgtccgccgaggcggaggccgccaagaggatgcggcccgaggacctgctggacctgctcgacgacgacgccgacgccgcggcggccggcgacctggcctccgtcatgcgcagcctggaggaggagatatgcgccggcgacctggccccgccgcagcccgagctgggcttcctgctcgaggcctcggacgacgagctcggcctgccgccggcggcggccgcggcgtcctcctcgtcggacgacgccgagggctgggagccggaggtgaccgccggcgtgttcggggagcagatatggagcttcgaggacgagattgagggcgcctacgccttcggcggcgttgcctactcgccggaggccgccgcggcgaccgcagcggccgatgctgagtggggcgacgacggcttcgacgccggcctgttcggcttcggcgacgagtccttggggccgtccgatgtcgacgtgcttcgccaggagaccatgcccgccgtttgatcagtcatcagtgaatggattagccttttctttttttaccattggctaactttagctttaccctttttttaacctacggggatgtaaatattctagatgcaagaaggaagaaaaaactgtggggaagaaacctgaaaaatgtgttgcttcgtattaatgatgtagagagaacaaatatcatctgaaggaaaaaaaaacctccctggattctagaagaaattgtttcatatttatgttcttcttggaacaacttcttttttatgaaagaaataggaaataaacccgctaaagtatcccctattttggtagaaatgtatgctagtagtataatatgaacgagtgtaagactcaacagcagatgcggaattatgatcgttgatggaaatgttcaaaaaaaaaaaaaaaagggcggacactcgcgatctagaactagacggacgcgggg

SEQ ID NO: 4222 - DNA, 1354 bp, Triticum aestivum
  Clone ID: TRIAE-23APR03-CLUSTER174_35
atccaccacagcttagcagcaaccaccagtgcctcaaagactctttgatcaacaaactctagctgatcagtgctagctaagtgttaacagcactcttctcacagagatctattcctcatcaattagaactacaagccatggattcaccaaggtctagccattacagaggagaggaacacgagaggggggagatacagaagcagaggaggccgaagccgtccagttcctagccaagttgttcgtaactctatcccttgtatttgtagttgccgtgttgcctggctaccgagcagcccaagcccagtagttatggcccattgtcgatcccatgggagagcaggggaagtcgctaacactaagcttgctacatagcaagccatgggttactccaaaaacctaggggctggcctgtttgccatgctgctccttgctccggccgtcctagcctcggaccctgaccctctccaggacttctgcgttgccaacctcaacggcaaggcggtctcggtgaacgggcattcatgcaagcccatgtcggaggccgggcgacgacttcctcttctcgtccaagctggcgcaaggccggcaacacgtccaccccgaatggctcggccgtgacggagctcgacgtggccgagtggcccggtacgaacacgctgggtgtgtccatgaaccgtgtggacttcgcgccgggaggcaccaacccgccgcacgtccacccgcgtgggaccgagatcggcatggtgatgaaaggtgagctcctcgttggaatcctcggcagcctcgactccggaaacaagctctactccagggtggtgcgtgctggagagacgttcctcatcccgcgcgggctcatgcacttccagttcaacgttggtaagacggaagcctacatggttgtctccttcaacagccagaaccccggcatcgttttcgtgccgctcactctcttcggttccaacccgccaatccccacgccggtgctcaccaaggcgctaaggatagaggccggggtcgtcgaacttctcaagtccaagttcgctggtgggtcttaatccctgggagcttgccctggaatgatcagtatataatttgatatatgcataccagtgaaatttaataattgttcagcataagacacgtattcaagcttctagctaagctcgcatgcagttgtaataagattgaataagttagcctcgcggtttagccttcagagccaatacgaggaatcgaaatgtactgctttttattgttgtgtttgttcttttcattgaacggaatatataattatcattttcgtaaaaaaaaaaaaaaaaaaaactcgagactagacctcggccgcgaccacgct

SEQ ID NO: 4223 - DNA, 2244 bp, Triticum aestivum
  Clone ID: TRIAE-23APR03-CLUSTER1756_1
agttttcccccgtcggtctcctcccccagatccacatccacccatggccatggcgatctccccccgcctcctcctcccgtcccctcctcgcggcggcggccgcctccgccctcgccggcgccaacgacctggtccgcgagctccagtccctccgctcccgctcccccgccggcgtgatccacctcaccgacacctccgtcacccgcttcctctcctcgccggccccgcgcccctactccgtgctcgtcattcttcgacgccacctcgctccactccaagaccgacctccacctcccccagctccgccgcgagttcgcgctcctctccgcctccttccacgccaacaaccccgactcctccgacctcttcttcgccgacatcgagttctccgagtcgcagcactccttctcccagttcggcgtcaactccctcccccacgtccgcctcatcacgcccggagcactcccgcctcgccgactcggagcagatggaccagtcccacttctcccgcctcgccgactccatggtcgagttcgtggaggcccgcaccggcctcgaggtcggccccatcgtccgcccgcctctcgtctcccgcaaccagatgatcctgctcggcctcttgttcctgatctccatcccgttcgggatcaagaggatcatggaaggggacaccctgcttcatgaccgcaagctttggatggccggggcgctgttcgtctacttcttcagcgtctcagggggcatgtacgggatcatcaggcatacgcccatgttcatcaccgaccgggaggatccaaacaagctcgtcttcttctaccagggctcagggactcggcccaactctgcgaggggtgccgtctacaccctgtaattccccgtgatgctgcccgtcgcaatggtggcatacatggctgctgcggtaccgggcttgcagcaacaatgttgagggccattggcactcacagcgagtcctcaagcccaagccggcatgactatggtctacagtaccaaccttgccagtccaagcaggctgctcaccttactgcctcgtcccctggtctttgtgtgtctgctgctccgaggcgtccttggcctaatcacggtctctgtcctcgacgtcactgtctcttttttatcgcccatgcgttagtacatgctcacttctttgtcacctagggtgacaacaatgaacatcccaattctatcacgtggggttgatgatgctgtggtgacacacttgctggtgaaggtggagagcctgcagacacagcgatttgcgatgctggcagtcatggccatcgggtggtgggcagtcaggaaggtgatttacctggataactggaatactgggtacggcattcataccttatggccaagtagctggaggtcatttccacgcatactcacacccccctcccatcaccaccagcaacttcacaacaacatcctgtgataacttcttgtgtaaccaaccactctaacttttctatgcactgagtagatgcaccaactaacagttctttatccttcagtttatagctttgcatctaggtggctcaggctctaaggagagcctgtgcccctcatcagagacaggttcaggagtgctaatgttagtttttggcacttggcactacctcctgccatttgtaacacagtgatgggactccaaagaaggctttggagataccaaagcactgctgtgcaactcaataaccccaatggacccaggcatatttttattgtcttgggtcacccactcatctagatgttcatcttccccaatgtcattaccatggttaggtccaggacccactctctttctctctctgggcagagaggctttgatgctttttaatgtaatattatcggtcacggtgattgtaataataaagtagtactatgccacttctagggcaggaactctttactgttttatcagtcggatctagctaaatattctgtcaacctataatcagtaccttctctatcgacatggtagctcgccatataatgcaatgtaaaatctacctgttctgttgcaaatttagcatttcaattttctggggctttattgtggaaaatagagaaccgagtccttttataccgaggattttaacttgcagtatttcttgaacaatggtaaatcctagctgatatttgttttcaggccgtaaccccggccaaggatatttaccgtggggttgtctgggtaatcttatgatagtatggtgggctatagct

SEQ ID NO: 4224 - DNA, 1706 bp, Triticum aestivum
  Clone ID: TRIAE-23APR03-CLUSTER175_44
ctcggcctcggctgcgagcgtggctccacgcctcccccccaccgcaccgcaccgccccgccccgccagccggtgaccgggtcgcgccatcgcacggcgacgccagcccgccccgatggacccgccgccccctcctccgccgcagccggcgcacgggggctacgccgcgcgcttctcccccgccggcctcatccacgcgcccctctccgcgctgctcgagtattcctcgggcgtcctgcgggcccaggccggcggcggtgggccccagcgcggggagcccgccgcgggggccgacggggaggtgtcgattcggatcgccgggcccgacgacgcgcctggcgccggtgcgggggacgcgggagggcagcagcccgcggacgaggaggccccggcggcgcggggggacgaggccggcgcgggcggggggagcgggaggggggactcgccgtaccagggctacgacgtgcagcgcctggccaggtgggtggagcacgcgctacccttctccctgctcctgctcggcgtcttcatccgccagcacctgcaaggtttcttcgtcatgatctggattgccgcagtcatgttcaagtccaatgatatcttgcgcaagcagaccgctctcaaggggagaggaaaatgccaatgcttatcgggattgtaacagtattcaccattcacgtgtttggagtctactggtggtacaggaatgatgaccttgttagacctttggtgatgcttcctccaaaagaaataccaccattctggcatgctatatttttcatcgctgtgaacgatacaatggtccggcaagctgctatggttgtcaagtgtgtgctgctcatatactacaaaaacagcaaaggtcgtcactatcgtagacagggtcaaatgttgacagttgtggaatattcccttcttctgtaccgtgcgttgttgccggctcctgtgtggtatcgttttttcctgaacaaggaatatggaagtcttttttcatctttaacaactggattgtaccttactttcaaggtggcatcaatggtggaaaaggttcgttcacttttggcttcagtgaatgcgctgtctcataaggacttgcattatggttcacatgcaacaactgagcaggttcttgctgctggagatctgtgtgctatatgccaagaaaagatgcatactcccatcctcctgcagtgtaaacatatcttctgcgaagactgtgcctctgaatggttggagcgggagcggacatgcccgttatgcagggcgctggtgaagccaggggacatccggtcattcagcgacggttcaacgaccctcttctttcagctcttctaacaagaaacaagaagcgctaaccttcggcctgcagatgttggatcgccccctgttactctccatcagcctgccgtgtgctgagacttattccagtccaggtccttttccgccacttcgtgacaagtagtaggtgccgtgggtgtgcatattaccctgtataggtccttgcgggattctccatcagaaaaaagaggaatgttatgatgaaataactgaatctatagaggtgaatttccattagcatgtggctgggtgggtgccgccacatctgcaaaattcagaattgaccttatacaagatcacaaatgttaactcttgactcctgagccaacgtagcttgttgcttgtaaaatgagatgaacatatcccttt

SEQ ID NO: 4225 - DNA, 1325 bp, Triticum aestivum
  unsure (1)..(1325): unsure at all n locations
  Clone ID: TRIAE-23APR03-CLUSTER176_124
ccccaacaaccattccctctacaaccacaacaatcattcctttggcaatcacaacaaccgttcctccaacaaccacaacaaccatctccccaaccccaacaagtagtacaaataatctccccagcaaccccaacaaccattccctctgcaggcaaaccaacctcagccccttttccacaacaacaacaacaacaccaacagctggcgcaacaacaaatccctgttgttcagccatccattttgcagcagctaaacccatgcaaggtattcctccagcagcagtgcagccctgtggcaatgccacaacgtcttgctaggtcgcaaatgttgcagcagagcagttgccatgtgatgcaacaacaatgttgccagcagttgccgcaaatcccccagcaatcccgctatcaggcaatccgtgctatcatctactccatcatcctgcaagaacaacaacaggttcagggttccatccaatctcagcagcagcaaccccaacagttgggccaatgtgtttcccaaccccaacagcagtcgcagcagcaactcgggcaacaacctcaacaacaacaattggcacagggtacctttttgcagccacaccagatagctcagcttgaggtgatgacttccattgcgctccgtatcctgccaacgatgtgcagtgttaatgtgccgttgtacagaaccaccactagtgtgccattcggcgttggcaccggagttggtgcctactgataaggaaagatctctagtaatatataattgggtcaccgttgtttagtcgatggatatgtcgatgcagcggtgacaaataaagtgtcacacaatgtcatgtgtgacccgcccaaactagttgtttaaattctgaaataaaataaaaataaagttgtatcaagacaatgttcatattggcattgtgtggatgtcgatctgattgccatgcttgcaagttcaaaaaaaaaaaaaaaaaaaaaaaaaaaaaaaaaaaaaaaaaaaaaaaaaaaaaaaaaaaaaaaagatgaaaaagaaaaaagaaaacaaaacaaaaaaaaacaaaaaaaagggggcgccaattttaaaaaaacaaaacttaacatcacggcgttgggaacagatatccttttttaaaaaaccccataaattaaacttattggccgtcttttaaaaaacccnctgtttggaaaaaccctggagtaaccaaaattaaaggacctagagacattcccactttttgaaaattgggaaagaccaaagaagccccccctgaagccccttataaaaaatttaaaaacctaaatggtaaaaggaaccccccctttaactgg

SEQ ID NO: 4226 - DNA, 1129 bp, Triticum aestivum
  Clone ID: TRIAE-23APR03-CLUSTER176_183
tcatccatcattctcataagtagagcacatcatttaagccaagcaagcagtgctcaatacaaatccaccatgaagacctttctcatccttgccctccgtgctattgtagcaaccaccgccacaattgcagttagagttccagtgccacaattgcagccacaaaatccatctcagcaacaaccacaaaagcaagttccattggtacaacaacaacaatttccagggcagcaacaaccatttccaccacaacagccatatccgcagcagcaaccatttccatcacaacaaccatatatgcagctgcaaccatttccgcagccgcaactaccatatccgcagccgcaactaccatatccgcagccgcaaccatttcgaccacaacaatcatatccacaaccgcaaccacagtattcgcaaccacaacaaccaatttcgcagcagcagcagcagcagcagcagcaacaacaacaacaacaacagatccttcaacaaattttgcaacaacaactgattccatgcagggatgttgtattgcaacaacacagcatagcgcatggaagctcacaagttttgcaacaaagtacttaccagctggtgcaacaattttgttgtcagcagctatggcagatccccgagcagtcgcggtgccaagccatccacaatgttgttcatgctattattctgcatcaacaacaccaccaccaccaacaacaacaacaacaacaacaacaacaaccgttgagccaagtctccttccaacagcctcagcaacaatatccatcaggccagggcttcttccaaccatctcagcaaaacccacaggcccagggctctttccagcctcaacaactgccccagtttgaggcaataaggaacctagcgctacagacgctacctgcaatgtgcaatgtgtatatccctccatattgcaccattgctccatttggcatcttcggtactaactgagaagagaagaactctagtagtagatatatgatacactgttttcttagtccatggtttggtcgttgtagcggtgaaaaaataaagtgacatgcactatcatgtaagaacctgaactatactagttcaaacttgggaataaaagacaaacacaggtcttgtctac

SEQ ID NO: 4227 - DNA, 543 bp, Triticum aestivum
  Clone ID: TRIAE-23APR03-CLUSTER176_187
tagaacatcctaatcgaaacagacacacactagcacaacaaaaccatcattccacgagcagatcgacaggactgggagagcacaagtttaggaccaaccaacgatgaagagcagcacgctggtggcgatcctggtcctccagaccgtcatggtcatggggatcctctcacaggccgccgccaaagacaatttccccaagtgctgcgacaactgcaactcctggtcggggtaccaattctgtgaggacgtcggccccaggtgccgccgcggctgcgccaactgccaggtggtgcagatgagccccgtgaagacgttccggtgtggagatggacgccccgtctatgacgggcacgacacgcccacgccctgcccgccgccgtgcaaaaagcactgatcgctccagctccctcagacactgatgagatcgatgttgcggccaaaaacataaaataaaaaggctccgatgagatgagatgagcagagccatgcccagccttctctttcctttgagagataataataatatatttgatgttgcttttt

SEQ ID NO: 4228 - DNA, 1684 bp, Triticum aestivum
  Clone ID: TRIAE-23APR03-CLUSTER176_189
agagttgctcaaacacagagagttcctcgacctcgactggactcccttcgctgttgacccaatccgccgccgcgtccaagatggcatctccggcgccgccgcttaaggacgccgtcggaggcctggaccgcgaccccttcgtcgccctcctcgccaagctcatcggcgagtcccagcgcctgcagaacgacccgccggccctcgtcccgcaggaggacctccgtggcgcagcacgtcgtcgacgcgctccgcccggtgtcgacggacaccggcggcggcccgctcgtcgtgcggaaggtgagctacaccgacggccggagcaacgtcatcgtcgagtaccccggcaccgtccccggccgcgtcgtctccttcgtcggcatgcacatggacgtcgttccggccaaccctagcgaatgggacttcgatcccttctcactaaccttcgaaggtgatgacaaggaaaagcttaggggccgtgggacgacggactgccttggtcatgtggcgctagtgactcagctcatgcggcggcttggtgaggtgaaaccaccattgaagcattctgtcattgtggtgtttattgccaatgaagagaattcatcggtcactggcattggtgttgatggtcttgtcaaggatggtttgctggataagctcaagactggacccttgttttggatagatactgcggataagcagccatgcattggtactggtgggatgatcccttggcatctaaaggcaacagggaagctgtttcacagtggccttgcacataaggccataaattcgatggagttaaatatggatgcacttaaagaaatccaaactcggttttacaatgacttccctgcacacgagaaagagaagctctacaagtttgctactccatctacgatgaagccaacaaagtggagttatcctggtgggggtctgaaccaaattcctggagaatgtacaatttcaggggatataaggttgactcctttctatagcacgagttttgttgtccagaagttaaaagagtatgtagatgatataaatgctggacttgaaacaaagcttcctactcgtggtccagtttcgaaatatgttcttccggatgaaaatctgcgaggaaggcttgaaatcgcttttgatggagatgtgatgaatggggtggcctgtaatcttgagtctcgggggctttcaagcattatgcaaagcaactgaggaaatagtcggatacgtagagccatattccatcaccgggagtttgcctctgattcgtgaattacaggatgaaggatttgatgttcaaactgctggatatggcttactgaagacgtaccacgcgaagaacgagtattgtctgttttcagatatggcccaaggctttcaagtgtttgtaagcatcatttcgcagctggaagcagatgcttaagccttctttaaggcatgaaagattaccttattggacacctattcctgctactcggggatctaataaaagtgttttgagcttagtctaaatcatatctcgtaccatgatattcaagctcagtttaccgcatagaattagaacttgtttgcattggaacgttttgagtgtacgagcttggtgtttttcgtgaaccatacatatcgacaaaaatacagaaggcaaagatcatctagccatgctgtcagtactgcaaaaaaaaaa

SEQ ID NO: 4229 - DNA, 837 bp, Triticum aestivum
  Clone ID: TRIAE-23APR03-CLUSTER176_191
acagtcgtcccacgagcagaaccaaaacaaagacccgtacggccaatcggccgaaaattccccagtcctggcctcttagccccaaccctaaccctagccaatcgcattcccatggacgacgacgccggcgacgcctcgccgccgccgggacctgccccccttgctgccacaggcgccccgtcgttgcgtgacatggcggcgtcccctaccagctcgcgctccgtgacggagacggtgaacggctcccaccgcttcgtgatccagggctactccctcgccaaggggatgggcgtcgggaagcacatcgcgagcgagaccttcaccgtcgggggataccagtgggctatctacttctacccagacgggaagaacccggaggacaactcggcctatgtttccgtcttcatcgcgctcgcttccgagggcactgacgtccgcgctctctttgagctcacgctgcaggaccagagcggcaagggcaagcacaaggtccactcccacttcgatcgctcgctcgagtctgggccctacaccctcaagtaccgaggctccatgtggggttacaaacggttctttcggcgaactgctcttgagacatcggactttcttaaagatgattgtttgaggataaactgcactgtgggtgttgtggtttcaactattgattactccagaccacactccattcaggttccagactctgatcttggctaccacttcgattctcttttggacagtaatgaaggggttgatgttattcttaataaggagacmagaacgaggttaatgagagtgaggatctgaaggagattgttcttgatgatctagagcccaagg

SEQ ID NO: 4230 - DNA, 1831 bp, Triticum aestivum
  Clone ID: TRIAE-23APR03-CLUSTER176_193
cacatagtcagtcacacccagtacggctcgcatcgagaaaccatactgcaagccgagaaatcgtgcaagctagcggatgatgcgtcgcggggttgccggcatggcgctgctgctcgtgctgcttctcctcctctcggggtggtcggcgatggggactccgcgttcacgcgagagatgggaggagggggagggggagtggcggccggaggaagaggccaagggcggcggcgggagtggcgggactgggaaaggcctgttcttgctggacaaggtggagaaggtggtggagtcggaaggtgggagtgtgcacgtcgtgcgcgggctgcccgtgccggaagcaccgtggcagcacggcgggtggtccgccgagtgcggagcttgccgggaggggctcatgcacatcggcttcataaccatggagcccaagacgctgttcgtgccgcagtacatcgactccaacctcatcctcttcgtgcagcgaggggatgtgaaggttggatggatccacaagggcggtctcgtggagaagcagctcaagatgggcgacgtcctacagatcgacgccggctccatcttctacatggtcaacacaggcaaaggccagaggctgcacatcatatgcagtatcgacgcctcggatagcgcaggcttcgcaccttatcagtccttctatcttggtgggggagggaaacagacctcagtgctggccggattcgagccaaagattcttgtcaccgctctcaacaccacttacgacgaactgggaagaatcttacccgtgcgaaccggtggaaccgggggccctttcgtgtcctacacaacggagtccgggagcggtggcaaagagcatggacagggaggcgagcgtgatgtgggggaaaatggaagggagagcgagccatggagaccagtggggagaggcgacgacgacgaacccggtagcgggcaatccacttggacttggtcgtggaggaaactgatgagcaggttcatcggaggggagctgaacaagaagtcggacaagactctgcgcgcgccggagccttacaacctgttcgaccacgagcccagcttccggaacacctatggctggagcatctccgtcgacaagcacgactacgagcccttggaccactccgacatcggcgtctatctcgtcgacctcaccgccggctcgatgatggcgccacacgtgaacccgagggcaacggagtacggcgtggtgctcgccggggaaggcgtcatccaggtggtcttccccaacgggtcgcttgcgatgagcgcggaggtgcgtgccggcgacgtgttctggatcccacgccacctcccgttcgtccaggtggcgtcgcggggcgggccgttcgtgttcttcgggttcaccacgtcggcgcggcggaacaagccgcagttcctgaccggccccacctctgtcctccgcatgatgctcgggccggagctcgcggccgggttgggcgtccctcagaaggaattgaggaaggtggtggaggcccagacggtggcggtgatcgagccgccgttgccggagaaggagaaggggcggaaggagagggaaccgtttgttatgaagcaagtggcgagggagtgagcgcacgcggctagccatctgcttaatgctttatttagcagatgatcgatcttacatgtgttcttctggtcgaaacttctgtacatcatgcgcgtgtttgcgccgtctgtttccgtgtttgtgtcgctagtgtgtgttgtgttctagtacgtgtttgttcatgtgagttctggtgtcgtcaataaataaagatgcatgtcaaattcaaaaaaaaaaaaaaaaaaa

SEQ ID NO: 4231 - DNA, 1373 bp, Triticum aestivum
  Clone ID: TRIAE-23APR03-CLUSTER176_194
catcagaaatcccaagccaaaaaccactctaaatccgacgcaaaaactcgagcccgaaccaagaaagcttcctccccgagacgagatcaagatggctcccgagctggccggcaagatgaccgccaaggccgccgtggcggcggcgaagcccgcgacgaaggcgtacgtgacgttcctggcgggggcgggggactactggatgggcgtggtggggcttgccaagggcctgcgcaaggttggctcggcctacccgctggtggtggccgtgctgcccgacgtgcccgagctccaccgcaagatcctcctctcccagggctgcatcgtccgcgagatcgcccccgtgtacccgcccgagaaccagacccagtttgccatggcgtactacgtcatcaactactccaagctccgcatctgggagtttgtggagtacgagaggatggtgtacctcgacgccgacatccaggtgttcgacaacatcgacgagctgtttgatctgcccaagggccacttctacgccgtcatggactgcttctgcgagaagacgtggagccacaccccgcagtaccagatcggctactgccagcagtgtcccgaaaagggtgacgtggccggccgccgagatgggcccgccgccggcgctctacttcaacgccggcatgttcgtgcacgagcccagcatggccaccgccaaggcgctccttgacaccctccgcgtgacgccgaccaccccattcgcggagcaggatttcctcaacatgttcttcagggagcagtacaagccgatcccgctggtctacaaccttgtgctggcgatgctgtggaggcacccggagaacgtgcagctggagaaggtcaaggtggtgcactactgcgctgcgggatcgaagccatggaggttcacgggcaaagaggagaacatggacagggaggacatcaggatcctcgtcaggaactggtgggatatctacaacgacgagagcctcgatttcaagggcctggccgccgacgccgacgagctcgaggcggcagccaagaagccgctccgcgcggcgcttgcggaagccggcaccgtcaagtacgtcaccgcgccctcggctgcgtaatccccggtcgcatagctccggcccgtgccactgtggtcatcaaagcaggaagccgggcacctataagcatttgcattttggtatttttgcgtctgttcggttccaagttagcagtatatcatttcaagttaaagataggaggtttgatcgaaacagtctacgtatgtgaataccctcagaccctttgtgaagcagagtgctgtctcgtcctgtatgaaagaattatgtgtgaatcaataggaagctgcaaaaattaggcatatttttcac

SEQ ID NO: 4232 - DNA, 1811 bp, Triticum aestivum
  Clone ID: TRIAE-23APR03-CLUSTER176_206
aattccacccaccaccaccaccgaaccctcctccctccctcgtttcccccgcgtgctgtagcaacttaagccacgaaatccccaatctcctccctcctccgcccgccaaccctagcccccctcctcctccacctccctctcccatggacgacgacgacgccgggggcggcggcgacgcgtccccgcagcacgaggccgggggcggggcggtggtgatcgagcgcggggcgggggcggcgacgggccccgcgcgggacgccgcggcggcgtcgccgacgagctcgcgctccgtgacggagacggtgaacgggtcgcaccggttcgtgatccagggctactccctcgccaagggcatgggcgtgggcaagcacatcgccagcgagactttcgccgtgggcggataccagtgggcgatctacttctacccggacgggaagaaccccgaggacaactccgcctacgtctccgtcttcatcgcgctcgcctccgagggcaccgacgtccgcgccctcttcgagctcaccctccaggaccagagcggccggggcaagcacaaggtgcactcccacttcgaccgcgccctcgacgccgggccctacaccctcaagtaccgcggatccatgtggggttataaaaggttttttcgacgcactgcccttgagacatcggattttcttaaagacgattgcttgaagataaattgcactgtgggcgttgtaacatcaaccatggagtactctaggccgcattctctagaggttccggattctgacataggccaccattttgggacgcttttggaatctcaagagggtgcagatgttatttttagtgtagcaggagagaagtttcatgctcataagttagtgttggctgcgcgatcttctttttttagatctgaatttcttgatcctgaatcagatgaagaaaacagtgaagtcgacactagtaacgaaatcaaagagattgtcatcgacgacatggagccaaaagtctttcaggctgtgcttcacttcatgtacagggacaatcttgtcggtgatgacgaattgtctgcatcaagctcagattgtcccatctttgatactttagctgggaagttgttggctgcagcagacaaatatgagttgccaaggctaagagtgttatgtgaatcttacttgtgcaaacagatttctgtaaaatctgtggcaactactctagcgctggctgatcggcatcatgctacagagctcaagtccgtctgcctaaaatttgctgctgagaacctttcagctgtaatccggaccgacggattcgattacctcaaagacaactgcccggcgctgcagtcggagatcctccggacggtagccgggtgcgaggaggaatgcagcagcggcggcaagagccagagcgtgtggggccagatctcggacggcggcgacaccagcgggcgcagggtgaggcccagggtctaacgccgccaccgccagcaagcactgacctgtatgtgttagccagctgccgctgctgtataaattcgtaacagccatttgattttgtgacagatcttcttgtaataatagtagcatccgctctgttgtagtactaccttctttgttcataaccgttttgttggataatttaccttcttttttaaaaggagaactttgcttcgcttaacagttaataagcttgcctttatcaagcggagccactacgtcagttgatgaggtgaacaactgagactggccacgttagctcagtctcaaagaatacatttggattgtatgaaaaaaaaaaaaaaaaaaaaaaaaactcgagactag

SEQ ID NO: 4233 - DNA, 3025 bp, Triticum aestivum
  Clone ID: TRIAE-23APR03-CLUSTER176_238
aagcttatctagtttacacgtaacaacttgtagaacattacaaaatttatgcttgctaataacttctagaacactacaacacttgacatgtaaaaggaatttgacgagtcatggcctactaaagcaagttatattactagtcttatctatcttaatagaccacacaagattacgaactaagtaccgtgacagccatgcttatctagtttatgtgtagcaatttgcagaaaattacaaacttagttttagaaaaataggcaatctagattagtgtttgagctgtaaagtgaataagatgagtcatgcatgttatcacacctttttggtggtggaatgatagtgcaacaacaaggaactttaatgaccagtccaagaatacacttgtaagtagtgccaccaaacagaacataccaaatgatgatttttagaagcatccaagcactttccacacaaacaaatgccaattgtgaaagagatcattccatggcaactataaatagccccatagcatgacgatcatccttcctcatccatcattctcattagtagagcgcatcatttaagccaagcaagctgtggtcaatacaaatccaccatgaagacctttctcatccttgtcctccttgctattgtggcgaccaccgccacaactgcagttagatttccagtgccacaattgcagccacaaaatccatctcagcaactgccacaagagcaagttccattggtacaacaacaacaatttctagggcagcaacaaccatttccaccacaacaaccatatccacagccgcaaccatttccatcacaactaccatatctgcagctgcaaccatttccgcagccgcaactaccatattcacagccacaaccatttcgaccacaacaaccatatccacaaccgcaaccacagtattcgcaaccacaacaaccaatttcacagcagcagcagcagcagcagcagcagcaacaacaacaacaacaacaacaacaaatccttcaacaaattttgcaacaacaactgattccatgcatggatgttgtattgcagcaacacaacatagcgcatggaagatcacaagttttgcaacaaagtacttaccagctgttgcaagaattgtgttgtcaacacctatggcagatccctgagcagtcgcagtgccaggccatccacaatgttgttcatgctattattctgcatcaacaacaacaaaaacaacaacaacaaccatcgagccaggtctccttccaacagcctctgcaacaatatccattaggccagggctccttccggccatctcagcaaaacccacaggcccagggctctgtccagcctcaacaactgccccagttcgaggaaataaggaacctagcgctacagacgctacctgcaatgtgcaatgtctacatccctccatattgcaccatcgcgccatttggcatcttcggtactaactgagaagaaaatagctctagtactagatatatgaaacaccgttttctcagtccatggtttggtcgttgtagcagtgaaaaaataatgtgacatgcactatcatgtaagaacccgaactatactagttcaaacttgggaataaaagacaaacacaggtcttgtctacatatttatgttgcatctatttatatattaaaagtaatataaggtgaaccaggagcaaggtaaatatgctagaaaattgcacgttaattagaaattactagccctcgatctggtaaatcttaacaaatagaattatcttgaccgttagatttatgtaacatatataatgctctgggcctccaacgactgtacgtgacacatctgaacgaacatatgttgaagaaaatatatttggtaaatggtgggcctctttaaaaagagaactcacgtacatgcaccaactaagaaaaacacaacttaaaaaaaaactaagaaaaactcatacatgtaaaggcaaaaggctgagattttctcacgtacgtgctccctggctccaccccgttgaaaaaatatacatctggaggccactttgtttccacatcgaaaaaaacttacgttaaaaaaattgcatgcatcccagggaaaatagtcaagaagaagtcggacttttccttacaaaaacaaggaacgtgttaagttgacttcaaagaaataaggaacatgttaagtttaaaaaaaacaagaaacctgttaagttagaaaaaaacaaggaacgtgttgtcctaggaaagatatgtgtcaaatcttacaaaaaaaagaatacacacacgtacgttcatgcacttggaaaatagaaaaaaaaaaggaaacatcacgtatgtatacacttcggaaactcattacatgaccatgtctgatatactcctccaatgcttaatattagtgcctaataatttatatttaaaatttaatttactgatcaaatatccccactgtttaaattttaatttggcacattatttggctatagtatgaacctaaatttcctcttattattatatatcatggtaataatccaaaggcgactaatcgctggcgcaccggcgcaatcaattcggctggacacagcgcggccgtttgattagattgcatttaaccgtcagatctggaatcattttctttccaattaaacggattcaaccaaacagcagaggggaaaacaaagcagcaccgccgccaacactagccatggacgaccgatgtagcaaaaccttgaagaaccgccgccggtcgccaccctcgccgctggtcgccgccctcaccgtcggttaccgccggtcgccgcactcgccgcctgcgtttctcatcggcttcatgcatgcaacaacatgcactcgtggttgcaggcttgcatctccggctccgggggacatggccgcatctccggtagcgcgccgccggccgcagcacctgtcgttgaggtcgcgctgtacctcaccgtgtgccctctcgaggctcttgctagttccaacaaaaaacgatacctattgtagcaaaaaagtatcgcttccagcaaaaaagctt

SEQ ID NO: 4234 - DNA, 1508 bp, Triticum aestivum
  Clone ID: TRIAE-23APR03-CLUSTER176_243
agatcaatcccaaaaagtacgcttgtagctagtgcaacctaacacaatgtaccaaaaatcatttctgatgcatccaaatagaattatttaagttgatgcaaagaaggaaagaggtggtgcccggactactataaataggcatgaagtataatgatcatcacaagcacaagcatcaaaaccaagcaaaagtagttagcaccaatccatcatgaagaccttcctcgtctttgccctcatcgccgttgtggcgacaagtgccattgcacagatggagactagctgcatctctggtttggagagaccatggcagcagcaaccattaccaccacaacagtcattttcacaacaaccaccattttcacaacaacaacaacaaccattacctcaacaaccatcattttcgcagcaacaaccaccattttcgcagcaacaaccaattctatcgcagcaaccaccattttcacagcaacaacaaccagttctaccgcaacaatcaccattttcgcagcaacaacaactagttttacctccacaacaacaacaacaacaacttgtgcaacagcaaatccctattgttcagccatccgttttgcagcagctaaacccatgcaaagtattcctccagcagcagtgcagccctgtagcaatgccacaacgtcttgctaggtcacagatgtggcagcagagcagttgccatgtgatgcaacaacaatgttgccagcaattgcagcaaatccccgaacaatcccgctatgaagcaatccgtgccatcatctactccatcatcctgcaagaacaacaacagggctttgtccaacctcagcagcaacaaccccaacagtcaggtcaaggtgtctcccaatcccaacagcagtcgcagcagcagctcggacaatgttctttccaacaacctcaacagcaactgggtcaacagcctcaacaacaacaacaacaacaggtactacagggtacctttttgcagccacaccagatagctcaccttgaggcggtgacttccattgcactccgtaccttgccaacgatgtgcagtgtcaatgtgccgttgtacagcgccaccaccagtgtgccattcggcgttggcaccggagttggtgcctactgataagaaaagttgtctagtaatatatagttggaccaccgtcgtctagtcgatcgacatgtcgaggaagcggtgacaaataaagtgtcacacaacgtcatgtgtgacccgcccaaagtagtagttaaattctggaataaatacaaatgaagtgttctctagacaatgttcatatcggcgttgtgtggacgtcgatctgactaccatgcttgcaagttcataagttcgtcttgccaggtcacaacctcaacttggtgtattaattaattaatcacgtatagcaataatctagatttaaatataatagtgttattgtaaaatttgggttgaactgaagaaaggacaaacatacaactctttaatggttggagatttgagatcttgtttt

SEQ ID NO: 4235 - DNA, 1296 bp, Triticum aestivum
  Clone ID: TRIAE-23APR03-CLUSTER176_245
atttttcatttccggtcctccagccttgcaagcgctcgcttaataaacggcaggcactaatctcggggacgcgcaacgtgggggagcggggagcgcgagggacgaaggaggggcagggcgagaccttcggggagactcccacccataccgcgccaccgagcgagcgagatcccgcccttcccccttctccacccacccgccctgccggacccgatcccgatctgatctcgccgccgccgccgcgcgccggacaagatggccccccgtgtcggctctgggccaagtacaagctgggtcttcctcggcgaccagtccgtcggcaagaccaagcatcatcacccgcttcatgtacgacaagtttgacaacacctaccaaggctacgattgggtattgatttcctgtcgaagacaatgtaccttgaaagatagaactgtgagactcccaactctggggatacagctggtcaggaaagattcaggagtttaattccaagctacatcagagactcttcagttgctgttattgtatttgatgttgcaagcaggcaatctttcttaaacacgtcgaagtggatagaggaagttcgcactgagaggggcagtgatgtcattatcgtgcttgttgggaacaaaactgaccttgtggacaagaggcaagtatccattgaggaaggggaaggcaaggcaaaggacctcggtgtgatgtttattgaaaccagtgctaaagctggttttaacattaaggccctgttccgcaagattgctgctgcactgcctggaatggagaccctttcatcagcaaagcaggaagacatggttgatgtgaacttaaagtccagcaatgctaactcatctcagtcgcaggcacaggctgggggatgcagttgttagctccagtccctaacactcgcagctcatgatgtcaaagatcccatgcccatcaaacagcaaccctaccttactgcttccctctcggtctcaggaggattgattgtctcacggcagttgagtccatgatccaagtcaatgaacgagaaccattttcgttggaaagatacgtttttatgtgttcttagtattttgtcagtggcctaagctagcaacagtgtagttgggttggcactgtgaactcctatcgctcggctgagtattagagttagtgattggttttatgtttcaacctatatttacgtcgcccatcttgttgcagtcagcccgagtcctgtgtttttctatggtgtactgaatatatatatttatatatatatatatatattggctaataagtcttgagtt

SEQ ID NO: 4236 - DNA, 2093 bp, Triticum aestivum
  unsure (1)..(2093): unsure at all n locations
  Clone ID: TRIAE-23APR03-CLUSTER176_254
gaccgcatgtggcactagaacgcaagagatgcactttgttttgatgtcacgagcactgcatgatacacaagttattgaaaaggacggcgcaacagtacaagtctcgggtgtttatcaaaaaataaaacagaagagtaccaagtctaaggctatagaagtcttacagggcaaaacaacacacgctcctaaacgcactccatcaaagttaacaaatccatcacctagcacgacgaaaaatgcaaggcaaggtaaaaactagtagggccgataacgccgggtggcttccctccgccgcctcggccaccgccatctcgccggtcaccacgtcgaggagggggtggaggcggcattccaccaggttgttgcagaacatagccaaggcgaccgtcagggagcaccatcggtaccatcctcattccagctggtgctggtcctctaccatagatcataggctggttgaatccagggccaccaccataggcaccatatgggtctcccatgtagccaccataaggtggaagaggatagctaggagctcctccaggcttgaacgagtggtcaggtttcttatcactcaaaggtttggccatggaaacttcgaggcacttgcccatcaatttcgtatttttcacttcctttaactgccttcagtgcacttgatctttcagcaaagtgaacaaacccaaaatccctcttatgcccggccttagcaggcggtaaaacaattttttgtgacctctccatgaacttcaaagagatccttaactttctctttagaaacattctccggcaggttcttcacatatatagtcttcacctgagcagcagatgaagaagaatctgatgatgacgatgatgaacccttaggttcagcccagctaacagtcaactggcttccatcaaccttaaagtctggtgatgacaatttctgcctggcatagtctgcgcaagcatggttatagtactcaacgaagaggaacccacggttacggcttggatcatgcaaatccttgaacatctcaatattcacgacccctggccccttccctttgattatgcttgtcagctcgtcctcactcaaccctttgggtacattgccaacaaataacctgtgcttggcctgggacaatgagcatcgcagtgttctccccttgtggtccttgtcatgcagttcttcaatagcacgctgcgccacgtccttggcagtaaatgtgacaaaggcaaatcctttgttttcctttgtttccttatccttcatcaacctcacctcaaagatttcgcccaatggctcgcatagctcgcggaggtcctcctcggtggtgtctcgggggaggcccccgacgaatacctccgagccctgcgggggtagtgcgaggagctcctcccacttcatcttctcttcttcgtcctcaggctcatcacccttctccatctcgtcaccacttgccgcggcaggttcgtcactggcaaccgccataccggcgtcctcctcccggccatctccgtcgccatcgccctccacctcgatttgaggctcctcgggctcgtcctccggctcatcagagtcctcaccaccgtggcggcggcggcggtacccttcctcgtcgtccatgacgtcgtcgtctccctccaggtccacctgctcctccggntcctccgacggctgccgatccgacatcccaaaaccctaaccctagacagaaacgaaaatccccgaaccatcaggtatcgcccgcgaaatcccgcagaaaaccgcacgaattcacagtggaagatacaaatcgaacacgcgtggtacggatctgacggcgggggatcgaaaatcggtacctttgacccggaaaaaacctagggaaattgaaaagcgcggcatgatgcgagaggtaaacagtagtataagattagcagcagtagtagtgggaggacgagaggattcgattcgatttgatttcgatatatgtgagtagaaggaattattggagcagaggaggaggcgaagcttactggggagtggagttgtgtgggtaggggaatttggctggctggntttggggggggggaagctgctgctgccgctgcctccctcgtgccga

SEQ ID NO: 4237 - DNA, 1322 bp, Triticum aestivum
  Clone ID: TRIAE-23APR03-CLUSTER176_262
ttttttttttttttttgagatcgtgcatctggagatcttcgggcaaaaaaaatatcagatatacagcagcacataacaataacactgctccatatcatgtgttcagtacgtaaatctgttgttccaaaactcctctatctacagctaaaacctgacaacactacataacaaaacaaagtgccgaagggtttatacaattcacaccgttactgtccttccaagctttttgatagtgaaccgttgtcagagctcttgggctcaggctcaggctctaacattggttggccattttggtcattcaccatgtcaggtttagactgttgcagattcccagatggctcgtctgataacttcgatgatcttgcactatgttgcataccccttggaccgttagagaatggtgttacatcatttgaagcctctagccttgcccgcaaagcttcatgttcggcttttacacgggacgggacgccatccttttggtaaacattccttttggcagtctcctcatctacttcaaccgaaccagcagcaaatgggtggtttactggaatccatctaactgtctctggatcgacatctggtggcaggggatcaccttctttaagaaacacagtgggccttttccactgatatgcatgtgatctccttttctgatgcattgcctgttgttcatttgtaagccggacaggagccatgcggtactccttgccaaacatctgagcagtagaagtatcttcatcgatcttgactaatgaattattgaaaggatcattgtacacacgtggctttgcaatcccacgttgcccagattttagatgcccgcgccttactagatcagaaacagaaccactactatcttgctgttgagttcttatgatgacctgtcttgcgagagcagccaaaaatgcaatgccgaaaccgaaaccggcaatggaatttagtccaatgtttttcctgatcgagacaacagcaggaggcaccgaggcgacaagcgccctcaaatcccccaccctcctctccagagccccgatcctccgctccccgttcggggcgcccttcgtgtcgctcgaagccctgattgggcgggaccacctcggcctaccgcggaagcatctgggcggaattaagcggacgggggcggagagggagacggcgagggaggcggcgaaggaggcgggcgccattgccgccctcgcatggagggggtagctagctaggctaatggcctgggactgggagtgctcagggacggtcggcagcagggggagaggggatggagaagacggaggaagcaaatggaaatcgcagaggggtcactc

SEQ ID NO: 4238 - DNA, 1433 bp, Triticum aestivum
  Clone ID: TRIAE-23APR03-CLUSTER176_269
aaaagtacgcttgtagctagtgcaaacctaacccaatgtaacaaaataattcatttcagatggagccaaacagaattattaaagctgatgcaaagaaggaaaagaggtggttcctgggctactataaataggcatgaagtataaagatcatcacaagcacaagcatcagaaccaagcaacactagttaacaccaatccaccatgaagaccttcctcgtctttgccctcctcaccgttgcggcgacaagtgcaattgcgcagatggagactagatgcatccctggtttggagagaccatggcagcagcaaccattaccaccacaacagacatttccacaacaaccactattttcacaacaacaacaacaacaactatttcctcaacaaccatcattttcgcagcaacaaccaccattttggcagcaacaaccaccattttctcagcaacaaccaattctaccacagcaaccaccattttcgcagcaacaacaactagttctaccgcaacaaccaccattttcacagcaacaacaaccagttttacctccacaacaatcaccttttccacaacaacaacaacaacaccaacagctggtgcaacaacaaatccctgttgttcagccatccattttgcagcagctaaacccatgcaaggtattcctccagcagcagtgcagccctgtggcaatgccacaacgtcttgctaggtcgcaaatgttgcagcagagcagttgccatgtgatgcaacaacaatgttgccagcagttgccgcaaatcccccagcaatcccgctatgaggcaatccgtgctatcatctactccatcatcctgcaagaacaacaacaggttcagggttccatccaatctcagcagcagcaaccccaacagttgggccaatgtgtttcccaaccccaacagcagtcgcagcagcaactcgggcaacaacctcaacaacaacaattggcacagggtacctttttgcagccacaccagatagctcagcttgaggtgatgacttccattgcgctccgtatcctgccaacgatgtgcagtgttaatgtgccgttgtacagaaccaccactagtgtgccattcggcgttggcaccggagttggtgcctactgataaggaaagatctctagtaatatataattgggtcaccgttgtttagtcgatggatatgtcgatgcagcggtgacaaataaagtgtcacacaatgtcatgtgtgacccgcccaaactagttgtttaaattctgaaataaaataaaaataaagttgtatcaagacaatgttcatattggcattgtgtggatgtcaatctgattgccatgcttgcaagttcataagtttgtctttccttgtcacaagcgcaacctggtgccttaattaattatcaatgtactggaataatcactatttaaatatatagtgt

SEQ ID NO: 4239 - DNA, 1589 bp, Triticum aestivum
  Clone ID: TRIAE-23APR03-CLUSTER176_284
ttttttttttttttttagacccttggtaacgagtacaatgtcgtgaaacattcacttatattgcataaaaagggaaagatactcggtacggttgacaaaccgtagccgttatttagaaacttggtaacgagtacaatgtcgtgaatcacatcaaggcctaatttacctttcaatggccgatgtgagtaactcagatgtgcttgaaatcctggagcgtccatcgcccatcttcccccttgaccatgaacttgtgtctagggacccaccaacacgccggcaccgggtgctcgtccgtgagagcgtcggcacccttgttcaccagcgctatgtcacgatccacctctagcttgaaccctccggcacttccctgctccccggccactccgtgtaggtagcactcgagattgtggagtgttcccactgtggccggcttacgcatgtacggagatcggattgttcttatggtaagctccacggccacgtccacgtatcccagaggtgggtacatgggcacgacgtcgccagcgttctgcacatgtagtgccttcaggtctggaaatgagttgaacgccgacctaaagaagcggcacccgacgtgagggctcgcaaacacgatagcagtcacagggaacgacttagtggagccctcgggtttgttgatgccgctagacaccaggtcaacggcgttcagggtggcgactgacgcaccaaggctgtggccacagatggtgatgctgacctcctcatccttgtacagctccacgagcctcctgacctccttgacaacctgatctctggcgctggtcttggtgaactcggagctcttgttgcttgacgtgtacatggagaggaacccatggtgcacgacggcgaggcggtgctggctcgccgcggagcccagcacgggcgcggcgggcaccggcgcgaagtcgaggtcgttgacccactccatgttctggacggtgccgcgccacgccacaacgatgtcccgcctcccgagcgcggcggcgccctcgtccgtggccacggccacgtaccccatccagttggactctcggctccagacgtccggcagcgacggcagcggcagcaggaggaaggagctcgggagtggcagcgacgaggtggcgtagatgaacttggtgacctcgtagttgttgccgtggtgcggcaccccgacgcccgccagcaggtcctcgtagccgtagaagcacgcgccgcagtgcggggagcgcctctcggtgttgaaggcgtcgtaggcggcctgcaccatctcgccgtaggagatgatgctggcgcggaggtgcgggtccagagggtccaggaggcccttccacgagttctcgccgtggagctcgcgccacctgctggccacggttccgaggacaggcgccggcgccgacgacgtcgtgtcgtcgccgcgcggtttctcttggccgttcagcctgctggctatgtctccaacgattggcagcggaatcgggaggaacgacatggcgagcgggtgttaaattcgggggaccttatcgatcgatcggctgcgtaccggtgagtttggctctgttggctacactcttgctagtattgtg

SEQ ID NO: 4240 - DNA, 1287 bp, Triticum aestivum
  unsure (1)..(1287): unsure at all n locations
  Clone ID: TRIAE-23APR03-CLUSTER176_291
tcccagcgcacagcaangacagaaatcattattcgagaggaggctttcagcttcggacacaagcaaagcaaatcacatcacagcatcctcaagcacacaagcaaacggcgtttgtctttacaggaacagcctttctctgtcatgtggcgcattgtaatcgatgttggggccttgggggatgatcccgtaggggttgatggaggggtggctcccgtagtagtgcttcctgatgtgctccatgttcaccgtgctgctgatcccggggatctggtacatgtccttggtgtagttgaacaggttggggtactccctcagcagcttcttgttgcacttgaagtgaaccgcgtaaacctcgtcaaatcttatgagcgtgacgaagaggcggacgtcggcctccgtgagctggttgccgcacatgtaccgctgcttgcccaggatctcctcgcacttgtccagagcttcgtacagcctcgtgacggcctcgtcgtatggcccctgcttcttggcgaagccgcacttgtagacgccgttgttgatggcgtcgtagacgaggccgttgacctcgtcgatggagccctggaggtgcgccgggttgaggtccagcccggggttctcggcgatgtcgttgaactcggcgttgagcatccggatgatctcgctgctctcgttgttcaccaccgtcttcagctgcttgtcccacagcacggggacagtcggtttgccggtgtagttggtgctcgcgatctcgtacagatccctgacgctcttggcgccgttgaaggggtcggggctggcgccgggcacctcgtcggcggtggccgggaacacccaccccaggtggtcgtccgactccctggtccgctcgaagatgggcttcaccgacgagaagctgatggcgtggtcgaggcccttgagcttgaggtaggcgaggcagcgggacgcccaggggcaggcgtaggagacgtagaggtggtacctgcccgccaccgcggggaagcgggcggaggcgtccctcgacacgaagctccggaaggtggacggcgtccggtcgaacgcgccggtgtcggtcacctcgtccagcgccgagcgcgccatcttgacggaagaggagggggagggggaggaggagtaaccggcggcggcggagagcgtcctggcggcggcgaggctgcgggagaggaggtgggcggatgaggaggaggggacaagacccggcatggtcaagcgatggagggagggaggagggtgttataggcggcaccgtgatgaactttgttgttgtttatt

SEQ ID NO: 4241 - DNA, 1814 bp, Triticum aestivum
  Clone ID: TRIAE-23APR03-CLUSTER1772_1
atagcgcaacaattttccaccttgtcccacaggcagccatagttgccaccactcgtgcatccatcaatcatggcaaggacaccgaggacgacaattttacaccttgtcctaaccctctgctgcatcctctgggttcaaaacacgccctctttagcttccactgcaagtgcaatcgatgaattccttgggtgcctctcggcggacatcccgtctggcctcatccagaccccggcaaccccgtcgtcctactccgccctcctgctgtccaccgcccggaacctccgctacgtcctgccagacacctccaagcctctagggatcatcgcggccaccgagcacgcccacgcgcagaccaccgtgcgctgcggccgccgccacggcgtccgcgtccgcgtgcgcagcggcggccacgactacgagggcctctcctacgcctccgtccacctccacaaccccatcctgccccgcgcgcggctcgacctcgccgctctcgtggcgatccaggtcgaggcgcccctatgggcgtcgggggcctcctcagccccgcgcgggtagggctgtgtacgtcacctatacggcctttgacctggggacgaatgagatggacggtgacgtgacgagctaggagaaggctagagtcgagctaggggagacaagtatttcaagggaaattttaagaggttggcagctgtgaagaccatggtggatccccatgatttcttcaggaatgagcagagcatccctcctcttcccactgccaaaatgatgatagattccatttgagactcttaattttggtctctattgctaaatttgtgcgtcttggtgacgtgacgtgtttataatattcatggatgaaaaagtatgtgtatcgtatcaagtttatgaaaaataataaataaaatggaatgatattgtcccttaaacaaaaaaaaaaaaaagtacttcgaatgcccatgcattgctgccgggacgttagctggggcctgtccacgggcttcttcggcgtctccgcggcggccctcccctcggtgccgctccccggcaggggcgccacgccgcgcgacgatctcagggccaagtccgaccacgtgcaagagcccattccaagggacgtgtgggagagcatatggacggcgtggctcgagaagcccgaggccgcgctgctcatgctggacccttacggcggcttgatgagcagcatctcgccatcgaaaacgccgttcccgcaccggcaggggaacctttaccagctccagtactactcgttctggtacgagaacgggacggcagcagcggagaagcgaatgagctgggtcaggggactgtacaaggagatggagcttacgtgtccaagaacccaagggctgtgtatgtcaactacagggaccttgacctccgggacgaatgagttggacggcaaccgtgacgagctatgagaaggccagagtctggggagagaagtatttcaaaggaatttttaagaggttcgcagctgtgaagggcatggtggatcccgatgatttcttcaagaacgagcagagcatccctcctcttcccgctgccaaaatatagattccatttgatctggtatgggcgctttcatttctttgggagtgtgcactgctcgtgattgcctttgcatgtcttagcggtttcgtctttgagactcttattcccttcggtctctatggctaaaacgtgctgtcttggtcatgtgacgtgtttataatcatgggtggaataaaaagaaacatgtatccgtgtccagtttatgaaaaataatatcccaaaggccaatgaaaaaaaaaaaa

SEQ ID NO: 4242 - DNA, 1935 bp, Triticum aestivum
  Clone ID: TRIAE-23APR03-CLUSTER17754_1
tagtataatttttgcgcccccccaccccgctctcctccccccgccttcccctcccccgtgcgaatctccgccataaaatcccaccggaagagcaagcagagcgcaccacggtcgggacctgccgggcaggaccaccgagcccctcccttctcccgtgcctgctgcggatcccctttcctttgccttctctcctccagtcagctcctcttccgcgcgtgtggtggccgatggcggcggcggcggacacttccgcggcttccacgaccgggctcgcgctctcggaggcgagcatcaactgggagaggttggacaagacaaagtttcatgtcattggagcaatcctatttacggcccagcaaggtgttctgcacccaacagctgttgtgaagactagaatgcaggttgccgaaggaggactttcacatatgtctggctttgtcttttttttggtaagatatatagaggtagtgatggcatccgtggtgtcttcagaggatttggcaccagtgcagttggagctctgcctggacgaatcttggctctaacttcactagagatctccaaagaaatggcatttaaatactctgagcatttcgatatgtccgaggcatcaaggattgctgttgctaatggtgtagcaggcttagtgtcaagtaccttttcaagttcatattctgtacccctagatgtggtttgtcagagactcatggttcagggattgccagggatgcaaacatatagaggcccatttgatgtgataaataaggttgtcaggagtgaaggcctccggggcctttaccgaggttttggaattacccttttaactcaatcaccagcttctgccctttggtggagttcatatggtggggctcaacatgctatctggaggagcttgggctatggaaatggtacgcagaagaaaccctcccatacagaacttgttgctgtgcaagcaacagctggaacaattgctggagcttgctcatcgattatcactacaccaatagataccatcaagacccggcttcaggtaatggacaactacgggagtggaaggccatccgtcatgaagactaccaggctgctactgcgagaagaaggttggagaggtttataccgagggtttggaccacgctttcttaacatgtctctttggggtacatcaatgattgtcacatatgagctaataaaaagactttctgtgaaacctgagcaatgaaccttttggcttctgctccgcctatctggtcatcatttccgttttggccatctagtgaattccttttggtacagggattggcatgtaacactggttggaaattcttgatgcaagtccccttataaagtctgacatgtttctgtacggaactaccctgtaaatacctccaagtgcaagggtgctcgtttcagatgagagccagaggatcgatctgggcactggagcgccttgtagttgttgagcaaaaatttccctgtaagtgctgaagggagctcgtttcaggatgagagccagaggctggatctgggtactgagcaccttgtagttgttcagcaaaaattccggaaacatagttttgtgtcttcccatctaattggcatagttaccccacttgaattttcaatttcgcattacttttgtagctcacttcttgggatgagatgtggcatgtccaaatcaatttagcatcatcagtgaggtggtaggctgcaatgtataccttgtcgagtgtcgacattctacagtgagaggtagatactttctttaaacaaaaaaaaaaaaaaaactcccctcccgccctccccttcggggggccgcctccttttcccccggttggggccttcttccccccgacttgccgcccccttcgaaatgttcccccgggaaggggggaaaggagggaaaggtttccaaaattggttggaaaaatttcgaac

SEQ ID NO: 4243 - DNA, 1936 bp, Triticum aestivum
  Clone ID: TRIAE-23APR03-CLUSTER17758_1
cgcaggcggccggcagcgcattcctcacccaaaaaaagcgagacgaagggacgaagcagcgagggcgggaccgacaaaaaggggggcgaggccgaggccgaggcgcgtcccacccaagcaagccctaggcgacaagacacgccggcgacgccggcggcggcgaggacgaattccgcgcgctcgtgcccagagacaggacgcataaggtggtctcctccgtgtccaccaagaaggttctatgcaagatcttcattcatggtgctggcttgaaaggcgagaattatgaggtcttccacgacgggagttaccaagcaattaatgttagcacgttttaccaaataggctcatgctcttatggtaacagttgcagatatgacgatattaagctttctagtaagaacccagtacctccactaccatcatcaagtaccgcaacacgtaattctacactttgcctgccaccatcatcaagtactgcgacacatgttgcatctacatctccacaaccttttaagtactggacggcctcttcacttgggacacccaacaaattcaatcaaccaactgaggaagacagctatacatcaaccagctgaactttgacgaaaggatgcctggatgaacgagtgccttccaaacagacagtctatcagtggatgggattggttggtcatccattctaactgcgcccaaccttccttccatcttgctggctggcctgcctgttcgttcgctgccggcgggtgctgcccgcccgggggggggtgtccgccctcgcatgcgggggggtgtgcgtgcggtcggtgggtgtgcgtgcttccttcccgtccggccgggtgggaggcaggtgcatatctagctgtgtggaaccacccaccggcgtctggacgctgtgacacgtggcaaaaaatagaattgcagtgtctgcttggaccgtcgtgctctcaaagtctactgctgcagaaaggaaattttggactattatctgaatgtgatcatcccttctgtatttcatgcataagaatgtggcgtggaccatctctcctacatctggtatggatgtgaactcagcactgagagcttgctcaatatgccgcaaactttcgtactatgtcattccaagtgttctttggtacttctcgaaagaggaaaagttggagatcgctgaaatctacaaagcaaagctcaagtcaatagattgcaagtacttcgatttcggaacgggcacttgccccttcgggacaagctgtttctacaagcatgcttacagagatggccgcttggaagaagtcgtattgcgacatcttgattgtgatgatggaagtacacttattgctaagaacattaggttgtcagacttcctcggccggttgcatctttagggacctgcttcatatatatcgaattattccgaagacatcagtttaaatcgaggcatcttggaaaactgctgctttatctccaatttttttggtggttgctttgtcgccaaacatacaaagaaaattcgaagttcgctgccggacgcctggatgaccttgtagcgctattgaccagtgaaacaatggaaaagaagttatgctgcgagtacttgaaaagtgaaaaaaattacaataattagaactgctgaaacgcctttccgtatgcactttgtgttgcttcctgggtggtcaccagtgattcggtagaacgttacctggccattgtgcgaacgaccggtgtgtaatactcatttccaaactgccattcccctgttgaggaaggctaccgcaccaacaactggtgaactgagaccgtttggttgtataacgtgtacgctggaggaaaaaggaaaagaattcaaagaatcgctttatacttgattgtatgaagtttgtttggtcaaaaaaaaaaaaaaaaaaactcgaggggggtgatcgtgttttaagctcatgat

SEQ ID NO: 4244 - DNA, 1664 bp, Triticum aestivum
  Clone ID: TRIAE-23APR03-CLUSTER17806_1
aactttcacccgtatgccgtttccctgctgctcatttccgttccccataccgctcccatctcacacaacccccttaaaccccagaagcctccatccgcggcgcccccaacgaaaaccctagcccgccatggccctcgcgctccgcctccgtcgggccctcgccgccgcctccacctccgcatccctcctccgtccgactgcctccgccgcggcacccccccatcgggctcccctcctcgcccctttcgtcgcgccgctgccgcgcccgttcctccccgggggcgccgccggcttccggtcgacggcggcggcagcggcacggggaaactacggcggtggggcggacgacgccaaaatcgaccccgacgagatcctcttcgaggggtgcgactacaaccactggctcatcaccatggagttccccgaccccaagccctcccgcgaggagatgatcgagacctacctgcagaccctcgccaaggtcgtcggaagttatgaggaggctaagaagaggatgtatgctcttagtacaacaacatatgttgggtttcaagctgtaatgactgaggaaatgtcagaaaagtttcgcggattgcctggagttgtttttatcttgcctgattcatatttatacccagagacaaaggagtatggaggagacaaatacgagaatggtgtcataactccaagaccaccacctgttcagtatagcaaaccgtcaaggaatgatagaaaccgcaactgtcgtggaaattacgaaaacagtcctccaccgcaaggtaattaccagaacagtctgtccagcatcaccacaaggaaacttccaagggtcccgcccacagcaagacgtaagaggctacgctccacagcagaattacgcacaagctgggcaagatggtagaggttatgggaggaatgattctgccgaccatccaggttacaatgcgcctggtgggtaccaagggcgtgtaaatgaagccggtcaaggtttccaagatccacaagagcgcaggagtttctcgcaaggacaggaaggagatctcaggcctggtggcccttcagcacctggaaattatggtcaaccgcctgcacctggaaattatggtcaaccacctgcacctggaaattacggtcaaccgcctgcacctggaaattatggtcaaccacctgctcctggatcctatgggaagccatctggacctccagcttatggacaaccgtctgggtcgagatatcctggaggtaaccaagggggtcctggttatggtggagacaacagacagggtgcagcgcctgcatatggaggggataacttgcaaggggtttctggtcagtatcctagcccaggtgaaggacaacaagggaactggcagggtaggcagtaaggacctgatgagaagtagcttcacttaagaacaaggcattagttcctctacttgaaatgtagaaatttccacctgtaaaataaacagctgaactactttattttgtcttgttgcctgcattcacatcagacttattattgatgtgcgttactatctcttgtagccatatatttgacgtttggaaaggcttgtggagtctggcaaaaaaaaaaaaaaaaaaaactgcttcgtgttttatttgtcatagaatttgtgatgtattcttccaacttccgctac

SEQ ID NO: 4245 - DNA, 2211 bp, Triticum aestivum
  Clone ID: TRIAE-23APR03-CLUSTER17808_1
ccaccatcctcttccgtaccactcctatcttctgcccagcccaatcagccaggtccaatattggcgcagctgcaggagacgtacgcgtgctcgccggcgacggagcgcgggcgcgggatcctgctcgcggcggacgccaaggcggagaccatcgcctactgcaccggccgcagcgtcatcacccgccgcctcgacgcaccgctcgtcacgcggcgcttgtcggcgtacgccgacccgcccatcgtcgcccgcttctcctccaacggcgtcgtgggtcgccaccgccgacgcttcagaatgcgctcgcgcatgcggctcgggcaacgaccgcgccctcaaggcccgagttccgtcccatcaccggccgcttcctcgacctccgatcgttcctcgaccgccatgcgcatcgacctctccgccgggacggcatccgggcaagtcccccgtccgcgctgtcaggtggggcgctggcagcacaggcggtggtgttgatgggcactcaaagagagtttatacttgcgaggtcaatccaacccgtccattccgcgttgagacctgtgctgaatattttctgccgaactactatctaggaccaccattcaaattcaaacattccataagggatcacactaactttgttaactgtatccggtattcacctgatggaaccaagtttatcactgtgagttcagataagaagggtttaatatatgatggcaaaactggagataagattggagagctatccagtgaaggcagtcacacgggcagcatatatgcggggtgctggtgtcctgtcagtattctggtccgtgcgctttctgctgataaaactgcgaaagtatgggatatcagtgaggatgggaagtggaacgttgaacagaactttggtttgtactggtattggtggtgtcgatgacatgcttgtgggttgcctctggcagaatgataatcttgtcacaatctctcttggtgggacatttaatgtcttctccgcaatcaatccggacaaagagccagtatcatttgcaggacatttgaagactgctagtgccctggcactttttcctcaaagtaacccaagaactatgctatctacaagctatgacggggttatcttaaaatggatacagggtgttggatatggtggcaggttgattcgtaagaacaacacccagatcaaatgctttgttgccacagaagaggagctgatcacttcagggtatgataacaaggtcttcagaattcctgttaatggagatcagtgtggagacgctgagtcaactgatgtaggtggtcagccaaatgctttaaacattgcacttcagcaacctgaatttgcactggttaccacagattctgcgatcgtattgctgaacaagtcaaacgtcacttccacaacaaaagttagttacactatcacttcgtctgctgtttctcctgatggcactgaagctatcgttggtgctcaagacgggaaactgcggatctattccatcagtggggatactgttacagaagaagcggtacttgaaaaacaccggggtcctattactaccatacattattcgccggatgtttccatgttttgttctgctgattccaacagggaagctgttgcatgggatcgggcaactagagaggtgaagctgaagaacatgctgttccacacagctcgggtaaactgcctggcgtggtcacccgacagccgtttcgtggccacggggtcgctggacacctgcgcgatcatctacgacgtagacaagccagcggccagccgcaccaccatcaagggagcgcacctcggcggggtccacgggatctccttcgccgacaacgacaccctggtgaccgccggcgaggacgcatgcatccgcgtctggaaactgacgcaccagtaggcgctctcatcggtcgctgttttccgcgggccgcgctgtctagtctgttttttttctctctctctgtgatgtgattctttcgtgtgctcctggaagaaagaaccctactgtcatcgtttccttcccacgcgtcgtcgtctggttttgtggggtgctgagaatacaggggatgctggcgtgttgtgatatctgtctctgtgctcttctccctggagtggttatatttttttttctgtgtttgccccctgcactggttgttaataactgagacaatatctgtacttgcgttttcataaatcatcatacgcat

SEQ ID NO: 4246 - DNA, 2184 bp, Triticum aestivum
  unsure (1)..(2184): unsure at all n locations
  Clone ID: TRIAE-23APR03-CLUSTER1784_1
gcaaaaggaccaaactcacgcgacgaggaagaaagaagcggagaccggagatcgagatcgccggtgggagggatggagccgagacgagcgatccaccgcagatccggcgcgctcctgctcctcttcgccgctgtattcgcggcggccgccggcgcctccgcctccgccatcggcgacaagtgcgccgcctgcaaagccgtcgcggctgagctggagattggaatgtcaagtgagaaaccaagaaatcacttggacctgcgtaactggttaaattccaaaggtcaggcgagaggggagggtcatcgattacagagtcagcgagcttcggattgtagagcttctggatgacctatgtgataagatgcatgactatgcgctacagtacgcggcatcaggcggaatcgggcgaataagaatgggcaaaaggaccaaactcacgcgacgacgaagaaagaagcggagaccggagatcgagatcgccggtgggagagatggagccgagacgagcgatccaccgcagatccggcgcgctcctcctcctcctcgccgctgtattcgcggcggccgccggcgcctccgcctccgccatcggcgacaggtgcgccgcctgcaaagccgtcgcggctgagctagagattggaatatcaagtgagaaaccaagaaatcacttggacttgcgtaacaggttaaattcgaaaggtcagcgcgaggggaaggtcatcgattacagagtcagtgagcttcggattgtagagcttctggatgacctatgtgataagatgcaagactatacgctgcagaagttggaatcaggcgaaaaagaatgggtgaaagtaccaagctggagcagttttcaaactgataagaaagctgcagcacgagcacactccaaaaatctatccagttactgtggaaggttactggaggaaactgaggacgagcttgctgagtggataaaaacaagctcggcagaatccgcggacgtgagccaggccctttgccaggatattagcaaacactgccagttaacaagtgctacagccccggtcgacgatgaactataacagcacgtgttagctccccgtatttactcgacaaagaaaagcagatgaatgcctgagaagcgtcaaagaagaagctccagtaggatatgaggctgtgatgtcttagcgtctgcatttttacacactcgcattgttgtcttaaagagggacttgcagattttcacatatgattactgatgtattgagaacattcaaactttgaggaatttctgcatgctgaattacagttagcagcatggtatgattcgctgaactaatctgaattcaacaatgcgagtgaggtatcatggacctcgaactgttaagccactagctgctttctacagtgatgtttcaggcatcagtgcatcagtagagtcaaccaatggggaggccatgccacacccgttagatgaaattgagccaaaaaaggatgttgaaccggagaattgtccattctggtgggcgcgttcgcccgaaaatatactgcagcaggatacatatctagcactggcagcttcttttgtaatcctgcggttgctgtatcttctattcccaaggatagtttctgcagcaaaatgggcatggaggaggcatactctgtttgcgaacttgatgggcgtgcatgaatatttcttcacctacctcgagcaagcaagacagaaattgagtaggttatacccttcgaagcgagggaatttacaggagggggcaaggaatgccactgcctgggcctccaaatcattagcatctgtgtcaatcggagaaccaagcactatcggaaggacgaactccacgaatgaactgaggtgaagtgtaaacttttttgtccgcagggatattatgtacagtagagtgatgaggatatgagcaccaagaatctgttgtaaccagctttgttagctattgtaacatcatcattagaataagcacctcccccagtattgttgccattataaccttgtcttgaatagctgttgcccaaacatattcttggaggaaaaaggtttgacgtgttccataaaaaaaaaaaaaaaaaaaattatcgataaccttccggggaggggtacccattacccaaagggggggaataaggccccttttttgttttgcgggtttttccnnncccnnnttttttttn

SEQ ID NO: 4247 - DNA, 1092 bp, Triticum aestivum
  Clone ID: TRIAE-23APR03-CLUSTER18013_1
caccccgcctccgcccccctcctgacaaagtattatgtattacgttgatggtacgtacatgtagcacaccaaggaacgaaaaatacaaacatgaactgaaacggaatacagatacacactctcttttttttgagaaatactgaaatacagacactcatttagggacgtggacatgagcgaaacgccggtgtttttcttccgggcgatgcaagctatagcctatagaagtctaaaacccacaagttcagcttcagcttgtacgtaactcagcacatgaagtagagatgatcatgggtgagaaggcaccccaggaatcaccaccagcgggccgttaatggtactggttccggttcccacaaccggcaggtctggcaaccccgaacccgaagaagccttggactcggcgacgccggcaccgcgtgtcgctcccagtgcgccgtccttctggctcagctccctcccttcgcaggacgcgagcaccaccagcagcaggagcgcgacggcgaggcacttcgccatattgctaactgggaggttctaactcggagtagagtactacggctgaggacaggagacagtctggattgcgtggctgtgtttgaggaggtgatacacacgctcattaagcaacatgaacatgagcgaaaagccggtgtttttcttccgggtggtgctagctacacaagtcttaagccacaattaagttcagctgaagcttgtatgtatgttagccagcacatgaactagagatgatcatgggtgagcagggatccccggaatcaccaccagcgggccgttaatggtactggtaccggtagtggttcccacaaccggcaagtctggcagccccaaaatcttcgactcgccgacgccagcaccggcaccgcgtatcgctgcaagtgcgcggtccttctcgttcagctccctcccgtcgcagtgcgcgagcaccaccagtagcagtagcgcgacagcgaggcactttgccattgctagctcggaggctctgatagtactactgaggactgaggagagtctagcttgtgtggctgtgtatgagtgatagtgttgtgtggctgtgtttgagggggcttt

SEQ ID NO: 4248 - DNA, 2446 bp, Triticum aestivum
  Clone ID: TRIAE-23APR03-CLUSTER18020_1
aaactttcgtttgtctctggctttttttttctgacgggttctttgtccatggcttagcttagacgtcactcgtttctcgggccatctgctgatattctgctccataaagtatttgctctcgcttcgcctattagtatcctatatatacgaatactgtgctgctgtggtttgtgagctctggggagtcgccgggaacgacgatggtggcggctctggtgcatctgctggtcgccttcagcgccgccgtgttggccgctgccggcggcgagcagccgctgtcgaagatcggcgtccaccgggccaccttggcgatccatccgggcgcctccgtcgacgtctcgccgctcctcctcggcctgcaggggcaggaccaagaatgggtgaccatcgggtttaacaaccccaggccatccaaggatgactggattgggggctctaggcatgaagtcgccgccgggaacgacgatgatggcggcgctggtgcatctgctggccgccttcagcgccgccgtgttggccgctgccggcggcgagcagccgctgtcgaagatcggcatccaccgggccaccttggcgatccatccgggcgcctccgtcgacgtctcgccgctgctcctcggcctgcaggggcaggaccaagaatgggtgaccatcggatttaacaaccccaagccatccaaggatgactggattggggtcttttcccctgctaatttcagtgactccatttgcccgtcggagaaccaatgggtcgaggcccctcttttgtgcacggctcctattaagttccaatatgcaaactatacgacgtccgactatgcgaagaccggaaaggggtccttgaggcttcagataattaatcagaggagtgatatatcattcgcattgttttctggaggactctcaaatccgaagcttatcacacgttcaaatagcataactttcgcaaacccgaaggctcctgtgtacccacgcttggcacaaggaaagtcctgggatgaaatgacagtgacatggacaagtggatatagtacgaaggaggctacaccgtttgttgaatggggcatacaagggcaaatccaaatcctttctcctgcaggcacccttacgttcagtcgcgacactatgtgtggcccacctgctaggacagttggatggcgcgatcctggtttcatacatacaagcttcctcaaggacctatggcctaatcttaagtacacgtacaggattggccatcggctattcaatggtcaaattgtttggggacgtcagaatagcttcaaagcacctccctatcctggggaggattctttgcaacgtgttgtcatatttggagatttgggcaaggccgagattgatggctcaaacgaatacaatgactttgagcgtggttcaatcaacacaacttaccagctagttaaggacttgaagaatatcgatatggtgatgcatatcggagacatctgctacgccagtggttatctgtcacagtgggatcagttcactgcacaggttgaacccattgcttctacagtaccttacatggtggcaagcggtaaccacgaaagagactggcctggatcaggatccttttatgggactctggactcgggcggtgaatgcggcgtgccagctcagaacatgttctatgtgccagcagagaaccgtgagcagttctggtactcgacggactacgggatgttccggttctgcgtagccaacacggagctggactggcggccaggcaccgagcagtacaagttcatcgagcactgcttgtcgtccgtggaccggcagaagcagccgtggctcatcttcctcgcccaccgcgtcctgggctactcgtcggccaccttctacggcgccgaagggacgacggaggagcccatggggagggagagcctccagctcctctggcagaagtacagggtcgacatcgccatgtacggccacgtccacggctacgagcgaacgtgcccagtatacgagaacgtgtgcgtggccaaggggtcggaccggtacagcggcgcgttcacggcgacgacgcacgtggtggtgggcggcggcggggcgagcctggcggagtacacggcggagcgggcgcggtggagccacgcgcaggacctggactacgggttcgccaagctgacggccttcaaccacacgacactgctcatggagtacaagcggagcagggacggcagcgtgcgcgacagcttcaccgtctcgcgcgactaccgcgacgtccttgcctgcggcgtcgacaactgcgccagcaccaccatggcgtcctagagcgccgctcctttcgctgcggctcggctctgttgttgttgttggatcgatggatgcaattttgttctcttcatgaaacttggatagatatgctgtgttcagttcatcgatggccgagaaacccatgcagaggtgttttgaatttccattt

SEQ ID NO: 4249 - DNA, 2365 bp, Triticum aestivum
  Clone ID: TRIAE-23APR03-CLUSTER1803_1
acgccagcgcagcctccgtcgccgtcgaggcctcacgcttcacaccccccaccccacgcggccgcgcccctccgggccaggtgttgaagcgccgcggggacgaggcaggagggccgccggctcccggacccctccgcctctccgaagcggcacagtttcttaagtagtgcacaatgtctgggtgtacagcaatcttgcgtcggtcatctcagaatcttatggagttatcgattgggtccaaatctcctggcgcttctttgagggggttcaacagctgtgccaggggcaaggtaaaaccaggcaattcaattattgggcagatgaaagcaatggatcgttttcctccagccaatggtgtgtcaagggctatgatgcccctttctgcttatatgggcactaattggttgagatacttcaaggcccagttttaatgcattgccaggaccgttaggtgtttccagcatccgccgtgcatactcatcagacactggaattaagcctgaggtccctattgttcctcccactgaaactgctgaggttggtactggaggaaccacttggatggacatttttgaaaatgctcgcaactccaccatcgatgctacgactgatgcaggcaagaaagtgaaggagatgactgatgcagtcacaccccatgttcaaagttttcttgaggcaaatccagatctagaaaaggtagttgttccacttggaggaacattatgtggtacccttttggcctggtttgtcatgcctatcatcttcaagaggcttcataagtatggttcacagaacccgatatcagcacttttggggaactcagtcaacactaatgcttcatatagcaccagcctttggagtgcattggaggatcctgcaaaatacttgatcacatttatggcattttcagagatggctgcagtgatcgcaccaagtgtatcaccttattttccacaagctttgaggggtgcatttgtattgtcagttgtctggtttcttcataggtggaaagcaaactttatcactaaagctatggccaaccaaactgccttagttactgatagagcaaggttatcagcttttaaccaagtgtcctcattgggactgattgcgcttggtgtaatgggtcttgctgaggcttgtggtgtagctgttcaatcaatattaactgttggtggtgtgggaggtgttgctacggcttttgctgctagagatgtcctgggcaacgtgttgaatgggttctccttacaattttctaggccattctcagttggagaatacataaaggctgggtcaatagaaggcacggtactcgaaataggacttacttcaacttcgatgatgagtccagaaaagcttcccttcacagtgcccaattctctgttctcaagtcagattatagtgaatagatcacgagctcagtggcgagttagtgtgaccaagattcctataaaacttgaggatattgagaaagttcctgctgtagcagaggagataaagtctatgttaaggtccaacccaaaagttatctcggaaacagatgctccttactgctacctctcaagattggaaagttcatatggagagcttgtcatagggtgcatcctccaaaaaatgagaaaagacgagttgatatatgcagaacaggacattcttctaggagctgccaggattatcaagtcacatggcgttgaatttggaagcaccacacagtgctgctgattctgatgttttctcaaaactcaagtagggtgaacgtcgttagcctggaggagtacatacgcggagggttagaggagattttgcttggtgcgcgtgcgaaggcagggacctcttttggaaccaaggtgggacttttgttgcctgtcctcaatttggcaaacatacatcatctgttgccggagaatcttgcgttacatcattttgctacgtgcgctgatactgcttagcgagtagtttaccacgattcgtcagtgctcagtcgtggtaacttcaaacacatggagtggcatgatccaccggaggtctgcatctgggcccaggagtatcccgtctggccttggaactctaaatgctggaacgtcgacatgcgtgcaagtgttgttttgatgcatgactaggcgtgatagacacctttgtcctgaatcggtgtgtcggggaccatgttgacacgcgtcgttcggcttttatttctagatctggctactatagtcctatgcatatgcttgttaatttgcttgtacggttgtggggtttgtggatgttgtgtttttgatagttttggcgggccgtctgtgcggttgtggggtttcatgtttaggagtagtttgtcgcttcgtttgtattggttttcgtccggtttttc

SEQ ID NO: 4250 - DNA, 2093 bp, Triticum aestivum
  unsure (1)..(2093): unsure at all n locations
  Clone ID: TRIAE-23APR03-CLUSTER1805_1
aacaagtttgttcctggaggccacacaagtttgttccgggaggccaccgtcgcggtctagttggtcgcgcaccctatatataccgagccgcccgccgaggccaactcacgcttccggctccggcgcctcggtccaactcacaccaaaggcgatcgacacgcgagtacgtctcgagatccatggagtctgcgccggcggcggccttcatggagcgggagcgcctcacggcggaggtgacattctccggggacgcgcaggcggcggcctcgtccgagggcgccgagcggctgcccaccagcatcatcatcaagatccggcgccgcctcccggacttcgcccgctccgtcaacctcaagtacgtcaggctcgggctccgccacggcggcagcctcacgtcctacctgcccatgctgtgcgtgccggtgctcgccgcggccgcctactccttcgtccgcctcgacgtcatctacctctccatcgacctgctcagctgcgtcgcctggctcggcaccgccatgctgctgctcaccgtctactacttcaagcggcctcgcccggtctacctcgtcgagttcgcgtgctacaagccggaggaccagaacaagatcaccaaggaggccttcctcgacatgaccgagagcaccggctgcttcaatgacgagacgctcgcgttccagaccaagatcaccacccgctccgcgctcggcgacgagacgtacctgccccccggcgtccaggcgcgcccgccgaggctcaacatggccgaggcgcggctggaggccgaggcggtcatgttcggctgcctggacgctctgttcgagtccaccgggatcgacccgcgccgcgacgtgcgcatcctcatcgtcaactgcagcctcttcaacccgacgccgtcgctggcgtccatgatcatccaccattacaagatgcgggaggacgtcaagtcgttcaacctgggcggcatggggtgcagcgccggcctcatcgccatcgacctcgccaaggacatgctccaggccaaccccaacgcgtacgcggtcgtcctcagcaccgagaacatcaccctcaactggtacttcgggaacgaccgctccatgctgctctccaactgcatcttccgcatgggcggcgcggcggctctgctctcgaaccggcgcgcggacgccgggcgcgccaagtaccgcctcctgcacacggtccggacgcacaagggcgccacggacgagtgcttcaagtgcgtgtaccagcgcgaggacgacgtgggcaaggtgggcgtgtcgctggcgcgggagctcatgacggtggccggcgacgcgctcaagaccaacatcaccacgctggggccgctggtgctgcccctgagcgagcagctcaagttcctcaagtcgctgatgatgcgccgggtgttccgcgccaagggcgtgcggccctacatccccaacttccggcgagccttcgagcacttctgcgtgcacgccggcgggcgggcggtgctggaggaggtgcagcgcagcctgagcctggaggacaaggacatggagccgagcaggtgcgcgctgcaccggttcggcaacaccagcagcagctcgctgtggtacgagctggcctacgccgaggccaagggccgggtgaagcgcggcaaccgcgtgtggcagatcggcttcgggtccgggttcaagtgcaacagcgcggtgtggcgcgcgctccgcgacgtgccggccgtgtcgcccccggggccggaggagaaggcctgcaacccgtgggcggactgcgtcgccaagtacccgcccaaggcctacgtctgacgatacattactacgccgccgccgcatgactccacacgaagattacatgattcttttctcctatactttttctgcatttcgtttcccgtaggtggctgtacctcaggttccatgggcgagcagtgccgttgttttcagcttttgtacttcaagtgtgaattataaacgacaaatatatacgacgaggtttcattacaaaaaaaaaaaaaaaaaaaaatatcaacgtttaccttgcagccgcccccgggcccggccgccctaccccaatttcgcccttaatagggaagn

SEQ ID NO: 4251 - DNA, 2130 bp, Triticum aestivum
  Clone ID: TRIAE-23APR03-CLUSTER18094_1
ggcgtttgcgcactgggggaagaagatcttcctctcccctttgatggaaaacaaagaagaaagacaaccaagcagcccccacggcggccaccgggtagtccaccgacggcggcaccacccaagcgaacaatttggtctgttgttagttcgatcgttctcattcaggtccttgaaacggcgtggatgcttttctcgcatgcccggatcacagcccggcggccgggcggtcgctgacgccggcgcgcggcgctcccgcctcgtccccggcgctcatctcggccgtccaggacctgtacgagttcatctgcagcggcccactggtggaaaggattggctacgcgcgggagaggatcgccgagtccatcgaccggtggctgtggcgcggctcgcaggtgagccggttgttccgcatcggacgagctccggctgacggacgccgagaagtcgaggatataccacttctacatacccgttcttcctctggtgcgaggaccaggtcgccgaccacaggtccaagtacaacgacggcgacgagatcccgccattagtgattggagtcagcgctccccaaggcagcgggaagacaactcttgttttcgctcttgattatctttttcgggtttctggtaggaactctgccacattgtctatcgatgacttctatttgactgcagcagaacagggtaaactgagggaaacacatgctggaaatgctcttttagagtttcgtggaaatgccggaagccacgatctccaattctcaattgacacacttgagtcactgatcaaactaacaaaggaaggtacgaagatgaagcttccacggtatgacaagtccgcttttggtggaagaggtgaccgagctgacccttcgacatggccagaggttgaagggcctacagaggttgttctctttgaaggatggatgcttgggtttaaacctcttccaaatgaagttgtaacagcagtggatcctcagcttgaggtgattaataagaacctagaagcatactatgacgcgtgggacagattcattgagtcatggattgtcataaaaattaaggagcctaactgtgtatttcagtggagactacaggcagaggtagctatgagagctgatggtaaagcaggaatgtctgacgaggaggttatggattttgtatcgcgctacctaccagcataccatgcctatttgcccacgctatataaagaaggaccaaatggcgcgaagaaagaccatctgctggtcattgacatagacgaagagaggactcctatatctggtagttgagtgctgagtgtacattctgaaatggatatcttgacttggtggttgagcttgggatttctgatctttctgagaccacttctgccaagcaagcaccaccgtcctcttgtttcttacagcttaaatatatcctaaacgtgtaaattcgatgtatatcaatttttgctatctatttaaagaaactggcatcccaaaaaaaaaaaaaaaatagcgcaccccaactgtcgcgtgcctttgctaactactcgggaagaagaacttccacttcccttagctttgatagaaaacaaagaaagaaaacagagaagctcacaccatggcaaccaatgggtactccaatggcggcagcaccaagggaaagcccatcaaatgcaaagcggcggtggcgtggggtcccggcgagccgctggtgatggaggaggtggaggtggcgccgccggcgcgcatggaggtgcgcgtcagaatcctctacacctccatctgccacaccgacctcagcttctggagaggagagaacgagcgtcaacgcaggttccctcgcatccttggacacgaggcagccggagtggtggagagcgtcggcgaaggcgtggaagaccttgcgccgggagaccacgtcgtccccatcttcaatggggagtgcgggacgtgcgcctactgccactccagcgcgaccaacctgtgcgggacctaccgcgtcgacgctttcaagagcaccatggtctccgacgacgggacgaggttctccgtggtgaacacctccggcgacacggtgccggtctaccacttcctcaacacctccaccttcgccgagtacaccgttctggacgccgcctgcgccg

SEQ ID NO: 4252 - DNA, 1381 bp, Triticum aestivum
  unsure (1)..(1381): unsure at all n locations
  Clone ID: TRIAE-23APR03-CLUSTER1812_1
ccacgcgtccgagctcatgccgatccgctctcgtccttggggctaccagctcgtcgacaagcacaaccacaagcgcatagcagcgcacgatatatcatagtagactcttctgaactccacaccagacctcccaaccatcccaggccatcccgggcgtcgctgcggggccgcgccggggggcggccgcgggagacagccggggcgggcatcccgcggcggcccggtccggcgggctctgtccggcggggtccgggcggccggaggcgggcgtccggtgcccgccgtccaaggcccaccaacaccaattcatcaacctcaaactactgcaacttctccaagccgcgaccagttctccaagagctgccaccggtgctggacccaggccggcggtccccgcaacgtccggctgcggggcggcccaacgtagcccaaggccggcgcggccgcggcgtcggcccccgcgccccgccggcgcacgcacgcccagcgccagcggcccgcgtctctcgtcgtcctcctcccgctccaacagcggcagcggcaccgcgagcccgcacgggcaacggggccggatccaccgacgacgacgaacgaccgcccacaacgcaaactccaacactgccgccttcgccaaccgcatgacgaactaccccttcgcggcagacgtgccacctccggtggccaatattcgccgaccaggccagccgccgcttcgggcccctcttttggcgccgcctcctgccgccgcctctcccggtggttcagcttctcggcggagccgaagatggaggaggcgatcgggtcactgctgctccctgggcaggaagccggcgcaggagccagaggagcccacctgcacctccaccgtcgccgacatggcgccgttcatgtccctggacgcggggatcttcgagctcggcgacgcgtcgccggccgattactggaacggcgggagctgctggacggacgtccaggacccgtccgtctacctaccctagtttggtctagttcctcatcgcgattgccttaattaagctgcagttaaatgcttcttaacgacgaccaacagctagctggtaagtactacagtatagtacacgtaatgctacgtacgtactgcctgcacttgtaccgtacctctttgttttcgttccatttctgtggctgcacaacacaggtttgtgtaagaaagctaaccattgtgtcgctacaaccgaatcaagtcacctcttattcttgtttctctttagattgtgaacatctcatatgtatgttgtacccctaattattgacttgtctcaatatattttttaagtacgcaaaaaaaaaaaaaaaaccccnaaatgggcaanttactgncttgtctaaacagaantagaaa

SEQ ID NO: 4253 - DNA, 1451 bp, Triticum aestivum
  Clone ID: TRIAE-23APR03-CLUSTER18328_1
gaacgcaagccacaaacaaacgacgcgcccccgttcttctaccgggcgccatggccgccgcattagcagcgccgacaggcctcctcaagctccctccttcttacgcgccgccttcttccccctcttcccctctctccggcacctcctacgggcggcgctcgcggagacggcctcgcctttgccgccgcggagccccgctgctggcggtggcggccggggaggtgtcgtacactgagccggaggaggcgctgctggaggccctcgtcggcgtacagggccgtggccgtgcagtcgcgccgcgccagctccaggaggtggaaagcgcagtgcagactctggaggcgctggaaggtgtgcccgatccgaccaattcaagtttaattgaaggtagctggaagctcatattcacgacaagaccagggacggcatcccccattcagaggacattcgttggagttgactctttcagcgtctttcaggaagtttaccttagaacagatgatccaagggtggtcaatgttgtcaagttttcagaaacagttggtgaactggcagtacaggcggaagcaactatcaacgatgggaagcgcattctcttccgttttgaccgagcagcattcgctttcaagttcttgccatttaaggttccgtatccggtgccattcaggcttcttggggatgaagcaaagggttggcttgacactacatacttatctcgtagtgggaacatacgcatttcaaggggaaacaagggaaccacatttgttctccagaaaagtgcagacccaaggcaaatgttgttgtcagctatatctgcaggaaccggagtaaaagaggctatagatgatcttacttcaagcaaaaaaggggatgtggttgatatgaacaccctagcgggagaatggcaactgttgtgggcttcacagagtgagagtggaggtggaagctggtcatctgttgcatctgccggtctcaaggatttccagaccataaaggaagatgggcaactgaagaatttggtgaacccctttccaggtgtgagccttagtgcaagaggcaacatatgcaaaacagggaacaacaatgataccttcagcgtgtccatgaatgaaggcgttattcaagttggtggcatacagtttcccttggaaactggaggagaatatgtcatggagatcttgtacattgacaataagataagaatatctaggctcaaccagtacaagcttgttcatttacgcattgtaaataaaacataaatacccaattggaggatcggctgtggccaaattgtttgagcttattgctgtagaaattgttgtataccaggagtccaggacaacacttaggttgatgaaatcatgcatttgcgcatattcaccaccatgcagatttcgagttatttattattgagaaactgtatatttttttcgataaaaaaaaaaaaaaaa

SEQ ID NO: 4254 - DNA, 1667 bp, Triticum aestivum
  Clone ID: TRIAE-23APR03-CLUSTER18332_1
gcccctttctgaccttttttaaccccccgggggggggggggtgcgtttttctgccaatccatgattgttttttttttttttcggataactgacggttccttcatgatgctggcacgacagctcaatagttttttttttttttttgcgtaaactctgttcataaattcagacagttggactgtaaaattcagacctaaaataaaaatgcaaggaaatgatgaatccattttctgccaatccataattgatatgcagttgacttggataactgacggttccttcatgatggtggtacgacagctcaatagactacaaaagacccgaaaaatacccagattagttccgaaatacagcagtactcgaactacgaggactcagtctcctcactagtcactacaggctacaactacatctccgatgctaaacaagcataaatagttcacttcagcaaagaactatcttacacactgagataccacgacagaggagcgataaaataggctatgcatgacaacactgttaactggtgtcagagcagctgcacagcgttaggcctttgctgtttctctcaccagagcaaatttggccagaaggccagaaagctgaaggaatgacccaacgccatcacagatcctcatgtgcgcaaatcccgtttccttcagcagttccagcttcagatattcagccatgtcatagttcttgatgacacggaagagggtagtgatgatgtcagtaggagagtagcccaaatcatagagttgctttaggccagagcaggcctcatcaaacttcccatcgagtacatttttcaccatactcttgacatgcaagggatgtggttgatcgcataccttgaacacattttcttgattaacaaaacggaacccgctgactgtagcttgcaaattgttcaaagcttgcctcatgtcaccatcagcagtaaaaatgatggcttcaagaccttctggcacataagggaccttctcagctgccaccacgaccataaggcggccaaggatctcctgatctgaaagcctcgagaaccggacaatagcgcagcgactttggatgggttcaatgattttagatgaagtattgcatgcaagagcaaatcttgtggtgttggaataaatctccatggttcttctcagtgcttgctgtgctcctgttgtcatgctgtcagcttcgtccagtatgacgatcttgtgccgtccgggtggcagtgtgaccttcttctgcgcgaacatcttgatcttgttccgcaccacatcaagccccctgtcgtccgaggcgttgagctcgagcacgccctcgcggtagctgggcccgagcatctcgtgggcgagcgccaggatgctcgtcgtcttcccggtccccggaggcccggagaggatgaggttgggcatgttgccgtcgcgggcgatgacctcgaggcggctgacggcgtcggcgttgccgacgacatcggcgacgcggctggggcggtacttctccacccacgggatgtcgtacgtgtcggcgggggcggcggcggcggaggaggcggcggcggcggaggaggcggcggccatggcgctggggtggggtttttttttttttgaggggaggggggggacctttcggttgtggagggaatagtggggaaattgccgggccagcggcgcgag

SEQ ID NO: 4255 - DNA, 1593 bp, Triticum aestivum
  unsure (1)..(1593): unsure at all n locations
  Clone ID: TRIAE-23APR03-CLUSTER18395_1
aaattcggcgcggggctcccccgccccaaccgaagcccggcgtcccacaaaagcgaaggtctcctccgcccgaatcgaagccgtcgtctcgaactccgtccggagcccacacccacaacctgtcacccacccccacccccacccacccagacgcgaagctggcgcgggaggcggccgacgcgagcgcccgcaagcgcaaggcggcggacgggggcgacacccccgcggcggctccggcccccgaggacgcggccatgggcgacgcgcccccgccggcccccgcgtcgctcgtcgaggggagagcgggcactggggcggtgcctcaccctaactcgcaccggttgagcccggagaccgtgtcggtggagctctccatgggcggggactactaccacgcctgctgcggcgaccccgaccccgaccccaagcccgagggaccccaggtgccgtacatcggtaacaaggaacctctctccgccttagcagcagagttgaggttgagcgcatcctaaataaagttgaacagtgcttggtgacaatatgaggtcttggattcattgctttcacgaggggaaactgcttctttatgttcattgaggagctgctcctacctcggaacatatccttgagacacaagatagagctgaggttgagcgcatcctaaaaaaccattgaacagtgcaagaagacactttcaggtcttggatacattgaattcacttttgaagacttcttctctatgttcattgaggagctgcaaaatgttctgcagggacacgaaacttctattgggcctgaagaacttctagaaagaaccagggatcaaacgacttctgattatgttgtcatgttctttaggtttgttacctctggtgaaattcaaaggagggctgagttctttgaaccatttatttctggcttgacaaattcgaccgtggttcagttttgcaagtcttctgtggagccaatgggcgaggaaagcgaccatgtgcacattattgctctgtcagatgcgttaggggtgccaatccgcgtgatgtacctggaccgaagctcctgtgacacaggcaatctaagtgtgaaccaccatgatttcattcctgcagccaattcctctgaaggtgatgctgcaatgggattaaatccggctgaggagaaaccttacattactctgctctaccggcctggtcactatgatattctctacccaaagtgatctctggctgatgaaacaccaaggttgatttttcccatgaattcaggttgagaaaacgttgtctagaaccgtgtagttgtgttgctcctgcatgctgccaaaggcggccttacaagagggaacttgtgtgttcttggggcgtaatcagagcatgctttacttgtcactgccctcaaattcgaagttttccttattgtaagtgtactctagcacaacgatttaacattgtggttgactgttgagaagaccctctgcatatcgtgactaatcgtggttcttgtttttcccttgaattatttactcctgcatcgtaaaaaaaaaaaaaaaaaaaaaaaaaaaaanngggnancaaaaannaaaaaaanccnaaaaaaaaa

SEQ ID NO: 4256 - DNA, 1730 bp, Triticum aestivum
  Clone ID: TRIAE-23APR03-CLUSTER18399_1
gcatcgtatcgttctatcgttctatctcgggctagtccctcgtgcctctctcgccgtacgctcctgcgccggcggcgactgctcttctcggcgggcgcccatggcgacgatgtcccgcgcgctcggctcggcgttcgtggggttcacgcggacgcccgccgtgccggcgacgacgcccttgccgttgccctcctctcgcgcctcctcggcgctcctcctgcgctggcagcggagccggggcgtcgtcggcggcggcgggggcgcgcggcggtactcctcgggccgcaacgcgaagattagcatgagcctccgcgccggcatcgtcggcctgcccaacgtcggcaagtccaccctcttcaacgccattgttgaaaatgggaaggcccaagctgcaaactttcccttctgcaccataaacccaaacaccggcgtcgtggctattcccgatcctcgcttggacgtgctctcgaatgttcagcatccattggcgcttgtcgacatttgcaagccttgtcaaaggtagcaaagcacagggattcagaggactgggcaaatcaatttctttcaaacatccgtgaagtggattctatacttcaggttgtgcgatcttttgaagatgatgatattattttcggaggaaaatgcgatcattttattctatgtaacatatgcagatacttgatagctctgcatcataacttggatccttagtgagttttgtaaatcactccaataaactttgccatgttatattatgagcaataatatgtagtaatccctttttggtcaggattagaaaaaattctggatgcacttatggatggaaagcctgcaagatctgttgatttgcctgaccatgagaaagaagctatacaacatctttatctgctcactatgaagccagtcatttatgttgctaatgtaacagagtctgatcttgccgaccctgataaaaatccccatgtccaggaggtggccaaactagcatcagagctgaaatctggcatggttacaatatcagctcaggttgaggctgaactgtctgaactaccactggaagagagagttgaatacctaaattctcttgatgttgccgaaagtgggctaggcaacttggtaaaagcaacatataaccttttgggactaagaacttatttcactaccggagagcaggaaacaaaagcttggaccattattgcaggcatgactgcacctcaagcagccggagttattcatagcgacttccagaaaggcttcattagagctgaaactgtatcttacgatgattttgttgcggcgggttcccttggagcagcaagggagaagggagtgatgaggttggaagggaaggaatatattgtgcaggaaggagatgtcatgctcttccggttcaatgtgtgacaacaatactgtgcaagaagtttcaagctttattcaactcgaatttcatacgaacttacaaggcaagacaaaatttggatagaccatcagaatttgtctttgaggcatcaattgtccatttaatcggcatcgttgcattttcggaggaaaatgcaatcattttattttatgtaacatatgcagatacttgatagctctgcatcataacttggatccttagtgagttttgtaaatcactccaataaactttgcctgttatattatgagcaataatatgtgtaatccttttttgaaaaaaaaaaaaaaaatatcgatggcatcgacctcga

SEQ ID NO: 4257 - DNA, 1268 bp, Triticum aestivum
  unsure (1)..(1268): unsure at all n locations
  Clone ID: TRIAE-23APR03-CLUSTER18416_1
ngtagtgttgttgcggggagggggaggtgcacgttttgtgtggtaccaagagttttgttggactacataccagtgtgggcggtgtaacaagagaaagagggggttgtctgtgaggtaggaaattgttttttccatttcgggttcactggacaagttgccactggttagtagatgggaaagagcagtttttataccggcggttgcctatattttttgtttttgtcgctgggcgggttctttggtttgtgtggttttcacgagaccactctcaactctgagattaccagggtgggttccatttgggtacccccagtcaacctacgggttcgttagaaaagttccgtcccgatattaacccttttttttttttttttttggatcagtcacatgaaaagcatataaagatcgaacctgatattctaactcttgaatcctctggattatttttttctttttaaaaaacaaaatgctaattatagccaaaaaatatatttcttacggaagtaatgccaatcacaccccaaattattgatccatcagttgacgtgtacatgaaaagtgtgtcctacaaaagaatgtcttcatgtcggtcctggcagtggcccggtcttggtgtacaacagtttatccgcgttccaaatttaatttttgccatgcagatctcgattactagttgccagccgcctcacctggagtcttggtggtcatttggtccacagcacgcacggtgctctgaagctcctcccatataaccttgtaaaccattctctgcctgttcacagcggatttcccctcgaacgccttcgaaaccacgtctatgcagatgtggcggccatcccctgaggcgtcgacgacggtgacagtgtccgcctccagctgctccttgatcttggtctccatagactgcgtgatggtggagcctgtgggtcccgccggtcccggcgccgacgcccaggccgagaagcgcccggtccgggtgctgccggaaagatggggaggggaccaggtggtgaatctagcagaggaggagggggaggatagggaagagagggccagggtggcctgacggcggatggcgtatgaagccgaggaggaggaggtgaggcggcggaggagcatggaggtgaaggagcagggggcggcggcggacctcatcagcagcatcgtcggcaaggggaagagagaggacaggagaatatttcagttttttattttttgatgagtccatattcaaattgtcctcaattatttcggacattccttccaat

SEQ ID NO: 4258 - DNA, 1237 bp, Triticum aestivum
  Clone ID: TRIAE-23APR03-CLUSTER18441_1
ttttttttttttttttggaggggcaaacttgttttcttctctttgtggtgtcatgccggaacatgatcattctatccacatgtacgtcacacatctataaaaatatgtacaattttttactccgagaccgagtaaccgagagacgctgggaaaacttgcgatgacgccacgcaaggaagacggcacatcacaaaaggttggaggaggaaaagtccaccgtgccagcccaggcgtcaacatgagcctgagcccgccggctgcgacggcttcgtctgccgcgacgacgcgctgctctcgccgccggcgagccccatctctatgtccctggccgcgtcctcctcctgaggcgccgggggcggcgatgcgccgccacacccgagaagccgccgcagaccgcacgcttgcgcttgcgacggagttggcgctgattgaggcgtcgttgtggcgggagtctgctgctgctgctgctgcggctgcgcgcggccggtgctgacgtcgtcctgggagccgaagaagagcacgttggtggggaagttgggcgactcctggtcggcctccggcgcctggaccggcgcgggcggtaggggcggcgcgtcgacggccgggcagcggcagagcgggcaggtggagtgcgacttgagccacatgtcgacgcagtccacgtggaagccgtggccgcaccggggcagcacgcgcgccgtctccccggcggcgagctcggtgatgcacaccgcgcagtccatggcctcccccttggccacctccctgcggggcagcgacgccatggacgcgtcgtccaggcccccgtcgtagaaccagggggcgacgccgtcccccgctccggccctcccgtccccgccgcagaacaagaagcgcaggtgcgccatcacgccgctccccggcggcggcggcgcccctccgcgggacctcttggcgcagaggaatatgtagaagcagagcacgaaggagaggaagatggccatcaccgccgccagcatggcggccgccgccgcggccgtggtcgccgtcaccgccatgtaaccacccctcgagcaagaatcgcttcggcctggtgcaaacgacagcggccgacctccctctctttctctcctcggtatctgctcctcgtcctcgcaagcttctaggcagggcgtgcgtgcgcggagagagtcagtatatattcaaaccagcgtgctctggcgcgcgcaggagctgttttgaaagtcccggcccggcc

SEQ ID NO: 4259 - DNA, 1114 bp, Triticum aestivum
  unsure (1)..(1114): unsure at all n locations
  Clone ID: TRIAE-23APR03-CLUSTER18474_1
aatcgaaaaaccaatactctcactcgcgcacccgcccgtggcccccgtcgcctccttcccctgaaccctactccaccatggccgccgcccgcgccgccctcctccgccgccccggcctcggcgccgccgccgccaaccccgtcctcttctccggccacggcctccgctaccgcaagctcgaggtcatcctcaccacgacgatcgacaagctggggaaggcgggggagacggtgaaggtggcgccggggcacttccgcaactacctcatgcccaagatgctcgccgtccccaacatcgacaagttcgccatactcatgcgcgagcagagcaagctttacaagcgtgaagaggaggtggttgtcaaagaagtctcaaaggaggaggatgatgctcggcaagcggaagagaaactgaagcagtgtcaagcagcagcaaaacggctcgataatgctcttttggtgttcagacggttcatctctgaagggatcgagttgcgctctcctgtaactaaggatgaaattgtttctgaggtggcaaggcaactcaatgtcaacatttaccaagacaatttgcacctggttacaactagtgtcatcccttggcagacctcgaggagaaattgcggtgccacttcgctataccgcgcggatataccaagcccaaaaagactatcaacattgggaccatgagaccctaagcactttcgactgggcgatcttgctctccttccaatgtgctgtcttgtaccgaaagagcgctgaatcgtacaaataggccatctcaccctacgggtgaataaacacgctcaaatagaccttcaaactcaaccttttccctttacaattggcttgggctatcgtcccgggcggggcgatatgatcgggcgttttgaacctgtgaataatcgttgagaggtagtgtacctttcgccgggggtgcggggcctagtcatcttgttcttgtctggctcgagcgccctctcctcgtgtgagtgggcccagtccgggtgtgagaggggaaggttgtgtgtgcaaggnatccttnaaaaggaaangccgggagtgaaagctcctcaaaaatgccaattggggcctcacatcatatgaaaaaaaaa

SEQ ID NO: 4260 - DNA, 1062 bp, Triticum aestivum
  Clone ID: TRIAE-23APR03-CLUSTER18501_1
ggtgttggttgctggtggtgctggggcgcccggtgttgagtcttagaatggtcgccgaggttagataaacatgagactgcttgtaaatagacaatccggctgtcaaccaattagttggctcactacaagatatagggcaccagagccttgatgctcgctgggaactcctcgaacttggattcgtaccatctccgggtggcgaagcttcggccgacgaggtaggctgccgtgccggaggccatggcgagcgcataaaccgtctgcgagatcatcgcgaacccgaagaatccggtgatctcgaagaggtagtgcgggcaggtgacgaactcgaagagccctcctttggggatcttgtaccctttatcatcgtcacctcccttcctgagttgcgagaggaggtagtggtggtagaagttgccggcgatgccaacggcaaagaggagcacacctgggtagaggaggttggttgaagggtcaggtagttcgacggcgaggtgctgcgcgtagatcatggtgatggcgctgagcaggtagctggaggagatggtgagcgcggtgttgagtggcatgtttccactgtaccggtggatgaagagtacctcgaggacacgcttgaggaagtggacggcgagcgcggcggcgaggagctccgcgcgcagcccttccacggcacccgggacgacgaaggacgcggcggcggcgactagagccggcgcgtaggccaccagcatcccgtcacggcccggaagctgcgcgccaccggtgcctcccttcttctgctgctgtccagacacgacgtgccagaacttggagtaggccatgtgctggccgcggagctccgagaggcccgcggacgccagcgacgcgaacgacaccaccgacatggccgtcacgaaggccgacgccggcggcgggtacagcagcgacgacggccaccacatgtcgctttatcgatcgtccacttggccttggtgtaggagctagctctgaactggatcgacccttgcgttgcgctgatctcctgggtggtactcgggccgttggtttacgcgtgggtcgacc

SEQ ID NO: 4261 - DNA, 1749 bp, Triticum aestivum
  unsure (1)..(1749): unsure at all n locations
  Clone ID: TRIAE-23APR03-CLUSTER18617_1
tcgtcccctcgccagatttcgggacatcgtttcgttcggtttaacaatatatgatggtgtttctatacttgtttacagtttgagacaaaattaccctttcgtacaggtttttatacaggattccctccgagtgcacatcacagatcttcctccggccttccatcagctcaccacctgcggcgcttcctgccgtaccaataaccgaacgcggagatcgacacggccgcaacaacccccgccgtcgcgtaccacacgaaggtgggcttctcgccgagggtgaccccgctgtcaggcacgtctttcttgctttcctggatggcaaacgccaggccttgtctttcaagttcagacatgtctgagaccttggttttacgccagacaaccaccgataacgcctcgtagtcgtcccggtccccgccttccaggaacgcgcccgtgatctggcccttgctgacccagtatgcgccgaaccgagggctgttgctcgtgaagtcgccgtagtgaattacttctccgacattgtctccatagaactgccaggacagtgtgaagactctggagtagaagaatggcaggtaatcgacgtccctgcttttggaaggctccaggatggctgcgacggcatgtctggcggttctacgagccgagtcaacatgctcaagccgtcggatatcaccgtcaaagagcttgatggggaacgcggcaacatcaccaacagcatacacggagctgtcgctagtttgcatttgcccatttaccttaatgccgcccttctccatcagcagctggccttcaaaaaggctggtatttgcacggatcccaataccaactactcccatatcagcaggaagggtggttgcccatcttnttagagattaccgaaagtccccttcccntgttgagtctttttcaaaggatgtaagcacagttcctttggtaaaagtaactcctttcaaagtgtagtagctttcataatagtctgcaattttttctgtaaatagccgacccatgcagtgtttttcagggaagaccatggttacttttatcttgttagtaaccaatgctgctgcacattccattcctatgtagccaccaccgatgacaacagcatttccaccagaacatgagctcatcgcattcactaatttatccgcgtcttcaagattgcgcaaataacatatgtttgcagcatctgaaccgcttattccaaactcttccagcttcaaagcccgagcacctgttgcaattataagtgtcttatagctgatagtttctccagtggctgtaagcaatgtcttccgtctcacatcagcagatatcactcttgttccaagaacaagttcaataccttgttccttgtaccattttgtcgtcagtaactcatcattagctccaacacaagtatggaattttggaagccgagaaggatcttctgggagtaaatagcctttgcttaatgcagggcgttcataaggagcaacggcctcttcggagatgatgcagagctcgccgcgggagtagccgccgcggcgggcgaactcgagcgccgcgtagcccgcggccacgccgccgcccaggacgacgtacacgaacgcgcgccccatcctgcctgtgtctgctgggctcctcctcctcctcctcggcccctagatgcgggccatggcgcggcctctctctgctcggcttgtggcgagtcgtgtgtaggggtgggggttggggatgacgaaatgacgtccacctgcgttgcgt

SEQ ID NO: 4262 - DNA, 1573 bp, Triticum aestivum
  Clone ID: TRIAE-23APR03-CLUSTER18637_1
ccttttgtattagtgttggcctcctcctccctgctctctcttccttgtacctgaagcggaggcaaattgagacgagacgaaaccctcctccccttccctccccactccaatctccatggctcaagacgaggtcccggagtcctcttccccctcttcggcggcggctggccgcctgaacgccgccgcgccggagttcaccccccgatccgccgccccgcaccaagcccatccccatcgccgcgggccccaccatcaccaccaccaccaccaccagccgcatcaccagcaccagcaccagtaccgccaccagcaccaccaccagggagaggatgagggggatgccgcggcggtggtggataacgctcagctcgtcctgcccgaggagctcgctcgccgggtcgtcaagcaggtggaattttacttcagtgatgtcaatctagctacaactgaccatctgatgaagtatattactaaagatccagatggatttgtgccgatgacagtggttgcatccttcaggaagattcgagagttaattgatagatccttgttgcctggtgcattacgtacatcaacagagctggtagtttcagatgacgggaagatggttaggcgacgagtgcccttctctgatgtggatgctgaagaagttcagtctcgaattattgttgctgaaaaattacctgaggatcatcgctatcagaatcttatgaggattttctcaactgttgggagtgtgaaatcaatacgtacttgctatccacaagggatcgatatttctgccggcaaatcatcaaggattgagatgctttttgctaataagctgcatgcttttgtggagtatggaactgttgaagatgctgaaaaggcggttgctgagtttagtggcggcagaaactggagggatgggcctagagttcgttcgctgcttggttgcctgaaacatgggattggtcaaggaagaaaaggtggagatgaggaggctgcggatgaagatgatcctgaagagtatgaagcagaagatgctgcccagggtgaggatggtttctatgacaaagctggaatgaggcaagggaggggccgaggacgtgggggaagaggccgtggccggggccagtaccatggccagagtcgggacggcgggcatccaatcggcactcctccatcaaatcacagtgctgagcatccggtggtgtccaagccgcctcctggtccgcgtatgccggacggcacaaaaggatttgccatggggcgagggaagccccaggtcagccccgcagtgctgtctgatgcttagtggtaccctgttgccctgttgtcgggaggggttggcagaacggcgcttatatgatgacccattttgatgtgatcccatgaagaggaaggatagtaataccctgatacatgcgtcagtatactgcattgctgctggtccatggacctgtcttttggtctctgaatttcctagttgaaagtacaaattcatacttgactcgacaaatcaacagaaagaagtcttcagtgggaggagcaaatttttatagttgttcgaatcgtcgcttttgcaaacata

SEQ ID NO: 4263 - DNA, 1583 bp, Triticum aestivum
  unsure (1)..(1583): unsure at all n locations
  Clone ID: TRIAE-23APR03-CLUSTER1869_2
gagtngtaaaatcagcaaataagttggtgagtataagctacaattctatagacactgtattccaggagtacaaatattctggtgcaagttcattttgactttctaatactacagatctgttaaagagcatcgaaacggaaaaggagctgaaaaaatgagctgctaatatcaccaacggaaaatcacatacacccaccagaaaggcaacaccattggtgcttcttcccatgcaagctacttggaaaatttccttgaggtaggcctcaaacaactagctgcagcacaaagtgacaaatgggcagttcttatgcaagaacctccttcagcttggccttctggtcgtccgtcagggttttcgggaacaacacctcgaacgtcacatacagatcgcctttcttgttgctttggtgcaatggcatgccctctcctttgaatttccttacctccttcggcttagtgacaccctgggagccgatttggacaagatggttgtcaagatgcttgaggttcttctcgaatccaaccagagcttggagcagggagattgtaactgttgcatgcaggtcattgccttctcttctgaagcggtcatgtggtgctgtcctaatcctgaacttcaagtctccaggttctccatcaatcttaggctctccttcctcgaaaaacgaaacctcctgtccatcttgcatacccttctcaatatcaacagttaaaaagtcaccttctcgtacatacttaacatttggacactggtcgcagacctgctcggtcatttgttgatacattccaggaccaatttgacggtggtaaacttcattcctgcagttgcatcgtctctttcctggtgctggttttatgatgtttttttctctccaaacctttaatgaaccacccatgtacaggtcctctagtgaagcatccagttcaacaatcacatcatcaccttttatgatctgttcttcctcctcttccataccaccacctcctcctccaaaaaagctgctgaagatgtcctgcatgttcatcccaccgccaccgcctcctctcccgctttggaactgcttcagcccctcctcgccataccggtcatagatcttcctcttctcctgatccgtcaagacctcgtacgcattattgatctcggcgaatcgcttggtggcctcctcattatcggggttcttgtcggggtggtacttgagcgcgagcttgcgatacgacctcttgatctgatcctccgacgcgcccttggggacttgcagcacgtcgtagaagctcttcccctcgatcaccgccgcgagatgcagcagcagcgcgaggaaggccgcgagccgcgcaccactcctccgcggcgccgccatccccccctcgccgcgtcccgctcgacctccccctcaacccaccggctatgagttaggatcggggttcccgcggctcgcgaatccacgcgtatgcccctgcggttctgccttcctcctcctcgtcgtcgtcgtcgtcaccgtcgtcctccctggctggccctcgcgcctcgcgggttaagagcttctacagctagaaggggaagggatctggagctccttttcggg

SEQ ID NO: 4264 - DNA, 1822 bp, Triticum aestivum
  unsure (1)..(1822): unsure at all n locations
  Clone ID: TRIAE-23APR03-CLUSTER18719_1
gaaagggacagccactagtgcggagatcctcgttcctccaacagtcgttgctgcctcccctcccctttcccgcactgccccagccgtgcactcaacccgttgctcgctgctcggagagaggttcacacggctgcggttgtctcgtcgccgtcttggtctccgcttccgtgtctgcctattccgcccctcccttgcacccctggctgctctagttgcccaggcgtggccatggccgtcgtcgtctgcgtcaccggcgccggcggcttcatcggctcctggatcgtcaagctcctcctcgcccgcggctacgccgtccgcggcacctcccgccgcgccgatgaccccaagaacgcgcacctgtgggcgctcgacggcgcggcggagcggctgacgatggtgcaggtcgacctgctcgaccgggccagcctccgcgccgccttccacggctgcgacggcgttatccacaccgcatcaccgatgcacgacacccccgaggagatcatcgagccggtgatcaccgggacgctcaacgtggtggagatggccgcggacgccggcgtccggcgcgtggtgctgtcctccaccatcggcaccatgtacatgaacccccaccgcgacccggacgcgccgctcgacgagtcgtgctggagcgacctcgactactgcaaacaaaccaagaactgctacttctacgccaagacgatcgctgagctggacccgtaggccggcgacagagcaacttcacgtgatctggccgtgcgaaacattttccctggtcgaggcgatcctgcagcatcccgagcatgaacaccagcaccaggcacatactcaagtacctcaccggcgaggccaaggcgtacgtcaacgagtcgcacgcctacgtgcatgtcaaggacgccgccgaggcgcacgtcagggtgctcgaggcgcccaacgccgggggacggcgctacgtctgcgccgagaggacgctgcaccgcggcgagctctgccggatcctcgccgggctcttcccggagtacccgattcccacaagatgtaaggacgaggtaaatccgccaaagaagggttacaagtacaccaaccagcctctgaaggaccttggcatgaagttcacccctgtgcaagaatacctctatgaagcggtgaaatccctgcaagagaagggattcattcagaaggcttctggcaacaaggggcttgctagtagagggagttcgccgcctcaaaattcaacggcgcccgtgtttatgtcgaaactttgatgggcttctgcacaaagtaacaatgcagttcgccgtcatgtgaattgtaattcatttgattaagtgatatgttgctggacagttcttgtatgtggcaaactgccaactttgtgtagtagcgccgtgttgcctggaacagtacaccgctacagagcaacttcagtgatgcatgccaaatattttccctggtcgatgttcttctaccaccacctagttgttcaccttgtctgactcagcgggtacaaaaacccgatcaagttggcacttggcagcagagcatacaagcgtgccctctttggagtctcgttcggagagtgatgctgttttggccaacttctgcttgttgttggtcgtgatcttgtttatgcgctttctctactaactccctctctgatcttgtgtatgcataccttgtccaaattgatggtgcagcttgttacgttcgctattaacatgatgctcttatcctaagatgcaaactagatctggcaaaagcaaagtgaggccaccttccttgccaaatatagctctntncttagtttactncatgctccttt

SEQ ID NO: 4265 - DNA, 1903 bp, Triticum aestivum
  unsure (1)..(1903): unsure at all n locations
  Clone ID: TRIAE-23APR03-CLUSTER18724_1
ccccgaataacctcggattccaggattcccattcggtgataccgcgaggggctccacctccggctcgccttaaccctaaccccctgcccccctcccctccggcgagatgcccaccggcgcctcggcgtgacgcgacccctcgtcggcggcggggagcacgaaccggagtcggcggagggtgaatctaaatggagacgaagcctcggccttcccgtgtgggcagggtgaccgcgaagaagcggccgaggccggatgcgtcctcctccaccacgcggaagctgcagcgccgggagattgccgcattccccgagcccaccttcgccgccagcaccacgcgggagcggtgacgcaacatcgagccccacgaagaatttggatacatatgatcctaaggagaacaagtggagaacaacccttacttgaggaagcggtctaaaattatcgagataattggagcccgtgatattatctttgctttatcacagctgggagtatgtgctgcgttcagtagagtgacaaaccagtcggatttgctttcatgaatggaagtccagatcatgtctatccgtagtttgttcttcataacaagaacaaatgtctcgcttataaccgtatcagtttatggcttctgaaaatttcagtgctttaagatgcagaacaactcgaatcgagtatatacgccgtggaaagccagatgctggtttccctctttttgagacagaatcgttaaggtggcctggtttcgtggaatttgatgatgtaaacggaaaagtgctgacttactctgctcaagacagtacttacaaggtgtttgacttgaagaattacacacttctgtatacgatatctgataaagatgttcaagagataaaaatcagccctggtataatgctattgatatactctagaaaaaagggctatattcctcttgagattctttctattgaagatggtaagcgcttgaagtcattcaggcatcttcttcatcgcaacaagaagatcgatttcatcgagcaattcaatgaaaagcttctagttaagcaggatggggagaaccttcaaattcttgatgtaacaaactctaagatcacagaagtgagcagcaatgagtttgtgactccatcagcttttatttttctgtacgagatgcagttgttcctgaccttccgtaatcgatcagtatcagtttggaatttccgtggtgaactggtgacatcctttgaggatcatttgttgtggcatcctgattgcaatacaaacagtatttacataactagcaaccaagacctcattatctcttactgcaaagctgaaccggatgatccatcttcagaagacaatgcctgttctataaacatcagcgacatattgaccgggaaatgcatggccaagataaaggcagggaacctgtgcaaacagaagtcgtcgaagttcctgtgcacgcctctagaggccctgggcgacattacatctctgtactacgacgaagagcgtgaggagatcatcaccggcaaccatcaaggcctcatccatgtgtggtcaaattaacagcttggtccagtgcaggcaggttacatcaggcaccaggggatcttcgttagcatttagctagtagtggcaccagtttagtgggcagcctgacctagccgtgggtatctttcgccgcatgggccttcatgttgggaatgtttgtgtatagtactgtagttcatccatcgccagcctgttagctatttgacatttgtcatgtgttttttgggggatccgtgtagctttaggagatgcttatcataggggtcatcgaagagggaaagtttcgggtgcatcgcatgtaagcattattgacctttaagctatttatctgattctgatttccgaaaaaaaaaaaaaaaaagctangatc

SEQ ID NO: 4266 - DNA, 787 bp, Triticum aestivum
  unsure (1)..(787): unsure at all n locations
  Clone ID: TRIAE-23APR03-CLUSTER18819_2
acgagagagctctaggacggaacgagcgagggagcgagcgagacagtacagaagcgaatagcaggcgattcccaatccccgcacgcctcctcgccctcctcctccggcggcgggatgatggacgacggcggggttgagcacgcgcagatcccgaatagcttcggccacgagctccgcgcatgcctccgctgccgcctcgtcaagacctacgaccagttcagggagaatggctgcgagaactgccccttcctggacatggacaaagatcgcgacaacgttgtcagctgcaccaccgccaacttcactggaataatatcgctgatggatcctaataggagttgggctgctcgttggttgagaattgggaggttcattccagggtgctatactctggctgtctcagaggaacttccagaggagtatcaggggatgtgccaagacaacaacgtgcagtacttccctccgaagcgcccctgancaggctcgaagttgatgcagtcgtgatcctggagcagtacttttacatatagttgcacctgtaatgtctgctgattaaactgccgccagtgttatgcatactctagcgatttgtggaacgcttctgtacaacctggagacgttttaagctgaactagttcatcgcacatttctacttggacgagacattgcaagctgtagttttactagatgacccgttgcgccaatggcgcaaaggccgaatgtaagccaggtattgtaagagtgtgcattaacatattgttgttcgaaaagcataactcatgatact

SEQ ID NO: 4267 - DNA, 1673 bp, Triticum aestivum
  Clone ID: TRIAE-23APR03-CLUSTER18868_1
ttctcgttaagctaaactactagtcggcgagaagaaggaatcgaagtagacgcaagcccacgcgaatccccgaacccaatcggagcgacgagaggaacaaaccggccgacgaggggaaggaaggcccgccgcagcgatgcagacgcagaggtcaccggcgatggtggggggagggcccgggtcagcggtcgggtcgccgtccccggcgacggtgccggtgaggcggcgctgcgagggcacggccatgggggccgtcaccctcgacctccgccccggcctcggcgtcggccccttcaccctcgggatgccgatttccgatgcatttgcgcagattgaacaccagccaaacatttacgatgttgtccacgtgaagtacttcgacgaggagcctctaaagttggacttcgtcataagctttccggatcacgggtttcacttgcgcttcgatccttggtcgcagaggcttcgtctcatcgagatttttgatgttaagagactgcaattgcgttacgcgacgtctttaattggcggcccatcgacactagccacttttgtatctgtttatgctctatttggaccgactttccctgggatatatgataaagagaggggcatgtataccctcttctatccaggtttatcattcgcattccctatccccagtcaatatacaaatttcttcaacaatggggaagtggcagatttgcccctggaatttcctgatggaacaactccggttacgtgccgtgtttctatatatgatagctcaacagatagcaaagttggtgttggctcattgatggataaggcagttgttcctgccttacctgcgggcagcctatatatggaggaagtacatgcaaagcttggtgaagagctttggctcactactggggggcagcatattcctttcggagcatcgccccaggatatctggaccgaattgggtcgtccatgtggtatccaccaaaagcaggtggaccaaatggttatacactccgcatccgatctccgtcctcggactactctttgtggagactacttctacaactacttctcgcgtggtatagatatcttatttgatggtcagacacacaagataaagaagtttgttttacatacaaacttccctggtcattctgatttcaattcatacatgaaatgcaactttgttatctatgacgctgaagctgaaggggcacagcagccgggtaacacttccaagaattgcataacacctcgaacaaaatgggaacaagtcaaggagatccttggtgactgcggtcgagcagcaatccagacgcagggctcgatgaataacccatttggatcaactttcgtctatggataccaaaatattgcttttgaggtgatgaaaaacggatatatcgccaccgttactctcttccagtcatgagtagcatatagtcgcacccgcacccgcaccgcactgatgtacgcggcatgcaaagtctgtgaagcatgccccttgtttacgttgtaaattaacctgtatatcccactcattgtacaggaactgcgttcctcgggtctctctgtaaatatcattccatcactattgttctatcaactaattaatcatgatgttggcgtgattccgtatcaccctgaacacaaccttgtacagggccaaaaaaaaaaaaaaaaaaaaa

SEQ ID NO: 4268 - DNA, 1788 bp, Triticum aestivum
  unsure (1)..(1788): unsure at all n locations
  Clone ID: TRIAE-23APR03-CLUSTER18870_1
ccccccccgtcgtggcgggggcgcccccccccgcgggccgcccccgccgcgggagagtcggcccgtgaggcgcaagaggatgtcggacgagttggcgcggaggccggccgcgttccggatcaccatttttccccagtccacccgccagcgcaccaaggcccccgccatgaagggacgacatgcgggtgtgctgacacagctggttgggccagaaggcatggaggacggcggcgttcgggctctacggcttcacccagttcaccaaatccggcttccgtggcaacacaacatttcgtctccgcacgcgcgccagaggaagaagaccgcggaggaggagagaaagcgcgcgcgagaggaggaagaacatgttcatccagaaggcatggaggacggcagcgttcgggctctatggcttcacccagttcaccaaatccggcttcgtggaacacgccaagaaatttagagaggaggatatgcagatccggttggatgggaaaaattgcctggtaactggagcaaattctggcctaggttatgcgacagctcagggcttggcttctcatggcgccactgtctatatgctttgccgtaacaaagaaaggggagagactgctctgaatgaaataagatccaaaactggcaatatgaatgttcatctggagatatgtgacctttcatcaattaacgaagtcaagacatttgccacaaaattctcttcattggagaagccacttcatgtccttgttaacaacgccggcttactagagcacaagcgtacgactacatcggaaggtttggagctcaattttgctgtgaatgtggcagcaacatacactttaacagagctagtgatgccactgttggaaaaagcagcacctgatgctcgtgtcattacagttgcttcaggagggatgtacactgagccactgaacacgaatttacaatacagcgaaagcgaatttgacgggacaaaacaatatgctcgtaacaagagagttcaggttgctctcaccgaatggtgggctgagaaatacagcaacaagggagtgggtttctactccatgcatccaggatgggctgatacacctggagtctcgaagagcttgccgggactatcagagaagctatcaggaaacctgagatcgaacgaagaaggggctgacacagtggtctggttggctttgcaacccaaggagaagttagtcccaggggctttctacttcgaccgggccgaagcgcaaaaacatttgaagtatgctgggactgcagcatcccatgagcagataggttcgattgttgacagcattcgctccatctgtaacctacctgctaacccacaagtttatcagtgaagggatggaagtcctggacaaaaataaaattgaaattctgaaacgaagacgggaaagctggaactaggattctttgaaaaaaagaaaaaaaaaaaaaaaaaaatttaaaaaaaaaaaaaacgttttccaatccccccccaaaaaaaaaaaaattttaaaaaaaaaaaaannntttttttttcccccccccccccgcgggggggggccccgccccccccccccccctcagggggggtttattcccccccctcccgggggggccttttttacaacagccgggagggggaaaaacccggggggccccccaaatttaatccttggggaaacaccccccctttccccgcgggggggaaaaaaaaaaaaagggccccccatataccccttccaaaattgtgggccccctgggggggggaggagaaatggggggcggtttttt

SEQ ID NO: 4269 - DNA, 1185 bp, Triticum aestivum
  Clone ID: TRIAE-23APR03-CLUSTER189399_1
aactgccgctgaggtcctgtctgtgccttctcttttcctactccaacctcccctctttattttttccctacaatcggtttccacttctctcctcacctcgcatcccagatccaatagccccccccccccccccgccccaaccccgctgcgcccaatcgctctcccccagcacagtagactagttaatgaaggggaagtttaagagcagaagaatatagttaatggttcctggatgagaagtggaaatgctactggctgtggaaggaggaggtttcttctcatcgtcagcttcaggatacagtcatggccttgctcttttgctgcttggacggaaagaagaagagaagcctgtcaaggcatggagtcagtaccgactagtcgatggggaagctgagcatgtgtatcatctggctaacacgaaaaaccaagctccccgtaaatgtgctcccttcatctgcttcggtagcactgctttggagctcgaaggggcgtctcctccgaaattgagttcaagcaacactttggactctttggaggagccatcccgttcaacaaagaagaaggttaccactaatggttccataactggagatgagagaaaaggttgtcttaagagcaactcaaaaagggattcgtcagagcattgtatagtggtgagtgaaggtgaagaaccacgtgagtcactggaagaggtgcaaaccttgaaatctggtatggaacggagaaaagttcaatggactgatacatgtggaaaggagctttttgagataagggaattcgaagccagcgatggaagtttgtcagatgatgaactggaaaatgagggtttcaggaagtgtgagtgtgtgattcagtagatttttcgtctgccatttgaaacaatggatagctgcagcttttctgctaggatatgcttatgctgccaacttctcaacaatctgggtgatacctgtggcttgaagttaaacaagcaaaggatgatcatatatgtctgctttcctgttagctagcttgcacggtagggttgcagttttgatgcccgctgtatcatatcaagatttgacccatttatttattttcgccttattttccttcatttgtgttcacatgctccaggttgtaacatacaaggctgctagcaaaaaaaaaaaaaaaaaaaaaaaagtcgacgcggccgcgaattcg

SEQ ID NO: 4270 - DNA, 1940 bp, Triticum aestivum
  unsure (1)..(1940): unsure at all n locations
  Clone ID: TRIAE-23APR03-CLUSTER18992_1
agnnaggnnnnnnttttttttttttttttttttcttttgatcacaattcacacattatttatacgcgtcttttcggtttggtcacaattcacacattattaatacttgtatcagttcagttgtacaaaagtttggcagagtatgatacaccatataaccctcgcaataaaataaataaaaactccacacaagtggcaaaattaggaagtgtttctagctttacatgggggctagttgctaagctctaaccaacaaacagaaacgggggcagagaaaatgcaggacctgatgattgctgacagagaaacggcgaatatcacaagcaaccactaaaacctgacctcttcagggctaacaacagttcaaaggtggcaatacgacctccgagctagaactcctggttgataaccttcttttcatgcaagaagctatcactcgtcatgaacccgtcttggctgagtatcatcttggccagtaaagtacatcatgacaccgagaagagcaacaacaaacatgagaatgtataatgagttcatgctgacaagagagtgcatgaaacccatgaaggaagggccactgactttcttctttattgttctccctgctctatatccctcaaggaattggcttaattgggatgcttggtcgccttcttctaacttctctgaaccctccactagttcatactcttcatttctgtcccacactagcagctttggcaattgtgagctcttggaaacatcaaaagtctccacaaactcctcccattgtttgactccaacatatccaaacaccaaatcacggttcgcatgagcagcagacctcaaaatttttaccagctgggtagaatttacatccgagtcatcctccaaaattgcgaggacaacttttctgtcatcatcatccagcaatttcagtgtctcggtgttgatggggacagtcaaaggcagcagcgattgccttacaaaatcctccaagaaacgtccttcaaatgggccatagaacacactttgttcattatactttggatgaactgcaaccaatgctgggatcttattaaaatcatatgtcgccatccagtcctcagaaaaatcttttgcgacggcaaaccatgctcttttcttgtattttcctccatattcagcaatcaatgactcgttgaccccaaaaccgatgaacatcggaaagcttgtgccggcattctcaacaaagctcttgattgcagaatccgactcaagagtagaaacatcaggcgcaacaaacttcttaagattgcggacaagcaagtcagctttccttgaaccagtgtattcaatagggaccccatgtataaagagcattagagtagggaacccatccactccatattttgatccaagcttcctgtacttgtcggcatttactttggcaaccatgatgggctcactcaatcccgccaacaccggtgcagcttcatctaactcgggagcgaggcgcttgcagtggccgcaccatggcgcgtagaagtcgacgaagaggaaatcgatggagctgagggccgcctcgaagttgctgtcgtccaggtctatcaccttcccgtcgcgcggaaactcctcggcggcggagaaggccgcgagcaggaggaggggaaggaggaggagaggaagcggcggcggcggtggagtcgtcgccatcgccgtgcgcggccgattcgatcttccgccgcgtctgaacgggaaggggtgggttctggtgcccacggaactgtctgtctgtcttgatggaagttggggtttatgcctctctaaaaaggggggcnnnaaaaaaaaatggggnnggggggggggttccctcttttttttaagagccccccccggggggggggggacacacaaatttgntcccacaaaaagaagggagnnnncccggggggggggaaaaaaaacagaaaaaaatatttt

SEQ ID NO: 4271 - DNA, 2146 bp, Triticum aestivum
  Clone ID: TRIAE-23APR03-CLUSTER189_1
gggaatccccaaccgccgggcccccgcgactcccgacaaagtccgcccgtccgacacatgcacatcagccattcacccccggcaacaacaagaggccgcacaaaaccctcctctctgatcctccaaagcggcggcgcggtgggcatggatgggtgccggtatggcgacactgccggaggccaacacgtcgcccgcgcccaacggcggcggctgcggcgggatcagggttgagaattgctacgtctccaagagcaggctgcaggagtcccgcccagaaagccggcctcatgacgccagagtaccaaacccgtcaagtgaggggcccttcccatcagaccaatcttcgaagtccgtccgtcgtggataaacaacaccaagtatgattctttgcctgggtttcttcagccggaaggctgcagagcagtcggctgccgaagtcgcgctcatggaaatcggcaagtctgtggtgttaccaaccaatgcaaccatccccgcagtccaagaaactggtctgtgcaagaatcttcttcaggagtatgctcagaagatgaattatgctattccaatcttatatttgcaacaaacaaggtccatacatatgcaccgtagagaattggtggaatacaatacattggtgctacagcacggacaaagaaagaggcagagataaaagctgcccgaactgctcttcttgacaaactaagttgcaaggccaaatcgagagggtagtgcaaaatggtaccacaaaagtatattgttgagcctggcaaaaggcaaagtaaggagatcgagaaaaagcctgttgaaactccaaaatcgcttaagaccaagaaatgtggtaacaagaatcaacgagaacaagaaaaaattcgtgaagaagaatcggtgcaagaagttaacgaggcaaaggattagaatggagtggctggggatgctcatcattcagaagtacctatgaagccagctgtaacatcagatagatatagtgagcacctctgtaatgatccagcctgatgaagcatggccataacgaaaatggaccattccggtgacaatgcaatgctgcaacctattgatgacgcttggccgtccgaacatgatccgaccggtgagactgcaatgctgcaacctgatggcgaagctacaaaagtggaacagggagcaactcagtgacacagcaatgctgcaacctgatgatgaaggtggaagagtagaacatgagccactcagcaacgctccaatggtgctacgtaatgaggaagctagaaatgtaaagcaggaagcactcatcagcactgcaatgccacaacctcacatggaagatagaagagtgggagcagagccacctagagatgctgcaatggtgcaacctaatgatgaagctagatgcataaagcaggagctactaattgacgctgcaatgcctctccccaatgaggaggccggagcagctgcaaatcctgtgccattgagtgactccataacagcgcaacctaatgcagtgactacaaatataaatgaggagtcactgaggaatgcagcatcagtgcaacataatgaagaagctaggaccgtaaaccaggagccacccagcagtgcttcactacagcagccaaaggaacccagagtcgagaacggtgaatttgtttctgaaaacaaggaccaaactctgggagatgcatctcgtgaggcaaataggtccaacgaagatgtgccagaaaagtgctcagataattcatctgcttttacaagtgtggaatgatatgtgctgtttgaatcaaatgcaatggccttccagttttacatcttgatttgcaaactagtaaaacctgaatagctggcttcgcattttagaaatataattgcataacagatggacgtacgtggaccaaccaaggtcggttggtggtccatgttggccattagttattaggaaatttgcatgacgatgtatctcatgttgcttatatggatgatgtatctcaagttgcttatctgatcaatgaactattagtgaactattatttgtttgttattagcacatgttattccttcaattggagcgttgtccatcaaatggccgaaataaatagcagcatgccgacttattttcaggtgtattgtttctaaattttgtaaccaaata

SEQ ID NO: 4272 - DNA, 929 bp, Triticum aestivum
  Clone ID: TRIAE-23APR03-CLUSTER1915_1
agatgtgatttatgccctcgcatctggcgctgctgtcgtgcctgctggtgctgctcctctccctcgacaagttcttcctccactacctcaagcgctggctctccggcggcggcagcataatcccccggatcccgaccggcgccttcaaggcgcactcgcaccgacccatggcggccgccggcaggtggagcgagacggccatgctcgtcatcgacatgcagaaggatttcgtggacccggcgatgggcagcccggtgctggtcgccggcggcgaggccgttgtccccgccgtcgctgaggccgtcgccgtggcgcgggagcgcggcatcttcgtcgtttgggttgtcagagagcatgacccttctggaagagatgttgaacttttccgcagacacttgtactctggaggaaagggtccgacagtgaaaggtttgataggtgcagagctggctgacgggctttttatcaaagaaggagactgcaagttggtgaagccaagatttagtgctttctttgcgacacaccttgattccgttcttaaaacgcaaggaataaagaacttggtaattgttggtgttcaaactccaaattgcattcgacagactgtgtacgatgctgtggaattggactatgagaaagttattgtccttattgatgcaacagctgctgctaggccagatatccatttggcaaatatcagagatatgaagaccatcggcgtggaaacaccaaccttggaagagtggcgccgttaagcttgcgggtggtgtacttcattcttggcacaaagtgacatgcatatgtgcagtagaggcaacaaatgtgctattacatccttgctctccattcggtcccgacaaatgtaaatatgttaatatttgcaaggttgcatatataaaacttttaatccgtccatacatgcctaaaaa

SEQ ID NO: 4273 - DNA, 1246 bp, Triticum aestivum
  unsure (1)..(1246): unsure at all n locations
  Clone ID: TRIAE-23APR03-CLUSTER1917_2
ggaacgacaacacataattatatgtctcggaacaccgtcaccgntacgagaaggaanaaagaatcccctaccanatctcatcaactntaccacgacccgcaccggtacagacaccacatggggtggtcagcttaataagagtgctagtactcatggacagacacacacacactacgctgctaccagtacgtccgatcgaaccatcaaaacgacgccggaaatgcaggcgagcgagcgggcacaaaagcggcgggggcgcgcccaccgaatccggcgccgcacccgcattgccgacgcgcggccagccagtggtcaccaccgcatcanatgaggtggaggaggagcggcgcggntgccgccacgagaagcccggcggaggccacgcggcgaccgacggcggctgcgttgtagtcctggttcatgcccgacgggccgtacgcgccgccgccgaaggggctccccggcatcccggtgctggtcgcgcccggcggggtcatgctccccatgccgccggtgctgacgcccgtgcctgtcccggtgctgcctgtgccggtgcccatgccgccggtgcccatccctgtgccgccggtgcccatgccgccggtgcctgctccggtgcctacgccgctagcgctggcggggtacttgcaggatccggcgctggggtcggcggcgacgagggtggcgacgcccatgaagtcgcaggtggcgcccatgccggcgttcttctggtagtagctgttgcaggcgtaggagcagtgggcgacgacggaggagggctggaagcagggcccgctggaggtgatctgggtgcagtcggcgcccttgccgcacgcgtagtcgatggccttctgcatcgccgccgggttcgcgtccgacttgcacacgcagtacatcgcatctgagccggtgaacatggcgaccaagagcacgagcaccagaggaaccgccattgcagcagcagaagggagctttcgctctcgctctctcgccgaggtccgagcaagcaagaagagaggaggggaacggaggaggctagtcggcgtggcgtgggagagtggggagtgtggtagtggttgcagtgcggtcaagctcccgagcgcggcaccctttttatcggcgaacacgggccacacaagcccgcatcgagccgttcgttggcccgccccctggaggtggaggtggaggtgtctctggaggcgtcggcgtgcgaccgtgcggcagtgtccttgccacggggtgacga

SEQ ID NO: 4274 - DNA, 1919 bp, Triticum aestivum
  Clone ID: TRIAE-23APR03-CLUSTER1918_27
ctcgaagagcgctggttcccctcctgcacctggcctggagctcgccccgtttctcctccccacaccacactagcctctccccggtttttccccaaatccgacggactcgaggccaagcggaggcggagatggcgctgcggtgggcgctgctcagatcggcggagatctctcccggtcgcaaggctgcacttgagtacttgcattctctatcaaaggcacagcctactagttctatctcatgtgccggcctgcatcctgctggcagatcattcagcacccaggctgctactacatcaagcacaccacagcctccaccaccacccccacctccagagaagactcactttggtgatcttaaagatgaagatcgtattttcaccaacctctatggtcttcatgacccttttctgaaaggtgcaatgaagagaggtgattggtatagaaccaaggatttagtgattaaaggggcagattggatagtgaatgaaatgaagaaatcaggtctacgagggcgtggaggtgcaggttttccgtctggcctcaaatggtctttcatgcccaaagtgtctgatggacgtccttcttatcttgttgttaatgctgatgagagtgaaccaggaacttgtaaagacagggaaatcatgcgccatgacccccacaagcttctggaaggttgcctgattgctggagttggaatgagggcatcagctgcttacatctacattcgaggtgaatatgtgaatgagcgtctgaaccttgagaaagctcggcaggaagcatatgcatcaggacttcttggtaagaacgcttgcgggtcaggctatgattttgatgtacatatacattttggtgctggtgcctacatttgtggtgaagagactgccctactggagagccttgaaggcaagcagggtaaaccaaggctgaaaccacctttccctgccaatgctgggctgtatggctgccccacaactgtcacaaatgttgaaactgttgctgtgtctccaacaattcttaggcgtggcccagaatggtttgcgagttttggacgcaagaataactcgggaacaaaactttactgcatctcaggtcatgtgaacaaaccttgtaccgttgaggaggaaatgagtatacctctgaaggaattgatcgagaagcactgcggaggtgtgagaggaggatgggacaacctgcttgcagttatccctggcggttcatctgttcctttgttgccaaagcacatatgtgatgacgtgttgatggactatgatgcactaaaggctgtacagtccggattaggcactgcagcagttatggtgatggacaaatccacagatgtagttgatgcgattgctagactgtcatacttctataagcatgagagctgtgggcagtgcacgccttgccgtgagggtacaggatggctctggatgatcatggagaggctcaaagtgggcaatgcaaagctagaagagatcgatatgcttcaggaggtgacgaagcagattgaaggccacacaatctgcgccctcggggatgctgcagcatggcctgtgcagggtcttatcaggcacttcaggcctgagctggaaaggaggatccgcgatcgagctgatagcgagctgctgatggcagcttctgcatgagcaccacttctgttttcctgattttattcacagaaataatgcaaaccggtgaagctcttctgtacaagcagatgtagcttaccttattggttcgaaccttttatgtccatgtttatttgatgcgctggtgaagccttgtgtgctttgatggagaagtagaaacgaatttgaaggattgtaccttgtatgttacatgagcctgtttttcttctttaataatgttataaagaatgactatcctcataatctgagtgaactcctaaaaaaaaaaaa

SEQ ID NO: 4275 - DNA, 1531 bp, Triticum aestivum
  Clone ID: TRIAE-23APR03-CLUSTER19190_1
acctccaatttcctcctccacccgccgccgagcgccaccatggcgttgccgccgaccgccgcccccgccgccgcgcttcggtgcgcgggcgcccacgtaggccgcgtccccctcccgcgccacgccggcggcgcctacctccgctccgccctcccgttcaggttaggcgtgctgtcgtcgaggaggtgccgcgcgggcgctggcgccgtcgtgtcggccacgaggagccccggtttgggcaatgcagggaacctgcgcgagggttcgaacttggctaagaactgggatttgagcagacaaattggtgatgagcacggtgttcttatagaatgcagggatgtgcacaagtcctttggggacaagcatgtactgcaaggcgtcagcttcaagattagacatggtgaagctgttggaataatcggtccttcgggaactggcaaatcaactattttgaaggttatggcgggccttctagcccctgataagggcgaggtgttcatctgcggaaagaaaagacagggcttagttagtgatgaggatatatcaggtctccggattggcttggtatttcaaagtgcggcattgtttgattctctcaatgttcgtgaaaacgttggatttcttttatatgaaaactccaagttgtctgaggagcgaataggtgaactagtgacggaaacattggctgcagtaggcttaaaaggtgtcgaggagcgaatgccatctgaattatccggaggcatgaaaaagcgtgtagcccttgctcgttcaataataaatgacgacacaaaagaaacaatagagccagaggctcttttatacgatgaacctacagctgggcttgaccctatagcatccactgtcgttgaagaccttatacgttccatgcacgtgacaggaaaagatgctatgggtaagccgggaaagatagcatcgtatgcggttgtcactcatcagcatagcacaataagaagagctgttgataggttgttgtttctccatgagggaaagatagtttgggaagggatgacggaggaattcacgacatcaacaaatcccattgtacagcagtttgcctctggcagcctggacggtccgattcgatacttctgaggatttatcgaactgctctgtcgaatattcgacgcattcctacgccagcgtccataatgcctcgtcttagagaggcatctacaatacttcagccaagaaatatgagcagtgactttgggcccatctggtgatagatggtgttattcagcaactaatagatgcgttcgacacgcaatgatgtaactctatttattggactttaggtgaataaacagcaaaaccagcttatcgatttagatgctttgttggcgagtttggggtcgatgtaaatgtcattctcacccgaagcagctccttgaatccttcatttctttgtagtctttcatggacaatgatttgtgatgtgatattgatttgtaatgtgcccaaatattgtcaaaaccattgagcaatgtcaaaaaaaaaaaaaaaaaaaaaa

SEQ ID NO: 4276 - DNA, 839 bp, Triticum aestivum
  Clone ID: TRIAE-23APR03-CLUSTER1924_2
aagacttctctcgcccgactccctttgcttcccctctccaccttcccccgctcccctccatcgatctgcgcacgccagccgccgccgccggatcccctccagcagcgcccgtcccccttctcccccgaatccgccggagcccagcggacgcccgccatgagcacctccgagtacgactacctcttcaagctgctcctcatcggcgactcctccgtcggcaagtcctgcctcctcctccgcttcgccgacgacgcgtacgtcgacacctacatcagcaccatcggcgttgatttcaaaatccggaccgtcgagctcgatggcaagtcggtgaagctgcagatttgggacacagcaggccaggaaaggttcaggacaataacaagcagttactaccggggagcgcatggaatcattatcgtatatgatgtgacagatagggaaagcttcaacaatgtcaagcagtggttgagtgagattgataggtatgccagtgacagtgtgtgcaagcttctagtcgggaacaaatgtgatttggtcgatagtaaggtcgttgatacagaggaggccaaggcttttgcagaatcgttgggaatgaattttcttgagacaagtgcaaaggaatccatcaatgtggagacagctttcttaaccatgtcatcagaaatcaagaacaagatggcgagccaacctgcggcggagaggaaatcgacggtccatgttcacatgaaagggcagcccatacagcagcagagcagcagctgctgctcctcgtaagctccgcaaggcaccattcaccatacaccttaaggctgttgaaggcagtgaattggatatactga

SEQ ID NO: 4277 - DNA, 655 bp, Triticum aestivum
  Clone ID: TRIAE-23APR03-CLUSTER192743_1
gggatacccgtcaaaaaaaaggagctcccgggaaaacccacccggctggactcgattcgctacactcggtcatggaatccggcggcggcgcccgcgtacggcggcagctccaagccgtgggacgtgtcgcggcgtacctcggcggcggcttgctcctcctctccacagcatccaccgccgccgttcgctccctccgcttcctctccgataccaaccagagaaaattcgcgatgcagtgtggtgcctgcgaggggaagggaacctacgggtgcaggctctgcaggggtagcgccacggtcgaatggtctcggctctacgacccggtgttcgttaacccgtgtctctgccctacttgtgatggtaccagggtacagcgctgcttgaattgcctgggcaaaggctatgcatgaaggaacaatttgtatcaaacgccactttttatgagtggactgtttgcatcatcagtttcttttgttacctgtttgaagcttaggtgtgtattcttagaagcgggtgttaaaaagtgttggcaggggaggcattgtattttgctcatgcaatgtaattgattgatgaccaaactgtcctgtttgtgttgagaaaccaaagaataatttatgtttcagtacaaaatgaactaaaaaaacccccccac

SEQ ID NO: 4278 - DNA, 1975 bp, Triticum aestivum
  Clone ID: TRIAE-23APR03-CLUSTER192781_1
gccaccccgcgcccgacactaaaagaaaaggaccgagataaagaaagcgaaagagagatctagaagaagaagaagaagaagaagatggcattgcaatggctgattctgtcgtacgtggttgccgcggaggtcgcgatcgccgtcatcttgactctcccttaccctatgcttctgaaaaaacgcatcgtgtcactcgtctcgctcgtactccagcctgccgcctccatcgtcgccttcgccgggtttcaactcctcgatatttactggaagaatgagcatagactagagtgctcatcggaggtttgcactgctacagaacgagatcgctatgagaaatccatctacaaggctcagaggaatgtggttctgtgtgcggctgggatccttctctactggtgtatttatcgcatctgcaagtacaacaaagaccttgaccatttggaggagctagagaagagatacaaggcagagtagtagtctcctcagagtctggttctgatgttataatatcacctcggcttgttgttagtagacgatgattaatctcgataaatctttgcacagaccttatttgtgtttgaacttgcaactttgatttacttttcgagaaacatgttctattctaaaaaaaaaaaaaaaagtgactgagaagtcatatccccttgtaatgccttcatacccaaaactgtggaacggcgctttctcttattctgagagatacacaatgcctgatgccatcgacatcgtacgatatgctgaaaaaagaggtgtaaatgtcttggccgagattgatgttcctggccatgctcgctcatggggtgttggctacccagaattgtggccatcagatagctgcagagaaccgcttgatgtcagtaacaactttaccttcaaagttattgatggtattctttcagattttagcaaggttttcaaattcaaatttgcccacttaggaggtgatgaagtcaatacaagctgctggactgaaacaccccacattaaggaatggttgaataataaccacatgaatgtgtcggatgcatacagatattttgtgttaagagcccaaaagatagcaatatcacatggatacgaagtcattaactgggaagaaacgtttaacaacttcggagataagttggaccgtaaaactgtggtgcataactggcttgggggggatgtagcaccaaaagtggttgctgcagggctgagatgcatagtaagcaaccaggataagtggtacctagatcacttggatgccacatgggaaggattttacctgaatgaacccctgaaaggaatcaacaacacagaacagcaacggttggttattggtggtgaggtttgcatgtggggagagcaaatcgatgcatcggatattgaacaaactatttggccacgtgctgcagcagctgcagagagactgtggagtccacttgagcagattgctgaagacaccaggtcagccacatcaagactgtcacgcttcaggtgtttgctgaatcagagaggggtagctgctgcaccactagctggcgatggccgtacagcaccatatgaacctggtccctgtgtaaggcaataggatattcatagcaaaatttgaagtagcattcaaagaggatacacatcatttcacaagtgttagttcagcattatgaatctgaagtagttacatggttgtgtagactatagaaggtttcagggagtccttaccctctttatgtatttctgcccctctccaattttcaactataatagtttgaatggtagggccatcaggagattaaacaaatctgacagaaaatggacataaaggttgcctgaacaaatccagtagggtcccaaatcaatggtactgtattacaaacaatcgaaataaataatatgtttattgaaaaaaaaaaaaaaggattaattggttaatggttatattaattatattttataatggggggggcgttttataggg

SEQ ID NO: 4279 - DNA, 1621 bp, Triticum aestivum
  Clone ID: TRIAE-23APR03-CLUSTER192_27
ggccagggaaatgcattttcacattttctttttccaccttccaaagatcgtgatgcacaagcaaggtttcttataataagaaacatcgaaacagagaagagttcccatgcctaacagaactacaaacgaagcacaaaaaactagcttaggagcttattagttctgcagaggaatccaatccggtccaccatttgatcttcattggagcgcagcagcggacaccgaagggcaagccgaccaaacaccatagacatggtttggccgccagagaggggatcacaacccttcgaagaactcgctcatctcagcatcatggaaggcagggttgtacatggcccgatcctctgatatccacattgggtaaggataatcagactgcagcatgccctccagcatgccttggtccaagccatccaggtagagaggttcctgctggccaatctccacgccattccaggagcccccggtgaccggctcaacttcaattgggtcggcttccatcaatcttaataattcttctatatcaaaaccgtcagattccccatccggcaaactggaaataggctccaacggctcaaacacatcctcttcggatatgctccttgcaatgcttgagccagcgtcaggaacactgtcttgatggctgtaatgctcaacagattcggtggactcaagcacatctggctgggagtaaatctcaagagcttgagcttgtcgcggcaaggaagaagcaacatctgagtggttggtggatgttgtagtagactcacatgatgctgaagcaccacgtacaacaccttcaattgccgctgctacagccacagcaggagcttgtgcaggatgcacagggaagttggcacgagccagtgcgccatacattgctctggctgcctcgtcataagcacgggcagcatcctcagcagtggggaacgttcccaaccagagcctgctcacccgatttggctcccgaatttcagcaacccacttcccccaagtacgttgccttacaccacggaatccacattgtgtattctcaggtcctcctttcccctgcatacagcccttctttgaaccctttgcaggtggcttcctcgacctctttgaaccctgtggatcatgctccagttgttggttcacttctttccatcgcctgatcgtttcagagactgaattaggcccatcacgtgatctccgaggtcgctttttcctgtagaacaaagagtagagcagcagttagtaccttatattctcttcacccaatataagcacaaggtacaatcaagaaagaatgcaaaacaattgaagcacctaaatagaccatctccacagaaacattttgttcaacaactaaactgttactaaatgtacacaaacagaccatccccacaggaacagatgtacagcaacagggacatataaacttccttgcggacataccatctccacagaaaacgataccatgttaaatcgtactaatcggctcctaaccctaaatgagttaacaagatatgacaaaaataaaataaacgtcagaccctgacacttaagactgataaatcagaaaggacatggaaaaaattagccactacaaaactgtttagtaacacctagagtcagttta

SEQ ID NO: 4280 - DNA, 1315 bp, Triticum aestivum
  unsure (1)..(1315): unsure at all n locations
  Clone ID: TRIAE-23APR03-CLUSTER193005_1
aaaaaaccaatgatttcagggaagtagcacgagcatcctcggccgaagcagcaatggaggaaaaggcgacccagaaagcggcggcggaggggaacccttcgccggagttgtgcctgaggatccccggggactacgccgtcggctccgtccccaccgtcctatacgtccccgacttcatctcccagaccgagcagtcccagctcctccaccatatataccaggcaccggcgcccaagtggaagattttgaaaaaccggcggctccagaactggggaggagtggtgcacgagaaggggctactgcctcaggcattacctccatggcttacaaagataactgacagaatctgccagtggactggtttatttccttcagcaatcaatcatgttctgattaatgagtatcatcctaatcaagggatcatgccacaccaagatggtcctgcctattttcctgttgtcgctatcatatcccttgcttcaccagttgtgcttgatttcacaccccatggaaagctaagagagctcgaacatacatatctccaaaatacacaatctgatgagttgcaggagagtaatggttcctataaggttgaaggcacgaaggaagctggtcctgcttcttcgtcacttctactaatgccctgcagcctcttaatattcaaagatcaggcttatacagacttcctacatggtatacaagacaatgagctgcataatctagacaaggttgcaaatatctcacagtgcccacaattcaagcatctaagccatgattacagcccaggcaaagcagatagcagtgctagctctgagccaagtggcaccttccgcaggaccacgacaagagtctcgttgacgtgccggctagtgttgaatgtgcacagtaagctgttcaaattctagtatccgtatggcctgcttacatcagcatggccggggtgagaatgaactgtagtagatacagagaagtatgctagcaaatcagaggatgagaggaacacaccatattgcccttatctggccggtatgatcgtttaccattcaaaatgtgaaattcacgatgtatcccctcggcggacagggttcacttgtgctgcagtttatccatgattgcatatgttcgttcttgatgtggtgaatcagagtgtttatccttgattgatcatatgaatgtagaaaatatgcatgaattttcttgaatgtaacggtagaatggacttttggtcctactagtaatttctgaatanactgcatgggatgtagctgcnctgatggttaagattatttgaatttggccnaaaaaaaaaaaaaaa

SEQ ID NO: 4281 - DNA, 1805 bp, Triticum aestivum
  Clone ID: TRIAE-23APR03-CLUSTER193334_1
aatcggccaatgcaacatttccactcaccagcatgcatcactcacagcactcactgcaatcacagagcttccacaagctacctccggtgccctcgaccgaacgcggcttaggaagccaatggcggctcctgcctccgaccacggcggcacccttcccgtccccctgcccccgtcaccgcgccagggccacatcacccccttctcgccgttcggccagcgcctcgcctcccacgccggcgcccgctgcacgctcgccgtcacggcctacaccctccgccggggccgggacccgtgcccgggcgcccgccagctcgcccaacatctccgacgccttggccgccggcggcttcggccgcgtcccccggcgacgtcgcggcgtcgctcccccggctgtactccggcggctccgtccggggggtacgagctgctgcggtcgggcggcggcgggaagggcgggcccgtgcgcgccgtcgtgtatgacgcgttcctgcagccgtggggcgccaagcgtggcccggcggcatggcgctgcgtgcgcgtccctggcgccgcgtgcgcgtccctcttcacgcaggcgcccgcggtgaacgtggcgtacgcgcacgccggtgctgggcggctgaccgttccggtcctcgcgggcacggtgccgccggagcttcccgggctgcctgccgggctcggaccggacgacgtgccgtcgttcttggccaagctcgacgagtgccccgcgtacctagacctgctggtgagccagttcttaggcctcgacgccgccgaccacgtgctcgtcaactccttccacgagctgcagccactggaatcggcatacatggcgtcgatgtggggagccaagacggtaggcccgacggtgccgtcggcgtacctggacaaccgcctgccggacgacgcctcctacggcttccacctgcacacgccgacgacggccgcgaccaaggcgtggctggacgcccggccggcgcgctccgtggcgtacgtctccttcggcagcatcgcggcgctggggccggagcagatggcggaggtggcagagggccttttcaacagcggcgcgcccttcctgtgggttgtcagggccttggagacgtccaagatcccggacggcttcgccgacaaggtgggcgagaacgggctgatcgtgccgtggacggcgcagctggaggtgctggcgcacggcgccgtggggtgcttcgtgacgcactgcgggtggaactcgacgacggaggcgctgagcgccggggtgccgatggtggcggtgccgcactggtcggaccagccgaccaacgccaagtacaccgaggacctgtggcgcgtcggcgtgcgtgcgcggccggacgcgggtggggtggtgaggcgggaggaggtggagcggtgcgtgagggaggtgatggggagcgagcagtaccggacgagggcggcggagtggagtgggaagacgaaggcggccatgagcgaaggcgggagctccgaccgcaacatcttggagtttctccgtggactccggtcgaggaaatccgagcggtcgggagcggcggaagatctgtagtctcgtgctgtttcttgtggaaaatcagctgtccgtcgtttgatgtctcgtgtcatttttctctcacaagtacgcgtgagtattagcgagagcttcctgttgaatttctctcaataaaacccagtcaccttctttttttgagggtataaaaaaaaaaaagaaaaaaaaaaaaaaaaaagcttatcgataccgtctgtttaaacacaataaagttggaacgggaggggggaaaggagtt

SEQ ID NO: 4282 - DNA, 1793 bp, Triticum aestivum
  Clone ID: TRIAE-23APR03-CLUSTER193_38
ctcccatckccgcstccccccaccactccccctccacctctgstagatccaatccaccaaccttctccatggcgctctccgtggagaagacckcstcsggccgggagtacaaggtcaaggacctctyccaggccgacttcggccgcctcgagctcgagctcgccgaggtsgagatgccsggcctcatggcctgccgcrccgagttcggsccctcgcagcccttcaagggcgcccggatctccggctccctccacatgaccatccagaccgccgtsctcatcgagaccctcaccgccctcggcgccgaggtccgctggtgctcctgcaacatcttctccagcccaggaccacgccgccgcsgcsatcgcscgcgactcsgcsgccgtcttcgcctggaagggcgagmcsctcgaggagtactggtggtgcaccgagcgctgcctcgactggggcgtcggcggcggccccgacctcatcgtcgacgacggcggtgacgccacgctgctcatccacgagggcgtcaaggccgaggaggagttcgagaartccggcaaggtycccgacccggagtccaccgacaaccccgagttcaagatcgtsctcaccatcatccgcgacgggctcaagaccgacgcccagcaagtaccgcaagatgaaggagaggctcgtcggygtctccgaggagaccaccaccggcgtcaagaggctctaccagatgcaggagtccggcaccctcctcttccccgccatcaacgtcaacgactccgtcaccaagagcaagtttgacaacctttacggttgccgtcactcgctccctgatggtcttatgagggccactgatgttatgatcgccggcaaggtcgccgtggtctgcggttayggtgatgttggcaagggctgtgccgccgcactcaagcaggctggtgcccgtgtgatcgtgacagagattgaccccatctgtgcccttcaggccctgatggagggtatccagatcctcaccttggaggatgttgtctctgaggctgacatctttgtgaccaccaccggaaacaaggacatcatcatggtcgaccacatgaggaagatgaagaacaacgccattgtctgcaacattggtcactttgacaatgagatcgacatgaacggccttgagacctaccctggtgtcaagcgcatcaccaymaagccccagactgaccgttgggtcttccccgagaccaagactggcatcattgttcttgctgagggtcgtctgatgaaccttggatgtgccactggccaccccagcytygtcatgycctgctcattcaccaaccaggtyattgctcagcttgagytgtggaacgagaaggccastggcaagyaygagragaaggtgtacgttctccccaagcacctsgacgagaaggtcgcggccctccacttgggcaagctcggcgccaggctgaccaagctcaccaagtcccagtctgactacattagcatcccaattgagggtccttacaagcctgcggctttaccggtactagtgtgtccagcatgactagcggctggcctgagcctgagtcggagcagcggcaccaacgggaactctatcaactatcctgtttcccttctattatcttacatgctgtctcttaggcggaggatttgttattatggttatgttttgagccttgtgagggttgggagaggcggcgtttgcttttgcccagaaataatggcattattattggtttaagtgaggaggtgtgcttttccagatacaaaaaaaaaaaaaaaaaaggccccta

SEQ ID NO: 4283 - DNA, 1982 bp, Triticum aestivum
  Clone ID: TRIAE-23APR03-CLUSTER19414_1
cacaattttcagtcggaaacccgcatctccccgctgccgaccacgcgtacctccacctccagctacagccccagccgacgatcgcagtcgaaaccctagctccgggagcagaggatgaggcccacagcgacggggccgggcggcggcgtggtgaggaggcggaaggcgggggccgccgccgccgcggcggcggcgagccgggagtggctggtggtgccggcgtcggggcgggcgcgggtggaggaggccgggaagcacgcggtgatggcgcgtacggggctgccggcgcgggacctgagggtgctcgacccgctgctgtcctacccgtccacgatcctcggccgcgagcgcgccatcgtcgtcaacctcgagcgcgtcaaggccgtcatcaccgccgccgaggtgctgctccccaactccaaggaccccgacttcgcgcgcttcgtccgcgacctccaggcccgcgtgctcgcttactccgcggaccaggctgcagagtttactgatatggatggtgaatcatctgcaattgcttcaccatttcctgctcctagttcatctaaaggacatgaactggagatggctaaaaggactcctaatgcggtgggtgaaatgactcacagcagcagtgtgcccacattgactgctatgaaagatggaagcaccaaggttttaccctttgagttccgtgcgcttgaagtgtgtctcgagtcggcttgtagatctctagaagaggagactgtgactctggagaaagaggcatatccagcattggatgagctaacttcaaagatcagtaccctgaatcttgagcgagttaggcaaattaagagccggctggtggcaatctctggacgcgtgcagaaggtgagggatgagcttgagcatctattggacgatgaaatggatatggctgaaatgtacttgacagaaaaacttgctcgagaagatatcagtgagacttcatctagagttgaggttgatgatcatgatcatgatcatgacccatctcagttggaggaggatatggatgaggattatcgaagcgagccagctggaactgcaagcaatggcagctctattggttataagcccaacattgaagaactggagatgcttttagaggcctactttgtgcaaattgacggtacactaaataagctttcgcatctgagggagtatgttgatgacaccgaggattacatcaacataatgttggacgacaagcagaatcagcttctacagatgggggtcatgctctcgaccgcgacggttgtcattactgccggagtggctgtcgttggtcttttcgggatgaacattggcatctctctttacacccccgtaggcgaggagcagacgcgagcagcacatgtgaagttttgggaaaccacttttggcaccattgctgggtgcacgatcctgtacgtaatagccatgggttgggggaagagaagtgggctattgcaatgagggcgcacccaatcctgtcaacaactgctcccgcagaagccttcgctggacaacccctgaaagagggcggtgtgcgcttggaatatattggtacctcaaaatgcatgcctgtaaccttatcccttgaaagccttagaagggagggaagaaagttttcttgatgcaagacaatgggtagttcgaagcgaagaagatcgtttcataaagtgttggcacaatgctgtcaagccaactcagagtttgctattgcacctgcggggtgagcagttgcttaaaccctctctcgtaaaagtttgtcttgccattgtatatgtaaacctcctgctacaagtgaattaaatcactgtagaaatgctggtactgtggcctgtcttggccaggggagagttattatcatgtgtgatattgttgacagtgtgagcgtatattttgttggtttctactctgatcgctggtttggccatcgttgtatcgtccttgtaatccttgtaataatcaaaaaaaaaaaa

SEQ ID NO: 4284 - DNA, 820 bp, Triticum aestivum
  unsure (1)..(820): unsure at all n locations
  Clone ID: TRIAE-23APR03-CLUSTER19428_3
atccattccaagggtttttagcccctcgccctccccgtgccgcgccgcagcaatggccgccgccgccgcgagatccttcctccgatccggatccgccacctcctccctccgcggcgcggccgccagggccgcctcccgctccgggccggcaaccccctcgaggcggctcctctcctctcctccccgcgcccgcctcgccctaaggtacgacgcgagctcttcttttcgggattcttctcctgtattttcgatctagatgaaatttttggtgcttgcgtttatggtacatggaggtcgccgctggagatgagcagcgcctgcttggagtcgctgatgcccatgcacagcgcgacggcttcggcgctcatgacgtcgctcctcgccgccccggctcgcgttggttcctgctggatctccgaagatcattgagatcagtgaggatggaggtcacggatgaagatgcatgctatttttttaccactcgtatttcttttgctttatcaaatgcacatggctgagcaaatcctgtaacttggatccgtgtgatgttttgcctgataatgcaaattaacatccttagcttattacctgggaatcgtacgatgattgttagccgcaataataccatgtatgctttttttttttctagccaaaaatatttgtttgacacattttatatctctatagacttatgatgggtgaggacggaggtctgggatgaagagacgccctgtttattttcgccagtaacttttatgatgtgagttgaagagctggagcttagagtattcgtttctatttggggaaaanaaaagaaaaa

SEQ ID NO: 4285 - DNA, 1317 bp, Triticum aestivum
  Clone ID: TRIAE-23APR03-CLUSTER19434_1
agagcgccagggtttacctagggtttcgtctcgccgcgccgccgcctacgacgccgtgaggggaccgtggggagtgagggaggaagcgccggcggcggcgaggggagggagggatggagcgggcgggaggtcggaaggcgaaccagctgcgggcgtactcgtgcacgcggaacccgctggagcgggcgcacgggtcggcgcggtgggcgcagggggacacggtggtgctggcggcggtgtacgggccccggccggggacgcgcaagggggagaaccccgagaaggcctccgtcgaggtcgtctggaagcccaagaccgggcagatcgggaggcaggagaaggagtacgagatgacgctcaagcggacgctgcagagcatctgcctgctcactgttcatcccaacaccaccacctctgtcattcttcaggttatgggtgacgatggttctcttcttccatgtgcaattaatgcttcctgtgctgcccttgtttttgctggcgtccccatgaaacatcttgctgttgcaattggctgcggagtgttggccgatggtgctgtgattttggacacaagcaaggcagaagagcagcaattgaaatcgtttgctcacctggtgttccccaattcaagcaagtctgttgatgtgaaagaatcacaacagaaagatgggcagccagaacggggcctgataacttccatcacccatggagtgatgtccgaggacgattacttcaactgtatagagaggggtcttgccgcatccgcgcggatctcggatttcatgaggaccaccttgcagaagcacacacctgactacctttgagaaaagcgtcgaaacttggcgtgatttattggacaaaagagtcacgcaaacatagcgccttggtgacttgggggctgataatttctatccccggagagcatgcacgaggaacaattttgcaggaaaatgcagcacgagctcctgcttcaactgctgggacactagaatacttgagggccgtccttgccctggcgcacccctgtcttccgctgtcagccacgcggcgctgcttggcgcgacagggcgtgttgcgctctgtgcgccctggtggcgctggggcggccttcggctcccctggaatgcagccgcgcaccgggaccgctggtgctggtcaaggccggcaccggcttcattttggaatgttgaaccactagaatactatatagcagtcgttgtcctgtagaaccttaattatctgttgtcatccatgctgtgctgattgaatagaaagggttgtttcggctaagaaaaaaaaaaaaaaaaaagcttatcg

SEQ ID NO: 4286 - DNA, 1169 bp, Triticum aestivum
  Clone ID: TRIAE-23APR03-CLUSTER19475_1
aaaacgaaccaccctgcctacccgcacacgccgcaccagtgccagaggccgccaagcaaagcgcccgcacccggcacgcggcggcgatggcggacgacgtcgccccgtgcaccgcatccggctacctcgacccctcctactgggacgggcggttcgggaaggaggagcactacgagtggttcaaggacttctcccacttccgccacctcctcgccccgctcctctccccctccctctccgttctggaggtcggctgcggaaattcgcggctcggggaggagctcttaagggagggcgtcaccggcggcgtcacctgcatcgacctctcgccggtcgccgtccagaggatgcgcgacagactggcggagcagggcaccagtggtgtggatgtggtggtggctgacatgcttgaccttccgttcgagagcgagagcttcgaccttgtgatcgagaaagggaccatgtggtgatccatggaaccccaatcctacaacagtggataatgtaaccaaaatgcttgaaggtatccacaaggttttgaagccaggtggcaaatttgtatcaattacctttggacagccacacttccgtcgtcgatttttcgaagcacctgagtttacatggtctgtcgagtggaacacctttggcgatggcttccattatttcttctacatccttcagaagggcaaaaggtcaccagagtccaacagtcaccaagttacattacctgctgttccaagcttcaatatgctccatgaagagctcgaaagcgaggattacatattctgcacaaatgttgatgagttataagcagtagctcaataagcgagtgcgccggttcggaggtcttgatgctacgcaatacgcatgaaggggctgaccgctaagcaacccagcgagtgatgcgtttacatgccttgttgtgtggtgatgtatcattgcggcccagcaggctagggatctttctaccatcagaactgacaatatacacctgttcccaatgttaaccttcttgcgttatttcggattataaaaaaaaaaaaacagtcatttttcttttgggtgccggctgccgttgagataattgttttcccttcttattcttctcatttccaggacatctacttgtatagccagtgccagttccagctgcagcagagtacgtgaaa

SEQ ID NO: 4287 - DNA, 1474 bp, Triticum aestivum
  Clone ID: TRIAE-23APR03-CLUSTER194871_1
gcacggcgccccgatagcggcctctgcttctctactcttctcgtaacttccacactcgtgtccctttctttcctccccgtcgcttccgcagatcaaaattcaaaaccctagcgaactcctccgcaagcacgtgatcgaccggccatggcttccgccctcggagcccaggtggctgccgtggcgccgattggttcggatggtcgccactacaggagttgttcttcgctcaagggtaataactcccgcaataagtcatggactggaaaattagcatgggaaaacaagaccctgcaaccaagacatacgaagaaggtcttttgtatgtccgtgcaacaagcaagcaaaagtaaatgtaaagttgctattaaacctctggaactggagaatacaaaggagccacccctcaacttgtacaaaccaaagggaccctacacagcctcaattgtctccgttgagagaattgtaggtcctaaagctcctggtgaaacatgtcacattgtcattgaccatggtggtaatgtcccatactgggaaggacaaagttatggtgtcattcctccaggagagaacccaaagaaacctggggccccaaataccgtccgactctattctattgcgtctactaggtatggcgattcttttgatggaaggactgctagtctttgtgtgcgccgtgctgtttattatgatcctgaaactggaaaagaagatccttcaaagaagggtatctgcagtaacttcttgtgtgactcaaaaccaggtgacaaaattcagatcacaggcccctcaggcaaaataatgcttctgcctgaggatgacccaaacgcaactcatatcatgattggaactggcacgggtgttgctcctttccgtggctacctacgtcgtatgttcatggaagatgtcccatctttcaagtttggtggtctggcttggctctttcttggtgttgccaatactgacagcctgctctatgacgaagagttcacaaactaccttcagcagtatccagaaaatttcaggtatgacaaagcactaagccgggagcagaaaaacaagagcggtggcaagatgtatgtgcaggacaggatcgaggagtacagtgatgaaatcttcaagcttttggatgatggtgcacacatctacttctgtggtttgaaggggatgatgctagggattcaggacacactcaagagagtagctgagcaaagaggtgagagttgggatcagaagctgtcacagctgaaaaagaacaagcaatggcacgtcgaggtttactaggttacaatggctgagattgttaattattgtttcccggggagatggaaaacagaaagataagtaggtcattctcttcccattgtaaaattgtcaatattattcatacgcgtgtgcgtcgcatgattaataaaacaatgtgcaattacaacaaaaaaaaaaaaagagcaggagatcccgagccagtgcaagatgt

SEQ ID NO: 4288 - DNA, 806 bp, Triticum aestivum
  Clone ID: TRIAE-23APR03-CLUSTER194_126
acgcagcagtttccctttcagacattttcttcgattagccaccatgactgccttggccaagcccgccgcctcagcgccgaagccctccgccgccaagccgaaggcggccgccgctggtgcctcccacccgacctacttcgagatgatcaaggaggcgatcgcggcgctcaaggacaggacggggtcgagctcggtcgccatcgccaagtacatcgaggagaagcacggcaaggccctcccggccaacttcaagaagatgctctccgtccagctccgcgcgtccgcctccaagggcaagctcgtcaaggtcaaggcctcctacaagctctcagacgccgccaagaaggacgcgcccaagcccaaggccaagcccgccgcccccaaggccgcggcgaagcccgccaaggacgccgccaagcccaagaagaaagcggccgtgaagcccaagaaggccgccgccgccgctggcacgaagcgcaaggcgcccgagaagaagacgctggtcgccaaggccaagaagtcgcctgcggccaaggccaaggcaaagccgaagaccgtccgctccccggccgccaagaagggccgcaaggtcgccgccgcttgatctgatctgatctgataggtggttttaggtgtgcgttggtgttctcggtctgtacaaaaggatgcctcatcctccctgatttaggtttcggttctgctaggcaggttctatgtatcgctggtggtgtttagtgtctggaatgttcaggtatcagatgtatccagctctaactctgaaatgaatttgcagtttcccagtttct

SEQ ID NO: 4289 - DNA, 777 bp, Triticum aestivum
  Clone ID: TRIAE-23APR03-CLUSTER194_157
tatgcttgtctcaaagattaagcctgcatgtgcaagtatgaaccaatttgaactgtgaaactgcgaatggctcattaaatcagttatagtttgtttgatggtacgtgctactcggataaccgtagtaattctagagctaatacgtgcaacaaaccccgacttctgggaggggcgcatttattagataaaaggctgacgcgggctctgctcgctgatccgatgattcatgataactcgacggatcgcacggccttcgtgccggcgacgcatcattcaaatttctgccctatcaactttcgatggtaggataggggcctaccatggtggtgacgggtgacggagaattagggttcgattccggagagggagcctgagaaacggctacctccccgacgacgtccgggcactacagacaccattcaaaagctatttgagcgacatgctggctctggtgaaaaaggaggcagcagagcgtaaagcactgggagcccttcctctctatgagagaacccttccttgaagacatcttccttgatatgcgccccagcttttgctccttgtagcatcacaatgcatgaaataaaatgcagattatgacactgttcctccttcgggtttcatgtccattgcctgtagcagttttcttgtgccccttcccaaattaattgcgacagaatttctgttgctgttgctgatataaaagtttattttggttgatggaattgttgctatagaagtctgaacaactctgctctggtcttttttccattgagcaac

SEQ ID NO: 4290 - DNA, 758 bp, Triticum aestivum
  Clone ID: TRIAE-23APR03-CLUSTER194_163
acgcgttttgatctcgtcgtcacatcctttcctttttacctgccccagccgaacgccgttgaaccgggcgaccaatccctccctgccgccggcgagcaatctccgccaccgccgccgccgcagcagcagcagaagcagctcggccgtccgggatgggcgacgagcgcgtgaaggcggaggcgctgcagatcctgggcctgttccaggtgctcccgcgcctcgtcgtcttcgacctcgactacaccctgtggcccttctactgcgagtgccgctccaagagggagtcgcccagcctgtaccgccacgccaagggcatcatctgcgcgctcaaggagaagggggtcgacatggccattgcgtcgcgctcgcccacctccgacatcgccagggtcttcatcgacaagctcgagctccagcccatgttcgtcgcacaggaaatattctccagctggactcacaagacagagcatttccaaaagatccacagaaaaactggggttccatacaagtccatgccgttctttgacgatgaggacaggaatattcaatcggtatcgaaaatgggagttacgagtgttctagtaaacaacggattgaatctcgacatgtttaagttgggcctcagtaatttcgctactactgttgctgcatctgaacccgcacctgcaccagaggacaattaaccttatattgtacaagtaaaaacagcagacagggaaaacgcccatgatttacgggatacgtgtggaaaaataaac

SEQ ID NO: 4291 - DNA, 1041 bp, Triticum aestivum
  Clone ID: TRIAE-23APR03-CLUSTER194_193
aaatcacacgccaaaggccaaaagcggggaagaggacgaaagaaagcgtcgccgccgcggagcaaatcgagcaagcaagcagccggcgacgcggccggatcggagcggtcccatcgatcgaccccccttgctcggcccccccgaggaaccgatagggtccatctccctgccggcgatggcgtcgtccgcggatccgtgggtgcgggagtacggcgaggcggcgcgcctggcggacgacgtcgccgccatggtcgccgaccgggcggcgctcccgcagtcggggccggaggtcatgcgccacacctccgccatccgccgcaagatcaccatcctcgggaccaggctggacagcctcgaggggatgctcgccaggcttccccccaaatccatcacggacaaggagctgaataagcgccgagacacgctatcaaatttgaagtctagagcaaaacagatggcagaaagtttcaacatgtcgacctttgccaacagggaggatttgcttggtcagagcaagaaagctgctgatgacatgagcagagtagccgggttggataaccaagggattgttggccttcagaggcaaatcatgaaagaacaagatgagggtcttgagaagctggaacagacggtgctgagcacaaaacacattgcgctagcagtcaatgaggagcttgacctgcatgcaagactgattgatgacctagacgaccatgtggatggtacgaactcgcgtctccagcgtgtgcaaaagaggcttgcggttctgaacaagcgcgccaagggcggctgctcctgcatgtccctgctgctgtccaccgtcggtatagtgatgcttgtggttattgtttggctcctcatcaagtatctgtaacctctgcccaactcaaatcagtttcaagtgtgcagctctttcaaagatagtatggttacttccgcttcgccatcattttggcgagaaatggaaaatatgtatgccacatgtgcccttatcgggctgaaatgtgaagttcaaacttttgtaaaaaaaaaaaaaaaaaa

SEQ ID NO: 4292 - DNA, 1785 bp, Triticum aestivum
  Clone ID: TRIAE-23APR03-CLUSTER194_195
gcgcgcttgcttgctccccttctccgtgtgagcgaggccgagacggagcaccagcggaggagggctgtgctgaagaaggctgcgccagcgagagcttggtgactggttggccttttcctacctactggacctgcagtactttgaacatgctttttgcatatcactgcattaaggatgaataaaatgttaagcaccgactgtttagggacgcaggagtttcatacattccacaagaccactaaaatactggaagactcgcaacctcaagagattgcattccacgaaacagcgctggggtcaacgctagtagatcatcaaaatgtccactctactgccgcagtatcagcgggagacattggaatggctgaagtcagcttgttgcatggtgaatctgacacatcagctaccggtttactgccagtgtcattcttgtcatgcagtcctagatctatggttccaatatcagttcctttcatcatctagccttgaagccatcctaacacctaatccaatgtacagtgatgttcagttgaaagaagtgatgaactacaatgctacagcaatggatgaaagcactgagttccttcagctgattcttagtggcaatgatgaaggctacaatactacaagcgaactgcaagtttgggatgttctggacttctacttctcagaaagtttttctgatgtacaatttgatagcataatgggttttacaagtgacgtcagtacttcctctcatgattatatgatgaatattgttgacttggtagagcggcctgtggcactcctgtctctcaatgagacagaggaaccaaataatgcaaccaataaggctccagtcgatcacagtacaatggaccctgatgacacatccttgtaccttcaaatgaaaccaccagattcagaaaccgaaagtacttctgcctctcaggatgtgataggaattgagtatgttgatgaaaagcttcattctaaaggtctgcctgatttaatggatgttgactcatccagtcgtctgcgaaaatcaccagtgagaacaaagcatgtcactcttgtgcttgatttggatgaaactcttgtccattcaacattggatcactgtgacatatctgatttcagcattcaagttttcttcaatatgaaagaccatacagtccatgtgagacaaaggccccacctgaaagatgttccttgagaaggtagctcagatgtttgagcttgtcattttcacagctagtcagagaatctatgctgagcagataatagataggcttgaccctgatgggaaattgatctcgcaacgaatttatcgtgagtcgtgtatattctctgatggcagctatacaaaagacctgacaattctaggagtccacttggcaaaagttgctataattgacaatacgccacaggttttccagttgcaagtcgataatggcatcccgataaagagctggtttgacgaccccgcggaccaggaactggtcgagttactcccattcctcgagacccttgttgatgcagaggacgtaaggccactaatctcaaggacttttcacggcaccatccagcaggattagatttagatgcatcattgtcgtgcactgagcctgagcctgcgaacttatcttgggaaattaggtataggatcagcattcaccatttatgttatgttggctgttacagatagcaagcataaactgcatgtcgccatggcttgtatacgtagtattgctcgggttttctgtgtggcaggtctgtgtaaataaattatagtattgaataaaa

SEQ ID NO: 4293 - DNA, 856 bp, Triticum aestivum
  Clone ID: TRIAE-23APR03-CLUSTER194_214
ctactaacaagaaggagatgccctggcaacagcaggaagtagaagtgtataccctgcttcgtcagcaggctgcgagcggcggccgtcagcaggagcagcgacagcgccagctccttcttgtattccccttcccctctcctctcctcttcggcggcggcggcttcagaaagagtcgagaccgagcgaggggatcgccgccgccgccgccgccgtcgcccaggatgacgtcgatgctgtccgcgttctcgtcgtggttcgtgaacccgcgccgcaacccgctggcccgcatccacatgctcaccatctccaaccgcctcaagaactacggcctgaggtacgacgacctgtatgacccctacttcgatctggacatcaaggaggcgctctgcaggctgccccgggagggtggtcgacgcccgccaccagcgtctcaagcgcgccatggacctctccatgaagcaccagtacctccccgacgacgtccgggcactacagacaccattcaaaagctatttgagcgacatgctggctctggtgaaaaaggaggcagcagagcgtaaagcactgggagcccttcctctctatgagagaacccttccttgaagacatcttccttgatatgcgccacagcttttgctccttgtagcatcacaatgcatgaaataaaatgcagattatgacactgttcctccttcgggtttcatgtccattgcctgtagcagtttcttgtgccccttcccaaattaattgcgacagaatttctgttgctgttgctgatataaaagtttattttggttgatggaattgttgctatagaatctgaaaatctgccctgggctttttcaaaaaaaaaaaa

SEQ ID NO: 4294 - DNA, 1904 bp, Triticum aestivum
  Clone ID: TRIAE-23APR03-CLUSTER194_255
acacatctcctcttgtggcagttccaagtgagcagatcatcatcgcctagcgagctgtcgtcagcttcgtcattggtgccctccatggataggctcgtcgccgccggcatccttggctttctactgattgcgtcggtaggaagccatgcagctcgtgctccggagcaatactggaagtctgctcttcccaacacacccatgccaagctccctctctcaactcctaaacaatcaagccgggggcacgtcggtgaacatcggctcaggcggtgtccatgtcgacgcgggtcatgggatgcccggcggcacgacggtcgatgttggcaagggtggcgtcggcgtcaacgtcaagcctggcagcgccaagcccggcaggactacggtcggcgtcggcaagggcggcgtgggtgtcaacgtcaagcctggctacggcaagcccgggggcacaaccgtgggcgttggcaagggcggcgttgacgtcaacgtcaaacctggcagcggcaagccagcggcacgacggtcggcgttggcaagggtggcgtgggcgtcaatgtcaagcctggctacggcaagcccggtggcaccacggttggagtagggaagggaggcgtcggcgtgaacgtgaagcctggcggcggcaccacggtcggcgtcgggaaaggtggcgccggcgtgaacgtgaaacctgcatacggcaagcctggtggcaccggcaccaccgtcggcgtcgggaagggcggcgtcggagtcaacgtcaagcctggctacggtaagccaggcggcaccacggtcggcgtcgggaagggcggcgtcggcgtcaacgtcaagcctggctacggcaagccaggcggcaaaccccggggtaagcctgtccacgtcaacgtctcgcctttcatgtacaactacgccgcaacggagacgcagatgcacgacgaccccagcgccgcgctcttcttcctggagaaggatctgcacgccgggaagaagatgaacgtccatttcatggccaccccatgcgccggagagaagttcctgccgcggagcgaggccgacaccattccgttctcctccgagaaggtccccgagatcctcagccgcttctccgtggcgccggactccgtggaggcggcggagatgaagcagacgctgcgcgagtgcgaggcgacggcggacaatggggagaagaagtcgtgcgccacgtcgctggagtccatggtggacttcgccacgtccagcctcgggaccagccacgtgagggccgtctccacggtggtcgggaaggaggggtcgccggagcaggagtacaccatgaccggcgtgaagcgcgcggcgggggccgaccagctcgtggcctgccacgcggagccgtacgcgtacgccgtgttcgcgtgccacctgacscaggcgacgagggcgtacacggtgtcgatggtcggcaaggacggcacggcggtggagsccgtcgccgtgtgccacgccgacacggccggctggaacccgaggcacgtggcgttccaggtgctcaaggtgaagcccggcgcggcgccggtctgccacttcctgccgcaggaccacgtcgtctggacccgcagcggctgaagaatccaggtctgttcacgttcgttcgtaagcmccatgcagttcagtgctttgctatttgggttgatgatgcctgcgttcgtttacgttctagcctctgcagacgctgctgtgtcctactactatacgagtatatggtatcttgcatcctggcatacatttccgttgttgttgcctattgtatttggatggcgttgccagtatcgccagcttgtgcggagtgagggctgtttgctgtatagtttagcacgttgatgcaataaaaagactggtacttaaaaaaaaaaaaaaaaaaactcgagacta

SEQ ID NO: 4295 - DNA, 1424 bp, Triticum aestivum
  Clone ID: TRIAE-23APR03-CLUSTER194_259
gatatccgatccaccaagagagtacaacaggcagcattctctgactgccgcccccaccccctcccccccgaccaaaacccaagcaaaccctagatccgccgcggccccctccaactccggcgaagctccccacccggtaggcggagaggatgccgaacctcgagtgccggatgtacgagccgcggttcccggaggtggacgccgcggtgatgatccaggtcaagcacatcgccgacatgggcgcctacgtctccctcctcgagtacaacaacgtcgagggcatgatcctcttctccgagctctcccgccgtcgcatccgctccatctcctcgctcatcaaggtcggccgccaggagcccgccatcgtgctccgtgtcgaccgcgacaagggatacatcgacctctccaagcgccgggtctccgaggaggaggcgcggtcctgcgaggacaggtacaacaagtccaagctcgtgcactccatcatgcgccacgttgcagagaccctcgagatcgacctcgagcccatctaccagcgcatcggctggccgctctaccgcaagtacggccacgccttcgaggccttcaagctcatagtcgccgaccccgacgccatcctcgatgtgctcacctacgaggagaaggagactggccctgactgccaagaggtgactaaggtggtgcctgctgtcacccctgagattaaggagaccctggtccagaatatacggaggaggatgacaccgcagccactcaagatccgtgctgacgttgagatgaaatgtttccaatttgatggggtgctccatattaagcaagccatgaggaaagctgaagctgctgggaacactaattgtcctgtgaagattaagctagttgctcctcctctttatgtactgactacacaaactctcgacaaggaccaaggcatctcagttctcactgatgcagttaaagcgtgcacagcggagattgaaaaacacaagggaaagttggtagtgaaagaagcacctagagctgtgagtgagagggaagataagctattgaacgcccagttggataccctggttgagcaaaacgcggaggttgctggtgatgatgacagtgaagatgaggaagataagggaatgggcgatatcgacctcacaaattctggcgtccatgcggactgagtctacattagtcgatttggatgagatttgttgtatagcatcagccaagatcctaaattatcctatttaaaagctctttgaattcgctggtagtgtcatcttggatgttcatcggccagtgctgggctttactttgattgagcagcacctgttttttttttctctttggagttttgttttctaaacaagtgtttttgatgcccagtcttggcatgcctattatgatgttagtgtatccatgtgcatactagtaag

SEQ ID NO: 4296 - DNA, 877 bp, Triticum aestivum
  Clone ID: TRIAE-23APR03-CLUSTER194_262
gaatccatccacctctcgagctcttttctgaagccgcaagcgagcagagcacaccgcacacgtagcagtttccctttcagatattttcttcgactagccaccatgactgctttggccaagccctccgcctcagcgccgaagccgaagaagacctccgccgctggagccgcccacccgacctacttcgagatgatcaaggaggcgatcgcggctctcaaggacaggaccgggtcgagctcggtcgccatcgccaagttcatcgaggagaagcacggcaaggccctcccggccaacttcaagaagatgctctccgtccagctccgctcctccgccgccaagggcaagctcgtcaaggtcaaggcctcctacaagctctccgacgccgccaagaaggactcccccaagcccaaggccaagcccgccgcccccaaggctgcggcgaagcccgcaaaggacgccgccaagcccaagaagaaggcctccgcgaagcccaagaaggccgccgccgctggcacgaagcgcaaggcacccgagaagaagaagctggtcgccaaagccaagaagtcgcccgcggcgaaggccaaggcgaagccgaagaccgtccgctccccggccgccaagaaggcccgcaaggtcgcctccgcttgatctgatctgatctgatcttataggtggttttaggtgtgcgttggtgctctgggtctgtacaaaaggatgcctcatcctccctgatttaggcttcggttctgctaggcaggttctatgtactatcgctggtggtgtttagtgtctggaatgttcaggtgtcagatgtatccagctcaaactctgaaatgaatttgcagtttctcaaaaaaaaaaaaaaaaaaggccccta

SEQ ID NO: 4297 - DNA, 2062 bp, Triticum aestivum
  Clone ID: TRIAE-23APR03-CLUSTER194_267
ggaattcggcacgaggctaatactgttgccttgatccgtagtttgctagggtcatgttcctaatttgttagcgcaattgcaagctcgcaataccgaatcatctctgctccttgttcgtatatttatcggtccatggacgtatacttttagttcgtaggatgcacagattacagtcgtgtggaatatttatatgtcgctccatcgttttttttgtcgttccctggtggtgttgccgagatctagttatggcttctgcatgatatgctggaggtgtaataacatcttattagaccatctttttactgttaaccgtcatagcatcttattaaaccatctttttaccgtttaccgtcacgggttagctaagatatttgatctatcagtttatgtcacttgtccacatgatgattccctgtgtccgttagttttaataatcttttttctgtgtcgcagttgggtagtttacctctacccaccagccatgggtaaggagaagactcacatcaacatcgtggtcattggccatgtcgactctggcaagtcgacgaccactggccacctgatctacaagcttggaggcattgacaagcgtgtcatcgagaggttcgagaaggaagccgctgagatgaacaagaggtctttcaagtacgcgtgggtgcttgacaagctcaaggccgagcgtgagagaggtatcaccatcgatattgctctctggaagttcgagaccaccaagtactactgcaccgtcattgatgcccctggtcaccgtgacttcatcaagaacatgatcaccggtacctcccaggctgactgtgctgttctcatcatcgactccaccactggtggttttgaggctggtatctccaaggatggccagacacgtgagcacgccctccttgctttcactcttggagtgaagcagatgatctgctgctgcaacaagatggacgccaccactcccaagtactcaaaggcgcgttatgaagaaattgtcaaggaggtctcttcctacctgaagaaggtcggctacaaccctgacaaggttcccttcgtccccatctctgggtttgagggtgacaacatgattgagaggtccaccaaccttgactggtacaagggcccaacccttcttgaggcgcttgaccagatcaacgagcccaagaggccctcagacaagcccctccgtcttcccctccaggacgtttacaagattggtggcattggaactgtgcctgttggccgtgttgagactggtgtcatcaagcctggtatggttgtcacctttggtcccactggtctgacaactgaggtcaagtccgttgagatgcaccatgagtctctcctggaggcgcttcctggtgacaacgttggcttcaatgtcaagaatgttgccgtgaaggatctgaagcgtggttttgttgcatccaactccaaggatgaccctgccaaggaggcagccaacttcacctcccaggtcatcatcatgaaccaccctggtcagattggcaacggctacgccccagtgctggactgccacacctcgcacattgctgtcaagtttgctgagctggtgaccaagatcgacaggcgatctggtaaggagctggaggccctgcccaagttcctcaagaatggtgatgctggcatagtgaagatgattcccaccaagcccatggttgtggagacctttgctacttacccacctcttggtcgttttgctgtccgtgacatgaggcaaactgtggctgttggtgtcatcaagggtgtggagaagaaggacccaaccggcgccaaggtgaccaaggctgccatcaagaagaaatgaggggcttacctgaatccatctatgtctgcttttgagatctctagtagtttagtgcaagttttgctactgttagcgccgtgtgatatgcgccctgttgatgtgtcatttgagtactgtcgttaattttggcttttggcaaaacatggaagcttctgagactaaaaaaaaaaaaaaaaaaaaaaaaaaaaaaaaaaaaaaaaaaaaaaaaaaaaaaaaaaaaaaaaaaaaaaactcgag

SEQ ID NO: 4298 - DNA, 1568 bp, Triticum aestivum
  Clone ID: TRIAE-23APR03-CLUSTER194_276
catctttctctctccccctctctcccacagcacatgcgcgtcgcccgccgacacccgcacccacagcagccagagcagcagcggcagcaatggagcatcggggcctgcttctcgtcctcgccgccgcgctgtgcctcgcgggcgccgccgacgccaggcacgccaagaagtcgtaccaggccgtcttcagcttcggggactcgctctccgacgccggcaacctcatcgtcgacggcatccccaaggccctcaccaccgcgcgcgcgccctacggcatgaccttcttcggccgccccaccggccgctgctccaacggccgcgtcgtcgtcgacttcctcgccgagcatttcgggctgccgctgccgccggcgtcgcaggcgcatggcaaggacttcaagaagggggccaacttcgccatcaccggcgccacggcgctggagtactccttcttcaaggcgcatggcatcgaccagcgcatttggaacaccggctccatcaacacccagatcggctggctccagaagatgaagccgtcgctttgcaagtcggagaaagagtgcaaggactacttcagcaagtccctgtttgtggtgggagagtttggggggaacgactacaacgctcctctcttctccggcgtcgccttctccgatgtgaagacctacgtgccgctggtcgccaaagccatcgccaacggcgtcgagaaattgatcgagcttggcgcgacagacctgttggtgcctggaattcttccgatcgggtgcttcccattgtacctgactctctacaacagcagcaagaagtcggactacaacgcgcgcaccgggtgcctccggagatacaaccgcctggccttccaccacaacagagagctcaagcagcagcttgaccagcttcagaagaagtacccaaagacgaaaatcatgtacggcgattacttcaaagctgcaatgcagtttgtcgtcagccccgggaaattcggtttcagcacggcagtgcaggcatgctgcggcgccggagggtcgggcgcctacaacttcaacctgaagaagaagtgcggcgaggcgggcgcgagcgtgtgctccaacccgtcggcgtacgtgagctgggacggcatccacatgaccgaggccgcctaccgcatggtcgccaacggctggctgaatggcccctatgcctctcccccgatcatgaagtgaaaatccagatggttagccctgtatgtacgtaacgttgctgctgctgctgctgatgatgatgatgatggaggggatcgacggatatgcagagcgcttcaggcgccggtgatgttaagttatgatgatgggtaaaatcgctcagtctgttcgttgagagtttgtataaaccgtgccggtatagatatgtttttccagctgaaaagctctagtagtacacatgtacgtaccttgtatgacatgctacctgattcttattcatttaccaagacttgcataagaataaattattaaatattatggaagcaagaggatcagaattgtgcgtttgcgcttcctgaaccaaaaaaaaaaaaaaaaaagcttatcgat

SEQ ID NO: 4299 - DNA, 2111 bp, Triticum aestivum
  Clone ID: TRIAE-23APR03-CLUSTER194_286
acaaccacaatcccgtcttcctcctccctccctccgcctcttcgcccaccgaatcgcccaaatccccccttccattcctataaaacatccatccatccgcccgcgaccaaatccaaatctcatcgtcatccccccacacccccaacccaaccccaccctcgtctcccccggatcggaggcgcgcgagcgagatggcgaacatcgacatggcggcggtgctggcggacatggagcgggacgcggcggcggacgcgcgcaccccgcggaccaagctggtgtgcacgctcggcccggcctcccgctccgtgcccatgctcgagaagctgctccgcgccgggatgaacgtcgcgcgcttcaacttctcccacggcacccacgagtaccacaaggagaccctcgacgccctccgccaggccatgcacaacaccggcatcctctgcgccgtcatgctcgacaccaagggacctgagattcgtactggatttttgaaggatggtaaaccaatcaaactgacaaagggtcaagaaatcactgtttccaccgactatgatatcaagggcgacacgaacacgatctccatgagttacaagaaacttcctcaggatgtgaagcctgggcatgtcatactatgtgctgatggtaccatctccttggctgttctgtcttgcgacccagcagctggaactgtcagatgtaggtgtgagaacactgcaatgcttggagagaggaagaattgtaatctgccaggaattgtcgtggaccttcctaccctgacggagaaggataaggaggacattttgggatggggtgtgcctaatgacattgacatgattgctttgtcatttgtccgcaaaggatcagatttggtgaccgtcagacagcttcttggacagcatgcaaagcgcatcaagttaatgtcaaaggttgaaaaccaagagggcattgtaaactttgatgacattctgagggaaaccgatgtctttatggttgctagaggtgatcttggaatggagattccagtcgagaagatattccttgcacagaaaatgatgatctacaagtgcaaccttgctgggaagcctgtggtcacagcgacacagatgctcgagtccatgatcaagtcccccaggccaacccgcgctgaggctactgatgttgcaaatgctgtgctcgatggaactgattgcgtcatgctcagtggcgaaagcgctgctggagcataccctgaggtggctgtgaagatcatggcgcgcatctgcgttgaggcagagtcttccctggataacgacgccgtcttcaaggagatgatcaaggctgcgcccctcccgatgagcccgctggagtccctcgcgtcctccgccgtgcggaccgccaacaaggccagggctactctgatcgtcgtcctgacccgtggcggcaccacggcgaagctggtcgccaagtaccgccccagggtcccgatcctgtccgtggtcgtccctgtgctgacgaccgactcgttcgactggaccgtcagctctgagggccccgccaggcacagcctgatctacagaggcctgatcccgcttctcgctgagggctccgccaaggccaccgactcggagtcgacggaggagatcctccaggccgcgctcaagtcggccgtgaagaagcagctttgcaaggccggcgacgccgtcgtcgtcctgcaccgtatcggcatggcctccgtcatcaagatctgcaccgtcaagtgatcggcacggtgacccgagcgccgccctggtccttgctgccgtggcgaaacctgggtcccttgttcctctctggtcttctcaccgtaccgtcagtattgcagtttgttgcatagatccgatccgcgctggtaaattaggagggagaggactccgttatatagagctcttttattacctgtagtatggtgtttggcaggtgtcattcctgcgcaaatttttctctaattattagttgctgctgctgcttgttgtactctgaactctgaagtactggtttggtagtgatgtcgatacatgtggtgataataagattttggcatcgtcgagtcggaagctcaaggacaatgcgtatctccaaaaaaaaaaaaaaaaaac

SEQ ID NO: 4300 - DNA, 862 bp, Triticum aestivum
  Clone ID: TRIAE-23APR03-CLUSTER194_306
ctcaactcaaaccaccggcattagtcactcctcttcactccaaaccagcgagtaacactccaaacagccaatggcgttccccaagcccctggcggctctcctcctcgccgtggcgctggcagcgactgccatgtccgccgccggtcaggatccccaaaactgcaagccgagccgcaaggtgacggtgcagaacctgtgcggcaaggacctttacctcggcatcgagccgctggccaacagcaagctcctctacagccctggctacctgctccgccacggcacccacgtgtcgtacgacgtgtgctcgtggacggggcgcgtgaaggtgcaggacgccgtggtgacggagtttcacatcgggtacgacggcggggcgtggtaccaggtgagcaccgaccagtcccacatgcccatccgtgtctccatcaccccccacggccaccccctgaaagaccactgccccaccgccggctgcaacagcggtggccactgcttcgagcactccgtccccggcggcaagtgccacggcgtcgacgagatcaagatcgtcttctacaacccctagatccagctgctgggcgtgtttaataagtttgcagctcggtgatcttagtcgtattgcagctgctagtcagtgaatcatctgctccaacgagctattgtcgtgtcgtgtcgtgtcgatttactgttcaattagtagttgcggtggtgaatgtgtggctagagatgtttcatagccgtgcaatgaactgcatgtcgtcagctctgtatccgtcgttggtgtgttgtgtgttttctagtttataaatccgatttaaaatgtggctgggtcaccgaactgatgtcaaaaaaaaaaaaaaaa

SEQ ID NO: 4301 - DNA, 833 bp, Triticum aestivum
  Clone ID: TRIAE-23APR03-CLUSTER194_307
gactcaaaccaccggcatcagtcactcctcttcactcctaaccagcgagtaacagccaatggcgttctccaagcccgtggcggctctcctcctcgccgtggcgctggcagcgactgccatgtccgccgccggtcaggatccccaaaactgcaagccgagccgcaaggttacggtgcagaacctgtgcggcaaggacctttacctcggcatcgagccgctggccaacagcaagctgctctacagccctggccacctgctccgccacggcacccacgtgtcgtacgacgtgtgctcgtggacggggcgcgtgaaggtgcaggacgccgtggtgacggagttccacatcgggtacgacggcggggcgtggtaccaggtgagcaccgaccagtcgcacatgcccatccgtgtctccatcaccccccacggccaccccctgaaagaccactgccccaccgccggctgcaacagcggtggccactgcttcgagcactccgtccccggcggcaagtgccacggcgtcgacgagatcaagatcgtctactacaacccctagatccagctgctgggtgtgtttaataagtttgctgctcggtgatcttagtcgtactgcagctgctagttagttatcatctgctccaaggagctattgtactgtcgtgtcgcgttgtgtcggatttgctgttcaattagtagttgcggtggtgaatgcgtggctagagatgtttcatggccgtgcaatgaactgcatgtcgtcagctctgtatccgtcgttggtgtgttgtgttttctagtttataaatctgatttacaatttggctgggtcaaaaaaaaaa

SEQ ID NO: 4302 - DNA, 2290 bp, Triticum aestivum
  Clone ID: TRIAE-23APR03-CLUSTER194_320
gagaccattacctagaacatcctaatcaaaaagttgtccgtggtctcgaatagcttcagatctcgggccatgtctccgtgtagcagctgtagcgtgccggtagatcgagttttaggttctttttgcggtgatgcgcgtcgatttcgtccgtggtttgacggattttctcgaagccgagtccttggttcggcttcgcgcgggtgcctctccttagtagcggtaaatctgcgagtagatctagccgcaggttcatctatgagcggatgcatgtcttttttttcgtctttaattttgatgtcatgccgtggccttgatctgtcggttttttagtgtttctgttaccgattgggtctcgcgagatgttcctgaatcatgtccgtgctttgttgcatgtattgttggatggattcgtgtagtacttctggttctgtaggatctgtgagttctctatgagagtttacagcatgaacttcatcatgtacttgtatggtgaattttgttcgcgttattaccgcagtaattcgtagatctaacaagtacctgctgtctaattgcttcaagtgcaattccatcttgttaaacgcatacttgtctgcatggttgtttcatatgttaacctcacaaatagacatgatattactttgttgacacttcttcacttggatctgttgtttctaagacatgcttactttgatgtttctgtttgctagcttcagccatgggtaaagagaagactcacatcaacatcgtggtcattggccatgtcgactctggcaagtcgaccaccactggccatctgatctacaagcttggaggtattgacaagcgtgtgatcgagaggttcgagaaggaagccgccgagatgaacaagaggtctttcaagtacgcctgggtgcttgacaagctgaaggccgagcgtgagaggggtatcaccattgatattgccctgtggaagttcgagaccaccaagtactactgcaccgtcattgatgctcctggtcaccgtgacttcatcaagaacatgattactggtacctcccaggctgactgtgctgtgctcatcattgactccaccactggtggttttgaggctggtatctccaaggatggccagacccgtgagcatgccctccttgctttcactcttggagtgaagcagatgatctgctgctgtaacaagatggacgccaccactcccaagtactcaaaggcccgttatgaggaaattgtcaaggaagtctcttcgtacctgaagaaggtcggctacaaccctgacaaggttccctttgttcccatctctgggtttgagggtgacaacatgattgagaggtccaccaaccttgactggtacaagggccctacccttcttgaggctcttgaccagatcaacgagcccaagaggccctcagacaagcccctgcgtcttccccttcaggacgtttacaagattggtggcattggaactgtgcctgttggccgtgttgagactggtgtcatcaagcctggtatggttgttacctttggtcccactggtctgacaactgaggtcaagtccgttgagatgcaccacgagtccctcctggaggcgcttcctggtgacaatgttggcttcaacgtgaagaacgttgctgttaaggatctgaagcgtgggtttgttgcatccaactccaaggatgaccctgccaaggaggcagccaacttcacctcccaggtcatcatcatgaaccaccctggtcagatcggcaacggctacgccccagtgctggactgccacacctcccacattgctgtgaagtttgctgagctggtgactaagatcgacaggcgatctggtaaggagctggaggcgctgcccaagttcctgaagaacggtgacgctggtatcgtgaagatgattcccaccaagcccatggttgtggagaccttcgccacctaccctcctcttggccgcttcgctgtgcgtgacatgagacaaacggttgctgttggtgtcatcaagggcgtggagaagaaggaccccaccggcgccaaggttaccaaggctgccatcaagaagaaataggcatctatctagcagaaggtttttgttcatggtcattgcttttgttgctgcagactcttatcccgggcgagcaatgatcctgtctgtcgtttaattactgtatttctattcctgcttcggctaaactcctgtgccttgagactgatttgttgtgaaatgcaagttattagattgcaaaaaaaaaaaaaaaaaaaaaactcgagactagacctcggccgcgaccacgct

SEQ ID NO: 4303 - DNA, 1701 bp, Triticum aestivum
  Clone ID: TRIAE-23APR03-CLUSTER194_321
gcgcgcaggctttgactccatcgcctctccctcctcttcgtctccggccggccaggtagttaacagctccagcagccatggggaaggagaagatccacatcagcattgtggtcattggccatgtcgactctggcaagtcaaccacgaccggccacctcatctacaagcttggaggcattgacaagcgtgtgatcgagaggtttgagaaggaagccgctgagatgaacaagaggtctttcaagtatgcctgggtgcttgacaagctcaaggctgagcgtgagaggggtatcaccatagatattgctctgtggaagttcgagaccaccaagtactcgtgcactgtcattgatgctcctggtcaccgtgatttcatcaagaacatgatcactgggacctcccaggctgattgtgctgtgcttatcattgactccaccactggtggttttgaggctggtatctccaaggatggccagacccgtgagcatgctctccttgctttcactcttggtgtgaaacagatgatctgctgctgtaacaagatggatgccaccactcccaagtactcgaaggcccgttatgaagaaattgtcaaggaagtctcttcatacctgaagaaggtcggttacaaccctgacaaggttcccttcgttcccatctctgggttcgagggcgacaacatgattgagaggtccaccaaccttgactggtacaagggccccacccttcttgaggccctggaccagatcaatgagcccaagaggccctccgacaagcccctgcgtcttccccttcaggacgtgtacaagattggcggcattggaactgtgccagtggggcgtgttgagactggagtcatcaagccaggcatggttgtcacctttggtcctactggcctgaccactgaggtgaagtctgtggagatgcaccacgagtctctcctggaggcgcttcctggtgacaacgtcggcttcaacgtcaagaatgtggctgtcaaggatctcaagcgtgggtacgtcgcttccaactccaaggacgaccctgccaaggaggctgccaacttcaccgcccaggtcatcatcatgaaccaccctggccagatcagcaacggctatgccccagtgctggactgccacacgtcccacatcgctgtcaagtttgctgagatccagaccaagatcgaccggcggtctggcaaggagattgaggcggcgcccaagttcctcaagaacggtgatgccgggttcgtcaagatgatccccaccaagcccatggtggtggagaccttcgctcagtaccctccccctgggccgctttgctgtgcgtgacatgaggcagacggttgcggtgggcgttatcaaggccgtggagaagaaggatccgaccggcgccaaggtgaccaaggctgcggccaagaagaaatgagatggtgtcaggttctttactgcatctatgatggtggtggcggtgacggcatttggtggtggtgatagttgttctagtcgttttgaaaacttgttaagcttcggttatttgtgtcgagcagtgttggaactgcttattgctctggtcattgtatcgttcggttgtgttggtggaactttgtcagttaatgttgctactatatatagtcatcatgtttggagtcgttttatgtcagttgatcatgtttttttgtcttgcaaaaaaaaaaaaaaaaaaaac

SEQ ID NO: 4304 - DNA, 645 bp, Triticum aestivum
  Clone ID: TRIAE-23APR03-CLUSTER195134_1
atgacccagaaaacggcaacgcagatggacagagcgattgcaaacctggatacaccgatgtgtctagctcccctcctgagccttcctctggcatcgagcagcgctgcagatccctcgacgagagcagagaccttcaacagaagcaccaagcaccggaagaactggaatttaatgatcagctgaaggccttcgattacgctgaagctagaaagaatacttcatttggagaagttagatctgagagaagaaaggacaatgcagtggccagcgctatcaatgtggattctggagataaacggaaaagtttgaaacaaacccccggtgccggtggcggcgaagaggatgaagggaacttccagaatccacgaaggcgacaggctttcccaccttctggcaacaggagtgctacgtaccattagttagttgagagatgtactatccgaccgaggcattgtatttgtaacctaaagagtacagggggaagtggaacaacgcgcatgatttggcattcgtcggtaagtcattggaaatgctcttatgtgagatactatggaggcctgtttgatgaccaacacaaaagtgatcgcctccaaccttcttctggttgtttgattaacacacaagaaaaattctcattgaaacaaa

SEQ ID NO: 4305 - DNA, 2056 bp, Triticum aestivum
  Clone ID: TRIAE-23APR03-CLUSTER19532_1
ctcggacccagacccacgcgcacacgcgactcctccctccctccctccaccccgaccgacacgcaccgcgccgccccggcgagctagggttcgttcgctcgctgcggcgtcaatctccggcgagcgggcgggggcgagggccaggcggggatgcgggggcccccggaagtcgcggtggagttcaggacattaatgtcgtggttgaggatgttcggggggcccagttggagagcagatttggaatggtgagggatcacggaactctggatgcaatacgactccaccccgatggcggcggaatgcgagtcatgcaatagcaagtcaggcaccaccctcgtttacgatgatcgcttcgccgatcccgccgtggtgctgctcgccgcctgcccctcctctgcatcctctggagaagtctacgcaggagcgccctcggccccccactatttccacgacgcctgcccctccttcgacttcagctttgacaaggatgtgccggacgtcgttacccaaacgtcgatggtgtttgcatcgcacaccggcgctttcctcgatacatgaaaaaaatatgtagaactatccctggcggatgactggtttgtaaccgaggccatggatgtccttgtaggctggacgaaaaacttatgtttcagcaaggatttgcctggctgcagcgtacttgacataggaaccgggagcggacgactcttacagcagcttgcaaaacaagggttttctgatctaactggcattgactatagtgaagccgcaattgagcttgctcgaaacctcgcaattcgtgatggatttgagcacattaatttcctggttgatgatgttctggagtcaaagttggagaggagatttgaacttgtgatggatgaaggaactctggatgcaatagggctccaccctgatggacctgtaaagagaatgatgtattggcagtcagtggctagcttggtttcccctggtggcatactggtcatcacatcctgcagcaggaccaaggatgagctagtgcaggaggtggagaacttcaaccagagaaagttgggcgccacgctctctgaaggagctctagccagcgatgccgtggtgttcaagtacctcgaccatgtccaagcttacccaaacgtcgatggtgtttgcatcgccaccgttgctttcctgcatacatgaaaattatatgtatatgtatccctgcccccctctctgcccctaacttatcagacctgtgagtaacaatgtaccccaggacagctgctcttctatggatgataatttaccttgtcggatacgttattcgctagtgtggtgctttgttatggctggatatactgcgttactgtactgttttaaagcttatcaagcaaatgttgcaaacagatgtacagaaatttgtatgctcagaaaactgatcaatagtccatgcacatgtcagtaagacaaatcaaagaactgtagatcaagcatgagttgcaggatcacaggttcagatacaggcctgtaattccatgcattttgcaagtaattttaggcaatctctcgagtacatgggagagttagagaagctcacaagttacatcgtctgggtcagtcttgtggtatgtacagagccactacaatctcctatttcttgtgcacacagaagcgagtggcttcagactatcctacaaaaaaaaaaaaaaaatccctgcttcttgggatctttgcttctgttaaccacaccgacgccgcgccgacttgtatggtgtcagtagacggggataaggcgtggttggtagcggggcggcgcaggatcggcgtcggcatcctcttcttcctcctcctcctcgtcgtcctcgtcctcggtgtccgagaagaacatgtaagttccctggtttccctgcagcatcaagtgatctggtccccacggcgacgctgcagggttgcctttgcgctcacctccgccgtgcttgggaaccgggtcccagcggtccgcagcacaagaagcaaaaacagagcaaacgagtactccccgtcgccgccgaccatgagaggaagagtgtgccggaga

SEQ ID NO: 4306 - DNA, 1724 bp, Triticum aestivum
  Clone ID: TRIAE-23APR03-CLUSTER195748_1
aattcgcgaaatttcaaacccaatcgaacgcttccaaaccctaggcgagctgcgggcggcggccgctcgcgagcatccagccatcgatcgccatggcgccgcctcgcccccctccggcccgcggcggacgccgcccaccccctaagtccgcgcccctccgtccggaggaggagctgctcctcgaggcagcgtccgacggcgacctcgtcctcttcaaacggctggcgaggatgatggacggcgggcgcgggcgcgtcacggaggcggtagaggccgttgtggagtgcacggcgggggcgctgcacctcgccgccggccaaggggaattggcgatgtgcaggtacctggtcgaggagctccgggtggatatcaacgccatccacgacggaggtgaaacgcctctggcttatgcaattaatggtgcaaatatagctactgtgaagtatcttctggaccatggtgctgatccagataaagttgatgacaaaggatttacttctctccatattgcagctgaggaaggatattgcaatatagtggagctcttgctttctagaggggcttccgttgatgcattatctaatcgtggtacaccactgcaccttgctgctactaatggtcatcatcaaacagtgaagattttgttggaccacaacgctgattgcaataagattgtgaatggtgtctacacacctctccttgtatctatttatgctccgtcactaaaatgtgtgaagctactaatccaggctggtgctgatgtaaatggtgtgggtaatataacccccttaatagctgctgttgggttaactgagtgcatgaagtgcttattggaagctggtgctgacccaaacgtccctgatgaatttggcaggatgccaatagagtttgcggcaatatgtggtacacgagaagatgttgagatcctatttcctttaacttctcgtattccggctgtacgtgattggagcgtcaatggaataatatgtcacgcatactcattgccagggcaaaagttctatgagagggggctggaaagggacagagctagtttgaaatttcaaggaagaaaggcactcgagagaaaggattacctttctgcaattgaactatacactaaggcaatgggccttgattatgaggatgcgaccctgtactcagataggagtctctgttttctccaaattggcgagggagacaaagcctttgcggatgcttatacttgtagaatgatgcgccctgattggccaaaggcctgctatcggcagggagcatctctaatgctgatgaaggattatgaaaaggcctgtggtgccctttttgatggtttgaaaatggacccacggaatcttcagattgagaacgctttacgggaggctatggattccttggagatatctcgtggcgctaagactgtatcgaagtgcccataggagcttgtttaccgcctgcctgcacgagtctgcttgcttctgcacgattttttccgagttctgtccatatgctgttatattgtagatagagaagcagttagattgtgtgcaagtgtgggttttccgtagtagtcgctggctggcacgcttcgaggtgtgtttgttaatgacttgtgtctactgagcgctgcataaatgtaaaatgatatacgacacacttaactactgtggttctttttgagggagcttaactactgtagttaattctaaaaaagaaaaaaaaaaaaaaaa

SEQ ID NO: 4307 - DNA, 1573 bp, Triticum aestivum
  unsure (1)..(1573): unsure at all n locations
  Clone ID: TRIAE-23APR03-CLUSTER19578_1
gacccccaacaacctcccccctccctcgtgcgcctctactaaaccgagtagtcggcaaggaggggcagcaggggagggagatctgactgacgaggccagcgaggcctagtggacggccagccgctgcaggccgcgacggacgagcgccagagcgcggggcccggataatggcagacccagcccgtgccgcccgccgcagccgagcccggcggagcgggagcccggagcggccagggctgtgcctgccgaggcagtcatgggggagagccagcccctgcacgccccgaccgccgtcccccacctcgccggcgccgccgacgagcaggccgcagctggagttccccctcccctccttcccggtaaggagttcacacggaatccccaagggcctcgtcctcgtgctcatgggcgtctccttgcgcctggcaactcatcgcaccatccctcaagtaccccgggatttctcccgccaagacaattccgatttggtacggactgtcggcaccgccgggtacttcgtgcagtgtcctcccatggagctattggcagttccctgggttctttgccttctgcgggaacggatattcgagccagtctggggccgcaaggaagttcttgaagttcattatcttgatcaactccatctgcggcatccttgcgttctgcattgctgttgcactgtactatgtcaccgggaaagagagcttccttgtaacgccactttctggcttccatggcgcccttgctggctttctggttggcctgaagcagctcttgccaaaccttgagctccccatgtgctttttctggaaaataaaggctaagtggatgccattctttgtcatgtgcttctcaactatcatggccttcattgtgccggattccatcaacttcctgccgactttgttgtctgggatgtacgtcagctggctttacctgagatacttccagaagaacccactgacaggacttaagggcgacccaagtgatgacttctccttccccagcttgttcccagatgccatgcggccagtcacagacccagttgctaatctgttcgaccggatgttgtgtgcgaggtctaagccttcagaaattgccctcccagttaccgatcctaccaaggcatcgagaagaagggagcgtggcgagagggttctcgaggaaaggatggccgcggatcatgcggctgacgccgaagccccagctcactctgcggaagattaagaattttcccctgtgctacgtcgtcatagtggccacggtcgccttgtaactcctcggatttgtgttctggggagcatattcatttttacagtggaccgatgatatgataatactttactgcccctcttttgtttccttgttttgagaatattggttggttaaattgtgttgtagttcctgattacagtgaggaaagaagaaaaagggtggcatccccttgcccccgatgttgtaatgtagaaaaagaatgacttgtcagtaacaatgtgaagtattttttccaaaaaaaaaaaaaaaacagccaaacatcaatagtagcttggatggacaggcngtnaaaaaaaaa

SEQ ID NO: 4308 - DNA, 1905 bp, Triticum aestivum
  Clone ID: TRIAE-23APR03-CLUSTER195_2
cactcactcaacctctctcgcccctctcccggtctcccctcccccgccgcatccgctgcgcgtgaccacaagctcctgccgcaaccgcgcgactctgccggccgaccaccgcatccgtcgcatgcatcggcggttgccgcacaacgaaggtcacggctggtcccgcgacggcctcggttggaggaggacgataggtccatagcgacggacgctcaagtaagaggagcggcccaatgacggcggcctcgagcacagggataagtgcaggctggggatgcaggagaggtgcagcgcggggtttggagctcccatgagctgggtgtggcgcatccgacggcgacagacacagggacgcgttgatccgggtgtgggtgctcaattcggtcccgttctggccggatccgtggcggtgctcatctccggcgaggtggcctgtgactcgcgggacgacggcggcgcaagaccacaggaggggctcatctcatgggacaggggcgcgaggtcttgttggcttcggttgccggtggcttgatgaaggggtggccggggtccggcgccatggaggctcttcgaggacgaggaagcagacagcgacgacaactttgaggccggcgggggcgccgtctccgcgttcgatggtcagggtccaacgcggccgccgttggctccatcccctacagttatcatgcggataagagaaccaaaaactaccacattgatatctgcttcaggaaaaatggtttgcactggagcaaaaagtgaacagcaatgtaaactcgcagctagaaaggtcaaatatttgacgatgttttcttctcccaacctggcaaggagtaagaagtcagttggagtgagaagtgaaacaagtaccatgagctcaagtgaatcattcaccaagctggtaaacgcataaacttcaaaaaaatcatctcaataagttttgtcagagatatgttttgctaggctggaggcttgtgagatcttcagattatcctaattgcttctacatagaagttttggttggctgatagcttgcaagatcttcatattctacatagaaggtgcagtgtgatgtgatgcatatggaactggtattactttgcagtatggaactggcggtgggtgtatgaaatgtgatggctgtaacattatacctaatttcttatcagttcatgatatggctgtttgaaatgtgatacctggatgtgagtgtctctggcgcgggatcctggacgcctccggcggcggctggtgaaagggatagacggatcctggacatcttcggcgacgggtcctgaaagggatcggcgccggatcctggaagcgttcggctgagggtcctcaactggacatgcaccggatcagtggaggccggatcagtggagaccagcggcggatcagtgccagggcggcggcgaagggatggagcggcggcggtgaagggatgaagagcggcggcgggcgaatgagggcacagactcggtcgtctgtttctcgctcgagggcacgagacctcgctcgtacgtgcgggggattggtttgtgatttattttcgctggttaattttcgccgggtttttctcgctggttaattttcgccggtttgttcgtgtcagatgggtgtgaagggaggttaggcgcgtgggggcggatgtgggactcggccctgagggtttttcttggttcatcgcggctgagcgggaggtgggagcaggtaccaaaaaaaccgggtgaggtgggacgaaagttaaacccggaatgcgacctaccaactgagatattaggagtagagattgcgctgtcctttccaattacttctgttgtcttactcttatcattaaacccccactacacctaaattctcgggcttgtgatgattgaatctttttaaggggtggtgcacact

SEQ ID NO: 4309 - DNA, 864 bp, Triticum aestivum
  unsure (1)..(864): unsure at all n locations
  Clone ID: TRIAE-23APR03-CLUSTER196023_1
acctccaatcggctcgccgtccttgacattccccctcccccaccccgccgcttttctcccccgtccgtccgcccgtcttccgtccggtgagagagagaggggagataaatacagtttgtgaggagtgagaagcattaggtggcaggagaggcagccatcaccaccccgtacgtgttgggcgtaattatctcttccccggagcggcgatttctggcctccgtccctcgccctcgctcgcgcctataatattcgggtagggggtcgttccgtccacgcttcacggcaggcggttccttctcgggcagaaatggcggaggagcccaactcctgggcggaagtggcggagctgcacgacggcgccggcgccgacttctggctgccggacgagttcctcgacgacgacttcttctccgacgagaaggcggcggccgcggcggcggcggcggcggcggccaggagcgacagcgacgacgaggacgggctcggcgggctctcgcgccgcgtggccggcctcgactgcggcgccggcgaccgcgccattcccaaggcggaggtgatgtctgggtctccgcagtccacgctctgcgtgctgcaggcctccggggaggacagccccaccggcggcgcctcgcaggtcagctcgccgccgtcctcgccgctggagcagcagccggccgacccttgggacctgctgcacgaggcggccggccaggtggcccgcctcggcgtggacagcatccccgtgcctgtcaaccctcctcccatccatggcgccggcgtcgcgccgccggcgaggaagccctctccgccgctgcttccgtccccaaagcccgncggccattaccagttcccgccgaacaactc

SEQ ID NO: 4310 - DNA, 2186 bp, Triticum aestivum
  Clone ID: TRIAE-23APR03-CLUSTER19616_1
cccttggcccccccttcgcacctcctcggccccagcccctccctgatcacagttccccttccattccgccccgccccgctgggcccctgcgccgcccggccgcatgcagcacccaagtcccgccccccccccctcccggcttgcaccacgcggccgcatgcagcacccaaatcccgtcccctccccgtcccagcaatctctaatggagagccaccggagcagaaatcaatcctaaattagcgtcccgccacccaccacccccccccccgcctcccagcatcaagggaaggaagccccctccccccccgccacctccgccgaggaagaaagctcacatatccgggccgaattggtcctacgccgcgccaagattactggcctgcaccgtaaataattccccagaggaaggaagaacggggggctcgggccggaaaaaggggcggtcaagcaaatgacggaggtggcgctgttccggggcccgaccaacctcgcttcgcccgcaagccgcggctcctcctcctcctcctccacctccctgcgctatttaaccgagcagcgacgtgctccagagaggcacgaccagcaggcgacgaaagccctgcaggatccgttgagcgacatggccggacggttgcagggatgaggaagaggaggaggagcgctggtccttcttggcgctgcttctcgagctgctgcggaagtcgctgctccggtgcagagccgaggacggcggccaaggccagggcgggatggagatagggctgcccacggatgtgcagcacgtggcgcacgtcaccttcgacaggttccatggattcctccttcggcgtttcaacacaatcgatgcagtgttcatatgattccacagggctaatgctactgtcttcggcgtttcaacacaatcgatgcagtgttcatatgataccagaggaaacagtgttccgacgattctcttgatgatgcaaagacgtctgtatgaacaaggaggtcttcgggcagagggtatttttcgtataaatgcggagaatagccaggaagagtttgtgagagatcacttaaatagtggaactgtgccggatggcattgatgttcactgtttggcgggtctaatcaaagcctggtttagggaactgccgagtggggtgctggattctatcccacctgaacaggtgatgcaatgccaatctgaagaggactgtgctcgggttgccaaatgccttccaccaactgaagcagccttacttgactgggctgttaatttgatggctgatgttgtccaagaagaacagataaacaagatgagcgatcgcaatgttgctatggttttcgctccaaatatgacccagatggcagaccctttgactgcactgatgtacgcggtgcaagtgatgaatttcctcaagatgctaatacagaagaccctcaaggatagagaagagtccaatctggaagatgcctctttgccacagaaggacccatctgatgaaaatggccatcagaaccccagtctccccgttaatcctcaacctgaagaaacatctgggcgcccctcttttgtcagcgaggagcctattgtgtacagtcctacacacagtgctgaagacaagcctcctgtggaaggcgattccatagcttccgttgtccatacaagtgatgtccggtcgagcgtggaagggtccgctagttgctcgcagcctgctcttgtcgcttcgtctgccattgctgatgcttcctgtgctacagctgccaacttacttccgagcagagggagccgaggcctgaatagcaggaggactagaaagggcaagcggcagtgcggaacgcccgccgctcctccagctgaaaaatcgaggggcgcgagcatcgtgagccggataaactccaaggtcgaacggatcgaagcgtggaggtagaaaccccggtggcactgcctttgttgttgtgtaatagatgactgacccagtgttgtttccttgcacattttgaattttcgacgcgcttatcatttcgtgtttggatcatcatcatgttgttttgaggctcatcccccccctgccttcactaacttatatgtatcttgcttatgagtaaatttggggcctttgcttcctttgttgtacatacatttcttcactccctggacccggaagtttttggacgtccctcaaaaaaaggaaaagacaaaa

SEQ ID NO: 4311 - DNA, 2320 bp, Triticum aestivum
  Clone ID: TRIAE-23APR03-CLUSTER19669_1
acaccggtaggagagagctaggctctgcagtctgcgccgtgtaccactccacacgcgaggactaaactaagctgaacttgggccacctgtccaggcagcgtgtggagctcggcgagcgcgagttaatggccggagaagttgccgtcgtttgatcttgacgcaccttgtttttatgtgttcttgtgtggtcttgactgactgttctaggggagaggtctgaatcggcgatttggacctttactcggtccatgacgagtccttgtcctgacgagcatgctcgccttcgtggacctctcgggtggaaccgtttggatgcgcaccgcgcaagcactgatgatgcatcgcaattcgatagctccaccgagaaacaacagttccttttctttcttatctcttctgcgcggtggaatcacgatatcagtagcgcctttttcatgatttttataccgtatagtgtcgcgttgccgaccagttagtttctggcactgttgcttgagattaaagctcttggcaggggttaacaaatagtgcttaattactgttatgtgtaccaccccacacatacgcacatacgcagcgtgcgggagcagagcgcaacagcgtcccttcgggaccagcgaggacaggtgtcagcgggggctcagcgggcgatccaggccgggtgacccgcggccatcacgccgacaagaatttcactctgcctccgcctccttcccggtttgacttctccctctcctccgagcccggcgaccctccccgtcctcccctcccgcctaccgtcgcgggcaatgggcggcgcctcgggggacgccatcaagctgttctccccgcttatagagcagttggaagagcctctagagaccatattccaagaaggtgcaccaaggatatccaagagggactgtgctgcgctttctcaaggccaggagaatgcaacgctacgaaagcatataaaatgctaatggattgcttgaattggcttgagacagaatgagattgacagctttctagctaaaccattattgcccgctgatttgtatagatttattatgtgatacactgcttgttggattaacaggatattccaggtcagggttcaacctgtttcatgcatttggtgttggcctcagtaccttgcgacagagcatcggtatttgcagtctcacatacagatgaatgagtatcgagatcgtgttgtcctgccaggtgcttcgtgagatgtccgagaaaacagattaacacctgcttgaaagttatggatatgactggcctgaagcttactgttttgaatttgaatcaaattgtgatcgcgattacggctgttgctgctgttaattttcatttgaaattcaggaagtatgagatgtagaacattctgaacgctccatctgctttttcggcatgttggaaggttgtgaagcctcttttacaagagcgaactaaaaagaagatcaaagtcttgtatggccctggaagagatgaatgtactgaaggttatggcattcgcgtcactcccgcactgctaaaagagggaagggtccggttcggggtcggaggtggatggcgtcgcctacgaccctcctttccaccaggagctgtacaactatgtgaagcagcaagctctgaggaaccaggacagcgtcggccccgcgaagcaagggtcgatgcatgtgagggtcgccgacgccggaacctggcaggagggccaagatcatggagacgatccagtcggagctccacagcctcaacggcaggcgacggcatttcccagctcctgcggccggatctcccccgtccggtccacggtgtccttgtttcctgctcatatcgatgatcgtcccggctatgaatcatgaagttcggagtggctcgaccatgcgcgggcggagggcctcgaattgcccggagcaggtaaccgcttattttatcttgatttgacgccgaggaaattattctggggtttctggcagtccttgcttgcattgtaaccgctggctagaaaagctcgactaggatcatatcggtagaggaagcagcagtagtagtaatagtagtagtaaaacaacggattctaataaccgagtgagtctgtatcgtgttgtcgaggatggtagtaattagtttgattaacctggctaatggatgtaccatttgcgttttactgtttccatccatgcttctcatggcagggaaattaccatgctcccagacatgagtagcaccatctctatgtatcgtatcaatcatcagtatatagtatatgtatgtatatgtaatcgccctctgatgttgcaactggtattaccattatgtatttggt

SEQ ID NO: 4312 - DNA, 1012 bp, Triticum aestivum
  Clone ID: TRIAE-23APR03-CLUSTER19701_2
atcatcatacgcccacgctcaccacttgcctcgtactgtcgtactcggtaccctacagcgccgaaagagctgccaagcggctccgtcgtccatggacgtgccgaccgccggtcgagccgccgccgccgcaccgcagcgcagggcctgggagtgggagggccgggtggtgtccccggtgccggcggcgacggcggacgaggcgtgggcgctgctgtcggacttcctggcgttccacaagtggcacccgcgcgtggcggtgtgccgcctggcgtcggcgtcgccctccggcgccgcggcggcgcccgggtgcgtccgctactgcgagggcaccccgcccgccgacgggacgcccgccgactgggcgcacgagacgctcctcgagcacgaccaggcccgccgcttcttccgctacgagatgaacgacaacaacatgggcttcggcgccttcttcgccgcgttccgcgtcgtccccgccgcggccggcggctgcctgctgcggtgggagttcgagtgcgagcccgtgcggggcacgcccaaggaggcgctcgaggcgcggctgcaggccgggctcgacggcatggccgcgcgcgtgcacgagcacctcatgtccgcgcgcgctgccgtcgccgcagccgcgccgtgtggccgcagggctggaggccgccgacgagctcaagctcgacaactccatcgcggcctgagctctgagcagtgagcactcgatgtacgcacacggttccacgtctgcgtgcacgtaccgacgacgcacgtacggttggttgtgatctcgtcccgtttctttctcgcggtactacgtacgttgtccgatgatattttctctttgttctgttctggcccttctgggcctttgtcggtttgccgttatgtatgtgcggctacgtaccgtttactacagtacggtagtgcccttatatatacagctgtaccgggaataaatgtatgatattactcgtaatatatgcaaagtgatcagtgcatgtgcagtcttttt

SEQ ID NO: 4313 - DNA, 2321 bp, Triticum aestivum
  Clone ID: TRIAE-23APR03-CLUSTER19718_1
ggacacgggccattccacgcgcatggcgagccccgcgcgcctcgcggccctcgcacaacggcgcctcggcgcggcacctgaagaaacccaaacagggaggggccagccgcggcgccggcgatggccggcgatgaacggtatacctctgcgggcgcgccgaggcgcaagcacatgctgccgaccctctcggccgaccagtctgaggacgacgaggaggatgacacgatcgaggtagccgacgacgacgacccggggccgccacagcagatgcagcgccaccgccaagttttggacctagaggaggacgaggaggaagaagacgaggcacggaccgacggccctgagcacgacgcgcaccacaagcaggaaagggaggcggaggcggaggctggggaggagggagtggcggtggttgcgggcgagggtgagggccaactgataatgcacgaggaaagtgaagcagaggccgaccatgctgatcttgattacggcgaaattgacccgggaagggtacatcgctcaccagcaagggaactgagggttggggtgatgcaaactgacgcaagagacacggacggtgaagaagatggctgatagcatcaggcggttcccagtagtagaagggaagttgttgcttctgaatctgagggggctgaagataattattatgctggtcaagctcctgaggatgaggaagcaacacaaaggaaaccaagatctaaaccgatggaggaagagagagatcatgaagttgtccgtgatgtgtttggtgatagcgatgaagatgaacctgctccttatcatgccccgcatgaaattgacgaagattccaatcctatggaggatgaattcttttactactgctggtcggtgagcggtaaagagatggcttgcgatgatatacgatatgattcagatgacaaccgcgagccaaaaacaaaatagaagccagttgttccaccgttgaacttggttggtccacgttagcagccaccagggcggccggtcgggttgcacggggtcctggtcgctgacaggccgcccatccttccgtggccttgcccccccttggcttccggccatgatcctgttcacgttacagatgaatctgggaccaagaaaaaaatacgactggaggacaatattgtgcggtggagaactgtcaagaattctgatggcactacatcagttgaaagtaatgcacgctttgtcaaatggaaagatggaaccatgcagctgctgattggtaatgaagttcttgatatatccgtacatgaagcaaatcatgatcagtcccatctgtttctgaggagtgggaagggagttctacaatcacaaggaagacttctacagaaaatgagatttatgccatcttccttgtcttcaaagtcacatcgtttattaaccgctcttgttgattctcagaataggaaaactgttaagatgcaaaagtggtatgatgctaaggatcctgagagagtgaagcaggaaaaagaaagggctgagggccaaagtattagagctcattcaattcttcaacgcaaacgagaaaaggtgaaccacaaatacacacaacctgccaggcaaagaaggcagctttctccagggtttttggaagatgcattagatgaggatgaggagactgacaaccactacagctctcggcgaatggcatctcgtggtcgttttgaggatgacttggaggctgaagcactaggtgaaaggcgtataattaacgcaaagaagtcgaatatgagcagaggtgttcctcgcaaaccatccgtccctccttctcgcccggcgagacgccaggagtactctgagagtgaaagggaggagtcagagtatgaaactgaaggcgaggacattgagcactcgcccaccggtggaagggaagagctggatgaggaggatgaatatgaggaagacccggagcctatgtcagatgaaggaatccaggaaccaaagcggaagagagagtcagcagtgggcgggagccaaaggcgcagggaggtggactcggacgaggattccccgccgaggaaacaggctgcgactgttcatcgccggaagggcgttgtttttgaaagcgacgacgaagacgagtgaaggagaaaatagaaattcgcaaacgtacattcgtctctgctgccaaaagtgttgttgaatattggatgggctatgtgtgaatgttgttcatttagaaacaaaaaaaaagatgttgtcagttgtccgttattcggtgcccaggtgcagatcatgaacagtaaattcaaataaaatagcagataattctattgatgtctacctccttaccattg

SEQ ID NO: 4314 - DNA, 2433 bp, Triticum aestivum
  Clone ID: TRIAE-23APR03-CLUSTER19734_1
ttttttcgcatccttttcattcaaaacaggcagggcagggagaggggaggaggtggaggcgacgagcgaaggaaaaaaaatcaagtgcactcgtcggcggcgcggcgcggcggctgcctcggctgctcgtccgaccgagctcgcttcctcgggtgaccgcgtctcatgtggattcgggagctgaaggcagcacgagtactgccaacggcaacacgacgtgcctcaagaaggcaatcacctgaagctgataatgtcgtcgtgaacttggtctcaacccccccagcgtctggaagccgtcgtggagtatcgacctctaacgctggcgcgcgcacctcacccattgacgtggaagccccataggaggaagagcaggtcgtattaacttgacaagtgcctcatcagaggaggagcctgagacctaggtggaagccagtgacagtagtagacctcgaggtgtatcttaacctagaacaacataatcgcaatctcataacacaaggaacaaacgcccaagagtttcccctgtaataaacatctctccagaaacaggagaagggtccagcttacagtcaaaaaatgcggggaaaactagcaaagagcctgtgaaggtggctccaaaggaacccatcttcacctgcccggtgtgttggaacaagttggacgagcccgccacaacaatgtgcggccacatcttctgatacaaactgcatcaagcaagccatccagtaccagaagaaatgtcctacctgccggaagcacctgaagatgaacaatttccatcgcatttaccttcctaacacctcccgttaagggtcaggagtcctcccagggagaaccatggtggatcttctgcttgggagcattgtgtatcatcatcacctagatgaatgtatggaaatgggtcggtaggtagttcatcgtccatgatgaccggactggataacattctgccttgaaatgggttaaccggataaagatagtggatagccttctgcctgaaatgggtttaacctgataaacagagtggatagccttcttctgcctgaaatgggttttacaaaatttgccgtgtagctttctggatattgtttgctgcaacttataaatgttgaatgtacttaggctaatagccttgtacccttctcttctccatagttggtcgatgtaaggaactacaaataaaaaaaaaaaacagccacctgacaagagaagaagcagcattcaaccatgagaactcgtctatgcagtggacttcgacagtacaccctttgaagtcatttatcaggaaccaggttgacatagcaccaaaattgatcctgtccgtgactacatgaaacacaagctgctgagggtggtttgcatttgacactgtagaattgacaacaactgaagtggccagcacattatccgagaatatacagaaatgatacagattattgtctaccaaccgtgtggaattcctgtgctcctctgaacgactccttagttttgggttctgaagccactcttctgtcagtttcaccgttaaacaatggatattcttgggaagtgattctgcagctaactgaccaaactcggcagtctgaacaactgctgcctttgcacgctcctctagtgcgagggcatggctcttgagtgtcaccattgtggtgctgatatcataatgagagtcctgcgctttgtatattaaccgtgccagacgagttattataggatgggcttcttcctgagtgatggctctcccactaacagccccttgagagagcaatctttgagaattccttatttgggaactaagttcccatgcaagctgaaggttgcggacgtctttcgcaaggataacataggcctttgctagagtcatttggtctgctaattgacgtgcaaaagatgtactgcttaaaagctcttcagtgaaattaaatatctcaggagaaacttcttcagtttctgaccctttatttatgacgggcggccggaactgctccttctggttgtggtgcaggacgaagagcatgagcccaaccacaaggaagatcccaacgagccaccagatccatcccggcagccgccgccgcgactgccgccggtactctggtgcccgcctccgcatctcggaaccccgcatctcgccgccgtgcgcccttccccaaagcctctcgctgcaacaattcaacccaggaactccacacgctgacctcactgccgtcgcgctaaactctcatccatggatagtgccgagaacaaccagaaaggcaccgtctttgcggaggatccgggggtcggatggatcaccccgaacagataagagagccgcgtcgtgaagctctggcactgagagaggcagaaacgccggctggtaggaggttggtgagatctggaaggtctaatgcgacgagagaaaggtaggagggggcgcgctttagagaaagg

SEQ ID NO: 4315 - DNA, 1669 bp, Triticum aestivum
  Clone ID: TRIAE-23APR03-CLUSTER19756_1
aagctagcttgctcatctcatctcattccctcccttgtgccatctgctctgctctctcctatcatctatctagcaactcaattccatttgcatgcctacacacatcttacattcactacctcaacacttaccactccaccctagctaagctatcttcacctccatcacaaatcatcaattgcttcagtttgatcccatcaccatgggcgagcaagtagccaccaaggaggaggccaacaaggaagaatcacctgcacccgccgccgcacctgaagctgcaccggcaccggcaccggcagaggagaagaaggacgaggcagcagccgaccaagacccaaagaaggaggaaccaccagcagccgacccaccgtcccctccgccgccggtgccggtgatcctgggcgtcgaggtgcactgcacgggctgcgccaagcggatcaggcgctccctcctccgctgcaagggcgtcgaggccgtccacgtcgacatgtccgccaaccaggtcaccatcaagggcgccgtcgacccgcaggccctctgcgaccgcctccgcgccaagaccaagcgcgacgccaccctcatctcccctctgccacctcctccgccggccgagggcgaggagcctccgccgccccctcctccggcaccgccgctcgtcagcgaggcccgcacagtggagctgctcgtcaacatgcactgcgaggcctgcgcgcagcagctgcagaccaagatgatgaggatgaagggggtggtcagcgctcagacggacctcgccgccgggaggctcacgctcagtgccaccgtggaggacgagaagattgtggagtacatccaccgacggactgggaagatcgcctccgtcgtgccgccgccgcctccggagccgcccaaggaggaggaaccaccagctcctgctgctgatgctgagccaccaaaggatgaagcaccagccgacggcaagaaagaagaggccggcgacaacaaggcggctgaagacggcaaaggagctgcagaggccggggaggagaagaaggaaggtgccggcgaggaggaccagaagccggggaagcaagaaggtgtggcggtggacggcttcccgccggaggagatgatgaagcggatggtctactggccctacggcggcgcacccggcggcggcatccactacaagctgcatccggccgacgccgaggaggccatgatggccaggaggatggccatgcacgccatgccgccacctatgccgccgccgccgcaccaccaccaccacaacccctacgccatgatgcaccagcagtgggcgcctccaccgccgccgccacctccggggatgccgatgtacaacagctacaactacggcagcagctacatgatggagcggccgccgcagatgttcagcgacgagaaccccaacgcctgcgtcatctcctagtcctagctatctcggatcgatggatggatcaccacatgggccatggcatggatatgagctgagcatgtgagcttggccggattattggaccatcctccatatacatttctatactccgattatgtactgctgcgtaattataagcagtagttattgtactattagcgacgaaattaaaggacattggtcacgcttgtaagatcaaaaaaataaaaaaaaaagcttatcgataccgtc

SEQ ID NO: 4316 - DNA, 2103 bp, Triticum aestivum
  Clone ID: TRIAE-23APR03-CLUSTER197725_1
cattcccgctatgcggctacccgaggtgccgcgcaaatttcagaacctcggcgtccgcttttttttttaggaaaccctaaaccctaagcttaggaaatcctaaaccctagccccctctccccactcccatggcgccgccgtcgcaactggtgctcgcggcctcctccaccgacgccggcgtggccgcgtgggacctccgcacggggtccgaggccatccgccaccgcccctgcgcctcccggccacgtgccgtcgctgccgtcgccggccgcttcctcgccgccgcccaaatcgccgccggcaactccgcccccatccactactaccactgggacaagcctcaggtggctgtgaagagcttccccgccgagccaatccgcgcgctcattgctgacccggaggggaactatctcatcggcggcggtgtgtccggtgacatattcttttgggaggtggctagtggagagctgcttgtccgatggcatgctcactatcgtgatgttaggtgccttgccctctatgacatgttgcttgtctcagcgtccgaggatgggagcatcaaaatttgggatcttctcacgatgcttgatgagcaatcaaggtttgaggcaaagacgccatacctatacaacttcaatcagcacacacttcctgtaactgatattgcttgttttcatggagcaattgctgtgtcatcttcagaggaccgcacatgtaaaatatggagtctatcagagggcaggatgctgagaagtatttcatttcctgctatcattgattctgttgaaatagacccaagaagtcatattttctatgctggtggtagagatggaaagatatatgttactgctatgggtgttgatgcctcctctcagggccgtgatgattcgtctattctcggtattctggatgaccacagcaaggcggtaacgagcttaacatcaagtacagatggccttctactagtctctggttcggaggatggtaatgttcgggtttgggataccagaagtcagcaagtaacccgaaaattcaaaccctcccaaggtccagtaactaatgttctcatagtaacacccaaaagattaaacctgccacctttacaaccattgcggaaagtgtgcgcagcaagtggcgaagttgtaccacgagctgtaattctgcccaaccctgaaaatgatgttcatattgctggaaatctcagctctaaccttctagagcagctcttggatgcacagcagcacggcagctctaggttatttgattctggggtgagcactctcaatggcgtaccaaaccaacagggggcagaatggagaagtaaatacctagagttgcaggatctttttgtgcatgaggttcttggtgatatgtcatcttaatggacatatgataccacaagactggatattatgggctactgtcagttaggaggtttgtggtgaagaactgttcaacacatgatttggtgttcaactagcaaacctgggaaatccatggatgccaaagatgacttccttataacaaggaaactccttacctttcattgcgtccacatgtcaattgacatgtggcagagccatatcagaaatagtaggaaaaactataaacggagcaaagatgggacatcttaaactgtaattcgactgtgtaaacagaaatgaagaaattttcgcttattgtggggtactgcaaaaaaaaaaaaaaaagctatcgaatacgtcaacctcaaggtggggcccggaacccaatccccctatagtgagccgaattagccggttacctggcccgactttttacaacgcctgccctgttaaaccctggggttaaccaattaattgcccttggagaaatttcccctttcccaatttggggtaaaaggaaatagccccaaccgaaccgctttccctaagtttgcaaacccggaatgccaagggaaaattgaaccttttatttttttgtaaatcccccgcaaaatttttgtaaaaccgccctttttttcccaaaagggcaaaagggcgaaaacccctttaacacaaaaaaattcccgcacaggggtctggtcgctcctcccttttgaaaaaaaccccatttaaaaaacgc

SEQ ID NO: 4317 - DNA, 1690 bp, Triticum aestivum
  Clone ID: TRIAE-23APR03-CLUSTER19780_1
ctttggccctgtttccaagcgccattaccctccctaagggaccaaagctggagttcccccgtgggccgggctccgcagctgggtcccccccccccttcccacccgtttctttctctcttttttccctctcttccccatttcaaaacttccagatccacctagggtttgcgcctcctccctccgcccccatcacacaagccgcatcgaggaggacgacgccgacctcggaccgtcggaagcaccatggagaagtacgagaagttggagaaggtcggggagggcacctacggcaaggtgtacaaggcgcaggacaaggcgacgggccaggtggtggcgctcaagaagacccgcctggagatggacgacgaagggatcccgcccaccgcgctccgtgagatctccctcctccgcctcctctccagctccctctacgtcgtccgcctcctcgccgtcgagcaggccaccaagggcgggggcgccggcggtggagggaagcccgtcctctacctcgtcttcgagttccttgacactgacctcaagaagttcgtcgacgcctaccgccgtggacccgcccctaagccgctcccaacgcaggtcgtcaagagctttttgtatcagttatgcaaaggaattgcacactgccatggccatggtgttcttcatcgggatttaaagccccaaaatctcttggttgacaaggagaagatgatactgaaaattgcagatcttgggttaagtagagcttttactgttcctatgaaaagctacacccatgagatcgtgacgctttggtatagagctcctgaagtactgcttggagcaacacattactcaaccagtgttgatatttggtccatcggatgcatctttgccgagatggtcagaaaacaggctcttttccctggtgactctgagttacagcaactgcttcacattttcaagctgttgggaactcctaccgaggaggattggcctggagtaactgctctgagggactggcacgagtttcctcagtggaaagcacaaagattgacgcgtgcagtccctacactggaaccagaaggaattgacctgttatcgaaaatgctccagttcgacccggcgaacaggatctcagccaaagctgcgctagagcatccctatttcaacagcctcgacaagtctcagttctagctgttctagctaccgtgtgatttttctcaacttggtgtgtgtgctctgctcgccaacttgttccgccatgagatcgatgctgaaaacgcacgaaaccatgtttcatctacctacaatcagcaacggcgtgttgctggtagttggctcccatgagcgcccgtctcctagacctccagcacttgatttgccttgagaattattgactgaagatacttgttcagatcatgtaggagttttatttgctctgtacggaattgtttgatgagatgggtttgcggacaatagacatttgtgtagcataataaggtagtactggtatttgttaagaaaatgttgcttcatgacaagtgaagttatttggagctgcgaagtggtgagaggcgtgtgtccgtggaaggagctaatagttagcatttgatgtggacatttgaaaaaaaaaaaaaaaaaagctccgccaccccgtcgggggcgggcacatttccctaagggggcctatccggcgcccgggccgctttta

SEQ ID NO: 4318 - DNA, 1640 bp, Triticum aestivum
  Clone ID: TRIAE-23APR03-CLUSTER198003_1
aaaaatcgaaaacgaaacccaaacccaaatcgcttccgttacgaaattcccccaaatctatcccccgtcggatcgatcgccgccgccgccatgtcgtcgtcggcgccgctcccgctgcagcgctacttctgccaccagtgcgaccgcgccgtcgccatcgccgcgccggcctcccgcgacgacgaggtcttctgcccgctctgcgccggggggttcgtcgaggagctcctcgacgacgaggaccccccaaaccctagcccccaaatccaccccttcttccccctcgccagcttcctcgacctccgcaaccccagcgacctcgccggggtcctcggcccgccctccccctctgcgccccgcgccgcctccgcctccgccaacaaccagttcgacgtcaccgacttcctccacggccacctcggcggcctcctctccggcggcgccaccatccagatcgtcctcgagggttcctccttccccggcggcttcgcctccttcggcgccgggggccccgtccccggcggggtcagcctcggcgactacttcatgggatccggcctcgagcagctcatccagcagctcgccgagaacgaccccagccgctacggcaccccgccagccgccaaggccgccgtcgccgccctgcccgatgtcgccgtctctgctgacatgatggccgccgacgggggcgcccagtgcgccgtctgtatggacgacttccttctcggcgccgccgccaagcagctcccctgcaagcacgtctttcacaaggactgcatcctgccgtggctcaacctccacagctcctgccctgtctgccgccatgagatgcccactgatgaccctgactatgagaaccaccagcgccaggctgctgcccctgctgctgctgcggcagcgcctgcgtcccctggtggcggcccttcgcctagggtcatggagaggaggttcaggatctccctgccgtggcctctcagggccgcttttggcgcgcagcaggcggagagcagcgaccaggatgctgctggctctggtgactacaacgacgatccgaatgcgagcggtcgctcgtatgatgatcttgactgaagcgcctgcaaggaagagggcaacaggggggataaggaggggcaaacggactggctggaagaaggaagggagtctgaatgcgaggaagagaagacaagaagaaggaagacttatgttgttgttgttgatccaaattgaattggaagcttttttggtgatgaagagtggcgccgtccgtctattgatctccgttgcctcctctcccctcccctcccctctttgcctgtcatggttgtagaaagagagagagaaaagtagagatgatattcttttgttgcctggtctggtctggtctggtctggttggtgggttgacttgactgaatatataccttcttgtgggaaggaagaagctccctccttcctaacttgtctgtgttatcatagtacaattgtctgtctgtgtcgattggtcggtcttcctttctctcttgtggggttggaagaaagtaagaaagggaactctagcgatccgatccgaccctcttatatatacataatgtgttatacatgagaaaaaaaaaaaaaaaaaaaaaaaaaaaaaaaaacaaa

SEQ ID NO: 4319 - DNA, 939 bp, Triticum aestivum
  Clone ID: TRIAE-23APR03-CLUSTER19802_1
atcccccgccctcgccaccactcccaacacagctcaatcccaccggagagacaggcagaagcagctgcggcggcggagatgtcgggccgcggcaagggcggcaaggggctggggaagggcggcgccaagcgccaccggaaggtgctccgcgacaacattcagggcatcacgaagccggcgatccggcggctggcgcggcggggcggcgtgaagcgcatctcggggctcatctacgaggagacccgcggcgtgctcaagatcttcctcgagaacgtcatccgcgacgccgtcacctacaccgagcacgcccgccgcaagaccgtcaccgccatggacgtcgtctacgcgctcaagcgccagggccgcaccctctacggcttcggcggctaggccaccaacgccgggctgctccagccagcaacgagataaattatttctataaggctagtagtatttgtctatggttcgtggtctcttcggtgttgtttgctctgctctgttcctgcttgatgttggaatcgatgtacgatgtaccaagtctcaatgcaaatcgaatttggaagtatctaggggctcatctacgaggagacccgcggcgtgctcaagatcttcctcgagaacgtcatccgcgacgccgtcacctacaccgagcacgcccgccgcaagaccgtcaccgccatggacgtcgtctacgcgctcaagcgccagggccgaaccctctacggcttcggcggctaggccaccgacgccgggatcttcaagcaagcaaagagattagcagtatttgtctagggtacgtggtctcttcggtgttgtttgctctgctctgttcctgcttgatgtatcgggaccgatgtactagtaccaagactgaatgaaatggaatttggaaaaaaaaaaaaaaaaaaaaaaaaaaaaaagaaaaaaaaaaaaaaaaaa

SEQ ID NO: 4320 - DNA, 830 bp, Triticum aestivum
  Clone ID: TRIAE-23APR03-CLUSTER19834_1
atcaaccgatctcatctagcacttggctacactctcacaatggctgccattaagcttgtgtcacttagcttggttgtgctactgagcattgggttagccagcgccactagggtagttagatacgccagctcaacggggacaggctcgggagtggggaatggtggtggcactgtgaacggcagcggtggagggactgggagtggcaatgggaatgcctacagtggtagtagtggagcccatgcaaatgcgggagggggcggtagcgggggtggtgcgtcgcaggatggtggcaccggacatggcgctgggtccggcgacggctcaagctctagctatacgagcgacggaagatatagttatggtggtgattcttatgcaggcggtaatggtgccggcagcggcggcggacaggcagcgggccctggttccagcggttacggagccggtggtggtgctggttctggctctagcgcggcaagtggtggctggtacccatatgcgaatgcgaatgctaatggtaacggtggaggcataggaactggtcagaacggcggcagcggtggcggcacgggaggtggcagcggtaatgctggtgcatacccttaagttatctctatttatgtgatagatctgaagatggagcccagaatttcatgttttttctttctttctgtttgcaccttgtggccccgttagtttgcggcgtttaagttcttgtatgctttttcatgtatactagtatggatgaatcaataaagggccccatcaacttgtgttagaaaaaaaaaaaaagaggagcttgatgacacgaggcctaagcttggcactag

SEQ ID NO: 4321 - DNA, 1055 bp, Triticum aestivum
  Clone ID: TRIAE-23APR03-CLUSTER19836_1
gccggcgacgccttcccctcgcctccggctccccgcgctccggccggcccccccgctccccgccctccctctctttccccccccgctctcctccccctctccgcctccccctccccgtgcccccgcgcgcagaggtcccccggtcggtgctggagcactgccgatgtgtataccgagcttgatgccgagggaaagatgctagctgatgtgccatcggtttcaccagccacagggtttgtagattgccagatctgatctgacctgattcagcaaagaattccgagctatcaaagctgcttcaacccgaagctctagcactgcgctatcttccactttaagaagactcgatcgatcgtcacggaaagagcagagagaagtatcaaaaattccatggtagcacctcatgttcttgagcgcaagaaatgagtcttcggagtcggaggacatccaagaactgatcaacagtagcctcaagtgcaacgcatccacgccagccgacgacatggagagcggcagaggcggagcaggagccgccggaagcacgtcgtcgtcgccatcgccgccggtggtcctgccgtccgaacagaaagcacggtacagcagggaggaggaccccggtcgttgcagctgcagcgatagcttcttcggcaagtacttctcgttcctcctgctcatgttcgtcaccgcgtcgctggtgattctcccgctcgtcctgccaccgctgcctccgccgccgtcgatgctgatgctggtgccagtggcaatgctgctgatgctcctggtgctggcgttcatgccgacgtcaggtggccggggtgcgacgggcccgactgcctacctgtagataactagtacgtccttttcttgtttgttctgttggattttgtgatagggtagtcatggaatcaagttttatgcccatcaattgaaagtaccctgctgcttttctcggcataccaaaagaaaaataaaaaaaaaaaaagcctttggtcagaacagcgccgtgactaatttgcgccttctttattaactatgcttgctatattaacacgaaa

SEQ ID NO: 4322 - DNA, 1255 bp, Triticum aestivum
  Clone ID: TRIAE-23APR03-CLUSTER19860_1
cgccccccagcttcgaaactcatctacccaccaatggcgctcgtatgcagtcggccagcctccctcctactcatcgcggctcttctctccgccgcaaccttccttgccgtcccgaacaagaaaactcatctacccaccaatggcgcccggacgcggtcgggcagcctccctcctactcctcgcgggtctcctcgcgaccgcaacccctacacccatcgccatcactctccttcctcgacgtcttcggccgcggcaactaccacctcgacctgtctaggccgcgacgctctccgccgtgccgcgccgacctcaagcactgccatctccaagaacttcctcgtcgtcctcttcggtcgcgggacctaccacatcgacctgtccgggcacgacgtctccgccgtcggcgccgacatcaagcactgccatgtccaagaacatcctcgtcttcctctccatcgggggcttcggcaaccagtactccctgcccaccgcccagtccgcggcaggacgtcgccgactacatctggaacgcctacatgctcggcacccgcaagggcgtctaccgcccgttcggcgacgccttcgtcgatggcatcgacttcttcatcgagaacggcgcgccggccaactacgacgagctggccaagcggctctggaacttcaacaaggacttccgcggcaggacgccggtgcagctgacggccacgccgcggtgcggctacccggaccggcacgtggagtgggcgctcgccacggggctcgtcggacgcatcttcgtcaggttctacgacgacgccgactgcgccgccaactggcagcgacagtgggacaagtggacggcggcgtacccgtcggcgcagatctacctcgggctgccggcgtcggagcagaaggtcggttacgttcacccaaagaacctctactacagcgtcatacaggtggcgcagaaggcggccaactacggcggcgtcatggtgtgggaacgctacgaggacaagcggaccaactatagcagctacgctatccaatgggcttgagcctccgtcgctcacatcgtcaccgtgtgtgaatttggtgtatccgtctgtgtactgcatactcctctgcatgtgtttgcttaccttacggtaaataagtatcaccagtgtgcagttgtgtgctttatacaataataaagtgagacctctgtgaaggtttggattaattgatggatttccgtgtttgttatctgctcgatctcgaaaaaaaaaaaaaa

SEQ ID NO: 4323 - DNA, 1036 bp, Triticum aestivum
  unsure (1)..(1036): unsure at all n locations
  Clone ID: TRIAE-23APR03-CLUSTER19867_1
gcccccttgttggaattcctccccctttcttgcctgtcaattccctagcaacccaaatcctcgatccaaatcgccacagatccgtccagcaggaggtgggaagggggaagatggaccatcaccacccgccgccgctcccgcagcagcacggcgaccactaccggccgctggtgctctccccgcagcccgaccatgcccacgcccttcagtaccagcagccgcagcagcaagcgacgccgccgccgcagcaccaccacccctcgctcgcgtcccatttccacctcctccacttggtgacaagattaggtgatgcgattgcaacaggcacaagggatcaagcttttgatgcattggttgaagaattgaccagtcaatttgccaggagccagcagttattgaactccatttcaggaacactaagctcgaaatctgttacggttgaaggacaaatgcaaagtttggaagaaacccgtcagctgcttgatcaaagaaaggatttgatcgcaaaatacaaaagctcggtggaagacctcctcaagggggatccaacaagataaaaaggctctgacagtcggaccctcagaacattagttatgatgtactagctcgttaccaccaccgcctgaaataaattcctgatcgacacgtcttatcatgtaaacatgcttggagtagtctgtggagtaagggacatgggatttttaagtggtggttacaaagctgcatttgtgtgttgggtgcgtgtattttgagttttatgaagtcatggttgagtccccgtaaaatggaccaagcatatatgcatgaatgccccgaattcttcggcctgatcggttggatattatgcactgaacttgcttgatgtctatcggcatagagataatgtgataatccgggggcaaaaaaaaaaaaaaaaaaaaaaaaaaaaaaacgcaaaaaaaaaaaannaaaaaaaaannaaaaaaannaaaaaaaaannaaaagggcnngngccgncttctagnaggnatnccaagnncttacgtacgggncgtgc

SEQ ID NO: 4324 - DNA, 1526 bp, Triticum aestivum
  Clone ID: TRIAE-23APR03-CLUSTER19884_1
aaaagcaccctgatttgtgagcaggaaatcgaagtagtccagctcggagcataggcgaataagcagagcaagcaatcatcaatggagaaaggcacgcctgcgataggttgggccgcgagggacgactcgggtctcctctccccttacagcttctcgcgaagggttccgaaggacgacgatgtgacgatcaaggtgctcttctgcgggatctgccacaccgacctccacatcgccaagaacgagtggggcaacgccctctaccccatcgttccagggcatgagatcgttggcatcgtcaccgacgtcggccctggcgtcaagagcttcaaggccggggcacacggtgggccgtgggctacttcctcgactcctgccgctcctgcgacacctgcagcaaggggtacgagaactactgccccacactgcgtgctcacctccgacccgcctgccactacgacggggccggccgcgctggtggcgtggccctcctacgtgctcctcgtccaagccaggtgagctgccgccgcgggcccgagaaccagtgccccacgctcgcgctcacgtcgaccgccgcggccttcgccgggtccaccacgcagggcggcttctccgacgtcctcctcgtcgatcagcgctacgtcctccgcgtcccggagggcttgccccctgggcggagcggcgccggctgctctgcgccggcgtcacggtgtacagcacccatgatggagttcgggcctcaacggcgccggggtcaagcacctcggcgtggtcggcctcgggggcctcggccagcatggcgcgtcaagttcggcaaggcgttccggggcgtgccccgtcaccagtgatcgagctcgtcgccggaggaagcgcgaggggggccgtcgagcggctcggcggcgacgtcgttcttgctcagccaggactccgagcaagtgaaggcgcgcggccggcacgatggacggggatcattgacacggtgtcgggggggcaccggctcgtgccgctgctggagctgctaaagccgaggggggcaggtggtgatggtgggcgcgcacagcgcgccgctggggcttgcggcctacgccatcatgggccgcggcaagctcgtcgccgggaaccgcgtgggcaaggctggccagctgccacgcgatgccggacttcgcagggaagccacggcatcaccgccggcgtcgcggggcgtcaagatggactacgtcaatgcggtggttttagcgactggagaggaacgacgtgagataccgcttcgtcatcgacgtcgccggcagccagttgggcgtcgccgcttagtgcttccgaacacaccatacgcgtgatcgtcctctttggttacctaccagcttccagccacgtgaagtcgtgatttgttgttttattctcacaaatgggttggtgcgtgcaattgcttttgaaataataggtgccatctttagagcaaaaaaaaaaaaaaaaaagcttatcgataccgtcgatctttagagcatcttctattgcaaatttagagatgt

SEQ ID NO: 4325 - DNA, 1727 bp, Triticum aestivum
  Clone ID: TRIAE-23APR03-CLUSTER19896_1
ctccgcaggagcttcgcttctggtttttctgaggaatgatggaggtgagggcgtcgctcgtgccgctgggtccgctggccgcccggcagccgcgccctccgcccagcagcccgcccacgccgcagtcctccggccccgtgcccaacatgcgcatgacctacggcgaggacggcaacgcctacttccttaagccgggctcagctccgccgccggcggagctgggtaggagctttggcttctgcttttttttgaggaatgatggaggtgagggcgtcgcaggagcagcagagagggatggccgggagggagccgttcggactgcccaacagcccgcccacgccgcccgcccccggacccgcgcccaccacgcccatcacctcccgcgcggtcggccccgcccccttccccgagccgccctcagctccgccgccggcggaggcgtaccagccagggggaggcgctggcctccccgcgccggccggccccctagcggttccggcggagggtatcttgctgccgggttgctcccagggcttcaccaacaaggccgccaagaagcgcggccgcgcaatgaagtacggcgacgacggctccacgtccctggcattggtgcccgtgcccatgcccgaggagcctactgcagtggcgcccggtgattccggggctttctcggcgccggccgtcaaaccggcggcgggcggcgtgctggcggtgccgccggtggggatgaagaagcggggtcgcccaaagggctccaccaacaaggtgaagaagcaagacaaggtcatgtctgcgcttgctttcatcgggactgcaggagctggctttactccacatgtaattgctgttcaagctggagaggatgtggctgcaaagatcctgtcatttgcgcagcatggagttcgtgcagttgttgttctttcagcaaatggcgccatttcaaacgtgacccttaggcaatctgccacttcaggtgggacggtcacatacgagggccgattttgctgccgctcactatctggctccttcgccatggaggacactgccgggcttcgtagccgcgccggtgggctgaccgctgctctcgccagttccgatcaccgcgcggatggcccaggacatgctggactcctggggcacgctaagcgagtcctccggcagccccatgaaccagggagtcccggcggcggccacccccagcaacagcggcctgtccagcatgatgtggcagcttaggtctgcatgccattgtcgtcaagtgaccagcttgacgcgagaactctgaagcaggaagaagaagcaaaaaaaacctgaactagatgtcacagtcggtcttagccgaggggcacgctcagcgactcctccgggagcccgatgaaccagggagtgccggccgcggccactcccagcaacagcggcctgtccagcatgccctggaagtgagctcagtgtctgtctgcatgccatcgtcgtcagtgaccagcttgacgtagaatcctgaagcagaagagagggaaaaaaaaacctgaactagatgttaccgttgccttagcgtaatttcgtggtcgagactgtttgtttaggcgttgaactgtttaatgtgtcgtcgtgggttgttgttagcccggatgtcgtggattaatgtgtcggattatcgtcgtgtcgtcgtcgagtttaaccggtggttatgataaatttatgaacctttgataaaaaaaaaaaaaaaa

SEQ ID NO: 4326 - DNA, 691 bp, Triticum aestivum
  Clone ID: TRIAE-23APR03-CLUSTER198_63
ctcagaatgcaatgtactaccatgtcaatccaattgcaaatatagtgtcaaaaattcatagttttactctgaacttgaagtgcaatgtgctacattcgtatccaattgccacaggctacaaacttggcataatatggaaatacggggcaaagcgttgagataaatagaatttcaccaacatgcaaaatctatttcttcttgtccgcggcaccaccaccaccagacctcatcttcctgaggacacttgacatctcctccctcttcttctttgctctcttgtgagtaccaagcttcctcttggcgaccttgagtgcacgcttgtcctttccaaccttaagaagctcagtgatacgcttctcatagggagcaaatccagcaacctccctaatcaagttcctgacaaacagcaccctcttggtacctttccccttgcggtcggacgggcgtggcggcagctcgcgcttggtgacgacgtggcccttgttgatgcccacgaagagccctgacttgggctgcgacggcgccatggcccgcctcctgctaacctgagacggacgcgatggcacaagaacaaaccggaataatcaaacaggagcccgtgtgaggtgaagggcggtctgaatcgaggttcgtggaggaggcggcgcttaccttgagaatggatgcgagttaaaaccctaagccgccgcac

SEQ ID NO: 4327 - DNA, 2388 bp, Triticum aestivum
  unsure (1)..(2388): unsure at all n locations
  Clone ID: TRIAE-23APR03-CLUSTER198_77
catgaaagggatcatattcaatttgatcacttagacataagacactaaccatcactagaactcaaaattctgggtactgaactgaaaatcattatccatgtatcaggtgagcacatgactacaatctccgtacattagtcctcagccgacaccgtgcattacaaacacatcaatgtttgacttccgctagctgcttcctctgttctacacaaacatttggaccggcaccagtaccacgtcactcttgagctgcatcgcctccctcctccagcgcctctttctccttttgctgctccaatgcaatctccgccagagctttctgagtgcgcttctccagcttgtcgatcctcttctgcacatctcgtttcaggtcccagttcgggttcttcggagcgatgttcccgaaggggttctcgagctgctttggctcagcggcatcagcagcgatcggatcttcaaacttgggaagagacagcggggccaccttgccacctcggagacgctcatcatgaggaaggtagtttctgaacttcagtggtacctccccattgtcttcaacctcatcagattccttagtggggctaacgttctccttggaagcatcctcgggtgcatccacaggacctggcaattctggttggtccgcctgttcttctgtcgtcccatggtcaccattcctaatgcagtgctggtccgcgtcgggggcggcggcgggcgcgggggaggcgccgtcgggggcggagaggagctccttggcggcgcggagggctttgaggcgctgatttgcctttgcaaaacgccccttgatcctcaacctgctgtctgcacgagctttgcgggactcatatcgcacctgtttgtcgaatcttcttgtcctcctcttttctttatagcgggaaatgacaatgtcgcggtcagggccagcaacaacatcaaagccacttcttttggggaaagcttgcattggcatgccagtaccaggatttgcctgctggccatcgtccatcatgctaccattgctcatgctggggcaaagttctgacatctgaacaaacgatgacaagcatgcttcagctgagcttgctggagcctgctcttgttcgtgctcggtcttgcaggcaccatttagggcatgataatcgttattgttccatccgccgttctcataactaggggttggcatggttgcaacctcatggctgttatctgtgccgaaatcgccatttccagtggtgtgctgtgactctgtcctggaaggcaacagatgagcagcttgctctgcctcctcacgaggtgttatctgaccgccgcccatgtcgacctcggcgagctcacgtaactgccgtatgacctcatcgttggtctttccatcgggtgagttgtggatcttgggcgaggacggcgtgacgaggggctggaagccatggctagaagtggtgggcacgatgagatcctccaggctgaacacctggggctcctcccaaatggcccaccaacagtcgtcggctttgccggccgagggcttgtcgaagtcggggaccccgagaagagcggcgaggtcgtgcgcggagggtcgtcccgtgtacccctggactgtgcagcggtcgtgcagcggcagctcggcgtcccggctcctcccgaagtcgcagttggagcagaggaattcgggaccggcgtggcggaagacggccccggttgcgcggcatgcggcgcagagcggggcgcgcaggtggcgggagcagaccgcgttggcggcgtgcacgtggcggtcgcacggcaggcagagcctggcgctgtcggcccggcagtacaccaccgcctgtgggccgctgcagtggtcgcaggctaccgcgtcggcagagagctccttctccatgtccggcagctctggatgctggcgctcgtcttgacccatgtgatggactactggaatggtcaccggcggaaaagagcttggtaggcgctgccacctacaaggagaaggagaagaagaggtagaagaagaagaagaagaagaagaagaagaagagataatgcgtgcatatacggcttgcttgcttgcggaaaaagaagaagaagaagaaggtgggagaagaagcacgagaagcggagtaanccgcgaaagggatggttcgaaagcgagnaggctgcntttgcctngtcantcactngngtagctcagtccgatatttctgtcatgcctgnatgactgtgtgctgtgaggccggcnacgtggcgggctccnccgtgcgtgaggctgnccgcgggccaggtgttggagcggcagtctcgtcgcgtcgacacggacaaaaacggcttctccatggttcgatcgactgtgggagtgggagagaacgaaggaaaggaaagnaaagggaaatgggaagg

SEQ ID NO: 4328 - DNA, 1846 bp, Triticum aestivum
  unsure (1)..(1846): unsure at all n locations
  Clone ID: TRIAE-23APR03-CLUSTER198_78
ctctatatctccttctccctttcaggttggccagattttggagaaggcgaatccggttggggcctttttgggtatttgccccaatcggcgaaaggggggatttccttccaaaagggatttaggttggggaacccccaggggttctcccagtcccgggcggtttaaaagcggcgggcccgtgaaaccggggttaatataggcgtccccattgggggggaattgggttgccggggccccccccttggagggtgggacgggatggaataagcctttatttttttttttttttgtgagacaaaattcactaaaccatgcaaaaatggcatactgtcactctcacttgcctgtagtacttttacagagttcatagatggaaactatatacaagggttggactaagaacaactcccctcaaaacattaatatagcccatatgttggcaacatacattattcagattgtacatgaactaccatctgccgaactgaaggcaaacaaaatgttcacgccttatgtatcatctgcactcactcctaattagtgttattccttctgtccaagatgcaaaatatactgcaaagtcaaggcttaactctgatttgcctttgcaaaacgccccttgatcctcaacctgctgtctgcacgagctttgcgggactcatatcgcacctgtttgtcgaatcttcttgtcctcctcttttctttatagcgggaaatgacaatgtcgcggtcagggccagcaacaacatcaaagccacttcttttggggaaagcttgcattggcatgccagtaccaggatttgcctgctggccatcgtccatcatgctaccattgctcatgctggggcaaagttctgacatctgaacaaacgatgacaagcatgcttcagctgagcttgctggagcctgctcttggtcgtgctcggtcttgcaggcaccatttagggcatgataatcgttattggtccatccgccgttctcataaactaggggtggcatgggntgcacctcatggctgttatctgtgccgaaaatcgcatttccaggggnngtgctgtgactctgtcctggaaggcacagatgagcagcttgctctgccctctcacgagtggtatctgaccgccgcccatgtcgacctcggcgagctcacgtaactgccgtatgacctcatcgttggtctttcccatcgggtgagttgtggatcttgggcgaggacggcgtgacgaggggcctgggagcccatgggctagaagtggtgggcacgatgagatcctccaggctgaacacctggggctcctcccagatggcccaccaacagtcgtcggctttgccggccgagggcttgtcgaagtcggggaccccgagaagagcggcgaggtcgtgcgccgagggtcgtcccgtgtacccctggactgtgcagcggtcgtgcagcggcagctcggcgtcccggctcctcccgaagtcgcagttggagcagaggaattcggtaccagcgtggcggaagacggccccggttgcgcggcatgcggcgcagagcagggcgcgcaggtggcgggagcagaccgcgttggcggcgtgcacgaggcggtcgcacggcaggcagagcctggcgctgtcggcccggcagtacacgaccgcctgtgggccgctgcagtagtcgcaggctagcgcgtcggcagagagctccttctccatggccggcggctctggatgctggcgctcgtcttgatccatgtgatggacgactggaatggtcaccgatggaaaagagcttggtaggcgctgctacctacaagaagaagaagagataatgcgtgtatatatggcttgcttgcggaaaaagaag

SEQ ID NO: 4329 - DNA, 1018 bp, Triticum aestivum
  Clone ID: TRIAE-23APR03-CLUSTER19927_2
accacacacacacacaccacaaggcattccactttgtaagctcatttgattccaggaagctcttcagtctagagcagccagccagccaccatggcacggcgctttctggctgtgttcgccgtcgccctggcgctctcgcagtccgcctcggccaagtcctggctggacaagaggttcaacactgacggcaccgtccgcacgggatacgacgcttctggacaggaggtggtgatgctcaatctcaaccagcaatccggcgccgccggcttcaactccaaggagcagtacctctacggtgagttcagcatccagatgaagctcatcaccggaaactccgccggcaccgtcgcctgcatctacctttcttctggtgacgacgagtggcgcgacgagatcgacatggagttcatgggcaactcgagcggccacccggtggtgctcaacaccaacgtgtgggccaacggcgacggcaagaaggagcaccagttcgacctctggttcgaccccgccgccgactaccacacctacaccatcatttggaacccggagaacatcctcttcaaggtggacaacctcttcatccggtccttcaagcgcttcgctggcctcccctcccctagctccaagcccatgaggctgcacgccacgctctgggacggcagctactgggccaccgagaagggcaagatcccgatcaactggtccaacgcgccttttgtcgtctcctaccgcaacttctacgccaacacctgcgtcagcggtggcgcgtgccatgccggcagcgacaggtggatgaagaagcagctcgacgccgccgagtggggcaccgtcaagtgggcggagcgcagttacatgcgctataactactgcgacgatgggtacaggttcccgcaggggatgcccggcgagtgcagccgctactgagcccagcctgactgcccgggcatccagtgttgatattgatattttttttcttggaatctctttgtgaatttgtgattaaaaagcagccctacag

SEQ ID NO: 4330 - DNA, 1270 bp, Triticum aestivum
  unsure (1)..(1270): unsure at all n locations
  Clone ID: TRIAE-23APR03-CLUSTER19928_1
cgccatgaggtcgctcctcctctccgccccctccgcctcccccacctccttcctgccccgctccaccgccctccgcccgctcctctcgctccctttccggccggatctttcccgccccaggcccctcggccccccggccaggtcgctctctaagaaggcggcgatgacggcggcggcggccaaggctcgggtagacggccgtggttcggcgatggaggcccgggaagcgcagtccggcgagattcatgtcatcgtcggccccatgttcgctggcaagaccaccgctcttctccgccgggtccaggccgaggccggcaccggcaggactgtggcactcataaagtctgacaaagacaatcgatatggattggattctgttgtgacccatgatggcacaaagatggcatgctgggctctaccagagctttcaactttccaagataaattagggagagaggcttatgataaggtagatgtcataggtatcgatgaagcccagttcttcgatgatcttcatgatttttgcagcaaagctgctgatcatgatggaaaaatcgttgtggttgcagggctagatggtgattacaaaaggaacaagtttggctcagtgctggacatcattcccctggccaactcggtcaccaagctaacagcacggtgtgagttgtgcgatcgccgggcgtccttcacattgaggaagacacaggaaaccaggaccgaactcattggtggagccgatgtgtatatgcctgtgtgcaggcagcactacctggacgggcagattgtcatcgaggccacaaggattgtcatggatattgaaagatccacggaagtagctcgctgctagttaggggtgtgtgccttacccagaatatccctctcttcagtgcgttattcatccaacagcgtgttgagatgtgctaccagtgtgtacctgttattgatcatctgtggcagcatgccagcctgagtttcaaattatgaggcaatgccatattaccataggagaacttaattaagttgctatttgagcagattgtaaatatttaccagttgggaatgttggtgcaaacagcttttntttttagaatacccacctgttgagatacaatgggggcgtaagacagattttggctgggaagcgaatccttagtaatatgcttttgtaggttacaaacaatggttggcatgaaattgtttgtttctgtatgaggtagaatgagaaactgaagaggtaacaaatggttatgtatcaaaaaaaaaaaaaaaa

SEQ ID NO: 4331 - DNA, 859 bp, Triticum aestivum
  Clone ID: TRIAE-23APR03-CLUSTER19940_3
acaaacacacggcctgatctgcgtaagcaagcagcatctagctagcttaaagcatccccaacccaagaaaaagtctcttgctttcactagcaaaccaagaggaagaaacgtccatcaatggcggcgagagcaagaacggtggccgccatgtccagcaacagcagcatcctcctggccgcggcggtggcactggcactgctggtgtcgtcggcgtcggcgcagtccggttgcacggcggcgctggtcggcctatacccgtgcatgaactacatcagcggcaacgacacggcgccgaccaagtcctgctgctcgcagctcggctccgtcgtgcagtcccagccgcagtgcctctgcagcgcacttggcggcgactcgtcgtcgctcggtggcatgaccatcaacaagacgcgcgcgctcgagcttcccaaggcgtgcaacgtgcagaccccgccggcgagcaagtgcaacggcggtggcactgctcctggcgccgccacgccgaccacgcccgaggtgcagacaccggcagggtctggatccaagacgaccccgtcggcgtacctgcaggagaacggcggctcgtcactccagggcccggctgggctggtgctcgccctcgcggctgctgcggtctacgccgtgtcctctctgtgagcgtctggggcgctagctggatggtagttccaaaatgtatttctttcccggtattatttggtttagcattgggcattggtgattggtgaggaccgagaggattatattgtagggtgttctgttccacatatgtattattattattggttgtcttctttgagtctccgtatatgatcaacaacggtaatcatcgatttttttcaag

SEQ ID NO: 4332 - DNA, 1019 bp, Triticum aestivum
  Clone ID: TRIAE-23APR03-CLUSTER19990_1
cttctgctttgcttccggtaacgaaccctagcccactcaccgcggcgcgactcacagggcagccgatctcgcgctccggtcggcggcggcggcggcggcgagatggtggtggtggggggcggcagcgggaatgcgtgggcgaaggagatgaccctccgccggaggatggccagcatattcaacaagacgcgggagcacttcccgtcgctgaaagactacaacgattacctggaggaggtggaggatatgagaatcgacgtcgaggcgatcgaggctaggattgccaggtatcagcaggaaaatgctgagcagatatacttgtcgcgagctaaaagggctgaagatcttgccgcggcgcttaaagcaagcagaatggtcactgtgaaggctggcccgagtgatacggctgctggaacctcccaaggtattagtggtggagcaggagttcaaggccagtatgcacctgccgccgttcctggtgggttgaatcagcctcgtccgactggtaacgccccgcagccaatcggtggttcatccgatcctctacatggatatgatgaggagaccatgcgactacgtgcggagagaggagctcgggcaggtggttggactgctgagttgggcaggcgaagagcactggaggaggcatttaacagcatattcgtataaaggttagatcaggcgcagcaactgtcccagaggatgcatggttaacttattacgacccttataccacagcgcgtacttgtccagctataacctgttggttgtggcctacattttggacatcaagcagaagggattgaagtgtctgatcagcatcaagcggcccagtggtcgtccctttttgcgagtcgagaagttgcatattgatgtacctatgatcatgccaatgactgaaacttttgtcattgcccctctgtaatggcatgatttttgttgttcgtcaaacttcggctccttttgaaatataatatgagtgctatcagtatcacttttttttaaaaaaaaaaaaaaaa

SEQ ID NO: 4333 - DNA, 844 bp, Triticum aestivum
  Clone ID: TRIAE-23APR03-CLUSTER199948_1
ccctccccgactccgcccccccaccccacctcccgccggccgcctccacgaccccccgcccccaccccacatccagtcgccgacaccatgacccgccgccgccgccgccgccgcgcccgccccgcctcgcccccggcggcgctggaagacgacgacctcctacggaagattttcctcctcctcccacctcatccctccacccttccccgcctctccgtcgtctgcaagcagtggcgcgacgtcgtcaccgacccccacttcctccgcggcttccgcgaccaacaccggaaacctcccctcctcggcctcagaacactccagaccacatctcgcacgagcgcttcttccctcgagacatccgcagcatgaacataaacgactgccgccatgggcgcgtcgtcttcttcgcccaacggctgggcgaggtcgtgctgtttgaccccgccacgggaggccgccgttgtgtggtcgttccaccagtgtttaccggaaaggagattggcgtcttcaacgccgccgtgatttgcgtttcctgtgatgaaggccacgtgcacggcgattgccacgccagtccatttcagcctttcaggtggtcttgatgggcatcagtgatgactataaacaagctttcgcctctgtctactcatcggagtctggcatatggggcgatatcatctccatagagaatcgtgagatgtataatttgaggcaacccagtacacttattggaaatgccctttactggttgtttcctggagatgatggggaaggcatactggagtttgatttgggtaggcagagcctagccaatataaagatgccgcacggtctggagtactatagg

SEQ ID NO: 4334 - DNA, 1788 bp, Triticum aestivum
  Clone ID: TRIAE-23APR03-CLUSTER200015_1
acgtatcggtcccgccccgtcttcgcacccatctgcagcagccagctcagtatcgggcaagaagagaagacattttttttcttcccccgcggggagatcgatccccacatcgtatcagtcccagctatcgcacacacctgcaacggccagctcaggagcgggcaagaagagaagacatttattttcttccctcgcgggagatcgatcacagccgggcagccatgggcgaggaggccccggccgcggtcaccgcggcggcgacgtcgccggcgccccacttgctcctcatatgcttcccggggcagggccacgtcaaccccatgctccgcctcgccaagcgcttcgcggccaagggcctcctggtcaccttctcctcgacctcctacgttggaggcaagatcacggcctcctccggggtggaggctggcggcgacggcgtgccgctcggccgcggccgcatccggttcgagttcttggacgacgatttcgacgggaatgacctcgacgacctgatgaggcacctggagacgactggccccgtggtgttcgcggagctgctgaggcgccaggaggaggcggggcggcctgtgacgtgcgtcgtcgggaacccgttcctcccgtgggcgatcgacgtcgcccacgacgccggcatccccacggcagtgctgtgggtgcagtcgtgcgcggtgttctcgctctactaccaccacgtgcacgggctcgtggagttcccgcccgaggacgacctcgacgcccgggtcaacctcccgggcctcccggcgctgtccgtcgccgacgtgccgtcgttcctgctgccgtccaacccctacaagctcctcaccgatgcgatactgaagcagttccgcaccatccacaaggcgtcgtgggtgttcgtcaactccttctacgagctggagcccgacgtggtggacgcgctcccgggcatctcgccgccgccgccgccgctcatccccgtgggcccgctcgtcgagctggaggaggagggcgccgtgcgcggcgacatgatcaaggcggcggacgactgcgtggggtggctggacgcgcaggcgccgcgctccgtcgtgtacgcgtcgctcggcagcgtcgtggtgctgtccgccgaggagctggccgagatggcgcacgggctcgcgtccaccggccgccccttcctgtgggtggttcggccggactgcagcgcgatgctcccggaggggtacctggactccgtcgccgggcgcggcatggtggtgccgtggagcccgcaggacctggtgctcgcgcacccgtccacggcgtgcttcctcacgcactgcggctggaactccacgctggagacgctcgcggcggggcttcccgtggtggcgttcccgcagtggggcgaccagtgcacggacgccaagtacctcgtggaggagttcaagatgggggtgcgcatcggcacgccgctgcggagggactccgtgcgcgacgccgtggaggacgtcgtggccgggccggacgccggcgcgatgctcgagaaggccagagcgtggtgcgcggcggcgaggacggcggtggcggccggcgggtcgtcggaccgccacgtaccaggcgtttgttgaccaggttgtggcgggaaccattggcgcacgagcagataaggacattgtggctgcggagcagcaaggtttcgattcatcttctctacgtggaaactaaggattatttcggccatctccaaaaaaaaaaaaaaaattgcttcttagcgtcactaccattctttacctatttatactaattcataca

SEQ ID NO: 4335 - DNA, 1296 bp, Triticum aestivum
  Clone ID: TRIAE-23APR03-CLUSTER200287_1
aaaaaacccaaccaaacccctcttcctcctcgcctctccccctccgcctcccccaccatggcccccggtgccctagcccgcctcatcatcggccgccgcgcagcgtccccgctcctggcgcgccccttcgccgcgaaggcccgcgcgccgcagcgggcgccggagcctgagcccctgtcggaggaggacgacgacttcaccagcggcggggaggcagcccccatccccaccgagggcatcagcaagccgctcgccggtatcctcaaggagctcgggaagagggttcccgagtccctcctgaagacccgcctcgaggacaatggcttcgccctcaagtacatcccatggcaccttgctaacaaaattctgaatgcacacgctccagaatggtctggggaggttcgcaacattgtctactcatctgatgggaaatctgtatctgttgtctaccgtgtgactctctatgaaaacccaaccaaacccctcttcccctccgcctccccacaatggctcccggtgccctagcccgcctcatcatcggccgccgcgcagcgtccccgctcctggcgcgtcccttcgccgcgaaggcccgcgcgccgcagcgggcgccggagccggagcccctgtcggaggaggacgacgacttcaccagcggcggggaggccgcccccatccccaccgagggcatcagcaagccgctcgccggcatcctcaaggagctcgggaagagggtccccgagtccctcctgaagacccgcctcgaggacaatggattcgccctcaagtacatcccatggcaccttgctaacaaaattctgaatatgcacgctccagaatggtctggggaggttcgcaacattgtctactcatctgatgggaaatctgtatctgttgtctatcgtgtgactctctatggaactgatgcagagatctatagagaggctactggaactgcttctgttgaggaaaaaggctttggagatcctgtccagaaggctgaaggaatggcttttcgccgagcttgtgcccgccttggtcttggacttcatctctatcatgaagatatgtcatagatgcttactgatcattgtttgtggtctggacttctgcttcatgtctcttagtgcgcggacacttgtcgttcagtaggctacccttttgtgctgaacatgatatggatgtgccggcatataaaactaagtattctagaatgtcgtttagttgtctaatgtaagctacaaggtgggtgatgttctgaatggtgtgcttataatgagccagcttggttcatcttct

SEQ ID NO: 4336 - DNA, 1607 bp, Triticum aestivum
  Clone ID: TRIAE-23APR03-CLUSTER2003_1
gaagcgcgcccaccgcagtcagccacgcccagctaccgctagcttccggcccccccggcctccccctggcttctcgctcgccagccagccacccacgctagcaagctcgcggccgccctcgcgcgcgccagccaccccccagcctacctcgctcgcctccgcgctcgcatcctccgccccccccctcggctcccacgcctccctccccgccgccgcccgtccgactctcggatggcttccacgctcgccttgcccaggccgtccgcgccgagcccggggacgaacgtgagggcgccattgagatcgcgggcctccactagagtctccgacgggtcggcagtcgcagcggtcgccgacacgctcttcgccgactacaaacccaccaccgcattccttttccccggtcagggtgctcaggctgttggaatgggtaaagaagctcttaatgttggaagcagctgcaggaactatttgataaggcaaatgatatacttggctatgacttgctgaatctttgcatcgatggaccaaaagaaaagctgaactcaacagtgatcagtcagccagctatatacgttaccagccttgcagctgtagaagtgttgcgcgcacgtgaagaaggccaatctgtaatttaactccgtagatgtcacatgtggtctcagcttgggagaatataccgcgcttgcatttgctggtgcctttagctttgaggatggtctgaagcttgtcaagcttagaggagaagccatgcaggatgcctcagacgctgccaatagtgcgatggttagtgtcattggtctagattcagaaaaggtgcaacaattatgcgatgctgcaaatgaggatgtggatgaaaaggaaagagttcaaatagcaaattttctctgtcttgggtaactatgcagtttctgcctggtgttaagggtattttaccagttgaagtcaatgcaacctcttttaagacgatagtaacggttctggctagctgttgcggtttactttccacaaatcccagaagcctccaattttctcgcacgacccgaatccggccttggactaactacaagagattagatcaccgaggaatcccagccttctcaaaggtagatgcacagccccactctttaggctagaggactaatcaaagaagattatcgggacaacagaatgaccatctcctgtgcaatgggagactacagtgacaactctgtttgggtaaaggccttgagaagagctattgaactcggacctaggaaaggttaaagcaggaatcattgaacggatcaacaaaggtgccagcatcgagaacattggcgcatgagacatgaatcgccaatattataagggcaaataataaagcaaggggggctgcttagatttaagcaacactcctaactgtactaccagggcacgagagcaccacagggtctggcaatttcctgtcatttgtgaagaacatagatagtgttgtccaattatgtttcattggctagagctaggtttctcggcggttaagcttgccctctatattgtgaggaccagaatgaaatttcagttatagttctgagttgtatcagtaatttcatccccaaaaaaaaaaaaaa

SEQ ID NO: 4337 - DNA, 2076 bp, Triticum aestivum
  Clone ID: TRIAE-23APR03-CLUSTER200_1
cagatctacatcctccctccaccccgtctcgccggccgcccggccgccccccaatcgtgcgtcggacgaggccccggccaagggtctcctagcggagatccaaccccagctgcccccccgccgcgccggccctccggccgccaccctagccttcctccggcgccttccccgccccgggcgtcggggctaggaggcccccgcggcgcctcccggggctccccctctgggtgggtttcctcgcttcccggcgggcccccccccctccgtccgggccgggtacgcccccccagctcccctcgtcccccgccccctactcaccccgcggctgccctgcgccactggcccccgacgtctcggcgcacttcttccagcgcagcgactccgacatgaggcagcaggggcgccgtcgccgttcccctgcccgcccgtcgcgggcgcgcggtcggtcttcctcgggggccccatccggctcctccgggcccagttgcccccgactggctcccgcgttcactgtggggcccctcaccccccggacgggcctagtacgcccgcctcggccctcgcttcaccgctcccagcctaacccgccggacctcctcccgtcatcggcccagacgtctcggcgcacctctttcaagagcaacgtgttcgacaagagccaccaggaggtctgccggttgcagcgtcccctctttccgccggggctccgtcttcgacacctcctcccaggtccggctggagtagttcacgtgctccaccaagacttccagaaccaggaagcacagcagctttgtcgatctgaagtttgcagtggcgcagctcatcttactgactgctagccgatgcttgcctgtgagggtggtgcgagaaaaagtgtttgatgacgtttctgctctcttccatgatcttgacaatgggatgcagccaatcagtgtcttctttccctacctccccatccctgcacaccgtcgccgtgaccaggcacggacacgtttggcggagatctttgccaagatcatcaagtcccgcaaggcctctggacagtccgaggaagacatgctgcagtgcttcattgattccaagtacaagaatggccgccagaccacagaaagtgaggtgactgggctacttattgcagccctgtttgctggacagcacactagctcgatcacctcaacctggactggggcctacctgcttaagttccagcagtactttgcagaggctgttgaggagcagaaggaggtcatgaagagtcatggtgacaagatcgatcacgacatattggcagagatggatgtcctctaccggtgcatcaaggaggcgctccggctccacccgccgctgatcatgctgcttcgccaatcacactctgacttcagcgtgaccacgagggaaggcaaagagtttgatatccccaagggccacatcgtcgcaacatctcctgctttcgctaacaggctcccccatatcttcaagaacccggactcgtatgaccctgaccggtttgcagctgggagggaggaggacaaggttgcgggtgccttctcgtacatctcctttgggggtggcaggcacgggtgcctgggtgagcccttcgcgtacctgcagatcaaggcgatatggacacacctcctgaggaactttgagtttgagctggtctcaccgttcccagagaacgactggaatgcgatggtcgtcggcatcaagggcgaggtgatggtcagctacaagcggcggaagcttgtcgtcgacaactagagagcgggtggtcccatagggggtgtttgcttctgtatttgttccatttaagttttttctattcgcacgccaacctgtagggtatctatcttgccattgttttagggtactttgatttgcttccagtgattatttagacgtgtagcatctgagtgttgtttctctctcctttcatctttgctgctgtccattctcttagacgggttcagacataaaatgtgaacagacaaccctatgtaaggaacacaacaactgtgactgagttcattcaaaatgcagttcttgctgcaactctttttgtcccccccccccccc

SEQ ID NO: 4338 - DNA, 1398 bp, Triticum aestivum
  unsure (1)..(1398): unsure at all n locations
  Clone ID: TRIAE-23APR03-CLUSTER201009_1
aagaacaccaccgtgccgcgcccacttaccacgccacgagaattcctacccccacttccgtccgcgatggccctgcaggtcgccggcggcgcgggatgttgcggctgcctcccgctcctcggccagcggccaacagcagcgtttcgcccgccccgcgcggtcgcgtccgagggcgcggcggtggaggacggcagcaaggtgatgctgggcgggtccggcgtggcggtgaccaagctcggcatcggggcctggtcctggggcgacaccacctactggaacgacttccagtgggacgataggaaactcaaggatgccaaaggagcatttgaagcgagccttgatagtggaataaccttcttcgacactgcagaagtatatggtgcaggggtatcgggagcgataaattcagaaagcctactgggaagatttatcaaggaaaggaaagaaaaagaaggggtcgaggtggccattgcaacaaagtttgcggctcttccatggaggtttggccggggaagtgttatttctgcactaaagggctcactttcccgccttggtgtctccccggttgagtcataccaactccattggccagggatatggggcaatgaaggttaccttgacggccttgctgatgcttatgagcaaggtcttgtaaaatccgttggagtctcaaactacagcgagaaacgtctgcgagatgctcacgagcgcctcaagaagaggggagttccacttgcttcaaaccaagtaaattacagtctgatttacaggaaccctgaggaaaatggggtgaaggcagcttgtgatgagcttgggattactttgattgcatattccccaatagcccaaggtgctttgacaggaaaatacactccagctaatccaccaactggacctcgtggacggatatacacttctgatttcctgtccaagctccaaccgcttattaacaagattagggagattggaggaagctatgacaaaaccccaactcaggtggttcttaactggcttatttgccagggcaacgtgattccgatcccgggggcaaagaacgcagagcaggcctgggagtttgccggtgcgctagggtggctcttgacggagcaggaggttgaggagctgcggtccatggcgcgcgaggtgaagcccgtcatgggtttcccggtagagaagctgtaaatcgcggccaagttaccctcgtggtttactgctacacaggatttccgtgatcctagatataggagttgtagttctgtgaaaaggtgtggagttgtaaaaagaacaaagacgtagaaaatcataacggaagtaagtgtatattcaggctcacgatcaaattatatcaaaacgatagttgttttgttccagaaaaaaaaaaaaaaaagcgcntnnaga

SEQ ID NO: 4339 - DNA, 1506 bp, Triticum aestivum
  Clone ID: TRIAE-23APR03-CLUSTER20217_1
cacagaaatccaataaaaccaacaagatctccaaccttctggttgagaattttgaggcaagaggtagctagcctagccatgtctccctctcttgatctgccctcccggatcctgccccgcgtgctcatcgtctcccgccgcaccgtccgcaagaacaagttcgtcgacttcgtcggggagtaccatctggacctggtggtgggctacggcgcggtgccgatcatcgtgccgcgggtcgccggcgtgcacgccatgcttgactccttcgaacccatccatggcgtgctcctttgcgagggcgaggacatcgacccctccctctacgacgccggcggcgacggcatcgacggcgacgcgctctcgccggagcagctcgaggccgtgcggcgcctccacccgagcgacgccgtggtggaccacgagaaggactccatcgagctcctcctagcgcgccgctgcctcgagcgcagcgtcccgttcctcggcatctgccgcggctcgcaggtgctcaacgtcgcctgcggcggctcgctctaccaagacgtcgagcaagagctgcaccccgcggcccgacgccaccgtctgccacatggactacgccaactacgacgggcacaggcaccccggctgcgcgtgctccccgacacgccgctgcacgactgcttcgccgagtcgctgaccggcggccaccaggtgatggcaaacggctggagcgccccgacgatttcgactcccccggctgcgccaaggcctaccaggagttcgtccgcgcagttgtcgcatgcaaggcgaagctggccgccgcgcatgctcatgtgcacgtccagagcgcggtcaccacgccggcgaaattgaaccacgaaatggagaagcagcgcaaggtgatcggccggagcgtctcgctcgccaagaacatgtacatgttcggcaacaacaacagcgcgcagcatccggcgcagcaccgggacggggacctggacggcggcgcggagttcctggagtcgaacacggcgctgagcgtgcagcaggagaagtggctgaagcagatgggcgcgacggtgcggaatgcgtcggggtacatgaacaggctcaaggttagcgaggagcgggaggcggcagcgcgggcgctcatggcgaagatgtcggtcgcccagctcgccagcctcgccgccttctaccgcgccatgggcaacgtctgctccgaggtgctcgacgccaagctccagccgccgtctacaaccctgcacgagtgacctgtgcgctctgtctctgtgaacctggccggaaatgcttgctcagttcatcagaaatcaaatgttgcatggcatcctgaattaattaaaccgtgtgatgttgatgcatttcaaaaaccaaatacaaacctgcacgagagacctgtgcgctctgtctctgtgaacctggccggaaatgcttgctcagttcatcagaaatcaaatgttgcatggcatcctgaattaattaaaccgtgtgatgttgatgcatgtc

SEQ ID NO: 4340 - DNA, 769 bp, Triticum aestivum
  Clone ID: TRIAE-23APR03-CLUSTER20240_2
aaaaaaaatcctcccgcaaaagtcacgaagctctaccctctccctcgaaaaggaaagagtagctcgaccgagcaacccaattcatggcgacggcggcgtgtcctctccctcaccggtctctgctcctcctccatctggccctcctcgctttcctgctggcggcggccccggcggcccaggcgtggacgggggagatccgcggccgcgtcgtctgcgacgtctgcgccgactctgccatcgggcccgaggaccacgtcctcgaaggcgctgaggttgctgttctgtgcatcacgaaatctggtgaggtcatcaactaccaggcgttcacaaactacaagggcgtctacagcgttgcagagacaatgcctgagagcgaccgatgggattcgtgcctggcaaggcccatcagcagcttccaccagcattgcaccaggaggggcgacgcacactctggggtcaagttcacatacaacaaacagtcagggagctcgcacaacgtcaagacgttcctctacaagcctgccaacgttcctctgtactgtagctgaaatctataggatgggttcatgcccgggcttgatgttgtaagatctgaatagggaaagtgttggtcgacccgtatgcttgtaacgatctgcccatctagagttattgcccatgtcagtcatttgaagggggtcggatgttgaatgtgtaattattgtaaatcactataatatgtttctcagccatatacatataatcaataaatatgtacaagtagttttat

SEQ ID NO: 4341 - DNA, 1217 bp, Triticum aestivum
  unsure (1)..(1217): unsure at all n locations
  Clone ID: TRIAE-23APR03-CLUSTER20259_1
ctccgctcccccccccgtcctcctcagcttcccacgcaagcccgtcgcgtccgcgaccggtggttgccgcgcccgcgactggccggtggcgattgcgcgcgcgcgcttttctgctccacgcagctcgcttcttcttcttggactcttgtggcagcgcggctagctagcggtggtgcacccggccccggagccaagattctgctgctgccatggaggtcgacacatcgtccgcgacggccaagagcggcggggcgccgccgccgccgcccactcattgcccccccctccttgggccttggccaagttgggcttagagggagaggtagataacatgacgcctcatccacacccctagcgctacaggtttgccgcgtatgtatcatccacacctccagcagcatcggcggggaggagaatcggaggcagcgtcgccgggagatcccagcagcagcatgtccgaccccaccaccgccgccgccgcttgccacaaccccccccctgccccagccccggcctcccccaagagcaagcggggcctccccggcaaccccgcccccgaggcggaggtggtcgcgctgtcgccggcgacgctgatggcgacgaaccggttcgtgtgcgagcatctgcggcaaggggttccagcgggaccagaacctgcagctgcaccggcgcggccacaacctcccgtggaagctgaagcagcgcgggagcaaggaggtggtgcgcaagaaggtgtacgtgtgcccggagccggggtgcgtgcaccacgaccggtcccgcgcgctgggcgacctcaccggcatcaagaagcacttctgccgcaagcacggcgagaagaagtggaagtgcgacaagtgcgccaagcgctacgccgtgcagtccgactggaaggcccactctaaggtctgcggcacccgcgagtaccgatgcgactgcgggacggtcttctccaggcgggacagcttcatcacgcacagggcgttctgcgacgcgctcacagcgcccaccgccaaggccatcaccgggggcggcctgccaccgccaacccccgcgcacccccagcaacacgccatgctctattcgcccgcaacgattctggatgcaagcaagcagcaagcaaccaaggagcctcgccgccgtttcaangaaccancaatcaaccaatcaaccaaaggtccatggcaacaagcaattgccaacnttcgacgttgaaagcc

SEQ ID NO: 4342 - DNA, 1422 bp, Triticum aestivum
  unsure (1)..(1422): unsure at all n locations
  Clone ID: TRIAE-23APR03-CLUSTER20279_1
aaattacccacccgaagcaccaagctcctcgctactccacggccatggccaccgccgtcgccgccttccgctctttcattcaccccaccgccattgccgccgccatcccactccctccttctcacttcaacctcaacaacttccagcggcactgcgtcgggctccgcctattctcctcctcccaccgtcgccaccccattctcctgcccgcctccacctccgctgcttccggccaagagttctcttctgacggagaatattactctgaggagggtccagaggagtacgtggaggaagagggagaggaggcagaacccgaggtccaggcagttcgcggttactatcccccgagaaaccggtccggcacttggacaagagcccgggcgaatctacgtcggcaacctgccctacaccttcaccgccgctgagctcactgcagcattctccgaggccggcagcgtcgacgatgtccagataatatatgacaaaatcaccgaccggagtcgtggctttgcctttgtcaccatggccaccgccgaggaggctgccaaggccgtccagatgttcaacggagctctgctgggagggaggacagtcagggtgaatttcccggaagttccgcgaggaggagaaaaggcagtggcatcggcagcggttgcaaggactagcttgcgttttgttgacgatgggacatacaagggttacgccggcaacctggggtggggtgtgccggctgatgcactcaagacggcattcgaggggcagcctggcttggttggtgccagggtaatcttcgagcgtatacacgggtcgttccagggggtttggctttatctcctttcagacaatagaagatgcaaaggctgccttgcaggccatggacggagtggaactggatgggaggccactccgacttagtctggcggcacagaaccctccagctggatcaactcctagcacagtgcagtcccagcaagaacaaactgcctcaggtggttctgagccagaggtcgacaaaaacagtactacttcaggacaatttgaaggcgagatggaaaagagcaacttacagacaactgccagctattagtaactactaatagacaggtagagatgattgagttgtaagcttggtgcnccggttcaaaaattctgccgttccaattcaagatgtactggtttgagcaaaaattttgacgcagaagtgggatttcagccatggatactagattattagactcttgtaatatgttgcagaaatatctggatccaaagtgcgtcatgtaaacatgttcaattcagtagagatgttttgtatattgtatataatatagagtactggattgactaagtggttgtgctgccctttcatgaaataaattagaatgatacccaggttgctcgctacaaaaaaaaanaaan

SEQ ID NO: 4343 - DNA, 944 bp, Triticum aestivum
  Clone ID: TRIAE-23APR03-CLUSTER203053_1
cagccaaacccacacccctcctccgctccgctcgctcgctctccttcccctcccccaatggcggccttcgcctccacctccccctcgccggcgatctccgcctcggcctggcgcatggactccctgcgcgccgcgctccccgcgctccgctcctccccgtcggcggccgtccggcctcgcaggcaggcggcctccgccgccccgttcctccggagctccttcgtctccacctcctccgcctcgtcctccgtctcccccgccccgatgtcctccgcggcctcggcgtccctcgccttctcgtacacctcctcgttctccgtggaatcaagctttgctcaccgactgtttggcattgatgtccgtggaaggatattggcgatgaggcacgggaagcgcattcctaggctcaacaggcctgcagatcagcggaaagcactcctgcgtgggctgaccacacagctgctgaagcacgggaggataaagactaccaagccaagggcaaaggcgatgaggaagtgggttgacaagatgatcacgatggcgaaggatggatctcttcacaagaggaggcaggccctggggtatatttatgagaagcacatagtccatgcattgtttgctgaggttccagacaggtatggggaaagaaacgggggctacacaaggatcatcccgacattcccaaggcggggagataatgcacctatggcttacatcgaacttgtctagagaatcatccattggttgcagtccatccatcgacgctgctcaagccgggtgtctgcgaatcgcctcttgaacttgtgttttcatatgttattttgtaacaacaaagtgtagatcatgtcgcggaatttctgaacaaagtgtaacagcaagatcagtgtgctatactactgaaaaaaaaaaaaaaaaaacccccccaataccggggcctcttccaa

SEQ ID NO: 4344 - DNA, 971 bp, Triticum aestivum
  Clone ID: TRIAE-23APR03-CLUSTER203353_1
aaaactcacagcaagacttggtaaaggcggccgaagaagcaaagctgactaatctgcaaccatgaagatgaagagatgcatcctgctgatgctcgcacttgaggccgccgtcctcgtcgccggccgcccctccgctgttgccgtctccaacgacgtgggcaccattctcatgccgaccgaaggcaaagggcaagtgggaacggcggcggcttccaggccatgggattgctgcgacaacaccatatgcaccaggtccttgccgccaatctgcatctgtctggacgaggtcgacgagtgcgcctccacctgcatggcctgcgtgccgtccgtctcaaacccattccgccgcgtctgcggagaccggtactacggcgaccccgggcccaagtgcacctacaacaccgtcgccggcgacaacaacgacgacgccctcgtagcggcggcggcagaggaggagaagccgtgggagtgctgtgacatggctctgtgcaccaggtcatacccgccgatgtgccgctgcgtggacgaggtcgagcagtgcgctgcaacctgcaagagctgcggggtgtccatcttgaacccgttccgccacgtctgcaacgactggtacaacggcttcccaggtcgcaagtgcaccgaggccgcccacgccggcggtaataactagcacctgcgttgatcaacgccatcaagagtgcacttgaatttcccctgcatgcaatgtgttacaaattacaataaaataaaataaaaaatggatggccggctggctggcctgctaccgctactgcttgcctgaatggtgatcagacaagcatgcatgcatgaataatggtcgagcgtctgtatgttgcaacgttttaatgaatggtgtgattttttttcccgtcaattttaagttgcttaccacgtgttccacgtggtgaatggtgttaaaaaaaaaaaaaaaaaactcgagggggggcccggta

SEQ ID NO: 4345 - DNA, 2263 bp, Triticum aestivum
  Clone ID: TRIAE-23APR03-CLUSTER20353_1
ttttgcttttttttaggcgaagccccccgcgaggtggatctgtcccattaaatcctggccactttcttctagcggaaaataatttccaccttccatacccatcaagccggtccaaggtagcagacgactcgcggtttactgacccacgacggagcaaaaccgtccccccccgctcatatttaattattctccccttctagtaagtgccggggctagccgatatgagacctttgtgctgcaaatttcctccacgctaggcctccgagggcacaaagcatccggcgacccgtcgggcagcggcgcggctgacgcccacgggctcgcccagggtgtgccagcggggtgggatggggggcgccgcaggcggtcacacttggtgacgccgttgggccccgtgaggcctcagtaagacttcctctgccgctggatgcaaatgtccgtgatctgctggaacacggggtcctcctggacttagcgaactcctccagaggcctccagtggcctgcctgatgctgtctgactccgcgcttggtcgcgctcgacagagctcgacagatgccgatgcagccccctgccgacttctgaagcgccacgttgtccgcgtgcctgaaggcgcccgcagccagctacagaccgggacccactgttgacacctggccctccctggcgccctcagggggctcccatccaggcttttggtgacaccgcccgccctcgagggggagtgtctgatggctaaggtttttttttttttttttagcgtggagaaacatggtcttttcaaagtgcacaatacactgaaactgaaagaaagatatatcttccagatcactgccatttcttctagataattgccaccaccggtacactgacgaatagtagtacacattactacgcgacagagctaacccgtcccgcccatgtctaattacagtctcctacacgtatatacagaggccaatccagttgcctccttaatgctacaactttgcaccgcacaacgcctagacggtcgcagagcaaagaaaaaaagaatccggcgacccgtcaggcagcgtcgcagttgacatcctcgggctcgcccacgttgtagtagagggtggactgcctgccgtcgaacttggagacgacgttgtgcgccgtgaggccgcagtagcacttcctcagccgctggatgcagatgtccatgatcttctggaacatgtggtcctcctggatgaacggctgcttcacgaactcctccagcggcatccactttgctgcctgaatctctgtttcgtcgatcttgatcgcgctcgacagaggcctcagcatgcagatgaagaacaggtccgacttctgaaacgccacgttgtgcgcgtgcctgaaggcaaccacatccacgaattcagtgtcaacccctgtttcttcctgcacctctctgatggctcccgtgtatatttcttctgactcctgaatgaaccccgtggggagtttccagacaccatccaacgcccagccgcgatacttctcttgcaccactaggacctccatttgatcattgatcacgaagcccccgacgccgacctgatgagaagcgttcgctgggagcagagacggctcgtcggggatccagtacgtcagcatcaagtaggcctcctccgcgtggtggtacttgaatccttccttgactgctattggaacaaactcagatcgatccactggcaatttcagccacacccctttctttcccacggactgccagtaggagagggacgccgctagcgaccgggcgaaggcggcctcgtcggacggcagcctgtcggcgtcgacgacgaccccgccgtactcgtcctcggaggcctcgagcacgaagttgttctccagggatgtccaccaatggtggccgatggagtccggccagttgacgcccatccactcgggctcgctcctgaacagcttcctccgcgccgccgacctcaccccgctcagcatccggccgatggagtaggacgcgctcaccccgtgctctctggaggagctggagcagttgaagaacctcgcggcgctcccggcgcggccgcggcggcgcgcgcccggtgtcgagcagagagcggcggcggccgtgtcgaccaagctgcagctctccatcgctggcaagtggtgactcgactgagagcaatgtaaagaaagtggttcccaggttgcagtgctatcacgagcgatgctaccgttgagcgatgaagtatgaactgatacggcgtgcgcgcctcgcgatgtccgg

SEQ ID NO: 4346 - DNA, 2166 bp, Triticum aestivum
  Clone ID: TRIAE-23APR03-CLUSTER204339_1
ccatattcccccccgcccggaagccccgccgcccggcactctgggctggccgccggcaccaaggttgcccccccgctcgatcgcctccagagagctcccggaaaccccgatctatatcgggcattgcgcccccagcccggtccgcccgcccccgcgtcctctccgcaccttagcttcgggcctcgcgccacctctgccggagacctcgcaccccttcggacccgaggagtcaggttctttactctctagagtgatggattcttcagaaattccgccctctgacctcagagaagagcagccgccggcgccggcgtccctgccgctgccggcggcctttctcgagttcctcggcgataatggcctggaccccgcgctgtacaccaaggaggataccatccctcgctagagccccgagtccagtcctcccggcggcgccgcctctgcgcgctttgggcaggaggccgacgccaccattgccggagacctcgcaccccttcggacccaagtaggagtccagtgtctttactctggagagcgatggattctccagaaattccgccctctgaccgcagagaagagcggccgccagcgtcgctgccgctgccggcggcctttctcgagttcctcggcgagaatggcctggaccccgcgctctactccaaggcggacaccatcccgcgctacatcaggttaaaaccaggcatggagtccagtgtggtgacagagatcgaaagcgagctcaagtgtgatctcatgagggtgtcgtggctgccggacttctatgcgatcccgcctgaaattcagattgctggatccaaggcttatcagcaagggaagatctatgggattgatgcagcttctggagctgccatcttagcactcgatgttcaatcaggagaccatgttcttgacctctgtgctgcaccaggtgcaaagctttgcatgcttgcagatatgcttggtagctcaggttctttgactggtgttgatgttgcaaagcaccgtcttgcagcctgtcgtacgatgttgcagaagtattctcttggagatcgtagtcgactctttgttgctgatgggacttcgttttccatattgcctgtgaactccaatctggggagcatggaagcttttgttggaattgaggataatggaagcatattctcagaatggacttcaaagagatcatggaaagacagacagaagtctaaaaaggcaaaagcagccggttcacctcatctaccatcaacttccgaacctgaactgatatactatggcaaagattcaggattagttggattgcaaaaacgttatgttcttcacccatcaactgatgctgctgcctgtacatctgggtatgataaggtcctagtggatgcagaatgtactcatgatggatcgataaaacacattcagaagtttgagttctggggatggaaaacattagaccgccgtgtactcaacgtagaaagaactggcaacctacttcatcttcagttagggcttctcacaaatggttttaaattattgaaaacaggcggatcacttgtctatagtacttgcagcttgactgttgcacaaaacgagaatgtggttcagcaattcctctcaaaacatccttcagcagagctgctaaagatcaatccagccgatagctggccctgcagaagcggcggcatccagaaaaccttgcggttcgatcccgcgacgtcacaaactagtggacttttcgttgccaagttcgtcaagttgtgatgttctttatgagatgctcgcaacttcgtataagttaatttcatatgaaaccaggatgtcgtgagtaaattttgctaggttttactctagttctttaaacaacaggttgtcgaagtctgcttgttgtttatttattttactctaatttgaaataagcttcttgggaaaaaaaaaaaaaaaaaaaattttctctattccccccccccccgggggggggccccgggacccaattcccccccttaggggggcccgtttaccccccccccccccggcccgccgctttttccacgccggggcggggggggacccccccccggcccgtgcccaaattatttccctggggggggaaaacccccccctttttccccgggggggggaaaaaaaaaaaaagaacgcccccatatttgctcctcc

SEQ ID NO: 4347 - DNA, 2312 bp, Triticum aestivum
  Clone ID: TRIAE-23APR03-CLUSTER20443_3
ctgtgcgccatttatctacggcgtcttagttgttttatgtaaaagctcaaggtatcagcttccatcttaaccaagcatattttagaatacaattatatatgtgtagactgggaaacacataatataattgtcatcttcatcgttacacgtatacctgcatcatggaacacatcacaagtatcacgttcaccgcaggaacatgcaaatcaggacaccgtactacaacttgctatcagacttggcacaacatcatccaatgaagctatcctctttcctggcccggagaatgggaattagttacaggcatgaaagggataatccgtacgtgggcctgctaaattccggcgggataagcagccacccggggggggtgcggcgggggggcgtgccgctcgctgcgggggtgccgcccgcaatgaccattgcaagcggagccctcggccggcgccgccggtaccgctagcccctgcgactcctgatcttggatgcctgtgatgtggctgcggttgccggtccgggccatgctctttgcaagcctccagtcttgcaaggctcgggtggtcggcccgagtcgccgatcgtctctgggaaggatggtagcgctgctgtggaggccaccgctcttcggccgttcggggttgtgagtggcgttcgtatgcatcgctacacacccgtaggggcagcatttcctacggatacccacgccgcgcgcatagtttctaggtttgctggcagcacaagcagagcggggggtacaatccgggttggtagtggctggggacggctgctcgtgcagaaaaaatggcaggccggcactccatcttcagacaagctggtggctgtggtgccttggcgacaaggggcagaacgccactcattgcccggtaagaccgagctagtgggcactgtccattttctagccattcatcactcattgcctcgtgggacggtgggttgcctcctttttgtttcatggaattctgatctggcttgttaggcttcttgtgtgactggtctagattgttgggcttcttgttctgctttttgcccttgccattaaagaagttaaacccgaatggtccaaatgctgatagacttatggtagcggctctagcagccaatggattaaagggcagagcaggttcaggcttgacatcagtgctctcactgcggttctcatcaggcacatatgatcttcctgaaaggggaactatcccatcctgtccatggaaaagcttgaatgccgactcaaagcctggtccatcctcaaagatcggacctttgcctcctcgggcagctacaggcaaagcagaagaaaatgaaaaggttgtagctccattgatgttcctcaggaatgggcatctctcaacaccgggatgaccagaaaagttctccgatgatgctgagtcacagaacaggctgctgaagagcatttccatcctcgccgagtcgctggagagctgctcgcctgcgtgcttggctccgtccgtgcggtgggggggagagagggagaggagtcgtgtggtgggcacagcgcggtgatggggagaggatatgaatatcgtagctgctgtgggaatctcgttcagccagtttgcaaacaaaaactccatgaggaacatctacatcattggactatcgttgttccttggcatctcgatccctcaatatttcgcggagtacaccgcttctgctgggccgcggacctgcccgaacaaatgcaggatggttcaatgacatcatcaacacagtttttgcctccggcccaacggtggcgctgatcgtcgcgtcgcttctggacaacacgctggagccccgtgccaacgagaacgaccgggggctctcatggttcacgccatttctgcgccgccgtaaagggtactcggaccctaggaacgaggagttctacagctacccgatccgggtccatgacttggttccgcaccggtttctctgattctagaaggggtgctgctaattatcctgtgctgctgtgcaatgtaaatcccctttgttcttgttagccttttaccccctgtggcccgtagcgattggtgcggtcacaggtttcagcttagtgggatatatggtacaaggatgctaggacttccgtcgttgctgttgctggccgtttgggccaaggagttggttacatggttgacgtagagttttattgtccgggtgtaatgttgtctctggggaaaaatggagggagtgtctatttagcatttgactgttttacaattggaaaacattcaaatttcctaactaataagcagctgccacttgtatgtccaaaaaaaaaaaaaaaa

SEQ ID NO: 4348 - DNA, 1693 bp, Triticum aestivum
  unsure (1)..(1693): unsure at all n locations
  Clone ID: TRIAE-23APR03-CLUSTER2046_1
gccgcttcattgcccggggcccccgcgctaatcgaaaagccccccacccgcccggaatccgcggcgcgagccccgccccgcctcccccctcgcgccccacaaagcgccggaggcgcgcccccccgcagccccccgcgccacacgccggagcccggatcgcgcgctgctgttcgccggcgggctgaggcgggcgtccgggcgcgcgccatggacgtggacagcgtcgagtgcctctcgctgcccgacgccgccatggacgcggacgacgtcggcctcgccctccacccgcacggcgggatcctcgccgccgcctcccgcccggccgcctaccccaaggccggcgccggcgcggggggcatcgtcgcgccggggagcagcgtgcacgagctgctcgagtgccccgtctgcaccaactccatgtacccgccgatccaccagtgccaaaatggactacatcaaggtaaagcatgcagcgctgtgcagctttagaccatacagttgcccctacgctggttctgagtgttctgtgactggtgatattccgttaccttgttaaccatttgagggatgaccacaaagttgatatgcacagcggttgcacattcaaccatagatacgtcaaatccaacccaagagaagtcgaaaatgccacctggatgctaacggtgtttcactgtttcgggcagtacttctgcctgcactttgaggccttccagcttgggatggcaccagtgtacatggccttcctgcgtttcatgggggacgagaatgaggcgcggaactacagttacagccttgaggtcggcgccaatggcaggaagatggtatgggagggcacccccaggagcgtccgggacagccaccggaaggtgcgtgacagccacgatggtctcctaatccagaggaacatggcattgttcttctcgggcggcgaccggaaggagctgaagctaaggatcaccggccggcaggagaaggagacgcaaaccccgccccaggcagcgtgcgtgacagccaccggataagcacatgacagcaatgatggtctcctaatccagaggaacatggcattgttcttctcgggcggcgaccggaaggagctgaagctaaggatcaccggccggatctggaaggagacgcagaccccggatggcgcctgcgtaccagttctctgtagctaagcacaagcagcgaacaatcttcaaaagaaaagaaaaaaggattcgatatcatatgtgacatgatatcgcctatcccctcgccatgccctactgttatcgtatggtctgaggcgacatttcatgattttgtctttgttgagcaaaattaggagggtaggatgaccttgtaaagtaaatcctgtatatatggcatcccatggcttattataggttggctcatcaagctctctgatgccttcagtcatgtctcaaggaaactgtattcttactgaacttgcatcatcagtcttccagccttagagggtaactggagttggtatttgatagcgccatcaaatttcagccccaggccttcaggccttcagcccatcgtgtggtgatagagagggtttataatttggactgggatggggcctagtataaaacgtcttatattagttaacagaggtagtacatgacatttgacagcttgactccggcactttgcaccttatatttcatttatgatttnn

SEQ ID NO: 4349 - DNA, 2281 bp, Triticum aestivum
  Clone ID: TRIAE-23APR03-CLUSTER20478_1
ccccctcggggttgccggtttcgaaacttttttttttttttttgaacaacatatagtggtgacccgcagaaggaaaaaacatacaggggcatcagcttacgacaaaatttctacatacatagtacatattttacattctgcaggctacagcacacgaatcccttgcgagaaaacaatctgctcatcatttacaatgctacagcaatgatcagtgcaggatcaggcaaagacagttcatatgctcggtgccagctgaggttcagctacctgtggcttctgggggtccaaacctgggaactgcccgatgtcatgaccttctactcggtttaggctgtcatccagaccaatcgcaaactcctcaggccgttccccaccgctcgcaaagtagtcagcgacatgatctccaagagacattccgctcaatactgctgcttctatacttgaacccgtgagccagtcaccacaaatgcctgctcgaccctggggatcaaatatgcatggtactcctggagtgttcatcggtaaagctgcaccccacaactgtactcttgtgtaaaatggtcgctgaagagatcctgtcgagagccccagagcaagttcaactcccccaagcatgtctcgtttcactttttctgcagtggcatttgggatattttcctgtggaactttgtttttctttccataagaagcagtgctgaaaaatgtccagcactcgggtctgtttgtctccaaagggaaaagcttccgagtattgttggccatccaagagagagaatcaatatctctcacaaatgctccttcaaatgtgccataagagttatcttgtgggattggaagaggatcatcaaatgccgcaagtagtgcccagacagaactcaactccagtctcttcatttgccttgtcagttggggtagacctgacgtagaaagcagacggtttgcacatttcccattgtgtgctattacaacggcatcatattgaccctggggcttctcattctcaaacaagcgccacaggccgttgaacggctcaagcttgcttatccaggaaggccttacaactttaatcaggtcattctcgggcagcattgcgtcggcaagcgggcgcattcctctcacgccgatataccttggcgtcgaggaaggtatagctgtgaaatggccacctgcctcgagctcaccgatcgagcccctccattcgcgggccaaccctttctcgacccactcatcgaccagctcctggaacctctggtcgctcgcggtgaagaactgtgccgcgtggtcgaacaccagccgccgcccgtcgtcgaccatcctggtcgccatcctgccacctaagccgtgcatacccgtgtcgaatacgacggcgcggacgccgcgggcggcgagggcggacgcgcaggcgaggccagaggctccgcctccgatgatggcgacggtggggtcggcgggcacgggggtggaggagaccacctgctcctgctggaagctcttcttgatggccgactgccgcgagaaccggggcttgccgcgcgggcgccgcgggggcgccttcggaggacgcgctcctccggcgccgctggcggcgaccaccgccccggaaaagcgggacgcggcgcgcccggcggcggggcgagcgcatggggcggggtggaagagcggcatcgcggccttgcaaggtgctcgacaaaatgcgggagcgggggaagcagaccgttatctgtttacaagtattttatctttactttggagagagagaaaactgacgttctcacggttgctccatggtattgtatttttcaaggaaattggttgttctttttcgattaggacgatgccctcttgagagtaatggacccgtgagaattcctgcagccgttcatccatacttctagactggcgacactgcgtggtagctcaaatatgctcgttacagagttgattgctcgctggacgaatctgcacatactgtcccagggaaaagtgtatccgtcccattcccaaaattgccttccgaagataaagagtaggcccgcctgccaaaggtggaataccccaataatggggtgggaaacggcctttccgggggaaaccggggtgccctggtttaggattgcccccccccgaaaaccgttttgttttggggttttttaaattttgttttaaaaacaaccccttttggttgccccccccccccaatttattccccccggggggggtttttattccccccccccccccaaaaaaaaaaaagaaaatttttttctaaaccccccccaca

SEQ ID NO: 4350 - DNA, 991 bp, Triticum aestivum
  Clone ID: TRIAE-23APR03-CLUSTER2049_3
cccccgctcctcggattggatccctccccttccctcctctgattccattccgttggagccctcctttcttgatctcatctctcccctgattggttcagacaggactgccggcgcccctccctccgctgcctcgctccccacggcggcgaggcgagacccaccggcgacgcgcggccagccctgaattgaatcagctaccatggcggccttgccgttagccacggcggaagtctgcgacgccaactcgcacctcatcaccggcggcgagctgcgcgcgctgcagcccatcttccagatctacgggaggcggcaggtcttcgcgggccccgtcgtgacgctcaaggtgttcgaggacaacgtgctggtgcgcgagttcctggaggagaagggccagggcagggtgctggtggtggacggcggcggcagcctgcggtgcgccatcctgggcggcaaccccgtccagcaggcgcagaacaacgggtgggcgggcatcgtggtgaacgggtgcatccgggacgtggacgagatcaacgggtgcgacatcggcgtgcgcgccctcgcctcgcaccccatgaaggccaacaagaaggggatgggcgagaagcacgtcccggtcaccatcgcgggcaccaggatctgcgacggcgagtggctctacgccgacaccgacggcatcctcgtctccaggaccgagctgatcgtgtaggagaggccgcggccgccgcctcgttgtccgtgccgttccactctgtggttgtatttgcttgtctgtaacatgatggatgaactgggctctgtggcactgcataaatagaggaggagggctgctgtggttgctgctgctgctgccctccctgattgaatggtgttgtatctggacttcacattcagaagctccgaacttgtaataattgtaagcttatcttgcctgatcaaatggaatgaggaatcggaataaaattgtcaaaaaaaaaaaaaaaaaaggccccta

SEQ ID NO: 4351 - DNA, 1333 bp, Triticum aestivum
  Clone ID: TRIAE-23APR03-CLUSTER205127_1
atcttccccaattgtttatccagcgcgccggccccgtcaccggtggcgacccaccccgtcccgccgcgtcgcccaatagccaccggccacccagccgaatcaccaccgcccgccgaccgagccgacgtgttccgcggccgacctcaccgcgcagcctccccttccccgagtcgccgtcctcctcccatccccgccgcccgcctccgcccgctccggatgtcggcctccaaccactccggcgccggcgccagctccccctccagatcccaccacctcctcctccccgcggtgcccaagtcgaggatccctttctgcccagcttgtggaagtccgacgaaattggccgtaccagacggggatgagaagacgagggctgtctgttcttcttgtgggagagtgcactacgagaaccccaaaatggttgtcggttgccttgtggagcacgataacaaagtcctcctttgcagaagaaagattgaaccggcttacggcctttggactcttcctgctggttatttggaagtcggagagtctgcagcagaaggagcctcaagggaaacgttggaagaagcttgtgcagatgtagagatagtctcaccttttgctcagttggatattccgctaattggccaaagttacattattttccgagcaagaatgaagacccccggtttctcacctggatccgagtcgctagaatgtgaactttttgctctggatgatataccattcgattctctagcattttcttcaatcatcgtcactttgagaatgtatattgaagatgtcaaggctgggaacatcaaattccattattgcacaataaacaagaggattggggctggcccttcggatctccgtagctttgatatcgacaaccatttagccgtgtgagcttgggaaggttcgagacccgtcgtggtacataatgtgattgctcttgttaaacaccagccgcgagacatcggcacagcaatcacattggtcgtcgatagagctggtcatgggtggggggaacttgggtcatcacatggcatctggccacagttgtggtagattgtttacgctgctgccggaattgtaaatgcttgtgtttctcgaagtcccttttcagccccttttccttttccttttcaaaggatgtcttgagtgattcaatagatggtgaatttagattttttgtcagcttacccaaaagatttgtgtcgtgagtgtcatggcaatttgaaacaaaattctgtaattgttttcccgagctgttcctgcaaactcttcagttacaacgtgtgggaaatatacagtgataccatgtttttcaaaaaaaaaaaaaaaa

SEQ ID NO: 4352 - DNA, 1360 bp, Triticum aestivum
  Clone ID: TRIAE-23APR03-CLUSTER205251_1
ccatctccttcccctccgtcccctctcccacgcgccgcggcatcatctccgtctccgtctcctctcccacgcgccgcgccaatccccgccactcccagcgtcgccggcgccaggccagctccaccgaacatacatcacccagaacacgagatccgaaaggcgggcgggcggcggcggcggcggcgcggaggatggcggccacgctgtcgcagctggacgacggcatcgtccgcagcatggccatcggcgcggtcttcaccgactacgccgggaagataagctgcctcgacttccaccgcaaggaggacctcctcgtcacctccagcgaggacgactccattcgcctctacaacaccaccagcgccacgttgtcgaagacaacttatcataaaaaacatggtgctgaccgtgtctgttttactcatcatccgagttccatattatgttcatcaagatacaatgtggagtcaggagaatcacttcgttacctgtcattgtatgacaaccgttgcttgagatatttcaaaggacacaaagacagggttgtttcactatgtatgtcacctgtcaatgatagctttatgtcggggtcacttgatcacagtgtcagaatatgggatcttcgtgtaaatgcttgtcagggtatactgcgtctgcgtggtaggccttctgttgcatatgatcagcagggacttgtttttgctgtagcaatggagggaggtgctattaagctgtttgattctcggtcatatgacaagggtccattcgacactttcttggttggtggagatacggctgaagtgtctgacattaaattcagcaacgatggcaagtctgtgcttttgactacaactaacaaccatatatatgttctagatgcatatggaggggagaagaagtgtggcttcagcttggagtcatctcgcaacatagcaactgaagctgctttcactccagatggtcaatatgtaatttcaggatctggtgatggtaccttgcatgcttggaacatcaatacagtacaggagattgcctgttggaacagtcatattggtcctatcactgctttgaaatgggcccctcgtcgagctatgttcgcaactgcatcgacagcactaactttctggattcccaacgaatccagttcgagttaggtccctgaggaagggagatggaacgtggaatacgctaacttaacaaaaggcttgtatcatgttctttccttgacaggacaggtactatgtatgaagtatcacttgctttattaccatatatatgtggaaacagtgatgttggttccctgtagaatgtattgaagtgctccctttatttcttaagtactatataatattgcacaaaa

SEQ ID NO: 4353 - DNA, 1710 bp, Triticum aestivum
  Clone ID: TRIAE-23APR03-CLUSTER20528_1
tttcttttggttttgtgtttctacatcacattgtttattaataccaattgcttcatgggtttttctcttttagaattggtgagctgatatcggatgattaagcatacaatctttggtacacgaggcacactcttttcgcatgccatgcttcgcgcacctctcacttgtacaactctgtacaacaccgcatctcctctgtcttgtggtcttggatcccactacaatattttaccattgtgcttcttcacaacaaatccctaccttagtaatacaacaatcagcacttgcatatctgcccaaagcatggccaagcagatcactccaagttcttcttattaataatgactacaaacactctaagtggcgctaaccaccaacctgagtaggcgaagtggctgttcttggtgatgtatatggagaccaagtctgtggtctgcgccgagccgccgtccaacggaccggggacaacgagctgggacaggtccgtcggcaagcacatatcggcgacctggccggatactatgcccggctcgccagaattcaagaattctcctttcgtgctgagccggccattctcgtcacccgcttggtatgaagtgcgtggaaatggccacttacagattattcaggcccgtttgttgcccaccctgtctacttgtcaagttagatgcttgtattagcagagaagccgaccttctctcaggaaattcagaacctcctgaggattgtaacagccatttccttcttgcacccgcggtagtcttacccgtctgcttctctagaaagtcggtccgcatatcgaccgccagcaccttgccatccgatttcttgcttagctctttaagcctgcccagcatctgttcagccacttctgaatattcagcgttcagtttgagcccagtgaacattgcatggcaagcagttgaatccaagtccttgttattcgtccctttcggtttcaaacttactgaagagaaaataattgcaagtcgtaggaaactgttcttttggaaggcgggctggatggtgtccaggatgaagtcttctgtcacccggtttggtactctaataacggctggcttcttagtggtccattcagcaggaagtttatctactactttgacaacaccatccaagttcatcttgaatttttccacatcgtacatgtcttggaattttcgactctttcctaattcatttcctctgatttctggaagtacaagtgtagctcccagataccttgcaatcactacagcatcagcgatctgtgatgaatggtattcggggccaatagtcaatgacatggtaacaaaaccgttagactggtcatcctttgggcttggtttggtccagcagggcttaatctcctcagtagcctcgagctccactccagccttggtaatttcagtattgtctgcgatcttcatcgcattgagctccacgcctgttgcctccacggccagctcggagacggaggtgaagtggtcgtgcttgatcatgttgccgagcatgacgaacatggagagggtgaggaaccccgccagcacctgccgcgggtccaccattgcgccggccggccggcggcgagcggcgcgggaggaagcggaggagcaccgacaggcgaggcgacagcagcacgcgggtagcgccgggctgcgcgtgtgcagtgcgtacagccgcgcgatgggggcgtgtggactggactggact

SEQ ID NO: 4354 - DNA, 2338 bp, Triticum aestivum
  unsure (1)..(2338): unsure at all n locations
  Clone ID: TRIAE-23APR03-CLUSTER206_20
caaccctcactaaagggaacaaaagctggagctccaccgcggtggcggccgctctagaactagtggatcccccgggctgcaggaattcggcaccagtttcctcgcagcctccgccctcctcgtgagccatctctccccgacctcccgatgccgcccaaatctaaggccgcggccgccgccgccgagccggtctccgtggaggacctcttcacggcgctccaccgccacatcgaggccggcgagttcccccaggccgtcaaggtcgccgaccaagttctcgcggtgtcgccgggcgacgaggacgcggtgcgatgcaaggtggtggcgcacatcaagtccgacgcgacggacaaggcgctcgcggccatccgcgccgccgagcgcctccccatcgatctcagctactacaaggcatactgctactacaggcaaaacaagctgcaagaagctctggatatattgaatggtcaagaagaaacagctgccgttctccagctggaatcccagatctattaccgattaggaangaatgaatgattgcatgagtagctatgagaagctccagaagttcaaggttgactcaatagatctaaagataaatatcattgctgctctagttgctggtggaagggcttctgaagtacaggcagccatgaaggcgcaaaaggttgatcttaccactagagcactcagagatactaggagcttcgagcttgcatataattcagcttgcaccttgatagaaaataagaagtattcagaagctaaagagcagctggacttggcgaaaagaatcgggaaagaggagcttatggtggaagattacgcagaagatgagattgaatatgaattagctcctgtatctgttcaacttgcttatgtacagcagctacaaggacagactcaagaagccatggaaacctatgccaatatgataaacaagaaatcaggagacccctcatcacttgccgtggcaacagccaaccttatttcagtaaaaggtacaaaggatgttgctgatggcctgaggaagcttgaccggcttgtcgagaagtcgacagcgccgaaccagttgcaactgatcgagagccttgaattcaagttatcttcaaggcaaaaagaagccctgtactctgctcgtgttcttttgctcctccatgcaaataaaattgatcaggcacaagagttggtaagtgggctgcttgctacgtttcgagacaatgtgttccctgttttacttcaagctgcagttcatgtgagagaaaagaaggtcccgaaagctgaagaggttctaagtcggtatgctgagaagcatcctgataattctacaggagtccttgcactcgcccagattgctgccaatgccaaccattttcagattgctgctgattcgctatctaagatatctgacatccagcacatgcctgcaacggttgctacactggtagctctaaaagagcgtctaaatgactctaatggtgctgcttctgtgcttgattctgctatcaagtggtggaaaaacgccatgactgaagataacaagttggatatgttcatgcgggaggctgctacatttaagctcaaccatgggcgtgataaagaggcctgtcagctgtacgaggaacttgtgaagagctatggaagcaccgaagcgttgtctgggctagtagcaacgtccgcacgcactgaccttgcgaaagctgagcaatatgagaagcagctgaaaccgttgccgggtcttcagggaattgacgtaaagagcctggagaagacatctggtgcaaggcatgtagagcaagccatgaaggttgatgctcccgaggaagtgaagaagcaaaaggctaagaagaggaagaggaagcctaaatatccgaaaggatatgatccagcgaacccagggccacccccagatcccgagagatggctgcccaagagggagaggtcgacctaccgtccgaagaggaaggataagagggctcaggtcagaggtgctcaaggctctgtgagtagagagaagcatgatgcatctgctgccaatgccggcgccacctcttcaaaacccaccacctcggccaaggctccagaaccaccaaagggctccaacaagtcccggaagaaaaagtcgaggtcttaggcggcaaagttgtcatgtcacaaattaacagtatacaaaggacactgtccattttagtaccttgacttggaatttttgtgttatctgcattggattgccctgtgccgtgcttttagaatcatgtttatggtggcttgagattcctagaccgttgcaaattttgttaacgctgtctgacttgtctggtcaaaaaaaaaaaaaaaa

SEQ ID NO: 4355 - DNA, 899 bp, Triticum aestivum
  unsure (1)..(899): unsure at all n locations
  Clone ID: TRIAE-23APR03-CLUSTER20761_1
ttttttttttttttttgaaaagtagatgattcgtatcagttttccttactgngaggcaaccagcgataattcatacgcaaggctgaagcaactanacaagtntacttcttcttttttgcggggaaactagactagtatactaattttgacttgacgttctgaaatcgagaacgagaggtcgcaagtagaaacgaatgatggggtatcccatgtacacagtgcagccaagtgcaagacccagacgagaagtatgcttagcatcacagggacttgaagttgtacatgtagcccctcaaggtgctgatatcttgcatcgacttcattagcgtatggtccacatagaggctcgatgcataagcaatcaaagggccaagcgggagccacactacatcccatcggatccttggtaacttcaagaggtagtatgtccagaagatggcaaccgccatgccaacatagaatgaataccaaatccacttcttggaggagttggatgcttgtagtagccccttaactgcgaataagcatgcaagggcagctatccaatctgcaacgatgaccatcggcgaaggcaaatcttccataaagtaagcatggtatcgcagctcccagggagaccaggcatggtggaagctggagtagacgaggaagaccgtgtagctcaggaggaatcccgcaaagacgtgcctccaacggcggctttggtgcacctgcttctgctccagggaacggactagctcctcctgctcttgggtgtccatggggacgagatcgtcggcgtcatcgctgccgtcgcgccgcttccaccatctcctcgtagtcatcgccgtccgtcctccggcctgaaatctatgcagagttccggcgcactgtttcagtttggaatgcaaagcatctta

SEQ ID NO: 4356 - DNA, 1090 bp, Triticum aestivum
  Clone ID: TRIAE-23APR03-CLUSTER2079_1
tttttttttttttttttagaggaagataaaatcatatagactatactccaataaatccacatacagtgtgaaaaaggttaaaccaaaccgaaaaaaatccctcctctccctacccgcagatgcatcaaaacgtccaaatccagatcttgacgcggagcttacactttgcgtccgtcgtcgccgacccgccgcctccggtggaagacgacgacagcctgatttttgaccgggtcggcgcaggcgccgcggccacgatgatcggcgccggggagggcgccggcttggccagccccgcgctgaagccaccgcacagcacacggacgctgatgcgcttcgacttgaactgcccgatctggaaacccaccttggagtccatctccactgacatcgcatgggacttcttggatctgagactggccgcctgcaccgggtccaccgtcgcggcggccgccgaagccgaccccttgatgaccgtcgtgttgcggctggggtggaggaagcccggcacggtgccgtccccgatgtccgtgccgtcggccgcgaaggcagccccgatgtcgccgtacacgaacgcgatcttctcgttggggttgcgcgcggtcaccgtgaactcgatgcgggaggtgacggagtcggagtcggagacgttcagcgccgccagacggagcgacgtcacggcgaaggtcggaagctccgggtggtaaatcacgtagaacacccccaacgctattgctccaaggaacaccagccccaccaacaccagcgtcagccacaggcaacacgcgcagcaccacccgcgcccgctccgccgacggcccggtggcggttgcatcggctttggtcggtacatcggcggcggcgggacgcgaccgggcaccatggacggaggccgaggtgtccctacaccgccgccgttcgccgtgccgttggcggaccgcggtgccgccacagggaccggcttggaggacggcccgtacgcccggtcgcccatttcttggcctctgctgcctttgcttggcttggggaaggagaaggggagagtaaaagagactgtggggggaagaaacgcgaagaatgcagcccggccggc

SEQ ID NO: 4357 - DNA, 813 bp, Triticum aestivum
  unsure (1)..(813): unsure at all n locations
  Clone ID: TRIAE-23APR03-CLUSTER208525_1
gtaacaaatcgaagagtgggtctctctctcgcggcggcgcaggcgtctctctccttctcctccggcggcggcaaggcattttggcatctgagcccaacagctagcagatggcaggcggcagagttgcacatgcgaccctcaaggggccgagcgtggtgaaggagatcttcattggactcacccttgggctggttgctggtggtatgtggaagatgcatcactggaacgagcagaggaagacgcgatccttctacgacatgcttgagaaggggcagatcagcgtcgttgtcgaggagtagttctgaagtgctgcatcttccacatatcaccagcagctagatcattcgtccaccatagccggtaacagagctcggtcggcaggcacagattcagctaggaggagagcaggagctaggtagccatggccgtcctgcgcgccctcacccgcgccctggaggacctggcccacgccctggtcgccgtcgtccgcgccctcgccgacctggccagccgcatgacccacgccagtgcccgcgccttgcccaacgccataagccgtgccatcggcgcctgatttgtataccctccggcggtacctctgcaccggatcgtcgctcctcttcgttagaggtactccggcggattccacggctgccgcctcccaagtcgccccgcatcccccgtccttcccctgcgacgcggatccactggatgcnagctcgccggntccacgatgttgtccgcacaggcgaggtcacgtgcggaccttttcatcgttattgagacaatcgggcatgatgagtgtgatttaaa

SEQ ID NO: 4358 - DNA, 1211 bp, Triticum aestivum
  Clone ID: TRIAE-23APR03-CLUSTER209166_1
tcttccccccgtgcggggccgagtcggggctcccccccgggggggcccttgtatttggtcgggccccgggctcccggtgctgccccgggcccgccctggggcctccgcaccgtcagtgcaccgccccgtgacacaactgcactggtggtggagtagataggggcgggaggaggaggagctgacaggaggagagcgagagacagaccgatcgatcgcccaccggccccgcccgccgcgcgcatccgtccgtccgccgctgcccggcccggccatggcgatggcgccgaggaggcggacgctgctcaaggtcatcgtccctcggcgacagcggggtcggcaagacgtcgctgatgaaccagtatgtgaacaagaagttcagccagcagtacaaggcgaccatcggcgccgacttcctcaccaaggaggtcctcatcgaggacaggctcgtcaccttgcagatttgggatacggcagggcaggagaggttccagagcctcggcgtggccttctacaggggagccgactgctgcgtgctagtctacgacgtcaatgccaaaagaacattcaacacgcttggcacctggcatgacgagttcatcaaccaggccggcccatcagaccccaagcaattccccttcattttggtcgggaacaaggtcgatctggacgctggaagcagacgagtggttcctgagaagaaagcaaaagactggtgcgtctccaagggcgacattccgtacttcgaaacctcggccaaggacgactacaatgtcgaccccgctttcctgtgcatcgccaagctcgccttggagcatgagcacgatcaagacatctacttcaattcagttgcagaacaaggccctaaaaccgaaggacagacgagcggatgcgcgtgctaggctagcatcttggcattactgtccagtataaggctacaattctgctgcatttatcgcactgtatccattcttgaatgtaatgtatgtaccatacgatagttagtgactgatcaacagttgcaagctgtgctcccgtagctgggcaataaaatgtaaacagttccaaccaaggaattattgtcgacctaattcttcgtcggttgtaacatgttgcacttcaactgcttggaatgattgtaacagagcatactcactctgaaaaaaaaaaaaaaaataagctgcaatcccgttctcagtggtaaaaaaaaaaaa

SEQ ID NO: 4359 - DNA, 1244 bp, Triticum aestivum
  unsure (1)..(1244): unsure at all n locations
  Clone ID: TRIAE-23APR03-CLUSTER209227_1
agttaccctctatccgtcgtatgtccaccatcccactcatcaaagctgtagtcgcaccgagtgtgcaagagacaaagcaaagccgcgaggaacccatgagcgatctcatggtcgcggacgttgatgcggctgcgcccccgccgccgtcccagccggacaaccccgtccggcggatcgccggccgcccgcaccgtgccgccacgcggcccctcctccccgccatcccgcctcccgacgccggcggccgggcgcccctcttccgcgggcacctgcccctcgacacctctctcggcacgtacatccggctacacccccccaaccccgtccccccggcgccgcggctccccgtcatcctccacttccagcgtggttgcctcgtaggccgacaccgccttctagccttcctcctgcgaggctgtggcggcagggctgcgggcgtacgtcgcctccctgcattaccggcccgcggccgaggccccgcctgcccgccgcctatgacgacgccgtcgcggccgtgatgtggctccgtgacgtggcaccccaggacccctggatcgccgcgcatggcgacatcgcccggtgcttcgtcatgggcagcagctccggcgggaacatggcgttcaacgccggcgtccggaccaagggcatcgatctgagccccgctgcggtgcgcgggctcctgctgcaccagccatacctcggcggcgtcgagcggacgccgtccgaggagaggtcggaggacgacttcatggtgccgctggaggccaacgacaagctctggagcctcgcactgccgctgggcgcggaccgcgaccacgagttcagcaatccggaaaaggcggtggcacaggaagccgtggtcggcctgccgcggtgcctggtgtccgggagcgacggcgacccgctgatcgacaggcagagagggttcgccacgtggctgcgggacagtggcgtggaggtcgtcgccaagacggacggctcccgggttccacgctgcggagctcttcgtgccaagagaaggccgaggagatgttcgcgctggttccccgatttcctatccccggcctgcgctgccgcggtgcgtgtccccgatcggtgggcgcctccgtcttgcccgtgctgtgtgggtaggcttctcccccgtcgtgcggctgcgtcttgtgatcaaataatccgccactgttcncaanttgggcggtcgtttaaatnttaaaanctcactagaaaaannnaaaaaaaaaaaa

SEQ ID NO: 4360 - DNA, 939 bp, Triticum aestivum
  unsure (1)..(939): unsure at all n locations
  Clone ID: TRIAE-23APR03-CLUSTER209236_2
accatcccgtgcccctttatcgaaaaatccacaccaaccggtcgcccgaatctcgagcgccacccatggcctcctccgccttgtccggcacccaccatcgcctccttctcccctgtttcctgcgccgcctcccccgaccccgctcgcgctcgtgctcccgcctccgcctcgccgcctgccacgccgacaccctcctttcctcctccggggcccaggggccgccctcccccgccgcgtgctcgtcggcatcctccgctggcgggttctctgactggctactcacgaatgggctgccgccgggcaaggtggccatcctggagcgccccgtcccgtgctctcgcgggggcaaagaccggccattacacttcgtcgctgctgggcaggacctcgaggtactgagcaagcagggttagttgttgactcggcggtgaacatgcgatcctgatgcggctttctgcttgcttgcacaggcgggggatgtggcgttcgaggtgcccatgtcgctcgttgtcacactggagcgggttctcggcgacgagtcggtcggtgagttggcctctggctctagaccggccgagttctgtcatttggtaatctaataataaatgaatttgacatttgtaatggtattacgccgaaatcgttcctgccctgagtaggttacatatgaaaataatttgtagaaatattgttaaaaaaaaaaaaaaaaaagctagaaacgcccacctaaacgccgcaaatcgtaactaaccagcctagaggctggacgctcaatctaagagaaaccttgctgcctcacaaggcccagtttccagaggcgaagagaaggaaactatttctgaaatgctgccatacttgagactaggatacatttcagatccagatgaaatgcaatgtatactttcgtcagagcgtgatacatgtccagttagtccatnn

SEQ ID NO: 4361 - DNA, 1652 bp, Triticum aestivum
  Clone ID: TRIAE-23APR03-CLUSTER2101_16
attaacccccactaaagggaacaaaagctggagctccaccgcggtggcggccgctctagaactagtggatcccccgggctgcaggaattcggcacgagctaatccgccccctcccgagacgccaaagccccaaacccctcgccctcccaaaccctaactctaaaacctccgccctcccgccgccgccgccgcccgattcccctccccaggccccgcatcccccgtccggcttgaacgatgtcgtccgacgaggaggtcagggaggagaaggagctcgacctctcctccaacgaggtcgtcaccaagtacaagaccgccgccgagatcatcaacaaggctctgaagttggtattgttggagtgcaagccgaaagccaagattgttgacatttgtgagaagggtgacaatttcataacagagcaaactgggaatgtctacaagaacgcgaagaggaagattgaaaggggcattgctttcccgacatgtgtatctgtgaacaacacagtctgtcatttctccccactggcaactgacgattctgtactcgaagaaaatgacatggtgaagatcgatatggcttgccatattgatggttttattgctgtggtggctcatacacatgtcatcaaaggtgggccggttactggaagagcagctaatgttcttgctgctgcaaacacagcagcagaagttgcaatgaggcttgttagacctggcaagaagaataaggatgtcactgaagcaattcagaaagttgctgctgcttatgattgtaaaattgttgaaggagttcttagccatcagctgaaacaattcgtcatcgatggtaacaaagtggtacttagtgtttcaaatgctgatacaaaggtggatgatgctgaatttgaagaaaatgaagtgtatgcaattgatattgtcaccagcactggcgagggaaagccgaagctattggatgagaagcagaccactatttacaagagagctgtagacaagaactatcacttgaagatgaaggcatcaaggttcatcttcagtgagattagccagaagttcccaatcatgccattcactgctagggcgctggaggagaagcgtgcacgcttaggtttggtagaatgcatgaatcatgagctgttgcagccataccctgttctacatgagaagcaaggtgacctggttgcccacatcaagttcaccgtgttgttgatgccaaatgggtctgacaagataacttcacatccactacagcaattggagccctcaaaatccatcgagggcgatgctgagatcaaggcttggctggctttgggcacaaagtcaaagaagaagggtggtggcaagaaaaagaaaggcaagaaaggagatgcagcagaagtagcagagcccatggaggtttctaaggacgcaccaagccaggaataattctcattttttttgaattgcttccgttacgtttgtacctgctcctttgctgcatctgattgttttatattacattcagctgtggggatttgagtacctttttttgaagtgtctaatgaaaatggttgatcctggcgcacatcacatcgaagtacaagcctgataattatgtatggtgtgctgaatgtttacctgtcagtaatgcttataaatccggcaaaaaaaaaaaa

SEQ ID NO: 4362 - DNA, 917 bp, Triticum aestivum
  unsure (1)..(917): unsure at all n locations
  Clone ID: TRIAE-23APR03-CLUSTER21071_1
ntcncntnccccctcttntcccccgtccgttccctccacctcttttttttttttttttggcgtggcttaaggagagacatagagatatcatgaaaattcaccagttcctttccaaagattcaactcctgttgagacattcttgaaacaactagctaattagcagacagtaagaacagcatctgcaatcaacgcaatctcatgaggaagctcttaattcttttttgtttcctataaacctgacccaaaagttaccatcacaacctcatggacaaaattagcaaaggcaacagcatccgttactcgcacattgttgcagcgtcttcttcgatcccaatagaactcacccaagaccacggattcagccatggatgaagcccgtgcacttgtccttgatccagcggaagccccggcggaaggaggccttgacttttccctccaccgagtacgccttgtagctcgccacccgacgccgcctcttcacctccgggtcgctgaagcaccaggcggagcctatcccgcctccgcctccgctcttggtgaccggcaacggcggcggcggggacctggtgggcggcggcggcttgacgacgaggtcgatgcggcggtcgccgtagggcacgatctcgttgcggtaggggcggtcgtagtcggcggcggaggagggcgcgtaggggcggtacgcgcggtcgtagtcggcggcggccatcgcgaagccgcccgtggagctgcgcttcggggaggaaaaaggaaaattccgctggggcctttccagggcccgctttattcccccgccccttcgttgatggaagataaaggactacccgctggcggggggcaccccgttcccctctcctccgagcagtggcctcgcgccttggcgggccaacaccacaacccgggccgcgggggttggtat

SEQ ID NO: 4363 - DNA, 2462 bp, Triticum aestivum
  Clone ID: TRIAE-23APR03-CLUSTER210_1
tcctccctctcctctcctccctctcctctttcgccacgccgccgttgggagccaggcccccaacactcatcaaaacccctacaaaaaaatacctcaaaaaaatccgcaaaaaaactgaaaaaaaattctacctttcgatcggtgatggcggcgcaggcggcgagctcggcgtcggagggcggctccccggccgcggcggccgctgcggctgcggcggcggcatcgtcgttcccggcgacatcgctttacgtgggcgacctcgacgtgagcgtgcaggacgcgcagctcttcgacgtcttcgcccagatcggcggcgtcgtctccgtgcgcgtctgcagggacgtcacctcgcggaagtcgctcggatacgcctacgtcaactacaacaccccggctgacgctgcacgggccttttgaaatgttcaacttaactcttataaatggacggcctaacaggataatgaattctaaccgtgaccccaccttgcgcaaaaggggaacagcaataatattaattaagaatcttgaaaagtcaattaacaacaaagttttgtatgacacattttttgggtttggaaactttttttaagttaaagttgaaccagatccggctgggaaatcaaagggctttgttttgtttcagtaggagcgggatgaggctgctcatgctgctatcgagaaactgaatgggatgcttatgaataagaagaaggtggaggttgggcctttcgttcggaagcaggagagagataactctcccggcaatgtcaagaatgataatgtctatgttaagaacctagctgagactaccactgaagatgacttgaaggaaatctttgggaagtttggagcaataacaagtgttgttgtaatgcgggatggggatggaagatccaagtgttttggatttgtgaattttgaaagtccagatgaagctgctctggctgttcaagatttgaatggcaagaaatttagtgacaaggaatggtatgttggaagagcgcagaaaaagtcaggaaatgagattgaattgaaagagaagtttgaaaagaaccttcaagaggcagcggataagtatcaaaacaccaacttgtatctgaagaacttggatgatactgttgacgatgaaaagttgcgagaactttttgctgagttcgggaactattacttcctgcaaggttatgcggattcaaacggctgctagcaaggttctggatttgtcgcttttaaatctgctgatgatgcttcccgagctctttgctgaaatgaacaacaagatggttggcaataaaccatttatgttgcactcgcacagcgcaaggaaaaaataggaaagctaggctgcaggcacagttttcacaaatgcgtcctgttccaatggctcaaactgttggtcctcgtatgcaaatgttacctcctggtgttccagtcggtctgcacatgttctatggcctggcaccccagttgattaacccacagcctagatttggcttccagcaacctttcatgccgggcctggagtcaggtgatgctgtgctcccatgccttatgttacgtatggttcagctcggacaacaaccacaacgaccacctggtaggcgagctggtgctggtggaatgcagcagcccctgccgatgggtcaggagccagcgctgggtagggggtgtggtcgtggttccgctgttcccacctgtccgagcaggccgggtcctgcgtgcatggtgctgggggtgtgattgacatccccgatatgatcatgggtgggatgcctatgaggagatgtcggtgagtcacagccggttccaattggggcattggcggctgcatttgccaattccccgccagtagacgccaagaatgatgctgggcgaggctttgtaacctcttgttgccccgctggagcccgaccgagctgcccaaggcgaccagcatgaccctcgtgatggtccagacggagcaggaccacgttgctgagtcgccaggcgttctcaaggccaaggatgctgaaggcactgcaggttcttggcagcgtcccccagccgctccaaagagcaccctgagcagcacctgggtaggctcttcgctgcactcacggcatcacctcttcctatcgccctaagccgacagttgttgctccattatcaaacttaatctaggcctgaaaatgacttgtttgattaattggcaagaatttttcgcttgccgttagaactaatctatcatttaggctgacttatcgtatttggtattttatttgcttgggtagtttgttttggcttatagtctccctatggctttgtcaattttatttgcatggattggttgtttttaaagttgtcaacttgtcactgaattaatcatgctttctcgttcgtggttgtttccgtgtctgtgagcactgtctggtttgtgcctttgctgttatcttgacgcacgagtaaggcccgtcccaaaaaaaaaa

SEQ ID NO: 4364 - DNA, 2010 bp, Triticum aestivum
  Clone ID: TRIAE-23APR03-CLUSTER21108_1
tttttttttttttttttccggtacaataccatggatatttattcaccgaatgtgcccctccgtttcttcctatgctcccgtccatttccgcctggcatactgggtcagtccggcctcccgaatacatgctatgttccctgcgattttgccgtgccaaactccttcacccggggtacaccaatcagtcctgtagccgcctggatggctcggtaccaaataccttggcctggggcagaccagacagacaagcggcaaactgaaaggcaccgttcattcggaagattcgccgcaaaaggaaggtaaggtaatccaacacatggtgaataaaattccaacatggcagtgacctaaaccatgacagcaacaagggtccagaaagatggaatgaccatcatctgtatttattcaacttctcatcatcccacagcccgtgcagatcgcatttacgtctctgtaatgtgggagttaaatatgagtttgtcttcctccatccctcggcaaaccggcatgagggagaaaggtaactagcttcaaggtgcaagtcagaaaaccaagcaagtttgcgctgcttgaatctgggatgagcttgcatggattaaaataacagatcagcattgccatcagctcgatggctccagtaacaccaaagcatcagttagtttgcgctggaattcagcaggcatgcacgcgcgcacaacaaggtcagaggaaagcggacgctgaagcagctcccacaagatgtctcaacctcgaatgatcaattttgcggaactcctgttttttaatgtcaacattgctgcttccgcaaaggcttgtgcagctacagcatcagcttctgcagcctccgcttccctcactgcggcttcagcttccgccatgatagcgtctgcctcagcaaccgcacgagctgctgcagctgcagcctcttctgcgctcatgtttctcatccgtgcaagttcagcatctacctgagatttagtgtgggcggtaaagccatcccgctctaccttctctaccttggttggctccttttttatatcagcaagcagcagcattttggagcgtcgcccttctaaaaaggatgagctaggggctatcctgtaccttcgattcaccttcatcaatttcccagatgatgtcaactcattcagttttgcagacagtacatgatcaaaatcagcaggtggccagtattgttcctctatgtaattagcaacggctgttttgtatgaccctgtaggctcattcaaggtcttcacggcctccagtatgatattttctagcctggatagcgatttattccctgaacctgtagtaaacgtcacaataggctttatgataggcttcacgtcgatgacgtcatcatcgccgtcggaggtgatggtggtgatcgccgtcgggtggttttcctgcttcggagcagacctcggcttcttagccgtgggtgtcgtcgtggtcgtcgtcctcactttgtcgcgagtgcccgacgcgttcaccgtgacattcatgttccgccacttgtccttgaggtcaacgttggatcggtagcgcaggatgttgctgaactcggggtccttgagtatggtgcgccatttcccggccccgtgcttgcctatcccggccttgagcgccgcctcctcctccgccgtccacttctgcttcggcgcccccatctgcttcggccttgccctaggaggctagggctccccttcctcctcctcctcctcctcctccttctacaacgaaagcaacagcgcctgtcgccaaacaaatcggaggcggatctgggaagcaaaggctgcggacggggcgggggcggaggcgcggcgatgtggggcggagacgtcgaccgcgcgcgggaggcgccggcggtggctagggcacgttcggcggcaggtctagggcacggtggattggagcttgagatagggcagggcagcagagggcagaggaggatacggtggagaggaaaagtcgccgcggcggtgatgggttttttcctcgtgccga

SEQ ID NO: 4365 - DNA, 2355 bp, Triticum aestivum
  Clone ID: TRIAE-23APR03-CLUSTER2111_1
gctcgacgccgccgtgaaatcgcgaggcggcagctctctcgggccaacccgaccgaaggctcgcgaccgcctcctcttcatcctcagatctcgccgccggcggaatgctcccctcctcccgcggcggcggccgcagacgcttcgtcctcctcctctcgctcaccgccgtccttgccttcgcttctccgctccgcgcgtccgcctcagagtctgaccacaagtacaaagctggagattcagttaagctctgggtgaataaagttggaccttacaataatcctcaagaaacttacaattatcacagcctcccattttgtcaaccatctgagaaccctgggcataagtggggtggtcttggagaagtcctgggtgggaatgagttgattgatagtcagcttgacataaagttcttaagaaatgtggaaaggggatccatttgcacactggaactagatcccaagaagactcaacaatttgctgatgccattgaaagctcgtactggtttgaatttttcatagatgatctgcctctttggggttttgttggagagactgacaaaaacagtgaaaacaagcactatctttacacgcacaagaacattcttgtaaagtacaacgataacaggataattcatgttaatctcacccaagagtctcctaagctccttgacgctggtaagaacttggacatgacatattcagcgaagtgggtaccgacagatgtttcatttgcacgccgttttgaagtttacctggactatcctttctttgaacaccagattcactggttctccattttcaattctttcatgatggttatttttctcactggtttggtttcaatgatattgatgcgaacactgagaaatgattatgcaaaatatgctcgtgatgatgatgatctagagtcactggagagagatgttaatgaggaatctgggtggaaacttgtccatggtgatgtatttcgtcctcctagaagcttgacacttctttctgctcttgttggtatcggcacccagctggcagctcttatcctacttgtgattgtattggccatcgttggcatgttatatgttgggcgaggggctatcatcacaaccttcatcgtgtgctatgctcttacatcttttatttctggatatgttagtgctggtttgtactcgaggaatggcggtaaaaactggataaaggctatgatccttacagcatccctctttccattcttgcactttgcaattggctttgcactgaatacaattgcaatcttctatgggtcattagcggcaataccatttggtacaatggttgtcatttttgtcctttgggctttcatatcttttccactggtgcttttgggaacggtcgttggtagaaactggagtggggctcctaacaatccctgccgagtaaagactattccccggcctattcccgagaggaagtggtaccttacaccttctgtcatctcattgatgggtgggctgcttccctttggcagcatcttcatcgagatgtactttgtgttcacatcattctggaactacaaggtgtattatgtttacggcttcatgttgctggtctttgtcattcttctaatagttacaatctgtgtcacaattgtcggtacttatttcttgctgaatgctgagaactatcattggcaatggacctcgtttttctccgctgcatcaacagcgctatatgtgtacctgtactccatctactactatcatgtgaagacaaagatgtccggctttttccagacaagtttctactttggctacacattgatgttctgtcttggtctgggaatactttgcggtgctattggctatgtagggtcaactcttttcgtgaggagaatctacagaaacatcaaatgtgattaatttcctgctacacatgtggggtgggggtggagcagtatcagatcaaatcatatacgtggaagcgaggccttcgaaattgattaatgctagttcctgattagggtttcagaactacgtcaccattgcttattccatcacaccccttctttttgcatacttatttgttccctggagctggtctcatagtgtatacatctgtggtagctgaggagttcagtacaagtggctggtgcaggttcttatttttatttgtttcttgccttttttttgttgcattcctccttttcaaatgagaaagaaataggaagtgagtatccacgcggcaatgtctggacttccccatctgaatcgttacgtccaattcaaggatggcatgtactacgtgagatctgtgtatttatatacatatatcaacatttaatgcatgagagtatacgtgtgcccactgacatgttcgaaaaaa

SEQ ID NO: 4366 - DNA, 1919 bp, Triticum aestivum
  unsure (1)..(1919): unsure at all n locations
  Clone ID: TRIAE-23APR03-CLUSTER21163_1
naagggattctnagcnttagtggtacncaggttccagccccccctcggcgcgctgaccggctcgcgtaagcttttttttttttttttttagataccgaaacatgtatagagagcaaagttaagctctcagtaccataagtccaaactatttattacataattgatcatggcgttggctagatcagagcagaagtactttggtgtcatagcaaggaataaccggaaaacgacaagacataggatctaagatacagacaaaaaagttcacgaggataagagcactggcatgcaacttataaacatgtacaaggcagcctatgcattgcatacttgagatactagtgaaaacttaaatcaaggaaacccttggcgatgaccctcgaaattgcagttgggcgagatgttcctccgctgatttccaaaactacgcccaaggatattgtgatttataaagggcagacggtccgaatcaccaccaattactgggaagttaagtgggttacgtgtaccgatcccccaaccatagcccgaaaaccttgggctgggtggtctcttgtgatgcctcctactgttgtccaccttccaagctgccacaaacctttgcttccaatctccgctccatccagaacccttgctagaaggactcatctccagttcaagcctcatcttccaaagattatcatctgctgcaagatcctgcaattccttgcatgcgcactgaacccttgcaagatcaacaccaggaacaaactccaagactttagccttcagatcacctggcaatgccatcaagcacggcggcaagcgcaacccgttgagttggcacaaagatatcatcagcggaagacacagctcatccttcagcaccctccaaagctcaagaatctccttctcctctgttgcacccacttcattgctatccagatatagcagcggcgccagctttggtaactccaagcacaatctgcgcacttctgagcatgccccaggcacacacccatatatcatcacaaaatttggcatcaatgagcagttcaaaaccactgtcttcccctcttcaccctcaggtagcatggcgacaagctccggtagggtgtactttacggtcagtgttgccgctgcacccgaggcccagtccttcagcaatccggggcgagaccccatcggattctccgcaaggaagccagcatcgacaagagctgcctgcagggacacagctaggcgatggataactgtaccatttgcgcatccagcatcctccgcctccatctcccgcttgagaatcccaatcacaaggctcgacaagctcttgggtgcgtggacggcctccgccatcaccacatcgggcggatcagatgccacgggcaaaataggctccacgtggagggctcgcggcctcggcgaagagataggctctatgtgtagattttgcggcagcgacgaagagacaggctgtatgtgtagattttgcggcggtgacgaggatccaccggcctccccaggagattgggaaccggaagcaatttgcccgatggaggctgtatccgggctagggttccggggaagtgtttgaggaggcggtggctgcgataataattctgcggagagcgtgaaatagaggaggtcaccggatgcgaggccgagggcggcgagggtggctgaggggtccggtgaacagagctcctgcgagcggttgagggagaggcggacggactcggcggggacgggctgcgcggcggagagcttggcggcgaggaaggacttcacatcggcgagcacggccgtgtccggcagctgcacgcggtgcgtctcagcgacgccgccgcgcgcgtccatggaacgcagccgaagcttcatggtcgtctgttggggaattttgcagtttttttcgattaggatgttctaggaatggtctcgtg

SEQ ID NO: 4367 - DNA, 2022 bp, Triticum aestivum
  unsure (1)..(2022): unsure at all n locations
  Clone ID: TRIAE-23APR03-CLUSTER2121_1
gtccaggatttccgtctgcncctatgggagcagccagtgattttatgaagagagctggaagttaacttgcggattggagggcgaggagttgaggcccagcttctagcaccacccacaaggcttcctatgcttgttccagcgcgtgtacttcagcagtcgagtcgcccccctgtccagagtagtaaacccgaaagtgatgaactggcaccttttcaagcagagatggntatgtaattagtttgcaggctttggggcgggggcatgtttagagaccagattgtgcaaatatatttgggcccacggtattttcatggagttcttcctgggaagacgtcagaagtgcacacagaaaactagttgcatctcaccctgatgatctcttatgtatatcttatcatgttacttctgtaatcaaacatctaagatgcgctgttgagcgcattatcagctaataaagggcatctgccatcattgtataaaaaaaaaaaaaaaaaaaaaaaaaaaaaaacaaaaaaaaaaaaaaaaaaaaaaaaaaaaaaaaaaaaaaaaaaaaaaaaaaaaaaaaaaaaaaaaaaaaaaaaaaaaaaaaaaaaaaaaaaaaaaaaaaaaaaaaaaaaaaaaaaaaaaaaaaaaaaaaaaaaaaaaggggccccccaaaagttttaaactttaacgacaactccgactcccgctttccctctacctcttcttctccccagcccgctttcaccagagcgactccagaccacgagccccgccgacgaagccgccatcgccaggccccgcccgcgagcaagaggcgcccgccccagttccgagattcaagccgatcggcgcgcgatccggcaggtcggcggccatccctggcgggggtttccggcagggtgggcgggcagtccaaggaggacagccaggcgtccgggctggcctccatcgacaaggtgagccagactcttggaatgttagaaaagaaggattatttacgaataaggaggacaaatatgtgaagttgagaaggccaatccgcaaacccaagccaagaacagaaaagctgcaatacagggatagaagaggaatagattagatgaacatcgagtggagcaggttgggaattttcagtaaaggatacaagatcagaaggctgcactgcagtgtgtcaaaaggaagagattgtatgagcatcaagtggagcagcttgggaattgcaaattaagcattcatcaacagatgataatgctggtgagtgcaacagctacaacagtgactatgaatgcaatgagaagcggagcatcaggaatgtacgctatgcacaaatcgacacatattgaggttgctaacaaaaccatggatgaaattaatgacaatatggagaacatgaggcagatccaggatctactgtctgcgcctatgggagcagcaagtgatttcgatgaagatgagctggaagctgaacttgcggatttggagggcgaggagttggaggcacagctactagcaccaaccacaagtgctcctatgactgctccagcgcgtgtacctcagcagtcgagtcggcccactgctcagagtagtaaaaccgaagatgatgagctggcagctttacaagcagagatggctatgtaattagtttgcaggacttgggcgtgggcatgtttagagaccagattgtgcaaatatatttgggaccacggtattttcatggaggtcttcctgggaagacgtcagaagtgcacacagaaactagttgcatctcaccctgatgatctcttatgtatatcttatcatgttacttctgtaatcaaacatctaagatgcgctgttgagcgcattatcagctaataaagggcatctgccatcattgtataaagaaaaaaaaaaaaaaaacctttccggtcgncgacccccccaaggggggggcccggtacccaattccccctaagagtgagtcgtatacgcgcgctcccctgggcggtcgtttttacaacgtccggaatgggaaaaaccctggcggtacccaactta

SEQ ID NO: 4368 - DNA, 1103 bp, Triticum aestivum
  unsure (1)..(1103): unsure at all n locations
  Clone ID: TRIAE-23APR03-CLUSTER2121_5
gtaacgacaactccgcgtcccgctttaccccttcttctcccccgcccgctcccccacccgagcgactccagaccacgagccccgccgacgaagccgccgtcgccagcccccgcccgcgtgcaagaggggagcgccccacttccgacattcaagccgatcggagcgcgatccggcgggtcggagcccagccatgtcgggggttttcggcagggtgttcgggaagtccaaggagcagagccaggcgtccgcgctggcctccatcgacaagctcagcgagactcttgaaatgttagaaaagaaggaaaatttactaatgaagaaggcgaatcttgaagttgagaaggcaaaggcgttcaccaaagccaagaacaaaaaagctgcaatacaatgtctgaagaggaagagattatatgagcaacaggtggagcagcttgggaatttccaattgaggattcatgatcagatgataatgctggaaggtgcaaaagctacaacagagactgtggatgcattgagaaccggagcatcagcaatgaaagctatgcacaaatcaacaaatattgatgatgttgaccaaaaccatggatgaaattaatgacaatatggagaacatgaggcagatccaggatctactgtctgcgcctatgggagcagcaagtgatttcgatgaagatgagctggaagctgaacttgcggatttggagggcgaggagttggaggcacagctactagcaccaaccacaagtgctcctatgactgctccagcgcgtgtacctcagcagtcgagtcggcccactgctcagagtagtaaaaccgaagatgatgagctggcagctttacaagcagagatggctatgtaattagtttgcaggacttgggcgtgggcatgtttagagaccagattgtgcaaatatatttgggaccacggtattttcatggaggtcttcctgggaagacgtcagaagtgcacacagaaactagttgcatctcaccctgatgatctcttatgtatatcttatcatgttacttctgtaatcatcatgggaagatgcgctgttgagntcccctctttgattttgggaactggaggggtgaaatgagtt

SEQ ID NO: 4369 - DNA, 1401 bp, Triticum aestivum
  Clone ID: TRIAE-23APR03-CLUSTER21262_1
gttcccgggcccccccgttttttttttttttttatctgatggtaaaagttcatttctctcaaggattgggctccaaaaacacactcacacaacttgatacatcggcgtgcaactttagtttgcactgcactacaagcttttctcctcatcgacaaaacagaggaagagaaacaaaatacatacaaatcgacgacacgcatcactaggggagcgccgagagaccatggagggaagagctggcacaatctttgcatggcctgctcctcctcctctgacacagcctcctgccgttcccggacgcatattcgtataaatacaatccccgcggtagaaattaacccgcggttctaaattaccacgaccacactctgcactgcacttcttggttactagccaagcacgtacggcgcagtgaaaaaaagttgatgaggctgtaacttaggggtagttaaccaaggagcggtaggtggctccggccttccagctggcggggatgacgttgttgacgacgagcttcctgccggagtcggaggtgagccggagcgagaagggcccgcgcagcggcttgccggtgttggagttgaggcggtacagcgcgccccagttctgcgccatgggcgtccaggtgccgcagttggcctccatgaggtccacggcgttgaggtcgccgtcgtcgtcctcgaattcgatcaggacctccaggtagtaggggttggagccctggtccaccttgaaggcaatgttcatgccagggtacttgcatggcaccctcttgtactggatcttgatgataccgccggcccggagtttgtcggccatgccaggcttcgccatggcgcccatggaggtgccgctcatgtcgaagtgggcggcctcaccgaggcaagcggccccggcggggcactcgtcggtgatgacgacggtcgccggctggccggagcatgcctggttgcctgtgcatttaacctcgtagcacgctccgcagcccttgccatctctgtagagcgacgggttgccggcggcgatcatcgacgagaacggccggttgccgacagcgctctggtagccacacgcgccaccgtcgcttccgtcgccgttgggggcgccgtaatacgtcgcgccgccggctaaccagccgccggagccataagcggcagacgacgaaggggtagcagcggtgtggttcttgtgggccttggttgcaggcctggggagcttgcgggaacaagcaatggggctcacaagaagtgagaggacaaccagtgcgctaagtagcgctaataaggtgaaagatttcgccattgctgcttcgagctagcttgggagaggatatggactagatatggttagctcaagtgtttgcttggtgagttgagctagataagcttagcccggccccga

SEQ ID NO: 4370 - DNA, 1276 bp, Triticum aestivum
  Clone ID: TRIAE-23APR03-CLUSTER2126_1
acacgttgccccgctacgcttctcctgtcctgtccaccagccgaaactcagagctccgagctccgcctccgactccacctccggccacggcgggcagctcccgcaccctcctgccactgctcctacatcagcggccgccccctcaccgacccgggaatcgacggcgagccgcacctccacctccccggcactcgacgacgaggcgccgcccggagcaccgcccctcatcgcggacgtttgcttctccctcgaagccggtcagcgctgccttctcgtcggctccaacggcgcgggtaagacaacgatactgaagatactgggcgggtcgcacatggtggctgccttcctggttggggcgctgggaaggtcggccttccacgacacggcgcttacctcctccggagacctctgctaccttggcggcgagtggaggcgcgatgttgcctttgccggctaccaggtgaatatacagatggacatttcggcagagaaaatgctatttggtgtcactggcgttgatcctcagagaagagatgagcttttcaagattttggatgttgaccttacctggcggatgcacaccagatttgcatgggacttcacaagccattaaatgttcttcttatttatgagataacagttgatcttgatgtgttggcaaatacaaatctgttgacatatctaaagaaggaatgtgcggaacaaggtgcaacaattatctatgccacacatatcttcgatggcctggatgactggccaactcacattgtctatgttgctcatgggaagttgcaactagcgctgccattagaaaaggtgaaagaaatgagccagttatcgctcatgagaacagtagagcgctggctgaggaaagagagggacgaagacaggaggaagagaaaggagcggaaggagaaaggcctcccggcattcgacaaggtcattgaggggagcagagtagtgaacaacgggtgggcagcaggaaggctcacttcgacgatagccggggaagataacttttctttcagttcaaacagcgttcttcggtagtaatcccacactgcactttggttcttgagatgatgaataacagtcctatagcaccacactcgagggattttggcggtaacagcaacattcttgcacaaaaggaacagagaatttgacaaaccatgcacccctgctgcatgtatacgacaatgtactctgaatctatgatactgggcgtcgattattattgtttgattttttttctgcgaaaaaaaaaaaaaaaagc

SEQ ID NO: 4371 - DNA, 2206 bp, Triticum aestivum
  Clone ID: TRIAE-23APR03-CLUSTER21296_1
cctttttgcgagtttgggttctacacttcttaatccacctcaaaacagaacaggacaggcaaaaattgaaaaccctatccaacggacgacagatcattacccaccccaaaagaaaaagaagagcgcatatgaggagaaagacggaaattttaatttctcatgaatacacatgtccagctccatcttctaggccagactaacatcctcacctcatgatgacaggattgctgcgcggccacatgctactacgattcatcttcaccttctctgtgcaagacagatggagcaggcgccttcatcgccctgtcgccgccgttcgccggcgaagcaccgggaggggtcgcaccggacgacctccgcggagctgatgggctctccatgatgaaaatggactgactagccgtgcctgtgctactcctgtacggcgaagctgcgagttgacttgaaaagcggcagaccgtcttcacgagccattggggacatcacaccctgactctccccgtttacctgccctctgtatgacctctcctctgcaatgtcatagtaatcagcggtcctcacctcctgagcaagagagcatgagcagcagcacagccactggaagcagtccgtcacatcggggttacagcagcagaaggggttcccggggaggttgaatctcttcctcatctgtattctccagaagccaccgtacagcagaccgaagaagcacagcgcgatgccggtaagccccagcgcctctcgcagggttccttgttccggatgcctgctgccaggttgaagatgaagaacggagccaggcaaaagagcaggaatgttgcaatgtggacgtacatgttgccgaacccaagcctctgaacattccacccgaaaacacagcagctgcagaaaattgacaagtatgcaatggttatgctgtcccagaaatctgatagcccgccgacccactcaggcctgctctccacgaaacggcgctcgtcgctttgaagaaaagagtatcttctctcaagtgacctccctgaagttgctggcctggcgccttcagttgatgtgaccccggcttgtgcttctggatcaccttctctcagctctgcatcataatccttcccaagaggactcacaatgttatacacactagcgaataacgcagccccaaatgcaaaagaaatagtcacggcgacaccaaggggaggcctttcagatctgcggtaccctatgttgagaccacacaaggcatactgggcgaagcagttcagattaagaaagaccacaaccaccatcatgtgcatccactcattaggcttatatgtcccatttttgcagtattctttcctaagccttaaaatgtccttttggtcccatcgacacaagagcacaaagttatagatccgcatcgggtgttggtaaaggcacatgagtgtgaataatgcattcaaaatttggttgttcacttcaaatcagaaagagacgcctgatttgctaggcaaagcatgattcagcattccagtcataaccatgaagagtattgcaccagatacagaaacaacagcgatccagacgaaaagggccatgttaagaggctgccttatccaatccttgcccattgcccacagatggccccagttaattttcctgattaatcgaaaatgttcgtgattgtcatggttgtcagaatggattgaacgtgaaaagtcatcacgctgaagtgcaagctgtcgaaacttgactgaaggagaagggcccagcttcttaaagtggcaccactagaaaagcgattcacaaagttgagacacccactccgctgatttccctgttttgaaacattttgagtggaaagagtgttgacatctgtggctccgggatcattttctgatgtctttgactctacttgttgaatatcagctttgaggtttccattaccattagggaccattttgttcagcaggagtcttcagatagtagaagcagtcttaacctccttcaaatcttcttcacaaaacaagggcaagctatcttactatcggacttgaagttccatgttccacaggatcggttgctgtactgtaatctttatatgaactgggcattggccaccgaattctggcgctcaagcaaaggcgcggatccttgccttcctccccccgccgccgccgccaccgtgtcggctaggctggaaggaaagacagcgcggagggtttggtctggt

SEQ ID NO: 4372 - DNA, 663 bp, Triticum aestivum
  Clone ID: TRIAE-23APR03-CLUSTER212_26
ttcctccactcgcgcttcgctcttttctctctcagatctccgtctcgtccgcgtgttggggtaggagccatggccgaccagctcaccgacgaccagatcgccgagttcaaggaggccttcagcctcttcgacaaggacggagacggctgcatcaccaccaaggaacttggaactgtgatgcgttcgctagggcagaaccccactgaggcagagcttcaggatatgatcaatgaagtggatgctgatggcaatggaacgattgactttcctgagttcctcaacctaatggcacgtaagatgaaggacactgattctgaggaggagcttaaggaggccttccgcgtgtttgacaaggaccagaatggtttcatctcggcggctgaactccgccatgtcatgaccaaccttggtgagaagctgacagacgaggaggtggatgagatgatccgtgaggctgatgtcgatggtgacggccagatcaattacgaagagtttgtgaaggtgatgatggccaagtgagctgtcatactaagctagttctatctcgatgttagcagctagtctagccttgaaaactgacagcagttggtactactgttaagtccagtgaatgaacatattgtgcgctcagggatgttgagaatttcgtttggattttcttgc

SEQ ID NO: 4373 - DNA, 1472 bp, Triticum aestivum
  Clone ID: TRIAE-23APR03-CLUSTER212_73
acaaaacgcaactattcccaggcacatcccatttccaatcccccacccttcctctctctctcccccgcccctagccgtcgccggagagagagagggacgcggccgcgggagaagaaggagggaagatgatgatgacacgggcctccatgggggccatggagggcgcggcgctggacgaggtggtgcggcgattggtcgagggcggccgcggcgggcggcaggtgcagctgtccgaggcggagatccggcagctctgcgtcgacgccaagcgggttttcctgtcccagccgaacctcctccgcatccaggcccccgtcaagatctgcggtgatatccatggtcagtttgttgatcttctgaggttgtttgatttgggtggttatcctccaacctcaacctatgtattcctcggagactacgtagatagaggcaaacagagcttggaaactatatgcttactgctggcctacaaaataaggtaccctgacaaggttttcctgttaaggggtaaccatgaagatgcaaaaatcaacagagtttatggtttctatgatgaatgcaagaggaggttcaatgttcgactgtggaagatattctctgattgcttcaactgcctgcctattgcagcactcattgacgacaagatactgtgcatgcatggtggcctttcacctgaactgactaacctggaccaaataaaggatattgagaggccggctgagattcctgattatggtctcctgtgtgatttgctttggtctgatcctagccctgacggagaagggtggggggagagtgacagaggtgtttcatgtacgtttggtgcagatatgcttatagagttcttggagaaaaatgatcttgatcttatctgccgagcccatcaggtggtagaagatggttatgagttcttcgcacagcggagattagtcaccatcttctcagctccaaattactgcggggaattcgataatgtaggtgctctgttgagcatagatgaaaatctaatgtgctcatttcaaatcttgaagccaaatgaaacaggcacatcgcgggtaaaaagacaaattccaaataagccagcaaccgggggaagtgcctgatctgatcaacatccattccttcaatattagcatcgtcggctcgaagggggtgatctgatctattgtttggatccaccagggcatggcaatattcatccaccagccaattgtcttgcttaaccacccttagttgccgagcatttgtaaatgtccattggctctgcactcgttttctctgtacagaattaggccggatttaacagcaccacctattctggttgttcttcctggttgcgcggcatctgtttttgtaagttacttttgtggtacatttttgcctgtggatgttgatagcttctgtttgtgagcatctattatttgccttatgtttgtgacgtgacgttttaaaaaaaaaaaaaaaaaactcga

SEQ ID NO: 4374 - DNA, 1721 bp, Triticum aestivum
  unsure (1)..(1721): unsure at all n locations
  Clone ID: TRIAE-23APR03-CLUSTER212_81
ctccatgggtaggccattatttgcaagccgagcatctgttttattcagatgaaggaccttgtacttctttatcattggtaaaatctgattatgataataggatatatcagaccagctgacgggtggcatggagcgaagatacccctgttcaactctctttttcagccttggaggcagctctttcagtatccggacctcatctctcaatgatgctatgaagtagtccacatcaaatatatctcggaactcactaggatcagcccaaaatgaagttttatccaactccggcacgatgagtgtgacattcaagtatcttgcaaccgtcaccatatcacatatagcggctcgcatctggttgagaccgccattgcaggacaccatcagatagccattgttcttgtagattcgcttgngctgcagcggcagcgctgccgcggcngccctctcgcgatccgccggcagcagcagcgggcgctgcacgatgacgagcgtctgcgcgaggcagccggaccagaccccgcccaggccgagcacgctgggcgccaggtgctcaccgaaggccgccgcgagcagcaccacgacgcaggtccagagcagcacggtggtgctggcgcgcgccacccagaggctcacccgcgccgcccgccgcgccttcccggccttcccgccggcgcccatctcgtccgcggcgccgcgcgagaggaaaccaccccacccgaggccgagcgggtcaggcggtgccgcgccgcctccctcctgcccgccgtctgaatggcaggaagattccggaaggttttttccgcgatcaaagccctctctctcctaactgcgcttcctagtcctcgcctccttgtcaaaacctgtgctcgcgcggcgtgaggggtggcgtgttcgtactgccggcgggagcaccggcggcgaggttttaatcagagagacgcctcagccatcaggattcatttcagtacgtcgagttacgtacaaggtacacgctagtattacgacagtagtacgtatatcttacggtacaaaaaggtagtaattcgaagacaatattacttgagcaaaccatgcatcgagcaattcattcgagcacaaaacaatcggtgtatcgatctggcgatgtccatgcatgcatgatactgtaggagataatatgatatcagctcgatcctcttgcaaagagagataggtatggcagcttatgcggtgagctcctcctccttgtgggtctcgatgacgatgtcggacttggggtaggcgtggcaggtgagcacccaccctgcctccatctggtcgtcgtcgaggaagctctggtcggactggtcgatctcgccggacaccaacttgccggcgcaggaggagcaggagccggcgcggcaagagtagggcaggtcgatcccctcctcctcggcctggtcgaggatgtagacgtcgtcggggacctccagctccacctcgccctcgggcgtcaccagcttcaccttgtacgtcgcctgcgcgcggagcctggctccccgcacctgcttggcggcggcgaggctgagggccgcgggcgcgagggccacgcggggcgccggtggcgcgacggcgcgcagggagaagggcgcgcggaggctcagtgcggcggccattgcaagctagctggagcttagacgctctttctctgtgtggctggggagctggagaggataggcgagcgagctcccggaccggccggc

SEQ ID NO: 4375 - DNA, 833 bp, Triticum aestivum
  Clone ID: TRIAE-23APR03-CLUSTER21318_1
ctagtctcgagttttttttttttttttttgcaacgcaaacccaacattttttttattgcctaacataggtatagcctatagcggcacaacgctttggaaggaatagtccctggagctccgcagaagtgatcaaaagcgcttacagttcaggaagaactacgctcatatgcatgtgttctgcacataacacctcaccgaagctaatgcactggcaatcgcgttgccccagcatcacgagccgattatcaccacctcgctattaaatcagcattacagggttccactcactggttttctgcatgcccattgaaaacaaagagaaaacaagatggaaatacatatcacttcttggggtactcggtgtgatcaggccctatgtcgcgcgatccagtgttcacatacggtcctcggaaagtagcctgcggtggcagaggcttcgttgaatcgataataggcctgttctttgatttcacaaagtagaagggaaatgctaggccagtaccagcaaagatcaccaagccagtgacaactaaggcgttgcgtgccttggacatgtgattgttttagaaacttgactgagcgaaggtggaggctgcaggccgcgcctccttcgaggtcgatcgatggccgcgacggcgccgagacagagggaaagggggagagagcagcgagcgccgagcggggggcgtcgtggagtcaccgattcgattagagagagttcttttttggggggtgagcagcgagcgctgggcgtgggtggggtatcctgaaccactggagcagctcccccttgtggctggggtagactctcagcagcttggtttacgcatggc

SEQ ID NO: 4376 - DNA, 1373 bp, Triticum aestivum
  Clone ID: TRIAE-23APR03-CLUSTER213434_1
caaaaacatctgaacccgaaccatccaagcacaggaacagctaaaactagtttcaggatggctgcagctgcgttgtgcttcagggcgtctgctctctccgtggcctgttttctcctggccgtgccattgctgatggcacaggacccttcgaacctgagcctggagcactactccaagacatgcccaaatgcggagcatgtggtccgtgccgagatggagtgcgcggtgcgcgacgaaccacgcaatgccgctttgatgctccgcctccatttccacgactgttttgtgcagggctgtgatggatcggtgctgcttgacgacacggcgaccatgatcggtgagaagcaggcagaccagaatgtgaactcgctgaaaggatttgaggtggttgacaaaatcaaggcaaagctggaggctgagtgtcctggaacagtttcctgtgctgacttgcttgccattgcagccagggacgcagttgtcttggttggtgggccttactgggatgttccagtaggaagattggactccaaggaggcaagtcttgacctagcaaacaaggacatccccaccgctgagcagggcctcgtcacccttatttccaagttctgggagaagggccttgatgccactgacatggtggcccttgtcggatcccacacgatcggattcgcccggtgcgcaaacttccgggacaggatatacggcgacttcgagatgacatccaagtacaaccctgcgtctgcgacctacctcagcaagctcaaggagatctgccccttggatggtggcgacgacaacatcagtgccatggacagccacacttccgcgacctttgacaacgcctatttcgagacgctcatcaagggtgagggcctcctcaactccgaccaggagatgtggtccagcatcgccgggtactcgacggccgacacggtgaacaagtactgggctgacccggagctgttcttcaagcagttctcggactccatggttaagatgggcaatatcaccaaccctgcaggtggcgaggtcaggaagacctgcagattcgtgaacacataagctgaaggaacctttgtttgcgtcttctccttcgatggttgatgattgtctgcaaataagaacgtttttcatagcatatactctactggtataggtattaccgtcgtcgcgctacacagaaatattttggctgtatggagtaatggagaatgtacacatcatgtattttgagggttttgcacaacctgatattatgtacacatcagcaatggattctgatcagattttagcacctgtttcaatctgaaaaaaaaaaaaaaaaaaaaaaaaaagggggggcccggtacccaattcgccctatagtgagtcta

SEQ ID NO: 4377 - DNA, 1308 bp, Triticum aestivum
  unsure (1)..(1308): unsure at all n locations
  Clone ID: TRIAE-23APR03-CLUSTER21378_1
tccctcttttcccagaaggggttgggccccccgacggtatcgataagcttttttttttttttttgcacacccaactcagctcaacgttgttcaactcaaacatgttcattattaattctacgacccgatggacacttgcaattcagaaacatcttatcacgttcttccatcagatgaataacacaaagcgaccgaagagcgccggcgcaaaatatcacgtgcagctgctcgatctcacacatgtcctggcgatccgttcattcccatgatcttttcctgtggaatgtccactcggatgggttgatggtggatttgccgctagaggcgacaaggtcgtagggcgagtcctccccgaactcggtcggcatcgccttccagtgtaggcatggatcccactccgcctccttgaggatcctcaggatctcttccacaactatattgctcccctcttctgacaaatgcagcccgtccgtaaagcatgctgtggcccagtcctctcgtttctgcatggcgttccaaagatcgaccaccttgatgcccatctctttcgatacagatatacatgcttcagagtagagacggcaggtttcattggtccgcacaatctcgctcagtgcagtgctcgttgatttcttgagcagctcctcgttgagcggcgggcagctcagaaagatcacacgagtcttgtcggacaggctcttgaggtgctctcctatcttcctcatgttgtccatgtactcctcaagtggcacatgaggtccaagcccagaagggtgcggagcaatcgaatcattgccaccaaagtaaactaccaccaagctaggctgcactgctgaatccttggggaaaattttggtaatgacttgaagtgctcgccttgagttccatgcaatatatcctctgagaacaatatcagccttgcgggcgtagacgtcggtgagggtggctccccatccgccgttgctgaagctgtactgcacgatggaggagccgaagagcacgaacaccgggcgacccatcatcttgtccggcggccggcgcgcgtctgttgattcgatctgccctagcttcgctgcctgccggcgctggacggccggaaagaaacaatgagaggggtcgtcgaggtctcccgccctgtccctctcacagtctcgccttatctcctgtcttttggccaccgccctcactcgtggtgttggtggtggtagtggagcacactagtactaccaccgttctagtttttcgattaggaatgttttaggtaatggtcaacagtaggatccaattaaaggaagggtccccctagnt

SEQ ID NO: 4378 - DNA, 1757 bp, Triticum aestivum
  Clone ID: TRIAE-23APR03-CLUSTER21384_1
ttttttttttttgtctcgctctccacttcatatttcacaaggcccctgtttatttcggggctttcagggcaagcccaggttacgaccttggttttgctcgtacctcaaaagttacagcatttagcccaacgatttgttgcatggtacacacgttgccctccacacgccatctcgagtggggaacagttcaagaaacaaacgacaagcaccaaagtccaacctaaggcaaaatccgaacgagtgaaaaacctccttttctcaacttctgactgcacttctgtgtgcaacagatgactaaaacccgtcttgcgcttctgctaggttgatagattacaaaaatgacgacgaccaaaactgagatcaaactgactagagtacatcaatccaccaatggctggaagcaatgtttaacaaaagagatacagaaaggcggttacttcagtagcatctctgcaatctgcacagcgttcagcgcggcgcctttacgtatctggtctccacatacaaataactccaaccctctgttatcatcttgtgacaagtcctgacgaattctaccaactgatacatcatctttatccgatacctccagtggtgtagggaagcggttggcagcacggtcgtcactaatggtaacaccaggagcagccctcaagatttctctggcagtgtcctcatcaagtggtttttcaaactgtagattcacgctttcggcatgcgcgcgcattgtaggaacccgtatacaagttgcagttactcttacatccttgtcattccagatttttctggtctccttcaccattttcatctcttcctcattatagccattttcaacaataggtgcattatgcgaaaatatattaaaagcatactgttgactgaaaatgttacaggttggtggctttccttccaagacctctcgagtctgaagtttgagttcttccatggctgcagcaccagcaccacttgctgcttggtatgtgctgacaaccatccttttcaccttggcgtggcgatgcagcggcgtgacagccatgaggcagatgatggttgaacagtaggtgttggccacaatagccttttcctcgaggcggacgtgggccagggcctcggggttaacctcggggatggcgagaggcacgtcgggggccatgcgggagccggagccgatctccacgacggccgtggcgctggggttgaccgcgggcatgacggccggcacgtcggggtccatccggtaggccgagctgttatccacgacgacggcgccgctggcgacggcggcgggcgcgtgggcgcggctgacgccgccgccggcgctgaagagcgcgatgtcgatcccctcgaaggcccccggcgccgcgaggtcctggacggtgtagtcccggccctcgaagtcgatgcgcttgcccgcggagcgctcgctggcgaggaggcggaggctgcggtaggggaagtcgcgggcggtgatgacgcgcaggaactcctgccccaccgcgccggtggcgcccacgatggccacggagggcccgtcctcgcggagcgccatgcggaccgtggagggccgccggctggcgcggcccccgagcggggacgccgcgaggaggtgcggccggtggacggctgcggcggcctgcattgcggcggcggcggcggcggcggcggcctagggttttagggcggctggatttgggtaggtgggtggtggtgggagggggattgggtggggagcgggcggcccgtttctggcgggccgt

SEQ ID NO: 4379 - DNA, 1496 bp, Triticum aestivum
  Clone ID: TRIAE-23APR03-CLUSTER21435_1
tttggttttttttttttttttttttgcagcagaatgagaacttcctttatgttgcataccacagatcagtccatactgcgcattattattaattacagattacaacaggcaagcacaataaactagaaacaagaaaactaaatgaagtcctggcaatgccacgctcttctttagagcaggatccaacagcacagctagtatttggaaggagcaggcgagtgagcagcttacgaatctcacaggttctccatctggatattgctcttgagcggcacgtactcgccaaggtagccgccgaggtgctcgtacagcgcggtcctgtcgatctcctggttgtggtaggccttgcaggcgtagtagaagacgctctgcgcgagcagccccaagagattgacacagacgagaacagagacgagcagagcgccgacgcctatccggccggccaagctcatgtcgaggctcccctcctcgccccgcgccttgacgacagccgaacggaacatccccgtgatgagcccgcagatggcgaagtaggagaaaacgaggacggcggcggtgcgagtgcggccctgcaggagctgcctgctcttggacatggcggcgaggccgcagaggggctcgagcacggagatgacgctggcgaggtgccagagcgcggagatgtagacgtggatggcgaggaagagggaggacgccgcgcggtgcgggtgcggccctggaggagctgcctgctcttggacatggcggcgaggccgcagaggggctcgagcacggagatgacgctggcgaggtgccagagcgcggagatgtagacgtggatggcgaggaagaggaaggcgacggcgaggagggcgaggaggaaggagagggggggcggggtggaggcggtcatgggcgggtcgaagaggaggatgaggaggacgacggtgatgacgaagccgacgtggtaggcgagcatgaggagcgagacccagaggaaggtgcggaggaggcggggcaggatgggcggcagcgcggagagcgaggaggcgatggaggccggcttggcggcgtagagggaggcgacggtgaagacggcggcggcggtggagaggagcgagaaggtgaagaggaagatgaggtagaggaactggtaggcgaagagggcgacccactgcgcggaggtggcggtgtagtcggaggtccggatgcggcggaggatggggtgggtgaagagggagtgcgcgagcacggcgaaggagagcgggaagacgaggcaggcggtgagcagcgcgaaggtgcgcggcgcggcgcgcgggatcgccgcggagacccgcaccaggtccgccgcgccgagcgccgcgagatcgcgcgtcgccagctccatgggcggtggagagggagaagggggagggggatccggcgattgatttggttttgagctgcggtgtggtggggaaggcgcggtcggtggggtgggggcgtcgggctcaactcaatcaaatcggggaagggat

SEQ ID NO: 4380 - DNA, 1526 bp, Triticum aestivum
  Clone ID: TRIAE-23APR03-CLUSTER215497_2
aggctaaacctagatcccacatcctctcccagccgccgccgccgccgccggcgccttggattcggtggaactgagtctaagggaagggaaagacatttcgatctgtctgccgcaccgcagtgcggagaatcagaatgaaggcgcggcagttcctgaatgtggtgttgcagaggtacggcagaggcagcctgtatacggtcagtcgcatcaagcccgacgaacatctcttctacccatccaccgcccaagcacaggcagcagcaaaatccaagctcagtatggattggccatcatcagccgtggtgccaccatggatggagaccatctcgcggatgcctccgcccaggctcagattcgaacagtccgtctcagacgacaaaagactggattttttgcccttctatgaacgaggcagcggtggggatagcaagatcttctgcgtggacgctgctggccataccgttctatatgacattgaggccggctcgatccagacattaccctgcctcaacagtcccaaggggagcaggcccatcggtttctcgaccactgatcctgatgcacccgacccggagcgtgctgatgtcttctacgttatggatagggtcccttccagctatgacccctacaacttctaggtacggatgtgcagtaaccctggtaatggcaggacgatgaaaggctggaattggctcaagctaccaacaccacctggctatgctgacaattgcattggcaattcccatgcgctgcttgaaattgaaggtgactcaattcttggtggctcctccggagaagaaaggcttggcacctactgggttaacacagccagtcgcaagtggtttaagggtggctcctggacactggcattcctcagtcgtgctgggcatggaccagagctggacaacctcttatttggcattggcagggatgcacccaaccacttttgtgcaatgggtatctcccgtcttctctcgaagaggtgtccacctttagtgtacagttggccacaccttgatctgcccgaggactggataatgcaagattgcagctttgtgtacttgggaaatgggaggttttgcatcaccaaagtctttgagtttggtctggacgaagacactggcaacacgactgatatgggtgctgtgatgtctggcgtggaggtagtgcatcacaagaagtctggactcatcatggtcaaccataggtccaaattctacaggttcttcagggatgacatccaatgtgtcttgtaaggtaacttggtgaaaggggagcaacacgggtttttccaggaggattggaattgtctgtcttcccctttccatcagtatctagtagctacaacttctgctatgttagtttttgggcagtagtgctcatttccttcagtatgttgtatcactatatttgctgccgttgctgtatacatagcttcttaggtgcttttattttattattagatggactagtatcttgatgaaattatgatatggtttataactggtaaaagcctgaatggtttg

SEQ ID NO: 4381 - DNA, 1939 bp, Triticum aestivum
  Clone ID: TRIAE-23APR03-CLUSTER21550_1
ttcgttgcccttcccccccccccaaaccaagcgtagaaatataatctgcaattggccgtaagcacggacactgctcccggacagcgagaacatggacctaccatccaacaaaaccactgaggtgaggcaagtttctttgtgaactgaacatttttggcggcccggttttattcagaggcaacagctcatggctaagtatcttctgcatcttgttttggtcaaaatgagattttccccggatcaatttgctgtatcagcatacaaaaaatagaacatctggtgtcacaggaactccatgaccgatgcagactggaatatccgagtacaaagcttggacgggccttccgccgaagtgacagcacatccaatgcgaatacagatctctgctcactagaaaatccacaacaacgagcagaggacctgccaccagtggcacggtaattttgcacgtagacctgttaacgcttgacccattggaagctcttccttgcctttgcctttccaggcttcttcctttcgaccacacgcgaatctctggttaactatccagccgctttcagatatgggcgtagtcctgcttccccgttctgtaaggctctgctgacccctacgcgcacagctccaacttgacctgaaacaccaccacctttcacagtacaagctacatccccctcctgccgggctccccgcagtcctaggcgcacagctccaacttgacctgagacaccaccacctttcacagtacaagctacgtcccaaagccccaacgtcttggtcacagtaaatggccgaagaagatcagctcgatggtccagaattgggaagtaagcatcaaattgcttgtcattgacaacaaacttgccatcaccaggctgaatccaaacacgggcaatgctgcacttccttttacctgtaccataagcccttcctttctcatcaacttgtctcacacgtgccttggcaatttcctcttgcatttggcgttctacttctgccctgcttgatgttgcattcattttctggatagctctatcttgtatttcacttagaggaggcaatcctggtattcccctggcatccttcaagaggatcaaactgtcaatcatctcctccgtaatcccagaggcagaaatgagatccccaaatgcacgatcaggacctttgagagtttccatcagctgctgctccctcgccttgtcctcctgccgctgacgctccgcatcttcttcttctttcccatcaacaagctcctcgatctgggcaccctcatccgcgatcccctcaacccccacatcaagcacagccgcggcgaagggatcgtctttctcatcctccatatcccacgtccacggctcggccggggccgcctttctcgcggtaggcgctgccgcggccgcatcctttctcgcggcgaacgggtcgtctttctcaccctccaaatcccacgtccacggctcggccgggaccgccttcctcacggcaggcgctgccgcggccgcatccttgtagatctcctcgaacacgtcggccttgtcgctgtcctccgcgcggaagtccttcgaccacgggtcctcgacgacggcgctcgaccctagcggcgcttcgccggggacggcggcggcggggtccacatcggcgaaggggtccggatctccggagtcctgcgtgaaggcccacggtcttcgggtgtcgtcgtcgccgccggaggtggagagcagccgcggcgagaggaggcgggcggggaggcggcgaaatgggagaggggcggagagaggatgcggggtcgagggcgcggcagcggcggcggcgttggtggtcgtggttagggtctggaggccgcgccggaggtggtgggaggggtggaggaggcggcggagcagcatggtggtgcgcggaggggggcggcgaccattcgtggagtggtacactagggtttttt

SEQ ID NO: 4382 - DNA, 1476 bp, Triticum aestivum
  Clone ID: TRIAE-23APR03-CLUSTER21747_1
ttagggttaacccggggcgcgggaattttcccgggggccttttcccgaaaaatttctcttggtcgaggaggcgttcccctgccgccgcctcctatgtgaacatcttcttcacatctcccaccgcagcagtctcctggcgccgcctccgatctttgcatcttcttcacatctatctccggatataccaaaacaaggaggaagtagagaggaaggggtgtcatggctagccggtttgtgaatctcgcggtcaagcacatgaacggccgccatattcctttcagcatacaccgtattaatccggcagatttcttttacccaaccggatcgccagttcccaaacaaggttcagcttttgtaccaccggacgaaattcagctgcctccggccaccatcgccttcgactggccctcccggcagggccaaccctgctcaatggatttcatggccttcggcgccaaccgggataagatcgtcgccgtggacagcatagggtgctcctacctttacgacgctcccgtacgcagtatcagcaccaatatgcccatgatgcccacgtgcatgctacaacccatgtccattgctgtcggtgacaacggcctgttagttatgagtaaagccgatcaccagttcgtggctctgaatgatggctgcgaccccaattccagatatttattaccaatgtctggctggtactggcagtccctcaagccgcctcccttccccagccgctcctaccaccagaacgagaaaggcagtcaccatccatttgaagtcagctcttacacggtagttggcaattcacagttctgggtgtccacagtgggtgcaggcacgttttcctttgatatgaacagcggtgcgtggatgaaggctggcaattgggagctgccattcagaggtcgtgccgagtatgtccccgagcacaatctctggtttggcatgtttggcaaagacgaccagctttgcgcatctgacctcattgccgtgtccgcagtgagctcaccagtgccacatatactttggaaagagctggtttggccgaaagattggaagctcaggtcgacccacctcctgcctcttggttctagcagactctgcattgccaggttcttcctaacttcagatgatgacaaggaagagaacatgtcagactataagcgcagcacaacaaataattttggggtgctcacgggggtggaagtggtgtctgatgaaggaggactgcgcattatccatcacaagtccattcgcttcgatttcggcctcagcattgctagtgtgctgtgatacgttgactcctctagtgcaggtgagtttatttatatccggaacctgctgtagcacacctttcttttccatcctttgctcaaacgcactacaaaagcttgtccttttagcactatggaaaacgctttctttgctggaacataatgcctcaatcaaataaaaagttcttagacaaaaaaaaaaaaaaaa

SEQ ID NO: 4383 - DNA, 835 bp, Triticum aestivum
  Clone ID: TRIAE-23APR03-CLUSTER217772_1
tcccacacgatccgagaggaaaaagggtcgagagaacgaaaaaaaaagcacgagactcacgcagcctcctcgacgcgccgccgccggctcatcgacgccggcgtccctcctccggcaaactaaccgttagaagcatgaagcccgaagaggagcccaaccgggccccatcacggcgccgctgcagaatcaacttcgacggcctacggtcctgggcctcgtaattgtaccagatgcagaactagtaccgctacgcagctttccaccactgctccagcaagtgacgcgatctcgtcgtctgtcacattcctacgacgaagtcgagcgcggaggtcgaggatattctcgctgcgggggagaaggcaaggccgcacttcaggagctaccgcacggcggacgaggcgtccgcgaactgatgtcaggggcacaagcagagggggaggacgtggccaccgccaaagactggaggtactgctgcgcctaccgccatgccggcggcgccgcagaagcgttgattgtgcttttggtgcgctgtgcttataaccaccggtctttgttcaatcttgagttaccgtgacagggtaaataattggaaccctgtatggaaggataccctaaccatgttgtgtaaagcatggcaggcagctgatcggtggttcttatgctattttttgcaccagctatgttagctttctgcctaattatcaagcataaaagttttggtttgtgctgtggtgtgttctcattaatttttaataaatgccgactagataatttcagttctgagctgtggtgtgttctcattaatttttaaatgcagactagtcaatttcagtta

SEQ ID NO: 4384 - DNA, 1736 bp, Triticum aestivum
  Clone ID: TRIAE-23APR03-CLUSTER2180_1
cccaggccctccgtctctttccctcctcggcatctctcctctcccgaagcttccgcctcccccccctctctctctagggttttgcggcgaaccccaccgccgatccccggcagcatggacgtggactgcgaggtctcggcggccgcggccgcggcggtgacgaaacgggctgggcggcggggtccagcccgccgcggcgccgtctgtctccgccgaccagctcgacgtggaggcgtacgcggcgcagtactcgggccggacccgcgtggcgcggctcctcttcatcgcggaggggtgcggggtggaggcgatccagctcgaggcgctgcggatggcgcacgacgaggccagggcgcgcgaggacaccgtgctctacctcgacgccgtcctcaagatcaacggccgcctcggcccgcgctaccgccacgaccaggcctgggtcgactccgtcaaccgccgcgccgagcagcgcaaggagaagctcgagaccgaactcaacggctacaggactaacctgatcaaagagagcatcagaatgggttataacgacattggtgacttcttctatgctcatggccacctttcagaagccttcaaaagctatatccggacacgggactattgcaccacttccaagcatatagttcagatgtgtatgcatgtgattctggtcagcattgagttgggacagtttgcgcatgttaccaactatgtcagcaaagcagagcaaaccccagacaccttggatgctgtcattgttgcaaagttgcgagcagctgcaggattagccaacttggagacaaagaaatacaaacttgctgcccgtaagtttctcgagacaggacctgaactaggaagcaactattctgaagtcatagctccgcaagatgtggctgtctgtggtgccctttgtgctcttgcttctttcgatcgttcagaactgaagagcaaagttattgacaacataaacttccgtaactttcttgagctagtgcctgaagtaagggagctggtcaatgatttctatgcaagtccctatggatcatgcctggagcatcttgagccgctaaagccgaatctccttctggatatccatctccgtgagcatcttgggactctgtacaatgatatccgccacaaagctatcatacagtacacgcttccgttcatatctgtagatctcaacacaatggctagtgccttcaagagctcagtatcgatgctggagaaagagctggctgcactgatcaccgagaacaaaatacaggctcggatagactcccacaacaagatcctgtatgcaaggcatgctgaccaaagaaacgcaaccttccagcgggccctccagactggcaatgagtttgagagagatatcaaggccatgctcctgagagccaacctcatcaagcatgatttcaaccagaagaactggcctggacaaaggaagatgaacctgtgagctctgagttaatgctaaaaggtctcctccgcttggaaatagttgttttgggacaaagggtgcaatggcacattgagaggtttctgtccgtgaaccgccttgatggctgaacaatcaactttgtttttcttctttctgttggctcttaggctgtgaatgttgctggcacaaacggtttatgaataggttatgcatctggagatatgatatactacctgtttgatgccattccatgtgatttagaaagttcttttaaccggcaaaaaaaaaaaaaaaa

SEQ ID NO: 4385 - DNA, 2360 bp, Triticum aestivum
  unsure (1)..(2360): unsure at all n locations
  Clone ID: TRIAE-23APR03-CLUSTER21869_1
catttctccctcctgtccgccataccttccccctctcccagggagcctcccaagcggcccccgtacggaccggaaatgagcagggcgagcgcggtgctgcccccccccgccccgtccaccgcctacgggtcggccttcctgcccccgcccgcgtcgccctgcgacggcgacctgctccgctccctgcaccgcctggcgcgcgacctcccggccgccggcgcgcccgcccccttcctgcgccccgccttcccgtccctctcccggcgcgccaggctgctcgccgccgccttcgaccacctgcttctgtgcgccgcgggcgagggcggcctgccgcggtcggccccggcgtcccccccggaggtgcgcctcgtgctgcacctcttccaggcggtcgtgcccgactgcgccgccgcggggccgaactctgccgctgctgcaagtccgcggcgacgcacccccagcagggcgacgtggcccaagaccgggcacggcctggccaatctggagccggggcgcagcacagctcccaagcccccgatctccaggtggttccgggagaaccgcgtggccatggaaggccgcgtgcccggcaggagcgagccggcccaggcggcgcccgccaataaggcggcgcccgaggtggcgcgcaggacggcatcgtatctggggaagaagctctccgtctcattctcccctgacgcggccaaccgcgtggtgcacgagatccggctgctctccaagtcgggctcagacaaccgcgcgttcgccggcgtccgagagatggactgccgccatgatcgccctcgtcggcctcctccggtacgccaagtgcgtcctgttcagtgccacgccccggccttcggattccaaggcggacgtcgatgtcgaagacgacggggaatccccggcgccgccaccggacctgcggtgccccatctccctcgatctaatgcgcgacccagtcgtcgccgctagcggtcagacgtacgaccgcgagtcgatcgaccggtggttcagctccggcaagtcaacgtgccccaagacggggcaggtcttggccaatctggagctggtgcccaacaagtccctcaagaacctcatctccaagtggtgccgggagaacggcgtggccatggaggtctgcgaggccagcaagagcgagcaggcccaggcggtggccgcgaacaaggcggcgctcgaggtggcgcgcatgacggcgtcgtatctggtgaagaagctctccgtgtccttctcccctgacgcggccaaccgcgtggtgcacgagatccggctgctctccaagtccggctcggacaaccgcgcgttcgtcggcgaggccggcgccgtgccgatgctggtgcccctgctctactccgagnacgccgggctccagctcaacgccgtgaccgcgctgctcaacctctccatcctcgaggccaacaagaagcgcatcatgcacgccgacggcgccgtggaggcggtgacccacatcatgagctccggcacgacgtggcgcgccaaggagaacgccgcggcggccgtgctcagcttggcgtctgtgcacacgtaccgccgcaggctcggccggaacccgtccgtcgtggaaaagctggtccatctcgtgcgcaccgggcccacgagcacgaagaaggacgcgctggcggcgctgctgtcgctggcgggcgagagggagaacgtggggaagctggtggaagccggcgtggccgaggcggcgctgtcggccatcagcgacgaggagacggccgcggcggtgctggcggcattggccaagcgagggggcgcggaggcgatcgtcagcatcgacggcgccgtggcgcggctcgtggccgagatgaggcgcggcacggagtgggcccgggagtcggcgacggcggcgctggtgctgctgtgccggcggctgggcgcgcgggccgtgacgcaggtgatgggcgtggccggcgtggagtgggcgatctgggagctgatgggcaccggcacggaccgcgccaggcggaaggccgcgtcgctgggcaggatctgccggcggtgggcggccgcctccgccgccgacggggagcggggcgccgagtgccccgcgtccagcgtggtgccgccggccatgatggcctcctaggatgaattaatcatgctcttcttgtacaaaccacaaggttcgattaggcaggctgtgtcacgattctttgatgcgagagataacaaaatggtgagtgatgttgatcaacaaataactatacagacggtgctccgcccggctcggccccttgtcttctcccctccgtttgcacacccacatttgtccccgttcttcttcttgacacganaaaaagaaaaaaaaaaaa

SEQ ID NO: 4386 - DNA, 1087 bp, Triticum aestivum
  Clone ID: TRIAE-23APR03-CLUSTER219067_1
cccaaagattccccttccagcctggtgcccgccggcggccgccctcctgcagctcgacttctcctgcagggctgcaggctccagcctctgccggccgcctccctcccgcagcctggtgcccaccggccgtcttcggatccccttctgctcgccctcccgcagccccgtgcggtggtgcccgccgaccgcagcaaggaaacagcttaggacatggcaatggctgtggaggcgcgtctccggcaggagaaggtgaagaagtttgaagatttcgttgaccggcggctcaagcctgacctcgttaacgccatagcccagcgcgataacttgttccagcagcagaagacattcttggatttgaagaagaacatcgaaaatttggaaaagaatggtgtaacgagtatgcgatctatggtcaatcttgggtcagaggtgtacatgcaggcagaagtgccggacacgaagcacatctttgtggatattggtctaggttttcatgtggagtttacttggcaagaggctttgcagtttatatctgtaagagaagcaaggttggccagacaaatagacgagtacacacacctcatagcgagcataaaagcacagatcaagttggtgtgtgaaggtatccgcgaactcctgcagttcccggcggagtgaacggccaggatcaaacttgcggcagagagatgcttacacaccaaacttgcggcagagagatagagatgcttggtagagggatatgatgtatcttgccatggatttttttgaagattcttgcaacaagctgtatgccaagaatgcagctctcccaagtcccaatgttgactaggaggcattgtgtaaactaaatataggtaaaagaagtggcaaatgagaatattgtgatcattgaacttttgtttaaattccgtgaaggttgttgcaaatcatcaagtgtctacacttgatgtgagttggtatttgcaaactgaattttgctaggaaagtgttgggaaatgcaatgtgtttcagatgattgcagcaaatgcaatgtgttgggaaataataacctttcttgctgcccaaaaaaaaaaaaaaaaaagcttat

SEQ ID NO: 4387 - DNA, 1155 bp, Triticum aestivum
  unsure (1)..(1155): unsure at all n locations
  Clone ID: TRIAE-23APR03-CLUSTER21956_1
cacgctccacttcccacaccccttccttcccctgtttcactccaacttccctcgcattcctctgcttcggtagaccggtaaaaatggcagcctccctgccgtccctctcgcccgcgccgacgccgtcgccggcggccaccaccttggccagcaacctcctctccttccccgccccgcggccgcgcctcgccgccacgcaccgccgcgcggtcgtggccgcggcctcgtccaggccccctccccctccgccgccgtccccggagggaggggacgaggaggtggagagggccatggggatggacggtggcatccccgggacctccggagagctgctgcgccgcgtctcctcccgcgcctacggcatgcgccgccacctcatggagtcgctcgactccctcgcctacgacgtgtttggagacaaaccccatggagagaacaacacccaaaaccagtctatgtgctggctagaangagacaatcaactatggacaatgaaaacccgtaggaaccgcagtgaagtcgaaagggaacttggaatgcttttctcaaagggaggaggttcaggggttgggactaaatcaaagtactctggctccaagtttagtatggttgttgaagatctcacagagggagtactggtgtttgaagacgaggacgatgctgcaaagtactgtgaccttctacagggcggtggtcaaggatgcgagggaattgcagagctagaggcttcatcagttttcaacatgtgccgtcaaatgaaagctcttgctgtccttttccggcgtggaaggattcctccaacgcctcaaagccttgagcgtgacttgagggcaagaaaccggtcactggaagactaggtggatctttgagacacacggtgtagatatgtcaattgtattcttctagctgttgaagcacaggccctatgccttgtatactaaatggtacatagatgattcaagccacacgaaaaaagggtgaaaaataactggtatatagattcaatgatagccaagatggagtgaaagtcaagtctgactgagtacatatttagcttgagattagcaatctctgtaaaactgaatattcttgtaattatttacattgtttacagtgaataaatgagattttaagttactaaaaaaaaaaaaaaaa

SEQ ID NO: 4388 - DNA, 605 bp, Triticum aestivum
  unsure (1)..(605): unsure at all n locations
  Clone ID: TRIAE-23APR03-CLUSTER21_2
ttctgtcagtttagacgnnagggncanagaagtacgaacccgccgtcgnnnaaganntnatagcattaggcagggggnacaaaaactggacgattcaatccgatccaaaacaaggttttctctcaccatgaagagggnaacgacactggtgctcgtggncgcgctcgccgtcctcctcctcctcgcctcaggccccgcgggcgtcacggccgcccgaacctcgcccaaggacgtggcaacggcatctcccaacgagaaggtcgcggcggcggcggcggaagaccacgagtgcgagatgatggccggccagaagcgcgggatgtgtgcatggcgagaaggacgctcgccgcgcacacggactacatctacacccaggagaagcacaactagtagccttcatatctgcgtccatgtaatgtaatgatgttagtcggcactgcgtccgcgtgttcgatctctatcctatagcttccttcataaaaaagggaccgatcccaccgtgcatgcatcgcatgcatgcatggcgcacttatgtattgcctataatttagcaattcgataatcaaaaaaaaaaaaaaaaaacttggttttattgctcggtttgc

SEQ ID NO: 4389 - DNA, 1140 bp, Triticum aestivum
  Clone ID: TRIAE-23APR03-CLUSTER2202_1
gcatccgcggcctgccttgctctcggacagggtttcgccgcgtacacctagccatggccgcctcgctaccacgcctctccctcccgccgacggccgctctccctgccgtcacctcctctcgctaccgccccgacctcgcccccgtccccaaccgccgccgcctcggcctccgtctccaccgctccccggtggtacctgcagccgccgcgagctcgccgtcccttctgtcttcttcaccgcaaccagggtcgggtatcggtgatgccctcggtggcgtcgccatcttctccgcggccaccggcgagcccgtcctgatcagggatctgtgggaccaaaacgagggaatggctgtcgtcgcgttgctaaggcatttcggatgtccttgctgctgggagttagccttgacgttgaaagacgcgaaagaaagatttgattctgctggcgtcaaactaattgctgttggtgttggcactcctgataaagcccgtattcttgcttgagcgtttgccctttccattggattacctctatgctgatcctgagcgcaaggcttatgatctcttgggcctatattttggtgttgggcgcacattcttcaacccagccagtgtgaaagtattttctcggtttgattccctcaaggaggcgacaaagaactatacaatcgaagccaccccagatgacaggccaagtgtcctgcaacagggtggaatgttcgtgttcaaagggaaagaactgttatatgcaaggaaggatgagggcacaggggatcatgctccattagatgatgtcctgaacatctgctgtaaagttccagtagcctgatgtcgaatcctacaaataggcgcttctcgtagagacatttcataagcttggcatcagatgactttcgagatactggatcctgatgtaagggtagcatccgccccatgtacatgtattaggctttgttcggttacaccctgtcccaaggcgattggaggggatttggggggaatttgacttgtatgggatataattctcttcaatccctgccaaacccctgtcaattgaacgcagctttaagatttttggcgaacactgcacagtgagctaaaatatagcgatacgttatcttcaaaaaaaaaaaaaaaaaactcg

SEQ ID NO: 4390 - DNA, 1347 bp, Triticum aestivum
  Clone ID: TRIAE-23APR03-CLUSTER22038_1
ctctctgaccttttttctctgctctcgccgctggaacctgacggaaaaaccctacctcgccgtcgccccatcgtcgaacttcccgatggcgtcgaggtgcgcggcgaggcttccgcacccgccgtgcgcggcgccgcagcacggttgggcgagctcgcgggtctcggcacgcccggcgcaatccggcgcgtcaagagggcgtgccgtcgcgtgcgccgtcagcttcaggccatgtatcgacattcacaaggggaaagttaaacagattgttggctctactctccgggatgcatcggatgatggcactgcactggtgacgaactttgaatcagacaagtctccagcagaatttgcaaatatttataaagaagatggacttgttggtggacatgtaataatgcttggcggagaccctgcaagccgttctgctgccctggaagcactgcatgcatatcctggtggtttgcaagttggaggtggaataaatttggagaatgcaatgtcataccttaatgaaggagcaagtcacgtgattgtaacttcttatgtgtttagtgatggcaaaatgaacattgaaaggctaacgcaacttgtcgagcttgttgggaaacaaaggcttattttggacctgagttgtcggaaaaaggatggcagatatgccattgtgactgacagatggcagaagttcagtgatgtctttgtggatgggccaacattagaacgtcttgctgcatatgcagatgagtttttggttcatggagttgatgtggagggcaaaaggttaggaattgacgaggaacttgtggaactattgggaagccattcacctatcccgacaacatatgctgggggtgtgtcaacgatggacgacctggagaggatcaagaaagcagggaaaggtcgagtcgatgtcactgtcgggagtgccctagacatattcgggggagatttgccctacgatactgttgtccgttggcacaaggagcaaaacctggttagccaacggtgaagaaatcagatgatctttttatagagcaaatgatcgaagttcagctcatgtgtgatccccacctgaccatggtcaggtcaggttatagagctttattgtttgctggacattgtagtgtgaaccgcgtagtgtgaatgtgtcttgtgtgacatgtcaaagctgaagcggaggtgtcaactcagtgtcgtagaggaccacccggtattcagatactgttcttcacattctgtttgtattgtagtactggtaatggtgaataaacaggggttgaactgcaaaaaaaaaaaaataaaaaaaaaaaaaaaagggcttagcggccccgaactaaaaaaaaaaaa

SEQ ID NO: 4391 - DNA, 2224 bp, Triticum aestivum
  Clone ID: TRIAE-23APR03-CLUSTER22057_1
cagggtgcaaatcgcttattagctcccttctgttccgtgatacacatcgacttgtcgttctctccgtacgccagatctggtaccctactccgccggctggcccgatcttggtaggccctggccgccagactactcagggagagcggccgtctgattatggggaaaagggcggtatcaggagtggaaatcgtggtgctgattcatatgcacctggtccagatgacacaggcaatcgctacctttgcacatataggaaaatagggaataaaattgtgaggggtggcgaaattgcctagaagctgagaagggatactctagctaagagtaggattggtgacaaacagcctaggagcgatacccaagctaagattaggtttagttagagtctccctaactacgatgaccgaataataacaatatttagctcaggctgggagactactttttgtgaagccctcgcaaaaaaagtttgaccgactctagggcctctcctgaggattcttgagaaggttggacctgactgggatgccgtaaaccttctgaatcccctaagtttagatcaattactcgtatcgttgcctctggcatctgggtaatacggaccgaccgttgatgaccggaacctattcattggaaggacccacatcagaattggtctacgagtacctatgaacagttaataataatttgcgagccgatggtactagtagtgatgaacttctactgataattggggatccgatggtacttataaaagctcttccctaagtgtcatctcgcctccatggcaacccatccaggtcacagcatctccttgcgtccagcttaacccaaccttttccagctggatcccgccttggtagttcctctactgcaccagttgtagggattactcctatggttatctatatacgaccaaccgaaggtgatatggtgggagattggccttctatataccaacaacggagggaggtgagctctgcaaaagagtttagccatgcgtctgctttgtgctgcggcgaatgtcggaggtgtaattggaaaaagaggtggtattagcaaacagattaggcaagaatctggagcttttatcaaggtggatagttcctttgatgatcctgtctctccaacaattgatgctacagtccgtttacagccaagatgcagtgagaaaattgatgaagcatcggtccgtttacagcatactaccagtgagaaaattgatgcagaatcgggggagccatcatatactacacgtttgttggtcattacggcactacgaagaacatcgatcgcaaacatacggatcatttcgacggaggatgttccaaaagcagcatcggccatacgaatcatttcccaggtcggtgttccaaaagtagcatcggacgacgaagagatggtccagatcagcggagatcttgatgttgcaaggcatgctcttgtgcaaataactacaaggctgaaagccaacttctttgaaagagaaggtgctttatcaggttttccacctgtgatcccatatcaccctttgcctgctagtgtgtccgatgagccaaagtatctaagcagagacaataagtctgctgggcacgattatccatattctagtggatatcgtgcatcagacgatgtgcttcctgttgaccgttatgcaaattatggcagctcccaggtctacggaggcggctatggtgcttacagtggtggttctggcagcagcgggttatctggctctacctatctttcatctggaaaacgctatggctattaaaatgcaggttgtcgaatccaacagctcagctctcttccgatgaacctgtccgtttcacatttgcacccctgcccaatcctttactgaaaacagccaagaccaatgaagtttggagcctgcttattggagcccctacccaaaccagatgactgagagtatggcccaacctggaagctttgcttaagaggacctgtctggatgccataaaccctctgatttccctagtagaatacatttactctttatcttttcctccgggcctgtgtgtgatgccctgccgtaaatgttctgaacctatgtattggaaggtcacatataagaatctgtatttgttgtcctaaaacctgcttagtagtttgtatgagagacttggtcccctattcgccatccaaaacttaggagatgctacttgcccttgcttgcaaatatgcattccttcattgatacaaa

SEQ ID NO: 4392 - DNA, 2244 bp, Triticum aestivum
  unsure (1)..(2244): unsure at all n locations
  Clone ID: TRIAE-23APR03-CLUSTER2206_1
atctaaccccagtatttgtcctcctccaccccgccgccaccatctaaccccaggatttgtcctcctccacccagccgccaaaccttctcgaagcttccccggcccgcccccgatccgatcggaccgcccgcccgccatggccgacgaggcgaaggccaaaggtaatgcggccttctcggccggccgcttcgaggaggcggcggggcacttctccgacgccatcgcgctcgcccccgccaaccacgtgctatactccaaccgctcggcggcgctcgcctcgatccaccgctactccgacgcgctcgccgacgccgagaagaccgtcgagctcaagcccgactgggccaagggctactcgcgcctcggcgccgcccacctcggtctcggagaggccgcgagcgccgccgccgcctacgagaagggcctcgcccacgatcccagcaacgcagggccttaagggcgggtatgctgaggtgtgctgagcggatcaccaaggctaacaggggcgggataagtcagggggaattgcaggagaagcagagcagagctcggaagtccacaacaacccagaccatcctatcctgcgccagctggcgacggatgtcgatggatttccaggggaaccctagggctgctcaggatcacctgagggaccctggagtagcacagaagatccaaaagctcataaacgcccgaatagtccaaaccagacgatccagcaaagccagaacgaagccaggggcggttgtagtgagattgtgctccgttgtgtaaccagtgtacactgcttctcgggccagcgtgaacgtacttctattcgatgccatgggacttgtctgttggagtcgtgcgtacagcctggcacaacgtgattccagcctacaactatatggtcttatagccggcgaatgtgcgctatgcccagtcctaggagtttgagcccgaggacatctcctaccgcactgaccgagctgcggtgttcatcgaaatgggcaagtacgatgagtgcattgaggactgtgataaggctgtggagaggggaagagaacttcgtgctgatttcaagatggttgcaagggcactaacaagaaaaggaactgctctggccaaacttgctaagaactccaaggactatgatattgccattgagactttccagaaggctctaactgagcatcggaatccagacactcttaaaaggctaaatgaggctgagaaggcaaagaaagacttggagcaacaagagtattatgacccgaagttagctgatgaggagagggagaaaggtaatgagatgttcaagcagcagaagtatccagaagcaataaagcattacaatgaggctatcaggaggaacccgaaggatgctagggtgtacagtaatagggctgcatgctacaccaagttgggagccatgcctgaaggtcttaaagacgcagagaagtgtattgagctagacccaaccttcaccaaagggtatacaagaaaaggtgcagttcagtttttcatgaaggaatatgaaaaggcaatggaaacttaccaggctgggttgaagcatgacccgaataaccaggaactgcttgatggtataaggaggtgtgttgagcagatcaacaaggctaacaggggtgacataagtcaggaagatttgcaggagaaacagagtaaagctatgcaggacccggaaatccagaacatccttaccgatcctatcatgcgacaggtgttgatggatttccaggagaaccctagggctgctcaggatcatctgaaggaccctggagtagcacagaagatccaaaagctcataaacgctggaatagtccaaacgagatgatcaagcaaagctagaaagaagccaggggcgtttgtattgaaattgtgctcggttgtgtcaccactgtacactgcttctctgcccagtgtgaacgaacttctattgtatgccatggggcttttcagttggattcgtgagtacagccagccacatcgtttttcctgtttacggctattatgttacagttttatgcgggcaatatcccatgttattacttgtagccgtttccgccttcactgtggacaaagagaacaatagagtgttattgtattttatttcttgctctaggaaaatgctgtcaatggagaaaattcataaccaacaaaaaaaaaatcaccaagggaaggnccaagtctaggaactagggantncccagngggganantccctaatanntatnccgccat

SEQ ID NO: 4393 - DNA, 1692 bp, Triticum aestivum
  Clone ID: TRIAE-23APR03-CLUSTER22073_1
tttttttttttttttttttttttataccaaacattttctttcgattaacaaagattatataagggtctgttttctgtgcctcggttcttggcctttgaccatcctggttatttctcaacataacaaggagtacaaagtagcatggccaaaacagagagcggtcctttgggttatcagagatggaagaatgttttactccctccgatccagtactaaagttgtactaagtgagcaacaagtaatacggatcatagggagtacaactacaaatatttcccagtggaaaaaagaatggtgtgtcttcactgattgccaaccaaaaaatagctctgcctgatgcttcaagtgttaaaactcttggcgggtgctgtgaacacaaccctgaatcatcttggtgatagatgtttgaacaaaacttgttatttggcaacaacactgtgggaagacaatcctgtcccagtgcgccttagtagtgtcagcggctgttagaaagcgtagtcatagatggcctgtgcaactccatcttcgtcgttggtggcaccgattacatttgccactgctttggtcttctcggcgccgtttgccagagcgacacccagtgatgctagctgtagcatttctatgtcattttctccatctccaattgccattacctcgtccgggctaatgcaaagatggtccagcaaaatcttcaccccggtgcccttagaagttgcaggtggtacaagctcaagcatatcaggctgtgcctggagaacaccagccctttcttttatcgcctttgtccagtatggcctcaatgtggaagaaactccctcagaagttccaatgaacactagtttctgtatctcagctgttcctaaaagctggtcaatagatgccactatttcagccttaggttcatggtatacttcatggagagaatcaaccaatgggtccttaaacatagaaaaacaccgatcctggctaaatgctactaatggtaccttgtgctccaaagaatataagaatgcctctcggcatacttcttggttcaatgtatttctataaatttctctccttccaaaacataaaccaacagcccctgaagaaatataccagacgaagattctgaaacaatgccatttcttccagataaatcaaccatattaagagcatcaatggcagctgggcgcgtctttcctgtggcaataactatgtttactcctcttgacctagcttccttagagcttctgcattccttgctgttacttgacttttactgttgagcaatgtaccatccatatcacagaagatatatttgaattttggtctataaaatctcaggctgccagctctctttagactgtttgttacttgtccatccaatgtttatgtgttaggcttgctcaaatcaggagcgttcttagcaagacctttccctttccaccttagactttttaaaatgtcatagtgatgaggctcaattccattgcagcccacgcgtccgcggacgcggtcaaaacccagaagacgtaacaggccacgaaccactagtgtccgcagttcatcaagaagggtatggcctctcgcctcagcttgccttgcagctgtttccacggatattactatatcacccaacataagagtaggaacatccagatcgggaatgaactgtgacactgagagcatatcagtagcctcgtgccgaat

SEQ ID NO: 4394 - DNA, 1517 bp, Triticum aestivum
  Clone ID: TRIAE-23APR03-CLUSTER22143_1
atcttttccaagcgcagaggcaaagttgtgcacgaggaaggcaagcgggaaagggcaattgtgaacgagcagcgcgtccgggcgcagacgccaagtgcgccgcggcgagggcgtgcggcatcgactcgacccactgcagcgcacctcgtgcggcgccggcggatcatctctccccacgccgtcccggagtcctccgtgcgagcaaggaccagaagaagccataatggaaggaagcatcagcggtccggcagcgagaggggttgccgtggtgaccggagggaaccgcgggatggggctggagatatgccggcagcttgcggcgcatgggctcaccgtcgtcttgacggcgagggacgagaaggggggcgcagaggcagccgaaaagctccgggaggaggggctatcggacgtcgcgtttcatcagctggagatcagcgagcccgccagtgccgctcatctggctgctttcataaaggacaagtttggcaagcttgacatactggtcaacaatgccggagtgcgacccttcaaggaaacgcttgcaggcaaggatgggatggagagagccgaatggctgaggcaacggaccacacagaccacccaggatgcagaggactgcctgaggatcaactaccacggcaacaagaccgtcacggaagccctcctcccgctcctccgatcatcctccgacggcagaattgtcaacgtatcctcaccctggggggtgctcaggtatatcagcgccgacgagatctggcgggagatggacgacgtcgcaaacctctcgacgcagcggctcgacgagatatcagacctgttcctcgaggacctgggcaagggcaatggcgcgctggagcgccgcgggtgggcccggccgacccggtgtacgcggcctacatggcgtccaaggcgctggtgtgcgcctacaccagggtgatctccagggaggagggcgccgcgctgcgggtcaactgcgtgcaccccggctacgtcctcaccgggatgaacgactacaccggcgtcctcacggccgcggagggcgccgccgccgcggttgcagttgcactggcggagaaggggggcgtcaccggcgcctacttcgaccgcactgaactcggagcgtcctttgtgtgatttctccgtggagcagttgtgacataagtatatctagaattatgttatctttgcaataacacaatgtcatgagttgttccagatatggagaattatgttgtgttcacttttttttctctccgctctcagaagtactctccgttcactattatataatgttctaacttttttataaatcagatgtttttagacacgttgtagtatgtcagtccttacgttgctgttcgtgtgttgtccatatcgttttattcaaaacattttataataagtgaatggagagagtagaatatttccaatgtcaaggtaaatctcttgaaactactagtcctttcgatccatattaattgatgataaaaaaaaaagtcgacgcggccgcgaattcg

SEQ ID NO: 4395 - DNA, 951 bp, Triticum aestivum
  Clone ID: TRIAE-23APR03-CLUSTER22145_2
atcctcggctagagcttctccgtcccgtacccctgcagaccgcgatctccgcctgaaccaccggccgggactgctgctccgcttgctctcccccgtcggagatccgcccggagcgactttcgtctttctgggttgttccgaagctgcagaagcccaaacccggaaacagagtagacggcgccgcatctatatttgcactcccacgcttaaagccgaggcggcggaggaagctgtgacagccatggcgtcgtcgttggcaacggcaccggctgctgtacgcgatatgcagtgcgacctcgagtcccaggccaacgccctcagcaagatccagaaagacatctccaagaatcacgaggtccgcaagcagttcaccatccaggtcggcgagaatgaactcgtcctcaaggagctggagctgctgaatgaaggggcgaacgtgtacaagctgatcgggccagtgttggtcaagcaggacaatgcggaggcgaaggccaacatcaaaaagcgcatcgagtacatcacagctgagctaatgagaatggatcgggcgcttaaggacttggaggagaaacagaatagcaagaaggaatcgataatcaagctgcaacagaagatgcaggctgtacaagcaaaggcgcaggcgtaaatgaagggctccctgcattagggccttcgtcctcccaaatgtatgggtctgtacaaggcgaagttagttgccttgtgttatctatcccctaaaaaggtgaaagaaatctgtagtgttcagagattgagagaagttccaggtttgtgtagtgagagattttgtttgagagtggatactcggttgaagatgtacctcttgctggtttctagtgatatggttgaattgacttttgttccgagaaggaattggatcaattttttgcatgtaccactttatttcttctatctttgcttatgttgattaat

SEQ ID NO: 4396 - DNA, 1880 bp, Triticum aestivum
  Clone ID: TRIAE-23APR03-CLUSTER22148_1
agcgcgagacctctcccgcaagcaaacccaaacaaaccgccgtccgcccccctcccccctccacccccgcccaccgacgccgccgcccgcgcgctctctcccgacgacggccgccgaggccggcagccggagccccggcctcgcgagaatcccgagcatgaaaacgcagtagcggcgccgccgcgccgcgcccggcaccccgacgccgacagccgccatcgccgctctccggttgaggtacgcggcacgcgcaacgaccacgtcgacgtcctcgatcttcgccgtggcgaagccgccgggccaactagagcagtccttcagtgatgtagtgagcaaagggatggatcaccatgacgcgagacaagacttggacggatcaaaacatcgaacaatatcattgaggggagacgatgtggggaaaaaaagtgtggtagttagaacaacattgttgcaaaaacgaaggaggaaaaataaaggggaagagagaaagctggaagaatgtgctaaaatcctgcagaaagctgtggttggaagggaaagattgatgaacatgcaaaaattatggagcatgtttctggatgactgaattgtctagatggtgtgggcacacaaatttgctcccagaagattgcaccttgggtctttgccggggataccatgatagtgcgaaaacaaagccaaaagaaagcgataatatggttcaggaagccccttgcaaatgtaccttcactcttagaactgaagcgcatctactatgaactgatgattcgctattactccacataacaatagattacctggaaatcctgccgtttctactaagtcgatctatgaatattccatcaataaaagaggatccagcaaaggtgggacaccagatttctttaaggaagttcgtgttggcttcgtgggtgcatcggcaccttcaattgatccaatgctcagccaagccttcttaatgctacaactacatgataaaaacctttcagagatcccataatttcgaattaagtattgaagcctagttgtgatccaaggtgttgaactactggtgaaacgttttgggaatttataagagaacgaatagagaaacttctaggaaatctccttaggaggatacgatacggaggataatctagctgaggatctttgaggctaaaaagttgtggaggatcataagttggatgtgactaaacacaatttcttggttgttccgaaatactatgccggaacttccctgaggcagctggcggacctcggtgacgtgtgcttcgaagaggcagagaatgataactctgaccgtcgtgaacggaaaaggccttgattgcctgaccttgcacacggccgagggcaatagctgtgcgcttcacgcatggcccaggaccgcgaaggggctgctgaacttcgtggacgacaaacccccgaaaaagctcaatgaaacgggtgtacaaaaggcgccactaaatacccaaggagacgatgttccacaaggctgtgtttaatgcctttagtggaccattttgatttgaatgtatccttgtttaaggttgtgtgcgtagtaaaattattctcatggctcaagtattcactgtcactttgcggttaaaacttgtctccctagctctactgggctacgcctgtttgctttgggaagtcgtgtgtggaccggcctcgaaatactgtaaccacagggaatgacgaatactatttgctgtatttttctgaacattcttttgtcttctttggccaaaaaaaaaaaaggaaaccaggagctagctgctcatcaggccctgtacccagttccgggttgccgtgctggggcacgcgctcgggcggttcacggtttatcatgtcattgttggtaaaacaaaaaaaaaaaa

SEQ ID NO: 4397 - DNA, 2044 bp, Triticum aestivum
  unsure (1)..(2044): unsure at all n locations
  Clone ID: TRIAE-23APR03-CLUSTER22156_1
agttcggcttgaccaactgaaacctcttcctcgattcaatcggagttgaggcatcctcgtgcccacaccgtagcgccttcagcctggtagacccctcatccggccaaaccttccccctcccaacacgccatggcggcccgcccagctgcgtctgccttctcctagccactaccggctttgactcgatggaagtccaagccagaaaacaagcccggctccggttcaccccgtcaccgtcccggttcctggaagctgcacaaaaatgctctagcagagatatcgtccactgttcttcagtccctatcgttcccaaaattgatggatctcactgggaatgcatctgcgaaaagtgaacttacgaccattccagctagtatcggagcactttcaaaattagttcgaatggacctgcaccagaacaagataacttcgattccttcttccataaagggctgctcttctctagctgagttctacatgggaaataatttattgtcgacaataccagatgatattggcatgctatcaaaattaggaacacttgatcttcactccaatcagctgaaggagtatcctgtgggagcttgcaaactcaagctcagttttcttgatctgtcaaacaacgcattatccggcctgccagccgaactaggtacaatgacaaccctaagaaagcttctgcttagcggaaatcctatgagggcacttcgtagttctttggtttctggaccaacatcaacattgatgaagtatctgcgaagccgcctttcgtctgaggaggaagcatcagggtctagaaccaccccaacaaaagatgaccagatttctgcagcaagacgattatctgtatcttcaaaggagttgaatttgagtggtcttggtgtgcccaatgtaccccctgcagcttgggagacaagtgatgtggtgaaacttgatctttctaagaacttgatagaagatctgccaaatgagttgtccctgtgctcatcacttcaagctttgattccgtctaataacaagataaaaaagtggcctggcatggttgtttcctcccttcccagtctcacttccttgaagctggacaataatcctctagcagagatatcgcccactgatctcgagtctctatcaaaacttgaacggctggattgaagtggccctgcctcctcatcgagtgaaccttctgtcgtttcttcattaccacaactgctggaactatatcttatgcgaatgaaacttcaggaatttcctattgggcttgtacaattaaaacatctacggattcttaacctgagtcaaaataatctcacaaccataccagagggtattaaggattttagtgctctcatcgagctagatctttcagacaacaatataacaaggcttccagctgagctgggtctgcttgagcctagcctgcaagtgctcaaacttgatggaaatccactcaggaggtaagcatctatcctcacgctttttctgtgatggatctatgttgacacaagatccacgattacacaaccttggcagtcctatatctaatttgtagagtcaacatggaaagaaaaaaagaaatctatcaatgacaacatattattggttcatagttgaatgcaaaaacttacatttgaggggaggggggaaaggaaagctgttgggcaggaaaaatatgaccagcctcgttttgctttcttgtacagcataaggcggactgttttggagcgaggaacgaaagctgttntcagctatctcaaagaaaagcttccgtccaantgaataataccatcatccagtgcaaattctggctggacttattcgctcggttttactccctctgtgttgaataagtttcctgtggttgaagtgtactgaattgacgtgtgtgtttgaagtgtggactgaattggccgtttgtgtgcgcgcgcgcgcaagaacggagatggtttgccacatacatattccaatatttataaggtggactcaacattatgtgatttgtgttttataattcgatggtgttggttggctaaaaaaaaaaaaaaaa

SEQ ID NO: 4398 - DNA, 1053 bp, Triticum aestivum
  Clone ID: TRIAE-23APR03-CLUSTER22177_2
gttgacccattcttccccggcaacctagctcggcgacggcggccggcggccggcgcgggcgggcgttaagttcaagcgagcctgccagcggcagggcgtcgctgtgccgcgctgcagggacggcgcggaagctgaagctaagcgtagactgacgtccgaacagcactaggattaagccatgtcctcttcgtcatctttccccggcccccgcttccctggcgccggcgctggagcctctggcgggggcggaggcggaggtggtgggagcgggagcagcgtgcggccctggggatcgagcggagggacgtcggtctcgtcgtcggggaagcggatacagaaggagctgctggacctcaacgcttccgactgctccgccggtcccaagggcgacaacctctaccactggctctccaccatcattggaccccaagggtcaccatatgaaggagggatatttttccttgatgtcgttttcccacttgattatcctttcaaacctcctatggtgactttcaaaacaaggatttaccactgcaacgttgattccactggggcagtgagtttggaaattttgaaggatggctggagtccagctttaactatttcaaaggtgctactggcgatcaaagccatcatcacaaatccggatccatacaacccacttgtggagagcattgcacgtctgtacctgactgatagagctaagcatgatgaaatagctgctgaatggacattgaggtttgcaagatagggagtcctttgtgcgacgtgaatttttgggacatgcagccacgcgctgccgaaatcctggatgtccgtctgcgcatcatgattactactttttatagcctgtttgcaatacgcgacacgttaatcaccagctttcgcgaataccacgtggtatacgccacatcaatggcctaggcgtcattcaattcttagtatgaatacaaggcccacgtgatggctcgggcgatggaataactgctctcgttgctgggtggatgtaattgagctctcgcactacttataagtagaaaacatttgatcctg

SEQ ID NO: 4399 - DNA, 1782 bp, Triticum aestivum
  Clone ID: TRIAE-23APR03-CLUSTER22204_1
ccatctaatgggaagggcctcatctccctccctctctcagttcctcgctcgcgcaccaactctttcaaaatcccccactttctcgcgtgcctgcgtcgattccgtccgtcgtgctcgccgccggttcggggggcgcctggatgaggcggccccgctgaccggagccgaatccgccgcgcgccgcccatggcgcagccgcagccgcagcagcgggtctaccaagcttggaaagggaataataggttcttcctcggagggagattgatattcgggcccgatgccaagtccctgctcgtctcggttgcgctcatcgtggtgccggttctcgtcttctgcgccttcatcgcaccgcacctgcttcaccgattctccgactacaacgcaggatacgcgattcctgcggtggcagtcgggttcatgatctatgtgcttctgttgctgctgatcacctcggctcaggatcctggtatcgtgccccgtgcatcgcatccaccagaggaagattttgcgtatggcaatccgttagctggggaaacaccgggcaggctgcagtttccccgtataaaggaagtgatggttaatgggatgcttgtgaagataaagtattgcgacacctgcatgatttaccggcctcctcggtgctcgcactgttcgatatgcaacaactgtgtggagcgattcgatcatcattgcccctgggttggacaatgcattggtcagcgcaattaccgatactttttcctatttgtttcttcctcgactcttctttgcatttatgtctttgccatgtcggctctacacatcaagtttctcatggacggagactatcctacagtatggaaggctttcaaacactctccagcttgcttggtgcttatgatatattgtttcattgctctctggtttgttggtgggctcactggatttcattcatatctcattagcactaaccagacgacatacgagaattttcggtacagagcagacagcaggcccaacgtctatgaccgaggatgtctgaataacttcctggaagtcctgtgcagcaaggggaaaccttccaagcacaggttccgagcctatgttcaagaggaggtacgcgctccagtggttaacttcggtaggcagatggaggaggaaccagctggcggccctcgcgcaaaggtagaagacgatcctgagattggcagcgatctcctgaagatctctcggcggcgcaactacgaggacgttgacgtcgaaatggggaaccaggacgacggtgagaaggaaggcatgggcgacgccaaactggcggcgggttcgggatcgcagatccctgcggtcgggagcgaggtgcgggtgcggcactcgagctgggaccggaggagtgggaactgggacatgtcgtcggacgtgatcggaaggagcgcatcggatgtgcttggaagaagcgcttcgctcaccgaggctgcgccgcggtctcaaagagaaactcactagtagccaatatgtgtgaattcttctgaactttgtgttggcgggctgggttctgtgattgtttactgatggtgacacaccgggagaagagagaaggacaatggctgtgacccattttgacttttgacatgccatgttttggtatcttggatggtgttttatgtatggacagttggttgtggtcgaagggtttagtggtaatgggggtcacatatcggtcttttttgcgccgctgttgtcatctgacagtgttcgatgccattctttgtgtaaattactgacgcaggatactcatccacctgt

SEQ ID NO: 4400 - DNA, 2994 bp, Triticum aestivum
  unsure (1)..(2994): unsure at all n locations
  Clone ID: TRIAE-23APR03-CLUSTER22237_1
aaacaaataacccacacccgatccagaggcgagtacccatcgcttccccgcgtccagattccggaagcacccttccgtcgcctcctccgtcggccgattgctccgtgttgcacgcttcgccgggcacccactacctagcaacaaaatggatgagcagagagccgctcacataaccgcgtccagatgccggaagcacctttccgtcgccccctccatcggccggattgctccgtggtgctcggctcggcgggaagcctctgcctagggaacaaaatggatgaacagagaatagctcgaatatcggtcacttggagaggcaggcaacttgatgttgatgcagacccaagctgtacggtgaaggaatttgggcaactgctccaggttttaactaatgttaaacctgagacgttgaagctcatagttccgcaatctgcaaataaaggttccaaggctgatcagttccagttttcagaccctcattcaagcttaacactgaaagaagctgctgtcagtgagggtaagcctattagaatgatgggtgtctttgaagatgaaattgaggaagtatcagacaatggcaaaagatcagatctgcggataattggatttgaagaggaagaacaccggctgaggcaacgatcttcaggcaggccccgagtttcactaaaacttccacaggggcaatacatcttctgtgattttcggacacttcacttacccggggttgagttgaatccaccaccttcggaagctctgaaaagaatgcacatacttgcatgtgaccctggcataattgcgatcatgaacaagcatagatggcgagtgggaatcatgactgaaatggcaccagtggggaatatgttggctgttacgctctaaatgcattctaggcttcaataacaacatggttggactgggatatcccttcgcctacgaactgatgatttgaaaaaggatttcggaaatatgaaaagtataaagaaaactctgctccatgaacttttctcatatgcaaccctgggggaggaacgagttcttttgcaagtgcccgtgtgctgccaggggtagctgcttatcagcgtctcttgagtgcatcatcaacagatatggggagttggccccgaagtatttgattcccttgaaaaagagtttgtgtgcaagccacacaagctggctctgatccggatgatgctggtcaatattttgttcatgaaaatgtgaagactgaaccagacccagatgataatgatgccatgcctgttgatgtaacaattgtgacatcaggaccagcaggttttggttactaaatctgtggagagacataatgtgcaaggtacacaagcttaacctgatccggatgatgctggccaggattttattcaggaaaatgtgaaggcggaaccagacccagatgacaacgatgccatgcctattgatgtaacgattgtgacatctggatcagcaggttttgtagcatctacagagcagaataccataggttattctgagcctgttcctgatgatgttgcgaagaaaagctctgttggttgcctagaacctgatcctgatgattccgcagatgttgacctactcaaacccagaaggcgatggtgaatatgataatgatcctgttcctgatattcagatgctagtatctgccctggaatccgtaacctctaggaataagatgcaagcggagattaggcagaccacaattctgtcatctgaacctgatcaacctgatcctgacgacaatgctgctaatttgaagagcgatgagctgcaaagaatagaagggccagtggcagccctatgctcgcgcctccataaggctattgaaatgctccggtcgcaagcaacacgtacagaggccgccgcagcactccctacgttttggagtctgaacctgaccctgacgataatgctgctgacttaaagagcgatgagctgcaaagaatagaagagccagtggcagccctctgctcgcgcctccagaaggctattgaaatgctccggtcgcaagcaacaccttcagaggcagcctctgcacttcaaacactcttcaaaattatcaagaatgtgatagagaatccaaacgatattcggtatagaagactgcgtaagaccaatcctcatttccaaaggagcgtggcgaattacaaagctgcgatggaggtcctcgagttgattggcttctgcgaggatgtcgtctcggatgagatcgggcgtgcggagacctacctggtactgaagaggaacgaccctgggttgctgtggcttgcgaagtcctcccttgaagtatccatggcttgataaaccttccagctatatacctgtatatcatgacatttcattccctttgtgctgcaaaaatggtttagtgcggtcttgtgcgatgagaatgagaacatgaaactaggtgttgcctgtcagcttctcaattgtatatcaaatatgtgattgcagagagactcgtaaaaaaaaaaaaaaaaaaaaaaaaaaaaaaaaaaaaaaaaaaaaaaaaaaaaaaaaanctcgagggggggcccggtacccaattcgccctatagggagtcgtattacaattcactggccgcgttttacaacgtcgggactgggaaaaccctggcgttacccaacttaatcgccttgcagnanatcccccttttgccagctggcgtaatancnaaaaggcccgaccgatcgccctttccaacagttggncaacctgaatggcnaatggcaaattgnaaccgtnaanantttggtaaaaatccggtaaaattttggtnaaaacagctcaatttttaaaccaataggcccaaatcgggaaaaacccntttaaatcaaaaggaattnnccccggaaaggggtnaagggttgttcccatttggnaacaagagncccctttttaaanaaccggggccttccaacgtnaaangggggaaaaaccggtttttaagggcaaaggncccctttngggaacccttnccc

SEQ ID NO: 4401 - DNA, 979 bp, Triticum aestivum
  unsure (1)..(979): unsure at all n locations
  Clone ID: TRIAE-23APR03-CLUSTER22263_1
gtacaatcagagattcgtcccgtgcctcaccagagatccactgccgtgcctccccttcccacacccacgagttcgccgagcgccgtcgcgagcaaagcaggcagacggcggacggataaatcatggaggagagcggcgcgagcgcggcggccgtagtccctcggctgttggcggcgaaggaggagtccgggaaaagcttctcggacatcgcggccgagacggggctcaccaacgtttacgtcgcgcagctgctgcgccgccaggcgcagctgaagcccgacatggcgcccgcgttccgggcggccgtcccggcgctcaccgacgagctcgtggagctcatgatgcggccgcctttccggtcctaccacccggacatcgtccacgagccagccatatacagattgaatgaagctgttatgcattttggagagagcatcaaggagatcatcaatgaggattttggtgatggaatcatgtcggctatagacttctactgttcagttgacaagattcaaggggctgatggaaaagatcgtgtggtggtcacatttgatgggaagtatctgccttacaccgagcagagatctgaacatatgatgtcaagattgaaccggaatgcatcttgagatggctggtgttacgaagaggatgtatgttcatggtgtaacacattgtgtgttgcctgattctactttagacttggaaaaaaatgaataatggcttttctggcatgaatgaccgacaaataaacgaactttctacatgtatgcagaataatttgttaaaaatgtggtttatatcaccaaaaaaaaaaaaaaaactggttctttggacctggaacagcactcgacatgcttttcctcgtctgaatgatcggctaaataaagtggcaatatagtttgtaatccctgcttgtacttcagacntgaagagtaactcagcatggtttnataaaaaaaaaaaaaaaaaaaaaaaaaaa

SEQ ID NO: 4402 - DNA, 1766 bp, Triticum aestivum
  unsure (1)..(1766): unsure at all n locations
  Clone ID: TRIAE-23APR03-CLUSTER2226_1
ccccccggcaggctgcagcatctgttcttcttctccggcccctctcccccgatctctcggccgcgacctgctccgataccctgcgaagtacggactccggcgagcttacggggctcgctctcccccgatctctcgcccgcgacctgctccgataccctgcgaagtacggactccggcgagcttacggggctcgcgcggcgagctcgcggccgcgatggacgaggcgggcacctcgtcgtccgcaggctccgccccgcgcggagggcgcccggcgagatcgggagtattctataagttcacccagcaggatcttccagcttggaaaccggcaatgacaccaggatacgtgatagccattttcttgataattgggattatttttgtaccgcttggactaatttgtcttcaagcttcaaacagagttgcagaaatcgttcaccgttatgatattgattgtgtacctaatgcttacagaagcaataagcaggcctatatcaaagacagctcgatttcgaaggaatgcattcagaaagtgaaggtacaataccacatgaaagctccaatttatgtgtattatgaactcgacaacttctaccagaatcatcgtaggtatatcaaaagtagaagcgacaagcaactacgctatgggctgaaatacactgatagctcatgcagtccaatagaaaagagcgacggccttccaattgttccctgtggattgattgcctggagcttgttcaatgatacttatgattttacccgtggatccatgggaatagtggttgatcggaaaaatatttcatggagaagtgatcgggagcataagtatggcaaggatgtctatcctttcaactttcagaatggatctttgattggaggaggaaaacttgaccctgatataccactaagcaatcaggaagatcttatcgtgtggatgcgcgcagctgctcttccccagtttcgaaagctgtatggtgtcatcgaagaggatatacaagctgatgaaatcattaccatgcacataacaaacaattacaatacctacagctttggtggaaagaaaagcctggttcttacaacatcaacctggctaggtggcaagaatgactttcttggatatgtatatcttatcactggttccttgagcattttcttgtcgattctctttgctctgatccatgtgaaaatcccaaggccacatggtgatgctgcttacctatcttggagcaggaaaaacggcaataactaagcttctgtgcatagttttttctttgtgtaagctagcagtacagcaccctggccagaggtttccccgcggcgttccgtctgcgcaccctgtctcgagggaaatggcatagtagcagcttcaggtttcatacactcgacacttggacggagcatgaaatgcgtagcagcttcagatttcatacacatacttggagcatgaaacgcttgatgactgctgaggatatacggtaaggccatggttcaccgacatgttcgtgcaattcaggccagcgctctgacggcgccctcgaggaaaactagagccgtgtaaaaactgatatatgtgtatgtaaagcgccataccatggattccatgatgttgtatgaatgaatacatataatgtttcagtttcgtgccgaaaaaaaaaaaaaaaagcttatcgatcccgtcgactcgagggggggcccnggtaccattcgnccntataatgagcgattaccgcgctcactggcgtcggtttacaacgctgactgggaaa

SEQ ID NO: 4403 - DNA, 750 bp, Triticum aestivum
  Clone ID: TRIAE-23APR03-CLUSTER22378_3
atccaatctcagtttccaaggtaaacttcagagaagcgacgaaggtagacgacgatggcggtgtcggtggagctgcccaaggagtacggctacgtggtgctcaccgtggtggcctacgccttcctcaacttctggatgagcttccaggtacaaggtgttctaccccaccatgtacgccaccgagtcggagaacaaggacgccaaacccttcaactgcgtccagagggggcaccagaactcgatcgagatgatgccgctcttcttcgccacgctgctgctcggcggcctgcagcacccggtcgtcgccgccgcgctggggctcctctacaccgtcgccaggttcttctacttcaagggctacgccaccggcgtcccggagaaccgctacaagcttggggggctcaacttcccggcgataatggggttgatcatctgcacggcgtcgttcggcatcaaccttgtcatcagggaagcgatctgaggctccggactgatgcctgacttgatagccgttgtgactggatcactggagtcatttcggcgtggtggtgatgatgtcttttgaagtgtcaaatgtgtgtgtgcgtttgttttactctcagaataaagctggatggagacagttttgcagtgcagattttgatacagtttccgtaaatctccagttttcttgtgcgacatctgcggagcataacattttgcagtacagattttgataccgtttccgtaaatctccagttttcttgtgcg

SEQ ID NO: 4404 - DNA, 904 bp, Triticum aestivum
  unsure (1)..(904): unsure at all n locations
  Clone ID: TRIAE-23APR03-CLUSTER223797_1
atcccaccgatctccgttttctccctcggcagaacgacaaacaaacacagaaaagaggaagcagagcagaggtcccgccgagaaagggaagaggagaatggcggcggaggtgagctccatcgccaggatgctccgcggggaggccgggaagggtagggccggcgcggggaaggcgccggagatggtcgaccatggatctgctcggcgggtgcggctgggagcgacggcttgatctgctgtccggcaagacgttcctgacccctcatcgccaccaggccgcccaagacggccaccaggacctcaacctgcctcccacggcatccaccgctccggccgccgccgtcaccacatgcgccgcggtctgcaccctcgacatggtccgcgacgccctgcagcgcgccgctgccgcgcggtcagcccgctctccggacacttcgtcctcgtcgtctgcgtccacctcctcgtcgtgcccctccctgggaaagcgcagccgctcgcctccttcaagcacggggtcgccccccgcgaacccggccatgcgcgcgtccgcgtgcccgtcctgcctcacgtacgtgctcatcgccgaggccgacccccggtgcccgcggtgcacgtccaaggggccgccgctccccaccaagcccgccgcccacaatagcgggaagaagccgaagattgacctgaatgctgccgccgatgagaccgagtgaatgggaaaagatgatagacaattcgatttttttttctttctggaaaagtttttccagtcattagtttgcactacttagaatatatcatcagaaacagatacatgttcagaaaattattantcctactatcatagggtcaaatcagatattcaagttggacttttattaatttatttanaaaaaaaaaaaaaaaa

SEQ ID NO: 4405 - DNA, 1405 bp, Triticum aestivum
  Clone ID: TRIAE-23APR03-CLUSTER223_1
cggccctgcctccgccggcccagccgcccctcgcgggcgctgccgcggcggatgaggaggagatgcaacttgtcaacgacaaataaactatcaatggcatccaaccatcgtcgcttcctcctctccggcgccgtcttgctctcagtcctcgccgccgtggccgccctggagagcgttgaggacgagtgccagccaggggtggccttcccgcacaacgcattagccacctgccacacctacgtgatcaaacgggtctgcggccgcggtcccagccggcccatgctggtgaaggagcggtgctgccgggagctggcggtcgtcccggattactgccggtgcgaggcgctgcgcgtcctcatggatggggtgcgcgtggaggagggccacgtggtggagggccgccttggtgacagacgtgactgcccgagggaggcgcagagggagttcgccgccacgctggtcacggcggcggagtgcaacctgccgaccgtctcgggagtcgggagtacacttggtgctaccggcagatggatgacgatcgaattgcccaagtaatgaagcgatcaagcagtactctactggcagatggagtactgcatgtagaataaaagtactcaagtgaaaacaaataaataaagcttgtgagctgtatgcgtatgaaaaaaaaatgagggccgccgccagcagctgcgcaaaggctcgacaaaccctaaccctagtccatagctagcttagcttccttcctctcgatctagctagagccatggcgccgaccaagggcgaggggccggccatcggcatcgacctcggcaccacctactcgtgcgtcggcgtgtggcagcacgaccgcgtcgagatcatcgccaacgaccagggcaaccgcaccacgccctcgtacgtcgccttcaccgactcggagcgcctcatcggcgatgccgccaagaaccaggtcgccatgaaccccatcaacaccgtcttcgatgcgaagcgtcttattggcagaaagtttgctgatgcccctgtccagagtgatattaaaatgtgggcgtacaaggtttattcctggcccccgaaacaagcctatgattggagtgccgtacaagggtggaggaccaagcagttcttacctgagttcagaaaagactgaccataaggccatcgatgctgagttgatcaaagctattgaagctgtccctgaccttaagaactatcttgctgcccggttctctctcagggatggtgacaagccccatgagatgaccttctaagttgctacaagttcctgagttttggatgtgttttgcctagattgttgctgaaatttgtaccctgttagttgacttcctatgtcagttgaagtgaccataagatattatgagaagatcaagagaatccttatctgctt

SEQ ID NO: 4406 - DNA, 960 bp, Triticum aestivum
  Clone ID: TRIAE-23APR03-CLUSTER2240_20
atcgaactgttcttctgctggtcatttatatccgtcatccgactcgatccttatcgaaatttgtgggattgtaggacaatggcggaaggcaagaaggatgctccgaagctgaaccagcggatggtatcatctctctcgaagcgaactgctgcggcacattcttggcatgatctggagataggacctgaagcccctctaatcttcaatgccgttgttgagatcacaaaggggagcaaagtcaagtatgaacttgacaagaagactgggatgataaaggttgacaggattctgtactcgtccgtagtctacccacataactacggtttcgtaccacggacgctgtgtgaagatggagatccaattgacgtcttggtcctgatgcaggaaccagtcatacctggttgctttcttcgagctaaggctattgggcttatgcccatgattgatcagggtgagaaagatgataagctcattgctgtttgcgttgatgatcccgagtaccgtcatctcaacgaccttaaggagctctctccccaccgccttgctgaaatccgtcgcttcttcgaagattacaagaagaatgagaacaaggaggttgctgtgaacgacttcttgccaccggagactgcacaggccgccattaagcactccatggacctatatgcagaatatatactgcagagtctgaagaactaatcgtggtagcaaacttgcaaggctgcagaaaccacccacatggtctcgtaagaggacaataatcgactacatggcttttatttaagggcccatttttctatatatttaaataatgggaaatgctattcccatacgtatttttctgcagaacattgtaatcaaggactaatgttatacttgtgcatagtgtttcataatatttgaatcaacacttgaaacatttagtcttgccctgttggcctgaatttcaaaataattatttgg

SEQ ID NO: 4407 - DNA, 2282 bp, Triticum aestivum
  Clone ID: TRIAE-23APR03-CLUSTER2240_30
ctcgtgccgaattcggcacgagctcgtgccgaattcggcacgagcacagccgccgcctaccccaccaacctgccccgacccgctcccgacctccgaggcaatcagcgtccgccgcggccgccatggcgttcgagaagatcaaggtcgccaaccctatcgtcgagatggacggcgatgagatgaccagagtattctggcagtctatcaaggacaagcttatcttcccatttttggacttggacattaagtactttgacttgggagttctacaccgtgatgcaactgatgacaaggttacagtggaggctgcagaggctactctcaagtacaatgtggctattaaatgtgcaaccattactccagatgaagatcgggttaaggagttcaacctaaaacaaatgtggaggagcccaaatggcacaattaggaacattataaatggcaccgtgttcagagagccaattatatgcaagaatgtcccaaagcttgttccaggatggactaagcccatctgcattggaaggcatgctttcggtgatcagtacagagcaactgatgccgttctcaagggacctggcaaactcagactagttttcgagggaaaagacgagacggttgaccttgaggtttttaacttcactggtgctggaggagtcgccatggctatgtacaacacagatgagtcaattcgaggttttgctgaagcttctatggcaatcgcttatgagaagaaatggccattgtaccttagcacaaaaaacacaatccttaagaaatatgatggcaggttcaaggacattttccaggagatctatgaagctggctggaaatccaaatatgaggctgctggaatatggtatgaacatcgtctcatcgatgacatggttgcctatgcacttaagagcgaaggaggctatgtttgggcttgcaagaactatgacggagatgtgcagagtgatttcttagctcaaggttttggctctttgggcttgatgacgtcagtattgatgtgccctgatggtaaaaccatcgaagctgaagctgcccatggcacagttacccgccatttccgtgttcaccagaaaggtggtgaaaccagcacaaacagcattgcttcaatctttgcttggacaagaggacttgcacacagggcaaagctagacgagaatgctagacttcttgaatttgcacagaaacttgaggaagcgtgcgtcggaactgtggagtctgggaagatgaccaaggaccttgcactccttgtccatggatcctcaaaagttacaagaagcgattacctgaacactgaagagttcattgacgctgttgctgctgagctcaaatcaagactgtgaaagacctcttccacttcaatgcttgaatagtcattactcatcgattcaagtcattttggttatgtcgccattacctgtcatgctttcattgtgaacagaacgagcttttactgcaccatcgcatattattgtcaaacatgcaagcgattctgtagatgctgatgttatgtaagtggggctcacaataaaggacatatagaaccattattcacatcaaaaaaaaaaaaaaaaaactcgagacctcgtgccgaattcggcacgagagtaccgtcacttcagagacatcagtgaacttcccccgcatcgcctacaggaaatccgtcgcttctttgaagactacaagaagaatgaaaacaaggaggttgcagtgaatgatttcctcccagcagaagatgccatcaacgcaatcaagtactcgatggacctctacggttcgtacatcatggagggcttaaggaagtgatctccagttggcggactgcggatgctacgcgatccgccctacggcttatcaatagtacgacaaacatctatgttaacatgatgatcgaaaaccatcagtctgttggggatctatatataccttctgtccatgctgagtcaagcatgggtacattttccttccgtatatgccatgtcaggtccaagtatttgacctcttgctggaaccttttttgtcaaaccgtctcttgacagagcggctgcttaataggaaatcagcgttacgcgaaggcgcgtatgcgtgcctccagtccgtttaaccgtgtgatatcttgatgttgtgtggtatccgctggttttgctttccctgggttctttttttccattagttttctgtgaacgtccgtagctgttgtcgccatcatggaatcctgtgtagtctttgtcacaggagttcagagctgttggaactttttcaaggaaaaaaaa

SEQ ID NO: 4408 - DNA, 1356 bp, Triticum aestivum
  Clone ID: TRIAE-23APR03-CLUSTER22424_1
ccatcacctgcctgcctaccccctccccttctccgtctcgtctttctatccaatcccatctccttccctcccacggcggtctgcctcgcccgcgaccacctcgccgccgcatccctctcaaccaccgccggcgtcggagatgcaggcgacggccgcatccttcctcgcccgccccctcccgtggccccgtcgcattggcaggagcgcgtatggggcggtggcggtgcacggaggcgtctcgccgctgccaccgcggctgcggggggtacggtgctccatgagcctctctatcggcgccggttcgagcgacatcggagacagcggattcagctaccagtatgctccggtcttccgaagataccgtgagcgggatccctacaagcttcttggtgttgaccgtgatgcatctgaagaagagatcagaagtgcaaaagacttcctagttcaacagtatgctggtcacgaagcaagtgaagaagctattgaaggtgcttatgaaaagataataatgaagagctaccagcataggaagaaaacgaaaattaatctgaaaaccaagcttttaaagcgagtcgaggaatccccgtcatgggtaaaggcatttcttggatactttgaggtgccatcaatggatattatttccaaaagattattcttttttgctttcatcgctggatggagcatagcaacttctgctgagaatggacctgcattccagctcgcaatatcactcttctcgtgcatatacttccttaatgacaagatgaagaaccttctgagagcatcgactactgggtttggagtacttgttggtggctggattgttggttctatgttggtccctcttatcccaacatttatcatcccacctacatggtcgcttgagcttcttacctccttggttgcatatgttttcttgtttctggggagcacttacctcaaatgaaggaacatcaatcttgtaaccgtaaattgtagtattgtttggaaaattttggcagttactgaaatctctacaattgcatgtaccggcaatgttgttgaatccttcgtccttcgttcagctcagggtagagacaaccggcgaagccaggtgctttgtttacaccagttgtccactcatttgtttaattaattgtccatatagggggctgttcttcgcttcgctggtccaagtgaatcgctgtatggatcacctgctgaagcttaggcacaggatcaattcagattgttaactcatacggaatgtactatttacatattgatattgatgtggaaatgatgtagcgaaatttttgcgtcttacgtaatgctgttgcaacttgcaagaagcatcaaacaaaaaaaaaaaaaaaa

SEQ ID NO: 4409 - DNA, 1269 bp, Triticum aestivum
  Clone ID: TRIAE-23APR03-CLUSTER22454_1
actctcgtgagacattggcacttggctacgctccgcagttcgcgaccagctagcccgccaccagcctccggccatggccgcgccccgccccaccgtcctcgtcaccggcgccggcggccgcacaggacaaatcgtgttcaacaagctcagggagagatccgaccagttcgcggcgaggggcctggtgaggtcggaggagagcaagcacaagatagggggagccgacgacgtctacgtcgccgacatcagggaggcggaccacctcgcgcccgccgtccagggcgccgacgcgctcattatcctcaccagcgcctcccccaagatgaagcctgggttcgaccccaccaagggcggccggcccgagttctactacgaggacggagcctaccctgagcaggtggattggattggccaaaagaatcagattgatgctgccaaagcagccggtgtgaagcacatagtgttggtgggatccatgggggggacgaatcccaaccacccactcaacaaccttggcaatggcaacatactggtctggaagcgcaagtctgaacagtatttggcagacagtggagttccttatacaatccaaaggcctggtggcctgcaagacaaagatcggggagtgagggacgctgattgttgggaaggatgatgagcttctccagcctgacactaaggcaatccctagggctgatgtggctgaagtttgtgttcaggccctccagtatgaagaggtgaagttcaaggcattcgatttggcttcgaagcctgaaggcgagggcaccccaacgaaagatttcaaagcgctgttctccaaggtcacagcccggttttgagtcatcagttaagacttgagagcataagtacatttctagcttataaggatcttaatgtcttgggtgtgtatccttgtgcattatgaagttgctgactgatgtaattgcacaatcggtttatcaataatgctgaaaatagccttaggtcacaaaacagttttgagtaaacggttaaggagcataagtacatttcttagcttataaggatcttaatgtctcgagtgtgtatccttgtgcattatgaagttgctgactgatgtaattgcacaatcggtttaccaataatgctgaaaatagcctcctatcgatgcgtggagattggagaagcaatttatgcattttcctgagatttttctctgaggagaaggagtcagcaaacaattgagaatacattgatacagtttaacggatatgactatcttcttttcac

SEQ ID NO: 4410 - DNA, 1508 bp, Triticum aestivum
  Clone ID: TRIAE-23APR03-CLUSTER22466_1
aaggcgcttccttttcccatctccacacttttgccacgccacacctccgcccccggcccccccttctttccaccgccgccgcgccaccgggctccccctggggctcgttccccccgccgcccctcgcacccgccgcctccggcagtcgctcgcccgcccccccgccaggaaccccctcccccgcccgtccgccgcaccgttctccgccgagaaaagcacgggccgggagcagcgggtggggaaggaggggggatgggcggcggggagaggagggtggcggtcgccgccgtgcggatcgcgggcgccgacgccgtggcggacaacgtcgccgccgccgagggggtcaacagcgacgccgccgagaagaggttcaaacaaggtcatcatacaggagcgatttgaagggtactatcactgtcaagctcaaaggatggatttctttcgggcgtgccaaacggatatatttgagaagcccgactatgattaaaaagcaaaagcctacaatgaagatggatgaagtaatacctgagaggttcgttgtaataagcgggcaatgcttattagaagtcggtggccattcttatatgctgatggcaccgatcttggcttatgccgccaatcacactttccagatggaccaggttatcaagagagattttatttcaacccgggtgacactggattcaaggctttcaaaaccaagtatgcaacaattggtgttggaatttgctgggaccagtggtttccagagaccgcaagggctatggtgctacagggggcggaaatattgttctatcccactgctattggttctgaaccccaggatatgaacctggattcccgcgaacactggaagcgtgtcatgcaaggccatgccggtgctaacttggttcctcttgttgcttctaaccggataggaaaggaaactgtcgagactgagcatgggaacagcaccataaaattctacgggaactcattcatcgcagggccaactggagaaatcgtgaagcttgcaaatgacaaagaggaggaggtgctcgtggcagagtttgacttggacgagatcaaatcttcgagacagggctgggggatattcaggggcaggggtcctgatctatacaaagtgctagtgacgttggatggcaagacatcatcatcatccttggttacacttttatcatgcagcatcgatcttaagtatgcactactgtggaaaaggacactcggtccgcaaaacctgggagaacaacaaacggtagatcgatctttttgtctagcttccccctgcataaatagtgaacggcctctgcgtttccagcttggtgatttttgaccgatacataacatgaataaaaataccgtcatgtgattatgatgtgaccgcaaccagataattataaatcaaagcaattggaaaatgatgctggtacaaaaaaaaaaaaaaaaaaaaaaaaaaaaaaaaaaaactcgagacctcggccgcgaccacgctaatcactagtgaattc

SEQ ID NO: 4411 - DNA, 724 bp, Triticum aestivum
  Clone ID: TRIAE-23APR03-CLUSTER22511_4
atcagttatcaactactcttcggtaccattcgcagctacacattcttgtctattcgatcctaccacatccttctcaagaagaagttgatcatcctaatcctagctagagcctggatggggtctctgatggccggctgggattcgccggttcttggccatggcaccaaagctcgtgtgacgaggaaccggtccctgacaaaggaggaggtggaggctttctggcggcagcgcgggaagccggcgccggaggacggcggcgacgtcacctcgccgcttggctcccctggtcgacctatggagaagagcccgctgggaagctcgcagaggagcaggtcaccggcgtcgtctccggtgtctggcgtacacgaggagacgatcggcgccgccgacgccggcaagagccgggactggtggacgaggagcaactgggccttcctcaacgagccgccgcaggaggagaggccgggaacggcgcacacctacacgccgcagttccacgtcgccgccggcaacgcctgaccggacatgctcgtagagtgtacgcaatactagtagtaccacgtcacgtcacgctgctggaatgcctagggtaggccctactgccttgaccgtaccgcgcggagatgcacaatatgtccatatggggtcatttccctgtcaaatatcccttgtacaatagatgtattgtaaatgtatatgtaagttgcgtatgtattatgtaagt

SEQ ID NO: 4412 - DNA, 807 bp, Triticum aestivum
  Clone ID: TRIAE-23APR03-CLUSTER22511_5
atcactacgctcttcagcactcacaactagacattcttcgtctcgttgatcctgcgaatatattcgattctactagctacatcgatctctggaagaagttgatcatcgaacgaagctagctagctagatggggtctctgatggctggggttgggattcgccggttcttggcgatggcaccaaaggtatatatgcggctacacacacggttcagttactgcttgcagccatgtttatgtattccttttgcttgcagctcgtgtgacgaggaaccggtccctgacaaaggaggaggtggaggctttctggcggcagcgcgggaagccggcgccggaggacggcggcgacgtcacctcgccgcttggctcccctggtcgacctatggagaagagcccgctgggaagctcgcagacgcagaggagcaggtcaccggcgtcgtctccggtggctggcggccacgaggagatcgacgccgccgacgccggcaagagccgggactggtggacgaggagcaactgggccttcctcaacgaaccgccgcaggaggagaggccgggcacggcgcacacctacacgccgcagttccacgtcgccgccggcaatcgtctgaccggacatgtccgtagagtgtacgcaatactagtaccacgtcacgctgctggaatgcctaggctaggcctactgcctgcacctaggataggtcatttccccctgtaaaatatccattggtacaatatatgtattgcaaatgtatatgcaagttgcatgtgtattatctattatgtaagtaaagtacagagtgaatttc

SEQ ID NO: 4413 - DNA, 1460 bp, Triticum aestivum
  Clone ID: TRIAE-23APR03-CLUSTER22523_1
atcgcgtccgcttccttgctgtttctcacggagaatcttaccccttccaagccttcccgtgagaggaaagttgcaaacgcggatttaggtagggcttcttcttcttgttccctttgcgctgacgatttctagcatcgtttgttcatctcctgggtcttcttgatctggaattcggctttctcgtgactccgtatgccaattctacctgttttgtgaggttgtatgcaaacgctacctagctattgaaactatcgacggacattattgtactggctaaaatctggactagaggacatctgcggcggatggacaggagcgaggaagagacgatcatgagtgattcagaccctctcctcgataggaaagatcagtcaggctcattgccccagctctcgccaccacagccggcgaccgtgactgtgctggaaattgaggatgaggagaccgatggttcttatgccgcatgctgccgcatttgccttgaggccgagtcggagataggtgatgagctaatatcaccttgcatgtgcaagggaactcagcagtttgttcaccgttcatgcctagaccattggaggtctgtgaaggaaggatttgcattctcacactgcacaacatgcaaagctcagttccatcttcgagtggaaactctggaagataactcatggcgcaaaataaagttccggctcttcgtggcaagagatgttatacttggttttcttgcagttcaaattactattgctatcattagtgcagttgcatactttctagacagggacggaagtttccggaatagtttcagtgatggttgggatcgtatcttgtcaaagcatccaataccgttctactactgcataggggttgtggttttctttgtgctgcttggatttttcgggttgatagtgcactgctcgtccttgaacgacaaccaagatccgtgcttagttgggtgccggaactgctgctatggttggggcatcctggactgtctccctgcttctttggaggcctgctttgccctggtggtgctcttcatcgtcgtgttcgctatccttgggattgcatacggtttcctcgcggcgactatggccgtccagaggatctggcagagacattatcacatcctgaccaaaagagagctcacaaaggaatacgtagtggaagatctgcacggcagctactcggccccgaagcttgagccagagcatgaggagcggctgaaaatactgaagctactgtagatggcccatccccatcaagaccactgtaaatcccgcctgtattgctgtgggccgaaagagtgttggtgagttggatcgtctgtgaaagaaaatggtgacgcgattgaaacttgtagctttctgaatcgaaatccccccgccccttttttttaacaaatgaataaaatttggtccatgcacctggttctgatccaaaaaaaaaaaaaaaaaaggccccta

SEQ ID NO: 4414 - DNA, 3008 bp, Triticum aestivum
  unsure (1)..(3008): unsure at all n locations
  Clone ID: TRIAE-23APR03-CLUSTER22564_1
agagtccagacacgccacgcgcttgcctccttttcccctctcctcgcgcaccttccccttccttgtccaccaccctccagaccaaacttccccgtccaagcaaacaatcgaaaaaaagggagggcgaattccgcgcgccgacgacctccctcgccgccgtgttggcactacatggcctcgtcgccctcggcgctcttgtccgactgccgcctccgctcctccgccgcctcgccgagcaccgtccgcagcctgcatcagcctccgcctcctcccccgccacagcagcccgaacagccaaccgtctcgttgtctgagacgcttcgctaccagctgaactctctcgacgcccacaaggcatggatgaggacccctgaggtcctggagttctggtccactgggcttcatttccctgcagaacatctggagaacgccgaggagctcgcgctgccgcgcaggtccctcccgctcgctgccgctcccggggctgggtcgtaacgcgtgcgtccggccctggtacctgcccttcctgtacccccagttgagctatactattctgccgaagcttgcaatcttagggctcgggaggaaactaagatctcaagtgcggcgacttttttttctgtgtgtggaaacttgagagagttgcaaggagggacaaccagggaggaggtagtcttggaggttgatttggggggaatttgtaagctagagaggcggatttgaagggactggtggtggtgactcgaggggatttcaccatggtggggaaggatttggtgctgcaacggaatgctcctgtggatatccgtgagattgctgccaaggccacgctgcgggaggtgcggcagaatgggcacacctatgtggagctccggcgcgtcgggaagcgcgtcatcttcttctgcaccatctgcctcaccgagtgcttcagcgacaatgtgctgtttgaccacctcaaggggaatctgcattcacggcggtatgccgaggccaaggtcaccctgtttgggcccatgccatggccgttcaatgatggtgtgctcttcttcaataactcacgcgagaatgatccgctcttgctggactcaagctcgcataacaccagcgaacttgctctggttccccatcctgactttgcagggaatggcatttgaggtgacatcaaggttgagagatggttcgagctcccataatggcgcaaaaggctcattcattggtgcaaatggacgtctgaatccgggctcctcgccccttactgaagatagtgctctgtcaaaccgcagtgaaaccgatggtccgcttgttattcctggtgtgttgataaaggatgttgtgttgaatttgcctgtgcatcttctgggttatggaaacattgcctaccagaattgctgaagctaggcgaaggtcgcaagaagatcagcaaaatctggtgtgcttgggtaggagaagaagcctcactgggctctgaggcaagtaacatctatgaacaatctggttttgccatagtcaacttctcttatgcatatgagttgggaaggaagtggccttctgaagatcaggaccttcccatctctgctggatctttctttgtcattgatgaggctggacatcgtggaaagcgaaggaagaagtcattttctgatcaagaagcatcttcagaagagtctaatggccagacccatgacagcagaagtcaagctattgttactggttccccaacaggttcctcatgcaatcttcaactcagccccttgtccagcaagtctatgaggagggagctgaggaagcagaagcgacttgctgctgagaaagtttgtgatatttgtgggcgatcaatgcttcctggaaaggatgtcgccaccttgctgaactgcagcacaggaaacctagcttgcagcagtagaaactccagtggggcttttcatctatttcacacttcatgcttactgcactggacaattttgtgccaatatgaggtgttggctgatcagattgcaaagatgggaaagagcaaacgaggaagaaaggcgaaaacagcgccaaagagcagaataatgtccatcctttgcccagaatgtcagggcacagggattcacgtcgagggagatgagctcgaaaagccaactgttacggagtaagagatgtttcggtacaagctgaagtccatcgaagcccacaaggcgtggatgaagacccctgaggtgctggagaactgttccactgggctccatttccctgcggaacatctggagaacgccgaggagcaggtgatgccactgaagtcgcttcctttctttgcagctgatggatatatggcataattcgtgggttaagctcatggaccaggccacgctaacgccgtgctattctgccagagccgttgtaaatctactagaacagctgtaaataagcatgcatgactatactgggacagtgtatgctagagatgctgacgtttattttgcttgtaatcgtgttgtatctatgatgtttatgttcgcctgtctgtcaaccaggtacaatccagcaaaactgttagaccaggttgtagtaaccataaacaatatacatgttgcactgctcaccatctttattttgtttaagatgtggttataatggcctctccaccatcgcttggtgtattcgtgttgtcaaactggttgtgcataatatttgatggtgatttaaaaaaaaaaaaaaaaaaaaaaaaaaagaaaaaaaaaaaaaaaaaagcttttcgataccctccccccgcgagaccccgacggggcccgggccccccgggcggcgacaatttccggccccccggggccgcttttgggggggggcgggggtgggttttcccggggccccccccccctcccnnnccccgcccctctcccnnnctnnctactgnnncnnnnnntgnnnngggggggcgtttttttttaacccccgggggggaagaaaaaaaaaaaagggncccaaaaaaaaaaaatattttttgggggggcgccccccccctcccc

SEQ ID NO: 4415 - DNA, 1449 bp, Triticum aestivum
  Clone ID: TRIAE-23APR03-CLUSTER22572_1
ccctggcaagcttatcggcaatggcggaaccggtgaagctcatcggcgccttcggcagcccgttcgtccacccgcgccgaggtggccctgcgcctccaggggcgtcccattcgagctcatccttgaagacctcaaccaacaagagtgagctgctgctgaagcacaaccccatccacaagacggtgccggtgctcctccatggtgaccggccggccgtcttagagtccctcctcatcgtcgagtatgtggatgaggctttcgacggcccgccgctcctccccgtcgacccctacgggagggccatggctcgcttctgggcccaattcatcgagcaaaagtgctcgaggccgttctggatggcggtgtggttggacgacggggaggcgcgggaggggttcgtgagggacaccaaggagaatctggcgctgctggatgcgcggctgcaggggaagcggttcttcgccggcgacgccgttgggtacctggacctggcggcctgcgggctggcgcacctgctgggcgtgatcgaggaggtggccggggcgagcattgttggcgcgggcgagttccccgcactgcgccggtgggcggaggactacacctccgacgcgaccgtcgccgcgtgcctaccgcggagggagcagctcgccgcacacttcgccgggaagaaggaccgaatcaagctcgccgtcagcgcgatggtggggcgggcgtagttgtcagtttggggcatcgatcaacacagcaggcgtcggcaaaatattcagattacgtactgtattatgatttgtgatttgtctgttatgtgtgtgttccctatggtgcgtatactaaaataaaattcatattagtatttgttgcaacgaaatttatgtcaaattatagtcaaaagtacggaattgcaaaaaaaaaaaaaaaaatgcgttgcgataccgtaaaaaaaaaaaaacaccacacacacaaagttctcatgtagcatcctaagaaacacctcacgattgtgcacatccagctcaagggcaatatattcttcgaaggcactgccatcggcctaaccaacatcaccggcgccagcgtgctgtcccactggacaggcgtgctgcaaaaggtcgctgggataaccgtcatgagggatgatgagtatcctgctattcgccagtggatggaggactacaacgccaatgaagttgtcacgaagtgcctgccggatcgggaccagcttgtgacccacttcaccgccatcagaggaaagtgcgtcgccgcggccaagtccatgctaccaaattatctagcgagcaaatagactaagctagaggtttgtatggtttgaattaaggtgaaaatctgtcgtaaaataagacatagggcacttggtggagtgttattgttcgatgccactgtgctcttttcgacataagatgcttgccgacattttggaggctcccctat

SEQ ID NO: 4416 - DNA, 760 bp, Triticum aestivum
  Clone ID: TRIAE-23APR03-CLUSTER2260_10
gcaacctctcgctgcaaaaggtctggaaaccttcgcccccctcccccccgcccagcctctttcgcgtgattctccctgcccggtcgcagatcggcgcgggttgcttgtcatggcatcaaagcgcatcctcaaggaactcaaggacctgcagaaggacccgcccacatcatgcagtgcaggtcctgctggtgaggacatgtttcattggcaagcaacaattatgggaccccctgacagtccctatgccggcggtgttttcttagtgaacattcatttccctccggattaccccttcaagccaccaaaggtatcttttaagacaaaggtcttccatcctaatatcaacagcaatggaagcatatgccttgatattcttaaggagcagtggagccctgctttgacgatctccaaggtcttgctctctatctgctccctgctgaccgatcccaacccggatgatccccttgttcctgagattgcccacatgtacaagacggaccggtcaaagtacgagacgacagcccgcagctggacgcagaagtacgccatgggttgaagaagacctgcatcgtgggacaactgaaatgtcgcttcaagaaaaatatttatgggccattgtttcttcgatttgttgctggttgtgtgtaatcccgattctcaaggattgtaaattgcattcggcgtccggccctatcatcaattgccactagtatcggcagacatgcatgcctatcagcctaatcactaagctggtgggtta

SEQ ID NO: 4417 - DNA, 920 bp, Triticum aestivum
  Clone ID: TRIAE-23APR03-CLUSTER22645_1
cgccctcgctaagcaggaaaaccccccggagccaccgggacgcggagccaccgctccctctcgccggcgcccgacacatgggccaggccctgcgccgcgcctcggggcgcctggggcctcccccccgcgcgacctccccggccgctaatcctcccccccctgcacgacgcgccgcaccgccgcccgctgctgccccaggacgagctccacccgaagctgggctcggcgtctcccagaatgctgttacaccatggacaaaagatgcacagggtgcacttgtagaacgtgatccaagatatgatggcaggcttaatcacatgtttgggaggatcactactaagcctggaggaaagccataaatgggtgaagcttacgtcgtagagcgatacaacaaggccgcttgcctcaggtgagaacgatccgaagccgaacctgggcagagcagggaacttccctcacggaaacctggaacgtcaggcacatccaggagatcatcgtaccctaccaaggacaggccagtagccaccgcggcccgatgagcgtggaccagatcgccttgaggttcagagtcgaagcctccgtggtccatggaatcgtgcagtttgtctcgttgccgcaggatgaaggcatcgaaaagaaagacgaacggcgggacctttgagcggatctgtcaacatggtggagattgttcatgctcccaaaatgagttgcgtagaggacagctggacagacaagtttcttgatagtgttttcgtaggtttcttttctttcttgttgttgttgctgctgctgagctgaaagcctgagatgatgatggaaactggaacccgtacattgccgtgttgcctaaataaagatgagcgtcttttttttacgtgagaaaaaaaaaagaaaaacccccccccccctgcctcccttcc

SEQ ID NO: 4418 - DNA, 1376 bp, Triticum aestivum
  unsure (1)..(1376): unsure at all n locations
  Clone ID: TRIAE-23APR03-CLUSTER22719_1
ttttttttttttttttcaaaactcctntcctnttgggctggataaatcaaatccanaggaataatccgtccatcctctcactgaaacacaaggcacggatacatacactagtatcaaacatggaagcaatattgaccaaaaccaaaactagccgtgcaaccatcagtgattgcaccatgccttcccctcccaactaattcttgctaattaacttctccagcaacacgcaagggaccaaaaaacttgggacatctcttgttctactaccaccaccagcagtaattcagtactatgctctgctctgctgtatcaccgctactaccgctgctactccacttccttcacaggccgcctgtcgccaccgccgccaccctgctgccagcggcgacctttggcggcgtccgaaacccgctgcacgatcatcgcctccgccgcatcgaccgcctcccgtgtcccgctgatcaccacctccctctcgttcgtcccaggtatgaactcccccttcacgattttgatctgcacgcccgtaacccgttcgatctcttgtatgggcctcccgccatagccaatgacagcgcccacgtactcgtccgcgacacccatggtgagggtcccttgcacatggctgtcgtagtcaggcgatctcacgggtgtgtcaggcctgctgtggtatctttcgacatgctcatcttgcccatcaccgccataccgaacacttgaacttggaaaactaaggcttgcaacggaggatgagtagcggacgtcgtcaagcaactcggacagtataagaaatattgcctgcagctgattgtccaagtgtccagtgatcgttaccagtctatcatggaaaccgtagcagatgtcgtagggcgagaccgtgattccagcatttgactcctcagctaaggacttgatgacctcccctcctttgccgatgagcgcgccgcagcaggcgtcgggcaccacgagcaccacggtggcctcagcgtcaatcacctggtcgcccaggtagaagagcttctcgaggacgagctctgcggcgtccatgacggtgcggaagaggccggagacgaggacgaccctgcggtccgtgccggggaggggccggcctcgcccggagagcttgatgtgggccccggagcgggcctccatggcgtggatgtcggagccggccttgccgatgatgcagcccgcgtcggcgtccgagaccaggatcctcgcgtgcgtccgcctctcccacatcgcatcttggcggcggtcgtcgtcgtcgtcgtcgcgggaggcggtggagctcgggggcggcgaggaggaggccatgccgaggggagcgcggcgaggcgtgcgtacggaatggggggagaagcgcgtgggaaaag

SEQ ID NO: 4419 - DNA, 2590 bp, Triticum aestivum
  Clone ID: TRIAE-23APR03-CLUSTER2272_1
ttcattcttctcacttgtcccgtttcgtcttcctccacttccgtgcgagcccacgccttagatgtccatggcgacgaagcaagcgaccctgcccaggtcgggagctttctcaaagggctacaacttcgcgtacgcgtgggagaagaacgcgccggtcacagaggagcagaatgccgcgatctccgcgctctcgcacgctgtggcagagcggccgttcccggtcaatctggaagatggaggtacggccgtgccagaaaaagagtctgctttggaggaggcgggtgcaatggatgctgtcttggtgaatacacatcagttttacaaatggtttgctgaactggaatcagctatgaaatctgagactgaggaaaagtatcgcctctacgagagtacattagaggaacgtgttaactcatgtgatggcatccttcaacaagtggatgtgacacagaacttatttgaagaactacaatccttgcactcaagtgttgccataaagacacaaactttgcatgatgcttgcgaccacaaaggcttgttgggtttgctgaagcactccgaagccatccatctgagatccaacgtgccacgtcaaaattttctagttttgcgcgtttagctcagtttctactatagtcttcccctgctgaagcgcgtaggtcaaactatttttatgaattggaaaatgtaagattctggcatgcataaatatgtgcatgcgtgtgtgatgcttagaattgtttttcagtctcgccaacttcagtctcgggcattaggtatgatcaggtcacatgtcttgtcgacactgaaagccgcttcatcccaggttcaagccgcaattcgaggcagtggttctggcaaaaatgctgttacagagggtgtggaagcatctcttatctatgttcgtttcaaggcagcagctggggagctaaaaccggttttcaatgagattgaaagtagatcctctaagaaagagtatgcgcagactctttcagaatgtcacagtttgttttgtgagcagaggctgtacttgatacgaggtacggtgcagcaacgcatttctgagtttgctaaaaaagagaccttaccttcttttacaaggtctggttgtgcctatttgatggaggcatgccagtttgagcaccagctttttgctcacttcttcccagcatccgcaccagatgtttcaactatggctcctttaatggatccattgtgcacacacttatatgatactctgaggcctagactgatatatgaaggcaacattgattctctctgtgaactcgttgacattctgaaggtcgaagtgttgggagaacaactgagtagacgtggtaaatcagcagctggactccgtccaatattgcagaggatacttgcagatgttcttgagcgtctggcattttgtgctcggactcatattcgtgaggggattgcaaattttcgcccttctgacgaagatctggattatcctggaaaacttgagagatctacaatttcaagtgctaatgttagtgacaactcagacatgtatgcgacatggtacagaccactggagaaaacagtttcgtgcctgtcaaagctatatcactgcttggaatcttcggtttttactggattagcccttgaagccgtagaagtttgcacagcatcccttcagagtgcaagcaaggtcattgcaaaaagagcaaccccaatggatggacagcttttcctaattaagcaccttctcattttaagggaacagattgcaccatttgagattgagttctcagtcacacacaaggaactggatttctcccatttgctggatcacttaagaaggattctcaggggccaggtctcattatttgactggtcaagtcaacatcacttgctaggaccttttctccccgcattttggagaatcaaattgacgccagaaaagaactggagaaaggcctcaaatctacttgtgaagagtttataatgtccatcactaaactagtagtggacccaatgctttcttttgttactaaggtaactgctgtcaaagttgcactgtcctcaggtagccagggccagaatttggattctgttctagcaaaaccccttaagacacaagcatttgcttcacccgataaagttgcagagctggttcaaaaggttgggactgctattcaacaagatctgcccaaagcaatgaccaagttgatgttgtatttgcaaaatccgtcgacaagattaattatattcaaacccatcaagtcgaatatagttgaggctcatatacagctacagtcccttctgaactcagaatactcggctgaagaaattcagtctattggtatgctgtctatatctgatctgcaatctcagctcgacagtcttctgtagcccatactttttcatatgttttgttatggtgtgtcctcttgagtctgagtgagaagtgcactcgattgttcaactagagtgatgttatttttaatcctgtaatcaaatttaaacacactttgatatgacatcaatcatggtggatggctagtacaagattgttgctaatgtgttagcatatcggattgattaaaaaaaccttcccaacaat

SEQ ID NO: 4420 - DNA, 2498 bp, Triticum aestivum
  Clone ID: TRIAE-23APR03-CLUSTER2278_1
acaaccgccctgccttcccccaaccgctacagagacgattggctgacgcgcgcgatggcgagcgacgcccccgcgcaacctccctggcgtgggcggtgcccgggatcctaatggcggactgggtgccggaacggatagcttcgcctgaccgctcaacgaaggcctcttcgttgcgccgttgggagtacgttatgtcggcggtatgatcgtgatgctgctcttggacgccgacttcaagacactgtagtagttatacgatggaagtataaattaggacggtcggacgacgggacaggagtaagtcagcacgtaccaggtccggcggcggtcggagttacacgcgcctgtagattggtgtacgtcgaggacagactcggacggcgcctctcttgcactgaggtgatgggagcccaggagcagcaccaaaatggcgccggctgtgaggaccgcttaggtgtttgcacggatgctccttggatttacacgttgttcgaagctgcggtcgggactctagagggaccttatggacactcctctggatcaggagagaagccaagcaacgatcagtagcgctctacgtgaagattacgatggcgttgctggtgttgatgggcacgttcctggtcgggcggaaggtgacctgaatagaacagggattcacacggcgcggtggcttcaagttgcacgtaagccagccgtgtccctcccgtgtggaagcaggctgtccagccgatgaggcgtggtatgggtgggtgtgcgagggtgactgagtttggttatcgccataagttgcacgcgaattgcatccagccatggccgggtagctccacaattctggcaccattggtggattaccgattggctacagagggagtgacaagaacccaggtcgaatccaaggcagtggctggtagtataagtgagtcattggggagaagcgtcctgagtcaaagtaaaaggtgctctagtatggtgctatccctgatggactgcaggcttggttcgagcgtgaatttgcacttgaagtgtaaggcacagagaggtcggaattgttgtgggatatcccctgccaaaaaacatttcctggcaccactgccaactgtggaccaccaggaattagtgggctgtacactctgtcttgaggatttccgagtggggaccgagtcgacggagatgcgttgggaaactctgttgagatcgaattgcatccttccatggctggagctccacagttcttgcccaatttgtcgatttcagttgcctaccgaggagtcaaagaacccatgtgaatcaggcagtggtggtgggacagtgagtgctgatggagatcatgctgagtcaagtaatagtgatatagaaggtgctaaccatgatggaggcagtctgcttgatgaaagttcaataaatgatagagatgtgacgtctgcgttgaacgcgatcttcggagatggatcctcatcatcctcatctgatgaaaatggtccatgtgcttctgagagctgaagccagcatcgccctggctcccgtgcttccaacatgtagacggagtcctgaaagaagactctcgtgaggccggcgtctttatgctgtggtttcctgtaaatatttcaattcgaccctgcaagacaaagctgtttatcttcgcttcttatgaaacctatgtggcttgtaaccgtttaatgcccgccaccgtgtttacagtatgcgtgtgtgtgtgaaataaaagtactctagtatgttgtttatgtgaacgggataattatccaactggcagttggacgaaaggaaacctgctcctgctgaatggtttatgttatggagcatctgttcagcgaaggctaaacactccttatcagtgtgagagaaattttatgaatgagatgcagatctttatgggcacatgctggcacaccatttacctggttgtatgagcacatcaagcaacttgcacgaccctcctgtatgcagctgtggtggcaagtggcaacctgtggtgttgcttcctctggtcttaaatcctcacaccagaaggatacttgtggtcaaattgctgttgttcctttgaagttgttgttccaactgaattctggactcagattgatccaagagttgcgggggtggcaagtggtttgctaacgatgcaggtgccgcctcatctgatcttgaatctcacttgctcagtttgctgccattttcttgttatttgcaggggtacttgtagggaacatgagaaggatctgctgtcacagtttgttgattgtgggatcataagctgccagcttgtcttgcttgtttgtttggtactccctttgtcccataatgtaagatgttctacactacgttagtgtcaaaaacgtcttacattatgggacggacggagtatatttgtgttttgcagcttcagattggaaaatgggtagctgttccagacaagggagtggaattgttccttgtatttgcatgagaaggttcttgtgtatgatatgtaatataagcag

SEQ ID NO: 4421 - DNA, 1171 bp, Triticum aestivum
  Clone ID: TRIAE-23APR03-CLUSTER22810_2
agatgttcctagcgatgcaggccgtcctcaggtacgacaaggtgcattccgaacaagaacaaatcgaactccggccctgcccggcgcgtgttcttggattacgaatttcaatgcaggagaaatgccgttgctgggccggccgcgctggctcgcttcgtcagccactgtggctactccacggcctccaactcccaaaggttggccgggaaggtggccgtgatcaccggtgccgccagcggcatcggcaaggcgacggccgcggagttcgtcaggaacggcgccaaggtcatcctcgccgacatctaggacgacctcggccgcgccgtcgccgcccagctcggcccggacgcggcctacgcccgctgcgacgtcacggacgaggcgcaggtcgctgcggccgtcgacctcgcggtggcgcgccatggccggctcgacatcatgcacaaccacgccggcgtcaccgggcggatggtcctggactccgtcgggtccctcgacctcgccgacttcgaccgcaccatggccaccaacgcccggtccgccgtcgccgggatcaagcacgcggcgcgcgtgatggtgccgcgccggagcgggtgcatcatctgcacggcgagcaccgcgggggtgctgggcggcatcatcgcgcacccgtacagcgtgtccaaggcggcggtgctgggggtcgtgcgcgccgcggccggggagctggcgcgctccggcgtgcgcgtcaacgccgtctcgcccaactacatcccgacgccgctggtgatgcgcatcctggagcagtggtacccgaaggccagcgcggaggagcaccggcgtatcgtggagggggacatcaacgagatggagggcgcggtgctggagccggacgacatcgcgagggcggcgctgtacctggcgtccgacgaggccaagtacgtcaacggccacaacctcgtcgtcgacggcgggttcacggtggggaaggcgcccaacatgccggcaccggcgctgtgaaacgaagcgagctctttgaaataaatttacgtcgtgttgcattgcaccagaagtagaaccaccgagcattacgtttttgtttcagaattgaaacaacgaattgtcctcgatgtcgaggacgtgcatacgctgaccccatgcggaaatagatgagagcagcccggttgttgtt

SEQ ID NO: 4422 - DNA, 784 bp, Triticum aestivum
  Clone ID: TRIAE-23APR03-CLUSTER22822_4
gctagctctcgcaagcatcgcaccagatccaccggtgggagcaaggaagcgagcgagatccacctaacccaccaatggcggccgctgcttcctccagcgcgtggaaggccaggtggctccgccccgaggtacgcgcgcaccgctccctcccatgttccttcatttcatctgatctagcttagtttagcgatctcgctcgctgggtttcggtagttgtgatggccatggtctcacgacggtggcatgttcttggcaggcgtacccgatcttcgcggcgacgggcgtggccgtggggatctgcgtgatgcagctggtgcgcaacatcaccaccaaccccgaggtgcgggtgaccaaggagaaccgggcggccggggtgctggacaaccacgacgagggccgccgctacgcgcgccaccccttcaggaggttcatcgacggcaagtccgccgagatcatgcccggcatcaacagcttcttcaccgacccaccaagaactagacgacgtcgtcgtcgtcggagagctcttgtccaaggaaggaaggaattcctccgcgagattttttttcccttctgaaggaatacagaaatactgttgttatttttcctcgaattcaagtatattattcgccatgactaattgtctggctgtacaccattgattgttgtgatcatacacacaaaactcggcctgaataatccctatatgtcttgaggaaaaaaaaaaaaaaaaaaaaaaaaaaaaaaaaaaaaaaaaaaagaaaaaaaaaaaaaaaaaaggccccta

SEQ ID NO: 4423 - DNA, 1331 bp, Triticum aestivum
  Clone ID: TRIAE-23APR03-CLUSTER22828_1
caggaaattcgagtccaaggaacccgaaccaaaggctttccccgagcggccgaacgggcggcgcctgaatcgaggcgaaacgccgtgcttgcggccgcggccccggccgcgacgctcgcctctctccggttctgattctatcccatgctttgctttccatacgaccttgtcttgacacggtttagcctctccaagcactagctactagctatttgaattctccgccacaagcctttagagatgctaagcaagaccgttggttttctagaaaacagcgttttttaaaatacgtgcacctcaacttcggggtatcaggagactatgcaaatagagacattgatcgcttgttttcgtttttgcctttttgccctctcttgctatcttctactctataacaggaaaataccccataaagccatcaccacctttccgccgttcccacccttgcacacaagatagtagtcaagctgctttagagtctttccagtattctgagctagcagctccacctgtctaatgaaaaaagaaaagggcatgtctaccttatcttctgccgctgcacaacatgtggtcgcacgcagatgctgtgtaccagctccatccatacttgcaacagtttgggctgttttatgccttcattgatacaatggcactagtccctggatggctattcctgatgatcttcatgactgtctacttctttgtggtgagacggaagtggtcgccgcactttttgcgctatcacatcatattggccattcttcttgacacgggctcccaggctctggcgaccatgtgcaactggaatccaagcatcgtctttcagggtaaaccaatggcgtatttctggatgacactggccttcattcagatcttcacagttgtcgagtgtatgaggtgtgccctttcaggaatgtatcctaacgttccattcatatcccacacagcgttcatccattctgatttgaacctgttcaggtaattggctagtgcaaatgtgcatctggaaatgtaagaggggttaaggaaccgtgtgtgagatagagaactagctgaggaaaaaatggtttggaagtgtattttgggacataagaaggggatgcaagtatatgcaatcatcacgggtaattgtagtagcttctcaagactctgcagtgttggcagtgttatactgcatgttttcatgaagttccaggggacacctgactttaaattttgtgtgtggcttggtttgtaaacgacaagcaattcgaaatgatgtttaatttggccagtatgcttatgttggagctcctaagtctaaaaaaaaaaaaaaaaagctatcgataccg

SEQ ID NO: 4424 - DNA, 442 bp, Triticum aestivum
  Clone ID: TRIAE-23APR03-CLUSTER22830_5
atcacaaaccaaaagcataccatctcctctcctctcctttcatctcatggctgctcccgctctcaagttcgcggccttcgtcctcctggccgccctctgcgcggccgcgctggccccggccgtgtcgggacagccgacggacgctctagcgacgtgcatcgggcgctgcgggtgtgtgccctgcccgaaagggaaggtctgcatcgctatttgcactcccccgccgccctgcgcagccagatgccgctgcacctattctggcacgggctgctaggctggctgtgactctggtgacgtcgcctgcgcgcaagcgcatgaagctctagccagctgtgtattgtatgtgtgcgtctgtgtgctgtgatgcgctaataaagtgtaaacggatcgatccgtgggacaaaataaataaatagaaatgtcaaaaaaaaaaaggccccta

SEQ ID NO: 4425 - DNA, 2595 bp, Triticum aestivum
  Clone ID: TRIAE-23APR03-CLUSTER228_1
gcggggtccgctcccgttcgggacgaggaacaccagcaaggacactcacccgcaagtgcctggccggggagaacgagtacgcacgccgcccgatcgtccgtccgtccaacaagaggaggagctcagatcagcgggggccccgccagctgcagctagccacaccatgagggcgcaccgggagcaggaggagaggacaagcttcccccagtcggcaacgacctccgctcccccacgagggcccggccggcggctgtgggtgggcgtgccggccccggtgcgtccgcggaggccgatcacggcagtgaggtcctctcgcactgcgggccgccacaccgcacgcccgggaaagcggctcgcggcacgccggaggtcgccactcccggggccggcgccggccacccggacgcgggccgcacggaacctcttgttggtcgtcggcccccgggggcccgcgggcgagcccgccgggctcggcggcgtaccggggggcctgcccccccccatggccgccaacggccgccgggcgatggtcagctccccgccctacgaccagtacaaggacggctgggagaccaccgtcgtctccgcgatcaaggtcgttgacaagtacgagagggtgaggtacttccactgctacaagcgcagggtggaccgcgtgttcgtcgaccacccgtgcttcctggagaaggtccggggcaagaccaaggagaagatctacgggcccgacgccggcacggactacgaggacaaccagcagcgcttcagccttctctgccaggcggcgctggaagtgccgaggatcctgaacctcgacaataacccctacttttctgggccctacggggaggacgtggtgttcgtgtgcaatgactggcacacgggccttctggcctgctacctcaagagcaactaccagtccaatggcatctacagggccgcaaaggtggcattctgcatccacaacatctcgtaccagggccgcttctccttcgacgacttcgcgcagctcaacctgcccgacaggttcaagtcgtccttcgacttcatcgacggctacgacaagccggtggaggggcgcaagatcaactggatgaaggccgggatcctgcaggccgacaaggtgctgacggtgagcccctactacgcggaggagctcatctctggcgaagccaggggctgcgagctcgacaacatcatgcgcctcactgggatcaccggcatcgtcaacggcatggatgttagcgagtgggaccccaccaaggacaagttcctcgccgtcaactacgacatcaccaccgcgttggaggggaaggcgctgaacaaggaggcgctgcaggccgaggtggggctgccggtggaccggaaggtgcccctggtggcgttcatcggcaggctggaggagcagaagggccccgacgtgatgatcgccgccatcccggagatcctgaaggaggaggacgtccagatcgttctcctgggcaccgggaagaagaagttcgagcggctactcaagagcattgaggagaaattcccgagcaaggtgagggccgtggtcaggttcaacgcgccgctggctcaccagatgatggccggcgccgacgtgctcgccgtcaccagccgcttcgagccctgcggcctcatccagctccaggggatgcgctacggaacgccgtgcgcgtgcgcgtccaccggcgggcttgtcgacacgatcgtggagggcaagaccgggttccacatgggccagctcagtgtcgactgcaacgtggtggagccggccgacgtgaagaaggtggtgaccaccctgaagcgcgccgtcaaggtcgtcggcacgccggcctaccatgagatggtcaagaactgcatgatacaggatctctcctggaaggggccagccaagaactgggaggacgtgcttctggaactgggtgtcgaggggagcgagccgggggtcatcggcgaggagattgcgccgctcgccatggagaacgtcgccgctccctgaagagagaaagaaaaggaagttctggtgcatggagcgtccatccagtctgcagggttttcgtatggggagatagccgcttgttgtagcgaagaagggccgatatatataatatatagacttataagtacttaacttttgttgtgccgcttgcctcttttacaaacaaaaaagaagttaggggttgtgcttgttatagtgtgctgaactgtgcttgcattttggtgtggtatattgcaataaacaaaggatttgttatttgtttaaaataaaaaaaaaaaaattagttgtgtgcctttatgctctttccccggtgttccatggctcgtcccttcattggccccggtttttaactttctgattgggaaaaacctgggttcccaacttaatcctttggggacaacccttttttccagtttgggtataataaaaaagcagctgcgatatccttttctaacaattggcggcgttatgtgaccgatcgctcgccgtcgatcgatcaagctagctcctcgtcgtctcaacccgcatggtgtttgataatttcagtgagtctttgcgtctgctggttacaatttccaggtccggggcaagac

SEQ ID NO: 4426 - DNA, 1542 bp, Triticum aestivum
  Clone ID: TRIAE-23APR03-CLUSTER229_1
aaagccacgccaccaaagccccggtcgaggcaccacctgagacggccccgccggccgtgatgcgccaccgatccaagctcgcaaccctcgtccggcgctcccgcccggtcgccgccgccaccgtcgccgcgtctgtccccgcaaccgcgaccgctgaccggggcctccgcccccaacgccacggcggcggcggccgcggccctgcccgcgactgccaccgccgccgcggccgccaacgggatggaggaggcggccgcgggcccgctgcacacgcgcgtgtgcatcattgggagcggccccgccgcgcacacggcggccgtctacgcggcacgcgccgagcccaagcccgtgcacttcgagggctggctcgccaaccacatcgcggcgcgcgggcacctcaccaccaccccccacgtcgagaccgtccgtgggttccccgacggcattctcggcctagaccgcatggaccgctgccgcgcgcagtccgtgcgcttcgggaccaagatcttctaccggaccgtcacctccgtcgacttctcctcccgccccttccgcgtctcctccgacgacaccgtcgtccacgccgaccccgtcgtcctcgccaccgtcgcctgcgcccgcggcctccatttcgccggctccgacgcgttctggaaccgtgggatcaccgcctgcgccgtctgcgacggtgccgcgcccatcttccggaacaagcccatcgccgtcgtcggtggcggggactctgccatggaggaggccaacttcctcaccaagtacggctcgcgcgtctacatcatccaccgccgcgacgccttccgcgcctccaagatcatgcaggcacgggctctctccaaccccaaaatccaggtcgtgtgggactccgaggtcgttgaggcctacggcggctcggacggcggccccttgggcggtgtcaaggtcaaaaacctggtgaccggcgaggtatccgacttccgggtggccgggctcttctttgccattgggcacgagccagctaccaagtttctcgccggacagctcgagctcgactccgaggggtacgtggccaccaagccgggctccacgcacaccagtgtgaagggggtcttcgctgccggggacgttcaggacaagaagtaccgccaggccattactgccgcaggatcaggttgtatggctgctttggacgcggagcactacctgcaggaggttggcgcacaggaagggaagactgattgactatatgtggggaaagcagctggtagttctacgaaaatttcattggtgccaaaatctgcactctgaggcgcaattgtgatgaatcgtgtcagctcctcaaaatcagcagattgttattgtttttaggccgcaagtatatgatacgctgttggaaatttattcctgtggatggtcaagttgtgctggtgttttcgcattcaaaatatctgaatgacaagacgaatttgtgaatcctgattactgtctccttcctgtggatggaaggaacatttaaactctattaggccaatttcgttctttgtaaaa

SEQ ID NO: 4427 - DNA, 2074 bp, Triticum aestivum
  Clone ID: TRIAE-23APR03-CLUSTER22_35
agaatcacacacacagagctagctagttcaacaatggcgaccagagccagagtaaccatccctctcctcttcctcctgggcacaagccttctcttcgccgcggctgtttcggcctcccatgacgaggaggaggacaggcgcggtgggcgctcgcttcagcagtgcgtgcagcggtgccatcaggaccggccgcggtactcgcatgcccggtgcgtgcaggagtgccgggacgagcagcagcagcacggaaggcacgagcaggaggagcagggccacagccatggccggcacggcgaaggggggcgtgaggaggagcagggccgtggcccgtggggcggcacggccagggagagcctgaggaggaggagggccgtggccgtgggcggcacggcgagggggagcgtgaggagcacggaaggcacgagcagggccgtggccggcgcggcgagggagagcgtgatgaggagcacggggatagccgccggccgtacgtgttcggcccacgtagcttccgtagcatcatccggagcgaccacgggttcgtgaaggcccttcgcccgttcgacgaagtgtccaggctcctccgaggcatcaggaactaccgcgtcgccatcatggaggtgaacccgcgctcgttcgtcgtgccgggactcacggacgcggacggcgtcggctacgtcgctcaaggcgagggcgtgctaacggtgatcgagaacggcgagaggcggtcctacaccgtcaggcaaggcgatgtcatcgtggcgccggcggggtcgatcatgcacctggccaacaccgacggccggaggaagctggtcatcgccaagattctccacaccatctccgtgcccggcaagttccagtatttctcggccaagcctctcctcgcgagtttgagcaaacgcgtgctcacagcggctttgatgacctcggatgagcagctgggcaggctgctgttcggcaggcgccaaggccaggaggaggaggagtccatctccatcgtccgcgcgtccgaggagcagctccgcgagctgcgtcggcaggcgtccgagggcgggcagggccaccactggcctctccccccgttccgcggcgactcgcgcgacaccttcaacctcctggagcagcgccccaagatcgccaaccgccacggccgcctcttcgaggccgacggccgcagcttccacgccctcgcccaacacgacgtccgtgtcgccgtcgccaacatcacgccgggttctatgaccgcgccgtacctgaacacgcagtcgttcaagttcgccgtcgtgctggaaggcgaggggcgaggtgcacatcgtgtgcccgcacctagcccgcgacagcgagcggccgcgagcacgagcacggcaagggcaggcggagcgaggaagaggacgacgaccagcggcagcaacgccgacgacgcggctccggctccgagtccgagtccgagtccgaggaggagcaggaccagcagaggtacgagacggtccgcgcgcgggtgtcgcgcggctcggcgttcgtggtgccgcccggccacccggtggtggagatcgcctcgtcccgcggcagcagcaacctccaggtggtgtgcttcgagatcaacgccgagaggaacgagcgggtgtggctcgccgggaggaacaacgtgatcggcaagctggacagccccgcccaggagctcaccttcggcaggcccgccagggaggtgcaggaggtgttccgcgccaaggaccagcaggacgagggcttcgtcgccgggcccgagcagcagagccgccacgagcaggagcaggagcgccgccgcggtgaccgcgggcgtggtgacgacgccgtgggggcgttcctgaggatggcgaccggcgcgttctgaggctgcatggccgctggagacttgtgtgctgtgtgtactgtgtagtggttcgtacgtatgcgggagtagaataaataagagtggcacgggctcggtacgatgatgtaagttgccaacctacctactaccaaggcatgtccatgtcaatacataataaatacaagggcgttgcgtctctttttcagtaaaaaaaaaaaaaaa

SEQ ID NO: 4428 - DNA, 1182 bp, Triticum aestivum
  Clone ID: TRIAE-23APR03-CLUSTER22_37
tagaacatcctaatcggaaaagggtaaagcggcctggcgatggccacagcgcgactactgctccgaagcgcctccctgctccccctccgccgctcgcccctgcactcatccggcttccagccccgagccgccatggcctccgatgccgccagccagttccagaagatccagatccagcgcgaggacacgacctttgatgtctatgttgttggcaaagaaaatgctcctggagtcgtagtgttgcaagagtggtggggtgttgactatgaggtcaagaatcatgccatccatatttcccaaatcggcgatggatacagagcacttattccagatttgtaccgtgggaaggttgctttggaggtagctgaggcacaacatctgatggaaggactagactggcagggtgcaatcaaggatattcaggcttcagttaaatggctgaaggaaaatggatcgcccaaggttggtgttactggttattgcatgggaggtgctttggcggtcgcaagtggagttttggtcccagaggttgatgctgttgttgctttctacgggacgccatcttcggagcttgctgatgcttccaaggctcaggctccaatccaggctcattttggggagcttgacagttttgttgggtttgcggatgttaccgcggccaagtcattggaggagaagctcaaggcttctggagtggcacatgaagtccacatatactctggatgctcccatgccttcatgaacgcatcgcctgaggccctcaagaggaggaagggcatgggtttgactgatgagaatcagggggccattgacctggcatggtcccgcttctccacttggatgggtcgtttcctggggtctgcatgagccattaccatatccatatggtctctgaatgatgtatatggagtctgtcggctcagaagaataaaatgtttgggtgcaatatgtagccagtgcccaatctagacaagcagtgtgttttgtgttagtactactatatgttccaactcgtcatggttttgccagaacatctcggggtacttgattggaggggaaatgaaacacttacgacgctgtcatacgagtttgttttgtgttttaataggcttcagccgagtgctttctggattttaaaaaaaaaaaaaaaaaaaaaaaaaaaaaagaaaaaaaaaaaaaaaa

SEQ ID NO: 4429 - DNA, 1327 bp, Triticum aestivum
  Clone ID: TRIAE-23APR03-CLUSTER23068_2
gagtacccaagattagaattatgtactgccgtctcccctcctctctccttcttcctctccaagtttagctcctcttacatatagacctccgtccgtcggcataccacggcaaggttgttacagtgaccaagaacagggctccctcaatggtgcggacgacggtgcaggagctggcggcggccgtcgaggagccgccgcggcagtacgtggtgcacgagcgagaccgagaccacctgctggccgccgacgagatgccggaccccatccctctcatcgaccttggccggctcacggccgccgacgaggcccacaagctccgggaggccctacagacctggggcctcttcctggtcaccaaccatggaattgaggagtctcttatggatgccatgatgagcgcgtcgagggacttcttccggcagccgcctgaagaaaagaacaaatgcagcaacctgatagatgacggcgagcacttggagatggaaggctatggaaatgacaaagtggtaaccccccaggatcagggcctcagctggaacgaccggttgcatttgaggggtggagccacaagatgagaggaattttgccaagtggcccactcacccggaatctttcagggatgtgctactttgagtacgcatcaagaaccaagagaataagagaccttatctttgcgatcaatagcccaagatcctggacctggatgaaggattacttcgtcaacaaaaatatcaaacacggctcgtgggtttgctaggttcaactactaccctccatgttcgagacctgaactagttttgggcatgaggcctcactctgatgttggtctccttacaatcctttttgttgaccatgatgtcggtggcttgcaagttcagagaaatgggaaatggtacaatgtcccagtcaagccttatacattggtgattaacttagctgattgcatggagataatgtgcaacggaatcttcatgagtccagttcatagggtggtgacgaatgccaagaaggagagactttcattgggtgtgttttatgttgtggatggtgaaacggtgctggagccagcgcctggtttgctggatgacaagcgaccaccaagatatgggaaattcaaggccaaggatttcggtttttcgttcgactgaacattttcgtcaagggaagagattcatcgagaccctgaaaatataagttcaacgtattaactagtttatttatgggggcttgtagtagtgattacctatatatggagaataattaaagagatggtttctcttccgtgagtgggttttctacctataatataataatgccctttcttagt

SEQ ID NO: 4430 - DNA, 1110 bp, Triticum aestivum
  Clone ID: TRIAE-23APR03-CLUSTER23091_1
acgcatcagccctcccttccctggcctcagtagttagccaccagccactgaacactaccaggagggatcagaaggctaccatcaggcaaggagggggcggagccgacggggtcagccccggcaaggtcccgctgtgctactacggcgcgggcgggcgacactttaaatacctcgggcccccggcccgcggcgtagtagtactcatccgccctcccgcccctggcctcagtagttagccagtagccactgaacactacgaggggcgatcagaaggccaccatgagcctaggagggggcggaggcgacggggtgagccccggcaatgtcccggtgtgctactacggcgcgggagggcgagtctcggccaccctggagcggcgggtgcgcgccgccggggtgctcctgcggtgcgcggcgtgcggcctggccgtgctcgccgccgccctcctcggcgccgaccgccagtcccgcaccttcttctcctgtgatcaggtgatggcgtacgtgataatcggggcggtggcggtggccatggaggcggcgctgctggggaagaccgggcaggtggagttccagtggatgaagacgtgcgagctataccagcggttctgcacgcaggcggggggcggcgttgcgtgcgccgtcgccgccagcgccaccatggtcgggatcgccctcgtctccgccttcaacctcttccgcctctacggccacggcaagggcagcagcaagtgaagccaaagccctcgctgcgtgcatgcgtgcatgcatggccggcctcttttaggttttaacgacaccgaatccaaatccagtccggggagagaaccgtacgtacgtagcatatgtagctaccgttgctctttttactatagtttgtttgatgttgacacgcatggtgtcagtcagcgttagccataagaagctctgtgggacaaaagctagaccggtttctctgtatatgatgtcaagtgatccacaaggtgtttgtagacagtaatactgctatgtgcgtaataaaagaggaacaagaaagcgatgtagtatccaaaaaaaaaaaaaaaactgtggccggcccggtttgataagaaaataggtagttttccgatt

SEQ ID NO: 4431 - DNA, 1634 bp, Triticum aestivum
  Clone ID: TRIAE-23APR03-CLUSTER23095_1
aaacccccaaccccttccgtctaggcaagcaccccggcggcgcgaacaccaaggctccccggcggccgcagcaatgctcctaaccaactccctccccgccagcccttccctgtcccacccccccccgaccgcccaccccggccacgccctccgtcgagcagcagcccccgcccaacccccgccgccgcagccatgctccgcacgaagccccagctctcttcctctctgctcgcatccacgccgctctttaaccccccatccaatcccaaccacgccaagccaatcgccgcctccccctccccccgccgccgcctccgcatctccgccgcatccacggcggtttcgccgggggcgacggcgctcagccgcgtcgacgtgctctcggaggcgctccccttcatccaccgcctcccgggcaacgcggtcgtggtcaactacggcggcgccgccttgaagtcccccgaggccgcagtcctccgttgatccgacgacctcgtcctcctctcctgcgtcggcctccgccccatcctcgtccacggcggcgggcccgaagatcaactcctggctgctccgcgtcggcgtcgagccgcacgttccgccaacgcccccccccgtccgcgcgccgccccacagcgggggtcgtccacaacgcggccgccgtcggggtcgtcggcgagctcgcccccctcgtcccccccgccctccgcccgatcatcgcctccggccacatcccggtcatcgccaccgtggccgcagacgagaccgggcaggcctacaacatcaacgccgacactgcggcgggggagatcgcggctgccattggcgccgagaagctgctgctgatcactgacgtgtccggcatactcgcggaccgggacgaccccgggagcctggtgaaggagattgacatcgccggcggccggcgggccgcggccgtgggccaggtggctgggggaatgatcccaaaggtggagtgctgcgtgcgcgccctcgcccaccctggcagcctggtgaaggagattgacatcgctggggtgcggcagatggtatccggtgggcaggttgctggtggaatgatcccaaaggtggagtgctgcgtgagagccctcgcccagggtgtgcacactgcaagcatcatcgatgggcgtgtcccgcactcgctgttgctcgagattctcacagatgagggcactggcacaatgatcaccggctaaggtgtaaaatgcctccttggttttcttgtaaattttaaagcgccagcccaggcgcagagctaagtgcagcgtgatggatagaactgcggaaaccaagtggatggggaaaaggacttcgattgagcgccgctacgtcaaggtccaattatgctagccatgaggatgcgggagactgatatgggtttgattcttctcgtcagtttcgaccaccatgttgtcatgggcatagcatagtgaactccactcatagctaaaaaggaacggtgcctgccttcttttcagtatctaattaccgcattcgtcggagctcttccgctgctgcatctcatttgttggacggggatatgctgagaaaacgaagggcaaatctgtgcccactgactaattatgttgcctgcttgctaaaaaaaaaaaaaaagc

SEQ ID NO: 4432 - DNA, 2552 bp, Triticum aestivum
  Clone ID: TRIAE-23APR03-CLUSTER230_105
aaacccaatccaaaatctttccctccctcccatcctttcttcccctccgcctccgcctctgcggccgccagtgacgcgccaggcgctagctagccatgtcgtgctcccacctctccaccgcgtggtcctcctccgcgcttgccagcacctccacccgccgccgcgcctccaccggcagcagcagcctggtggtgcggtgctccctccgggacctccgtaaccgcatcgactctgtccgcaacacgcagaagatcacggaggcgatgaagctggtggccgccgccaaggtccgtcgcgcgcaggaggccgtggtctcctctcgccccttctcgggaggctctggtggaggtgctctacaacatgaaccaggagatccagtcggaggacatcgacctgcccctcacccgccagcgcgccgtcaagcgcgtcgcgatcgtcgtcctcaccggcgagcgtggtctctgcggcgccttcaacaacaacgtgctcaagaaggccgaggcccgcatggaggacctcaggcagctgggcgtcgactacaccgtcatcagcgtcggcaagaagggcaacgcctacttccagcgccgcgactacatccccaccgagcgcttcctcgagctcgccgggatccccaccgtcaaggactcgcaggccatttgcgacctcatctactccctctttgtcgccgaggaggtcgacaaggtggagctcgtctactccaagttcgtcaacctcgtccgctccgaccccatcatccagacgctgctgcccatgtcccctaagggcgagatctgcgatgtcaacggcatctgtgtcgacgccaccgaggacgagctcttcaagctcaccaccaaggaaggcaagctcaccgtggagcgcgagaagatcaagatcgagatgcagcccttctcccccgtcgtccagttcgagcaggaccccgtccagatcctcgacgctctcctcccgctctacctcaacagccagatcctgcgtgccctccaggagtcgctcgctagcgagctcgccgccaggatgagcgccatgagcagcgccacagacaatgccatcgacctccggaaaaatctctccatggtctacaaccgccgacgccaggccaagatcaccggagagatccttgagatcgtcgctggcgccgacgccctgtccggctgattcctcctccccacttgagctgagccgccgctgttatatataactctttgcctccttttctcctctcttctacttatcttgcttggtctgtgtctgtctgtaataatttctcatagcacaaaaaaggatgtctgttctaagattcagttcggagatgccaaatgtataatccagagtaattattacagacagacacagaccaagcaagataagcggacgcgtgggcggacgcgtgggcggacgcgtgggtcatattcgggaaccctatctatctggaggctacctaatcccctccccggcactccccgcctgacagccgcggccatggcgtgcgccttctccgcctccaccgtgtccacggccgccgcgctcgtcgcgtccccgaagccagccggggtgccgcagtgcctgtcgtttccccgcgccgccgccaggccctcccgcctcgccgccgccggctcgaggacggccagggcccgcagcctcgtcgcccgcgccgcagccgagtacgacctgccgctggtggggaacaaggcgccggacttcgcggcagaggccgtgttcgaccaggagttcatcaacgtcaagctatctgattacattgggaagaagtatgtgattcttttcttctaccctctggacttcaccttcgtctgcccaactgagattacggctttcagcgacagacatgaggagttcgagaagataaacactgaaattcttggtgtttcagttgatagtgtgttttcccatcttgcatgggtgcagacagagaggaaatctggtggacttggtgatcttaagtatccactggtttctgatgtcaccaaatcaatctcaaagtcttttggtgtattgatccctgatcagggaattgctctgagaggattattcatcattgacaaggagggtgtgattcagcattccactattaacaaccttggtattggccgcagtgtggatgagaccttgagaacccttcaggctctgcaatacgtccaagaaaacccagacgaggtctgcccggcaggatggaaacctggggaaaagtcgatgaagcctgaccctaagggcagcaaggagtacttcgctgccatctagatgcgtcctttgcactcgctgtcgagttttgtcatggccgtttctcggttacatgtgtttttgtgacccgagttgtagttatcatgcgtacaattgactctgtaatttctacaataagggtttgtctgtgtgtggatcttccctgctccaatttggaaagaacaatacaagattggaaataaaatcttatcttatgccagccaatggctttatttggaaaaaaaaaaaaaaaaaaaaaaaaaaaaaaaaaaaaaaaaaaaaaaaaaaaaaaaaaaaac

SEQ ID NO: 4433 - DNA, 712 bp, Triticum aestivum
  Clone ID: TRIAE-23APR03-CLUSTER230_58
cataaacccttctccctcctcagtttcctctttccccctctcgaaagactgcgcggccgcgaagccaaaccctagcctccgccccccctcgaatccgcatcgtcttcagcggggagggatgagcaggcgctggagcaggacgatctatgttggcaacctccctggggatatccgggagagggaggtggaggacctcttctacaagtatggccgtattgttgatattgacctgaaggttcctccaaggccgcctggctatgcttttgttgagtttgaagatcctcgtgacgccgaagatgcctgtgctggaagggatggaaacctggggaaaagtcgatgaagcctgaccctaagggcagcaaggagtacttcgctgccatctagacgcgtcctttgcactcgctgtcgagttttgtcatggccgtttctcggttacatgtgtttttgtgacccgagttgtagttatcacgcgtacaattgactctgtaatttctacaataagggtttgtctgtgtgtggatcttccctgctccaatttggaaagaacaatacaagattggaaataaaatcttatcttatattgttctttccaaattggagcagggaagatccacacacagacaaacccttattgtagaaattacagagtcaattgtacgcatgataactacaactcgggtcacaaaaacacatgtaaccgagaaacggccat

SEQ ID NO: 4434 - DNA, 1646 bp, Triticum aestivum
  Clone ID: TRIAE-23APR03-CLUSTER230_80
aacgccaacgcacgcagcgcaggacacgcccactttccacgcccccgtctccgcctccctcgccagcgagctccgctccgctccgcttcctcctccggcccccgccgccgcctcctcgctccccaagaccaatggctgacggcgaggacatccagccacttgtgtgtgacaatggcactggaatggtcaaggctggttttgctggtgatgatgccccaagagcagttttccctagtatagttggccgccctcggcacacaggtgtcatggttggaatgggccaaaaagatgcctatgtgggtgatgaagcgcagtcaaaaaggggtatcctgaccttgaaataccctattgagcatggcattgtgagcaactgggatgacatggagaaaatctggcatcacaccttctacaatgagctgcgtgttgcccctgaagaacatccagttttgctgacagaagctcctctgaacccaaaggcaaacagagagaagatgacccaaatcatgttcgagacattcaatgccccagcgatgtatgtggctattcaagctgttctttctctatatgccagtggtcgtactacaggtattgtgcttgattctggtgatggtgtgagccatactgtgccgatctatgagggatatgcacttcctcatgctattctccggctggatcttgcgggccgtgatctgaccgactccctgatgaagatcctcacagaaaggggttattccttcactacaaccgcagagcgggaaatcgtaagagatataaaggagaagctcgcctatgtggcccttgactatgagcaggagctggagacagccaagagcagctcgtccgtcgagaagagctacgagctgcctgacgggcaggtcatcacgatcggcgccgagaggttcaggtgcccggaggtgctgttccagccctcgctgatcggcatggaggctcctgggatccacgagaccacctacaactccatcatgaagtgcgacgtggatatcaggaaggacctgtacggcaacattgtgctcagtggagggacgaccatgttccccggcatcgccgaccggatgagcaaggagatcaccgccctcgcgccgagcagcatgaagatcaaggtcgtggcgcctcccgagaggaagtacagtgtctggatcggtggttccatcctcgcctccctcagcacattccagcagatgtggatatccaagggagagtacgacgaatccggcccctcgatcgtccaccgcaagtgcttctaagccttggggccgtgtctctctgcacttttcctatgattgggcttgtatccgactcccctccattgaagtattccccgagctttctgcggccgttttcgccgatgatttggcattgccatgtggatgaaggaaaagtaggtcctgtattatcacttatatacagaagatgccgcttgttctcagtgacattactagtatgttggttgatatttagccggtgcgcgtggacgaccggtttcgggtttgggctttgggctgtttgtgtggctgcagagtgcagaacgctggctgtgtatgtataattattttcttccgttaagtatattggtgtggaattgttatcattgttattattatacctgtagttgctttggtcaaaaa

SEQ ID NO: 4435 - DNA, 1825 bp, Triticum aestivum
  Clone ID: TRIAE-23APR03-CLUSTER230_92
tcggcacgaggcgcgtcagcaggccgacagcagtgtgtgtgcgcgcgcgcgagcgagatccagacctccagagcggcacagccaggaaggacagtccagagcggctgcagttatagccagcgcctcccccaccaccaccttccccctccctcctccgatcgcatctcccccctcctccgtcctcccctcccgtcgcccgcctcggcctcagcctcctccagtcctcggagccctccacgatattctctaggaaatggctgacggtgaggacatccagccccttgtctgcgacaatggaactggaatggtcaaggctggtttcgctggagatgatgcaccaagggctgttttccctagcatagtcggtcgcccacggcacactggtgtcatggtagggatggggcagaaggatgcctatgtcggtgatgaggcgcagtccaagagaggtatcctcacactcaagtaccccatcgagcacggtatcgtgagcaactgggatgacatggagaaaatctggcatcacaccttctacaatgagctccgtgtggcacccgaggagcaccctgtgttgctcactgaggctcctctgaacccaaaagccaacagagagaagatgacccagattatgttcgagactttcaatgttcctgccatgtacgtcgcgattcaggccgtgctttccctctatgcaagtggtcgtactaccggtattgttctcgactctggtgatggtgtcagccacactgtgcccatttacgaaggatacgcgcttcctcatgccattcttcgtttggatctcgctggtcgggatctcactgactcccttatgaagatcctcaccgagagaggttactccttcacaacctcagccgagcgggaaattgtaagggacatcaaggagaagcttgcgtacgtagcccttgattatgagcaggagctggagactgccaagaacagctcctcggttgagaagagctacgagcttcctgatggtcaggtgatcacgattggcgcagagaggttcaggtgccctgaggtcctcttccagccatccatgatcggcatggagtcttctggaatccatgagacgacctacaactccatcatgaagtgtgacgtggatatcaggaaggacttgtatggcaacattgtgctcagtggtggcacaaccatgttcccaggtatcgctgaccgtatgagcaaggagatcaccgcccttgccccgagcagcatgaagatcaaggtcgtcgctccacctgagaggaagtacagtgtctggatcggagggtccatcctagcctcactcagcactttccaacagatgtggatatccaaggacgagtacgacgagtctggcccggcgatcgtccacaggaagtgcttctgatctccacgaaacgctgcgccgccgttatcatctagtctcgggttatgtttggttcattcttctagaaatgtattgcgtatttgcaagctatgttttttttccagacgtgacgtgagtactctcgggatatgccgcctatatacgtggcggctccatggtgcaagtgcaagtgcaagtacactatatctatgtttgtgcattgtcacagtgtgtttgtgagatcagttgtcaaacttgggttggcttgatttgttgttggagttgtctgtaatagctcatggtttttgctatgtactatatcttattatttctttgaggggaggatcatggtaaattatggattttttaagatctcaaggcgttatacagaggtcatccatggaccattttccatgcgattatcaacgggttcatcactggtttataaggccttcaatc

SEQ ID NO: 4436 - DNA, 1035 bp, Triticum aestivum
  unsure (1)..(1035): unsure at all n locations
  Clone ID: TRIAE-23APR03-CLUSTER23140_2
acagccacatcctaggtcaccatggcttcttctccctctccgtcggctgctcgtgccctgctcgtcctcgccgcagcagctctggtgctgagctctgtgtcagccgcggctggctcgccgccgcttgccaagggcctgtcgttcgacttctacagcgccaagtgcccgcaggcggaggccatcgtcttctccttcctcaaggacgccgtccgcaaggacgtcggcctcgccgcgncgctcctccgcatccacttccacgactgcttcgtgcagggctgcgacggctccgtgctcctcgacaagaccaacggcgtcgacagcgagaaggtgtctcctccgaacgtcacgctccgtccgtccgcgttcaaggccatcaacgccatccgcgcgctcctccagagggcgtgcggtgggcccgtggtctactgcgccgacatcggcgcgctcgccgtccgcgactcctgccacctggccggtgggccaaggtacgccgtaccgctcggtcgccgcgacgggctaacccccgcgtccctggacaccatcttgggcgcgctaacgccgacgacctccaagcctgctgaaccggcagggcctcttcacctccgaccaggacctgcacaccgacgccgggaccaagcccgtggtcaccaggttcgccgtcgaccaggccgccttcttcgaccagttcgtcaagtccatggtgaagatggggcagatcaacgtgctcaccggcaaccagggccagatccgcacggactgctccgtgcccaacgccgcccgcagcaccggcgacgagctgccctggtccgtcgtcgaggccgccgagagcttcgtgttgtagttagtaggctttagtcggtccttctcaagctgtttgtttccttccgcaatggtttggactttggatgtcagagtgatcgtgtgttaagtttgtcaagcaacgagaaatattactgtggccctcgtgtaatcggaatccagaaatacatggttgtgctaacttgggatgagaagatttctcttgtcacctttgtt

SEQ ID NO: 4437 - DNA, 1752 bp, Triticum aestivum
  Clone ID: TRIAE-23APR03-CLUSTER231545_1
ggaaagtgtggtaggcaaaggggagattaaaaggtgggggtgaacaccagagtttatttatgcaagggcggggaaagtttataaaaaaaagccgtaccagtgaggcgcgaaataaaaatgcgcgtgcggtattagggggaaagtgggtaacccggggtatatgcttagagtgtgggccggtacggaaaaagctttttttttttttttttattaaaaaaatgtcgatttcagctactcaaaatctgctcccatcagggcaagtggagtgcatcaaattgtctagagacactagtgtatatgcaaaatgaccatgagaaaacagaacagtgtgtgcacgcaaggaatatgattcgctactcgcgagttttttcatgtacatcttggtcgtcgatctccatcgactgtaagatgccattggatctgttctcctttaggatatggctagaagcaaaaggaatagttaacctgatcacgccttcactgcagaagaagtggccatttcctccaagagttccttctgctccaatgcagcgcaggactgaacagctgattcaatatctcctaaaaggaagctagacaatacaaaattcatcttcaaccgatgatcagtcactctgttgtccttataattgtacgtccgtatcttctccgagcgagcaccagtaccgacagttttgctcttaataactggaacgcgcgttctttgttttgaagttgtgacctttcttctgtgcagaatatccttattcccgtaggcttgtgaataagatcaatagccgtctccaccttgttaacattctgccctccagctccaccagatctgggagctttaagctcaatatcttttggatcaataaccacgtccacttcgtcgggctctggcataatagccacagttgcggttgacgtgtgaacacgacccatagtctctgtctgtggtacacgctgaacacggtgcacacctgactcaaacttcagtttactgtagacttgctttcccttcacctccatcacatatgttttgtatccacccttttctgcttctgagcaagaaactggtttaaacttccaattgttgagctcacaatatctttggtacatgcgtacaaggtcaccagcccaaattccagcttcatcacctccagtgccagctcttacttcaagtaagatgttacgtgaatttagagggtcgcttggaagcagaagtaccgtcagtctttcctcgagctccgcaagctgatcagagagagactctagctctgaagctatcatctcagccatatcagggtcatcaccattctctttttgcaaagcttttgtttcttcaatctgcctttcacattccttaaattccctatatgccgtcacaacctctcccagatcggaaacagactgtgcaagtttttggtatttgcttggatctgagacaatgtcagggtcacccaatctaatcgacatttctttccatgccttctctgtagaatccaactttgatatgagatgtcgctccgccatgcagaccacggaggcggaggaggagggcttactgcgccgtgtgccgagaaaaaaggggctgggaggcgggctccgggcggtgggtacggcggaagctcgaggcggcgcccggaagccggcgaggaaggcctccatctttcttttctgccgaggaagaggacgagaggtggtgatggcgagttcaggatagaacaaggttggagaagagctccggtggttctctccattgagattggt

SEQ ID NO: 4438 - DNA, 1484 bp, Triticum aestivum
  Clone ID: TRIAE-23APR03-CLUSTER2317_1
cccaacaccaatcccccaatcccaatccaatctcatcgccaagcaattactccagcactcccgccctcccctcccagcgtgacgtcggcagtctcgccagcccgcagtgctcccaccacccctctgtcgcgcccccccggagccgcagggcgccgacgtcgtcgacagcttcgccgcgggcgaggcctacgtcgccgacgccaaggacgcgatcgccgccgtccgccgcgtctacggcgtagtacgggggcttccggcgctgatagtcagctaggttactaagtttggttatcttggtgtgttgagagatttcgttcaagatgattcttatgtaggttatgtcgttggtacctcaattaccgcgtggcaaaccatttaaaagtgggggaaaaatgtagcaaacaacagtaacttttcataaggttgcatagaaacagggagcttttagcggtggtgaaacttgttatggcaggctctcttaggtatatgctgaagctacaagtggcgatggagtttatggttcggttgcatggcatggttcgcattttgcaattagtatcgagcagtagttagtaagttacgtcgcaaacttgtgtagtaaaagttgtgattgttgaccagttgatctgccaaatctgttaagttggcccggatcctaacaattgagcggaaacggacttgttaactcatagcgggtagagtttcttctctctgaatgcggggtctaatctaattttcaaggagtaaagttgtgtttttcaagaggggaccaggagtttcaaaagggaagaccctgttgatgctaactctaatgagaaaaagctggggtataaggttgagggactgcaggttaaccgctggtgagcaaagttaagttgcagacatagcttaatgataaggagatcccaggcagccgttgttgtcacacccttctatttgttattgtttatggtatcgtagcggtagcatgcacggtcgctatacttgtctctgaaactgacgtaatggcccctccagaattgggtcaagcaggtcgagcaggttctatcctctaactcagggattgctcactttgtcaagatattccctggggtttctcatggatggaccgtgagatacaaaagcgaagacgcagctgctgtgaagagcgccgaggaagccctggcggacatgattgactggttcaacaagaacctcaagtgaacctaatgaattggcggccatccttttgtaataagccagtgtcactcttcaggagtcaccacgcgagcatccacggtttatgttatggtcttagctatagcctatagggcatgcgtctttgtctgctgcaggtctgctggtatgtgtgtgcttgctcattttggggtctgcttgtgctgaacactgaaactattgcactcagataaaatgtggtatttgcagtttaaaagaaaaaaaaaaaaaaaattgccgatccgtcccgcctcgagggggggcccgta

SEQ ID NO: 4439 - DNA, 1771 bp, Triticum aestivum
  Clone ID: TRIAE-23APR03-CLUSTER231806_1
tccctttttttttcttttaatgaattcggaaactttttttttattttttttttggtacggggaacggaatttgagaattttattcatattgatttattaaaataaacaacaacaacaacaacaacaacaacaacaaatgataatgcacgaggaacagaatatatagaaaaataagtgagtactaatactcctcctctttctcctgggctgggtggtaaggtgttggcacgagcatgagtgaggtcttcttccggtaagtgagcaccccttcctcctccatgttcacaccctcccggctcaccccgttgggcagcgcccagttgaagcagtagagcaagttggcaaggatgtactcggcgtttgccacccccatggccagcccggggcagatccggcggcccgcgccgaaggggatgaactcgaagtggctgccgttgaagtccacgtcagtgtcctggaaccgctccgggttaaactcctcggggtccttccacgcggaagggtccctgctgatggcccacgcattgacaatgacctgggtcttggctgggatgtcgtagccagccacctggatcggccgcagcgtctctctcggtacgagtagtgttgctgggggatgcagccgtagggtctcggacagcaccatcctcaggtagctcattttgggcatgtcagcttggtgcactctgctgcctcctccagcggcagtcctaatctcaagttgtgccctttgcagaacccttggtttccggatcagctctgccattgcccaggttatggtcactgtggtggtgtcaatgctaccaatgaatgtgttcatgagaatggccttgacatgatctctggtgaaggttcctgcagcggaggcggcggcccttttcctgatgtccagcagctcctgcaccaggtccgatccgccgccgccggtgccctttctcccatcgcactgctccttctgatcctcgctgacgcggccgtgctctcctcaccccctctcccggtcgcctttgacgccggtgatgcggtcgatgaggcgcccaacgccgttggggaagaagtcttgggcagagaagctacccaacatgtccatggttgcgttgagtaagggcacaaactgccccttgaactgctcccccgcgtagctctcgccgaacgcgaacaagcccacaatccggtccatggtggcgaagatgtgggcctccaggggtaccgggttcggccccaccacggtgagggtctcaatcagcttgtcgatctgtgcatccctcgcgtagtaggcagactgcacgcgccgcctgctgagcagctcgatgatgaacaacttgcgcatctcgcggacgtagtcgctccacggcgagaaggccacgtccttgtagccgtaagacagcagccctggccctgccgacaggggacggctgctgcagtcatcatccttggtcttgagggcttcccgggccgcctctggcgatgtcagcaccaccgtcggcaccatgcccagccgcagcatcatcacaggcccatgccgccgggccagcgcagccaggctccggtgcggcagtggcccgatctggtgcaggttgcccacgaaaggcagcctcatggggcccggtgggagcttcaggccggagcccgaccttccccgaaggaggaggaagccgagtgggacgaggaggatggctagaatcagctgccattgttggggcaggagctggagaacaggtggggcaccagccactgccattgttagggtagcaggagctggatagcaagt

SEQ ID NO: 4440 - DNA, 943 bp, Triticum aestivum
  Clone ID: TRIAE-23APR03-CLUSTER231_13
attggagtcgaaccgtccgagaaggcagtgcccgccgccgccgccgcccccgccccctcaatccccctgccccgccgcccaactccctccgcctctcgcgcgcgtcgccgcccaccgcgcccctgccgtctcgaccccgtccgcaatctctctccactgggtttcgaggggaacatggcgaggctggtgtcgtcttccctcctcagggggctcgcgcggtcgtgccgcgcgcccagcacggcgaccgtgtcacgaccagctttccaacagttcatgaactactcatcaggaatcagtggtgattctaacgtgaatggcggcacaagtgcaacacgagtaaccgctgatactgatacacatcaagatttccagcctacaagcaaaggttctgacatgtctttgcaagacatcgttgctcaggatatcaaggagaatccagtcgttatcttcatgaagggttatcctgaagctcccaggtgtggatttagtgcactggcagttaaggtcctccagcaatatggcgtctctatcactgccagagatattctgagtaatatgaagctcaaggagagtgtcaaagcttactctaactggcctacctttccgcaaatatttatcaacggggagttcgttgggggctctgacatcatattaagcatgcaccagaaaggggaacttaaggatttacttggtgattccgcacaaaagggcgagcaagacagtgcccagtgaaacaagctacagttgttagcatttgcatggagatggatgcttcctctctgagtactcttttactcgacgctcttcctgcggtgttctgttgttttgacgcaggattttcatcgtcgtgttgccagccatgatggaaatctctcggttccaagagcatccaagttttcgcttcatgacaaataaatgccactttttcaatactctgtttttt

SEQ ID NO: 4441 - DNA, 1524 bp, Triticum aestivum
  Clone ID: TRIAE-23APR03-CLUSTER2323_1
gaccaaaccccacccccacacccggacacccccccctcgtcgtcgccactgacgccgcgcgacgcggcgactcacacggcccccccccctctcctcccccgccgccccgcgcccccgccgtggtggacggcgtccccgcgctcctcctcggccccggcgcccgcgccccccgcctctccccccccccacacgctctcctccccctccgccgctgccgccgccgcggcggcgctgcccccctccgccccacccgtctccccctcgccgcgcctctcttttgctgttttcgctgttgctctttgtcatgctggtgcagctgaaggattgatggatagatcagatctctggccattgatattaatgttaagaaaaaagactagatctctattcatgatctccaattaccgataaaagaataccagttgaagctgaagccgcttttgtatgcatttggctttaagcatttgagtatgacgactattagggccttttaatttttctatcttctgctgccgcagccccgtccgcccactgatgacgatgacgatgacgatctgcttcaagtatgattcagagagacctgacctggttactcccttccataattcattgaagcaaatcgctcgcgagatttctgttgtaacaacaagaagagtattcgaaaggattgcggtttgtcatgtttcacaaagaacagcatggaagcttctcaaagatgctgcaaaatcatcgaagaggaaagctctgagggggatgtcaattccagaatacacatactgtgttgccagaacaactttccgagcgcatgcattgggagtagctgctacttgggttgtacaatctgtcgtccaggtctacaaatgttttattcgtcaacctgataatgatgacgaattgttcgacgagaaggaaaaactcagattgtttgcgagaaggatctatagtgtaaccatcaaatgtggtttctctttggtttttgcctcgattggagcaggcctcggcgtccttctgcatccagtgcatggacaatggattggttgtatccttggagattttgcaggaccagttgttgctatccttattttcgagaagttacagttcccgctagaaggttaaagaccaccatctcctgctacaaagttaagaaacccaggtcatccgaccttgtttctagcctgcctggttttcgaagaacatgaagtggagctccttggccttgagtctaccctttcaggatattcattggcctaacttggagctcaaagttgatgaataactatgcatgcatggttaatagcttttcgtggcacaatgcctttgggtattgtgtaatgcttacttttggcacatttaataactagctactgtacttcgttgccgtgctttacattttgaactcaaaggaacatttctgtccactggtttgcataaatttctacagtaagtacttcgctgcccttgtcgtcaactgaacctggtatatctaaggccctcttggtttgccccaaaaaaaaaaaaaaaaaa

SEQ ID NO: 4442 - DNA, 1733 bp, Triticum aestivum
  Clone ID: TRIAE-23APR03-CLUSTER23260_1
ctggacccacttccggttccggagacctcgccacccggcgggcgacccaatggcaacgagccgccggcacgcttgccgttcgtccgttccgcagccgccaccccgcgactcctcctgatctccccaccgtgccaactagtcaaccaacctacccccacccaccgccgaccccccgccccggcgaggcgtacaaatatggagctccgcctccgcgccccggcgtcccccgcttccgcctctccgcgcggcacgtcggtctcccccagccccaggccgcatccgcgcctaccctcgcaacccattcagaagcgattgtccggcagcgccgtctccgtctccaggcgaggcaccgcggcaaggagcagcctgtgttccgccctgatggcggcatcatacaacacaggaactccggacctagtcgacttcgactgggagactcttggatttcaactggtcccgacggactttatgtatataatgaaatgttcgtcagatggagtgttcaccaagggtgaattggttccgtatgggccaatcgagctgaaccctgctgctgcagttttaaattacggccagggattgctcgaaggtcttagagcacacagaaaggaggatggttcggtaattgtttttcgccccgaggaaaacgcgttgcggatgaggataggtgcagatcggctatgcatgcctgcaccaagcgttgagcagttcctatcaggtgtcaagcaaactatattggcaaacaagcgttgggtaccccccactggcaaaggttctttatatatcaggccgctgctgattggaagtggagctatgctaggtgtagcacctgccccggagtatacatttgtcgtgtatgtttgcccagttggtcactatttcaaggatggcctgtctcctattagcttattgactgaggaagaatatcaccgcgctgcacctggtggaactggtgatattaagacaattggaaattatgcttcggttgttagtgctcagagaagagccaaggcgaaaggtcattctgatgttctttacttggatcccgtgcataagaagtttgtggaggaagtttcttcctgtaatatattgatggtgaaggataatgttatttctactccactattaacgggaacaattcttcctggaatcacaagaagaagtataattgaaattgcccgaaatcttggaatccaggtcgaagagcgccttattgcgatagatgagttgcttgatgctgatgaagtcttctgtacagggactgccgttgtactatcacctgttggttccatagtgtaccacggaagaagagtggagtatgggggcgggaaggtcggagcggtgtcccagcaactgtactcagcacttacagctatccagaaaggccttgtggaggacagtatgggatggagtgtgcaattgaattagcagctttatcatctggatggtctctgcaagctcctcggcaagaaaacaatgcaaaatcacttgaccctctgtcaggaaattttgcagaatgtactagaacagaacaatttccctgtgaagatagcaagaggtacacacacaacatagcatcaagctggatcagaagattaataatgattaaatagctgttgtttcttctcattctgttccccaggaggactgattacactttgagtgtaaataactctaccatgcttgcaattgcaacccatgagacataaatatttgttgcaccaactgggttc

SEQ ID NO: 4443 - DNA, 1171 bp, Triticum aestivum
  Clone ID: TRIAE-23APR03-CLUSTER23277_1
gtcaataagtttttctccgccattttccccgtcctccgcgagaagcgcctcgaggtccccgtgtgcggctagctagatcggtggcgcctcccctccctcctcccccgcggaaggcgctcgcccccttcattcccggaaccgattctcgcaagggattcctcgctgctcggctcttcttgaggcatgcagagccagatcgtgtgccatgggtgcaggagcgttctactctaccccagaggggcccccagcgtgtgctgcgccgtgtgccacgccgtcaccagcgcgccgcctccaggaatggagatggctcagcttatatgcgtcggctgtcgaactttattgatgtatactcgcaatgcaactactgtcagatgctcatgttgtgatacagtcaaccttgccagaccagcaccgccagtgaatagtatagctcatgtgaactgtggccagtgccagacggtgttaatgtatccatacggagcatcttctgtcaaatgtgctatctgcaattttattacgaacatcggaatgaacaccgtgagacctttgccacctacaatgcatgcaccaaacggaatttcatatagtgtcccatcgacctctgcgccatccgctcaatcgcagaatgtaacggtggtcgtcgaaaacccaatgacagtagatgacaagggaaaattggtgagcaacgtcgtagtcggggttacgtccggcgggaaaaagtagcaaaacatgtcagcgcttgtaccaagtgatgccctgttctgtgtcttataatctggagttgggaacactttgtattatactcgtgtctggtgatcgaccgatcggtcgcatagaagaaaaccccgaagcgcgtaaacggactgcgccaacaaaaaaagagagtgcgggtgtggataatacggaaaaaaactgtattttgcttaccccctagattcttttgtatgtaaaatgtgggcactgtcagacctcactgcgtgatcaaatcctctctgtcctgtcctgtgtcctgtcctggaggggcctctcgttctggatgaataacagcaaataactttgcatatggctggccccacctgtcaatgattggtaattaaacgactgtaattattgtgatgaataattctttgaaggctgtatataaaaaaaaaaaaaaaagagcttatcgata

SEQ ID NO: 4444 - DNA, 1302 bp, Triticum aestivum
  unsure (1)..(1302): unsure at all n locations
  Clone ID: TRIAE-23APR03-CLUSTER2327_1
gcctgtcggccccgttcctctttctcctcatcttcccacctccttcgtcaaaccccagggccaagcaaccgccgccgccgccccgccccgcccctccccccgccgaatccgccgcccccgcgctcccccggcctgccccccgcgccgatccgccggaatccgccgcaaaggcggcgcctttccatgctctcccccgatgtacagcaacttcaaggagcaggcgatcgaagtacgtgaagcaggccgtccagagaggacaatgccggcaactacgtcaaggcgttcccgctctacatgaacgcgcatgagtactttaagacccacctcaaagtacgagcagatccccaatgagacaaggacgccatctccgccagactacaccgagtgacgttccgccgcccggcgtatgtccaggccgttacctgcgacggcagctacgccccccttggggaaacgccaggcagcggatacaccggacaccttatgggcatgtgacgtcgagctcatgggttcgttgtttcgaaggtttctgtcggtgtggaagatgctttcttcgtggccggtgtgctgtatgcgggtatgcgatgaacttcttcagcacagatggtcaccagtggatgccctgtggttcgaaacgaccagtggctggacagaccaccatgcaggagcgtacaaccaaagggcttgcctcacagcttcttccacccccgatctcgaagaatgatttcgagaacgtccttgcgaggcagagaccaaccgttggcaagaaggacctggaagtgcacgagaagttcaccaaggagttcggtgaggagggttgagtggtatgccgccgtgagaacgctctcgacccatgcacagccgcaccacagaaatgtatattgtttacaactttgatttgttgcgcttgggacttagattcacagatctgtacactctggtagcccgacgacggcagccttgttatgccgggctatcattgtgcctctgttgtcaactctatttcatttttacactgtcatgcttggaatttaatgcaagtgtattaaggaataatgatgattattgagctggtaatgcaagtgggtgcaggaataatgatgattattgagctgggtagtccttgtggtgcaaaaagtaaaaaaaaaactcgagcctgggtcccctttgcccccaccacccctacttccttatgggttctgcttacgccctccttgcctcctctttccgtcccaacgcatggaccgccgtacgngataaccgcggtttgngtaccactacgtaatncaggccacncgccct

SEQ ID NO: 4445 - DNA, 2523 bp, Triticum aestivum
  Clone ID: TRIAE-23APR03-CLUSTER2329_1
attcaacaccgaccagcaccatcactgcttggaaggttcaaatctcccagcactacttggtcttgaaggaaagtgagaggcgacagcagaggagtgactttgcccttggaaggttgccatccaccaacaccacctggatcttgaaggaaagggagaggcgaaccgcagagtagtgactttgccccgtagcccgccgccggcccatgcgcctcctactacaagggcttggactcgaccaagaacgccaccagcacggcggcgctcccgtcgccgttcgcccgcgcatgtcctcgctgcagagcgtccgtatagcggcgaccgaggtgtggtaccgcagccagcgccccgaccttgtccgggcatgccgctccccgcggaccaacaccgtcacgcaccgcaccccatcatcatctcgacagaccgaggggtgggccaacaaccagctctacgacgccgcgcgggcgtacctggcgacgcggatcaacaccgacatgcagcgcctccgggtcagccgcgtcgacgagaccaagagcatgatgttcagcatggaggagggcgaagagatggccgatgtccatgagggcaccgaattcaagtggcgccttgtctgccgggacaactccagcgccagcagcagcaacggcaatggccgtggcggcagcggcaatttcaagcttgaggtccggtccttcgagatgagcttccacaggaagcacaaggacaaagcacttacctcctacctccctcacatcctcgccgtggccaagaaaatcaaagagcagaacaggacgctcaagatctacatgaacgaaggtgagtcgtggtttgccattgatctccaccacccatcaaccttcagcacgcttgccatggatcacaagctcaagcagtcagtcatggatgatctcgagaggtttgtcaagagaaaggaatactacaagaagatcggcaaggcatggaaacgagggtacctgctgtatggcccacctgggactggcaagtcaagcatgattgcagcaatggccaattacctcaaatttgatgtatatgatcttgagctcactgaggtcaactggaactcaacacttcggaggttgctcatcgggatgaccaaccggtcaattcttgtcattgaggacatcgactgcactgtcgagctgcaacagcgggaggaaggccaggagggcaccaaatccaacccttcagaggacaaggtgacactatccgggctactcaacttcgttgatgggctttggtccacaagtggggaggagaggataattatcttcacaacaaactacaaagagaggctcgatcctgcgcttctgcgccctggcaggatggacatgcacattcacatggggtactgctgcccagagtcgtttcgaatcttggcctccaactaccactctaagatcaccatgtcacatacccggagatcgaagaaatgatcaaggaggtcatggtgactccagcagaggtcgcagaggtgctcatgaggaatgaagagacggacgtcgcactcaaaggtcttatccagttcctcaagagaaagaaagatggtgctggcaaaccggaaaatgtggaccaggtagcgaaggaggaagaacaagagaaagagatgatggcacaaagtgatgttccagacaatcaagatcagcaagatgggagcaaagaatgatgtgtatttagtgcgaatatcatacaattagtgccagaaacttcgagcaacaatgtatcattttgctataataagagatcaattttggtaacaataagataatctggtattgtgcacagttatactatttgagtgcatataaacccagttatgaaatgagtattggtagctatttcaatgcagaaatactgttcaatataagcagtctacaaggttcaaaaaaaaaaaaaaaaaagcttatcgacctagtcgatttagagggaagttagcatgtctggcttctaataacacatctccaaatcagtcttcagcacaagtgttcaccccattttcttctcgtaggtcatactcgacaattaggccaagattgtcaacaaacttgtgatacacctggcaccctgcgcactgaagaaaaactgttcctctttcatagcccaccctgtttatcaaacgttttgtccttgcatcacatttattacatgtaaactgaacaagcaagcttcttctaggaagctttatatcaaaactagcttctgccggtgacgctgccgaggcgtccggatcaacgtcgccggagcacgcacagacatacagtcccctacgacgatatgaaaccctcaggctaggagcgggagtcctgagcttgggattggaggaggtgaggcaagcgcgggacgggggtgagcgaccggcgaaggagctccccctccccgggaacgacagcgccgccgagcagccgtaccccgccgccgtcgccgccatcggccggccgctgccggctggaggaatcctctcctctcccgttcctcctcctgctgtgcaatggagccatccgacggagt

SEQ ID NO: 4446 - DNA, 1571 bp, Triticum aestivum
  Clone ID: TRIAE-23APR03-CLUSTER233_29
cgtccctctgccggtttgcccatcgccgagcccagaaccctaatctgagatcgcgaactatcctctcccgatgtcagacgtcaccgccgagttcacgccgcgccagcgcctgcctacgccgtcgccatcactatcccctcagcagtctcgcagtcgtcagccgccccctcccggctccgaccccctcgctctcggcgtcgtcatcttcatcgccgtctgcttcctcctggtttcaatctcagctccatcaagcattttacatcaagttcctgaaggacatgttggggtatactggaggggaggtgctcttttgaaaaccattactactccaggctatcacctgaagctgcctttcatcacccagtttgagccaatacaggttacactccaaacagaccaggtcaaaggtattccttgtggaacgaaaggcggtgtcatgatcagctttgacaagatagaggttgtcaatcgtctcaataaagactttgtttatgagaccctgctcaattatggtgtgcattatgataagacatggatatatgacaaaattcatcacgagataaaccagttctgcagtgctcatagtttgcagcaagtttacattgacatgttcgatcagattgatgagaccatgaaagaagctatccaaagggactgcacgcgctatgctcctggaattgagattatcagtgttcgtgttacaaaaccaaacatacctgttagtattaggagaaatttttaacttatggaggaggagcgtacaaaggcgctaattgccatcgaaaggcaaaaggtggcagaaaaggaggcagaaactcagaagaagatcgcactatctgaagcagaaaagaatgcactagtgagcaagatcctcatgcaggcagatgctaacggcagaaggacagttccaaaaggcagcaggcagattgataatgaaatgtttcttgcccgagagagagcccttgcagatgcaaactattacaggattacgaaggaagcagaggctaacaaactaaaacttacacctgagtatcttgagctgaggttcattgaatcaattgccaataacacaaagattttctttggtgaaaagattccgaacatgatcatggatcaaaggttgattcgaaatcaccttgattctgctccgagcaaggaccagttagaaatatagtatcatctcttgtaaatttgaaggaacgatggttgttttgtaatcctgtatggaggtttggatttccctgaagcccctcggcgcatgagaatcaaaaaaggatgtaatagtaggaggaccccttttcaattgccttgacgttgttttcaatcaaggaccgtttagccttgtggaatacttgtagttgaaggatatgcacgcccttttgacctgcaagggaaagaaatgcagagctcataactgtaatgtgttgcaactggttgtgatttgttaggacttcctcaacatgctagtagtactattactgaagagctataaatgtgtttcacggaattggaagtaaaaaaaaaaaaaaaaacctcagggggggcccggtacccaattcgccctatagtga

SEQ ID NO: 4447 - DNA, 1725 bp, Triticum aestivum
  Clone ID: TRIAE-23APR03-CLUSTER233_36
ttttttttttttttttttctattccagggctaaacaatgagaaagttcaataccgatcatagccgacacaacgttgacacgtgaaccaacaaccatcctgtacagattctaccttcccatggactccatcagcacattcaaattgttcaacgactcgccttcttcgctcatgtttttctccgccatctccttcaacctcagcaccctttccttggcaccttcgtcctcgaaaatcctatccagcagctccaccaccctctccttcatcaccagcccgccaccctcggccgacgcaacccgtagcccgaccctccagatgtcacatatatatgtctggttcgtgaactggtcggtgaagtatggccagcacagcatcggcccagtccattgcggacgccctctagcgtggagttccacccgcagtgtgtgacaaagcagcccaccgcaggggtgccccaacacctgctcctgcggtgcccagccgaccactttgcccttcccgagcccgtcaatggcgcccgcaaacccggctgggagcttgccggcctgctccggcctgacgacccacaggaacggccggccggacgactcgagcccgagcgcgagctcctgaagctgcgccgcggtcatgatgctgatgcttccgaacgccacgtacacgacggatccgcggggttgcccgtccaggaaggacgtgcaggcgtcgtcgtcggcgtgccagaagtgccccacgggcgcatgtctcgtcggccgttgccatgtgcggagcgggccgattgggaggatggtagccggcgtggggccggtgaagacggccggctcgatgtcggagaatgtgttgcagaggagaaagtcggccttctcagcggcggcctgcgcggtggaggtgaggtagtggaacaccaggcgctcggcgtcacggttgcccatgtaattccaggcgaggaaggtcgcgtccatggacgttgcggactcgttgagatggaatgagttgttcttcaagttaacgggtgctccgtcgtcatcgatgacgccatcgcgtatcagtctcttggcgttgaccagcaccgagagcacggccgcagacgccggccagaggcgcggccgacgggagggccccggacgcttcacaacatccagcgcccacgacatgccggagtcgaccaccacacatgtcacctttcccagcccctcgccggccgcgtcctcgccgtcgagaagcgcctccagctgcggcgggatggcctcctgcatggcggcgttgagcaggatgaggttctcgtggtccccggcgtcgtccatcccgtcttcgaccgcaacgagacgcagccgtcctcctcctgctgaagagtatgccgtcgccgcgccggcggcggctgcgacgacgcggcggtggttgaacttggtgttgacgaaggtgacggcgaagccgcggtcgaggaagcggtgggcgagctccatgaacgggatgacgtggccctgccgccgggtaggggaggaagagggcgtgcgggtgcggcgacgcaggcgcggcggaggtggccatcgcgtgcgtgcgtgggaacgggaagtatttgggggaaggacttttttcaataaaatgttcaagggaatgggcctcggggaattccttggggcccggggggaccattatttctaaaggggccggccacgcggggggaccccagctttggtccctttagggaggggaattggggccttggg

SEQ ID NO: 4448 - DNA, 1508 bp, Triticum aestivum
  Clone ID: TRIAE-23APR03-CLUSTER233_37
attgcaagcaaagcagctagcaaacgcacgtcgtagctctagcttaactaagctaacccagccaggtagccagccatgaacatgaactacggctccatgggtcctggcgcgatggtgcggtgcaggcagtgcagctcgagcatcacggcgatgcccggcgcccgcgccgtgcagtgcatgcagtgcagctgcgtcacccgcgtcagcgggcgtggccggcagcagcacggctacggccagggttacgggaacggcggcgggatgctgatgccgccgatgcgtcccaccccggccttcggcggcggccgcggcaagaagcgcgccgtgctgatcgggatcaagtacaccaaccggcgctcctgcgagctgcggggccccatcaacgacgtcaagtgcatgcgctacctgctcaccgagcgcttcggcttccccaacgactgcgtcctcatcctcaccgatgaggagaggaacccgtgcaggcagccgactaaggacaacatccgcatggcgatgcactggctggtgcaggggtgcagctacggcgactccctggtattccagttctccggcctgggcgcgcaggtccccgacgacgacggcgacgagctggacggcatggacgaggccctctgccccgtggactcgttccagcagggccccatcctggacgacgagatcaacgaggccatcgtccgcccgctggtgcacggcgtcaagctccacgccatcgtcgacgcctgccacagcgccaccgtcctcgacctcccctaccaatgcaccgtgtccaagcagaccgggcgctggaggtggagggacgagcgccctatgaccggcgcctgcaagggcaccagcggaggccaggccgtgctcatcagtggcagcagcaacggaaagagcaacatgagcgtgctgcctgagccctacgccacgatcggcgccatgacgcacagcttcatccgagcggtggagtgcgagccgcgcaccacctacggccgcctgctcacctccatgagggccatcatgcgcgacagcggcggcaactgcaacctgcaaggccccatcggcggctccatccacaaggtcgcaaacttcagcggcgtggaggagcctcagctgtcctctgcctacaagtttgacatcgagcgcgagccgttctgcatgtagaacctgacccgatccgcgggctcgtcgtcgctgcaccgcaggctactgcagtcgacgattaattaccaccgaatcatgcatcgaccgtactgaataatgggccggttaattaactatgatgcttgctactagtatgtgtgacgatgtatcacctcacctgttgccatgccatcaagaatgagcactgcatatagctcatacaaggctctcgaggacctcgttctccactgtactgtactgtaaatcactgtaacatggccgttgtgtgtcgtgtcgtccccttaaataaatcaagttctatgtatgccgtttgatctccgaaaaaaaaaaaaaaaaaaaaaaaa

SEQ ID NO: 4449 - DNA, 1244 bp, Triticum aestivum
  unsure (1)..(1244): unsure at all n locations
  Clone ID: TRIAE-23APR03-CLUSTER233_44
gaccattgcaagcaaagcagctagcaaacgcacgtcgtagcgctagcttaactaagctaacccaggtagccagccatgaacatgaactacggctccatgggtcctggcgcgatggtgcggtgcaggcagtgcagctcgagcatcacggcgatgcccggcgcccgcgccgtgcagtgcatgcagtgcagctgcgtgacgcgcgtcagcggccgtggccggcagcagcacggatacggccagggttacggcggtaacggcggcgggatgctgatgccgccgatgcgtcccaccccggccttcggcggcggccgcggcaagaagcgcgccgtgctgatcgggatcaagtacaccaaccggcgctcctgcgagctgcggggccccatcaacgacgtcaagtgcatgcggtacctgctcaccgagcgcttcggcttccccaacgactgcgttctcatcctcacagacgaggagaggaacccgtgcaggcagccgaccaaggacaacatccgcatggcgatgcactggctggtgcaggggtgcagctacggcgactccctggtgttccagttctctggcctgggcgcgcaggtgcccgacgacgacggcgacgagctggacggcatggacgaggccctctgccccgtggactcgttccagcagggccccatcctggacgacgagatcaacgaggccatcgtccgcccgctggtgcacggcgtcaagctccacgccatcgtcgacgcctgccacagcgccaccgtcctcgacctcccctaccaatgcaccgtgtccaagcagaccgggcgctggaggtggagggacgagcgccctatgaccggcgcctgcaagggcaccagcggaggccaggccgtgctcatcagcggcagcagcaacggaaagagcaacatgagcgtgctgcctgagccctacgccacgatcggcgccatgacgcacagcttcatcagggcggtggagtgcgagcccgcgcacaactacggccgcctgctcacctccatgagggcatcatgcgcgacagcggcggcaatgcaacctgcaagccccatcggcggtccatccgcaagncccaaacttcaagcggcgttggaggacctcaacttcctctgcctacaatttgacatccagcgcnancttctcatgtaaacctgaccgtncgcggntcntcntcgctgcacgcagntatgcatcgaacgattaattacaacgatcatcatcnacgtnactggggg

SEQ ID NO: 4450 - DNA, 1770 bp, Triticum aestivum
  unsure (1)..(1770): unsure at all n locations
  Clone ID: TRIAE-23APR03-CLUSTER2347_1
attttcttttttcttcttccccccctgcccagatcaagaaaccgtgtcctagaatccaccgagatcgctggaaaggcgacatcctccggagactctctcgctcccctcgtcggcacggatcgagcggttgtttttgttggaagatttttttcttcttccccccctgcccagatcaagaaaccgtgtcctagaatccaccgagatcgctggaaaggcgacatcctccggagactcttctcgctcccctcgtcggcacggatcgagcggttgttttagttggaagatttctcctttcttttccttctggtcgctggccggagacacggcgtgtcggggcgcgcggagatggtggccgaggcggaggtgatgcatcagcagccggcgcccgttctggaggtgcagtaccgccggtgcgtcgccaagggggccgggatgtcggcggtcgccgtgccggaggtggaggtggaggtcgccgtcgagctgcctcgcatgggattggcgaacaccgatggtgcgacgagtgtgtccgctgagacactacagtttgtacccaatattcggtctggaagctttgctgatatcggacctaggaggtacatggaagatgaacacatccggatagatgatctttcagctcatcttggctcgctgttggtgtgcccactacctagtgccttctatggggtctttgatggccatgggggtccggatgctgcagcctacatgaaaaggcatgccatgaggttcctgtttgaggatagagagttcccacaagcattgcaagtggatgatgtattccttcagtccgtcgaggaatgcattcgcagcgcgttcttgcaagccgatcttgctctggcagataatttagacatcagccgctcctccggaactaccgcactcgcagcattagtatttgggaggcaactgttggttgcgaacaccggtgactgccgagcggtcctttgccggagaggcatagcgatggagatgtctcgggaccacagggcaaactacgccgaggagtgcgagagggtggccgcctccggcggatacatcgaggacgggtacctcaacggggtgctctcgttgacgcgtgccctaggcgactgggacatgaaggtgcccgactgctccacgtcgcccctcatcgcggagcccgagttccagcaggcgacgctgagcgaggacgacgagttcctcatcatgggctgcgacggcatctgggacgtgatgacgagccagcacgcggtgagcgtggtccggcggggcctgcggcagcacgacgaccccgagcggtgcgcgcgggagctcgtcatggaggcgaagcggctcgagacggccgacaacctgaccgtcatcgtggtgtgcttcgggtcggagctcgggtcaccgccgccgccccccgctgccgcggcggcgaggccgaggagctgcaagggcctgtcggcggaggccctgtgcaacctgaggagctggctggagactgaccgctagctctagcttgagatgcctgctctgctcctgctcccctacctagtgctgctggtcggttcgttcccacgctgtaaatatgctgacatcggtcgaggaatcgtaactgccacttcccttttagtccctaccatttttttcaggcggtagcccggcagttttgtaggggcattctcccattgtttcctgtgcttttcacaaaaaaaaaaaaaaaaaagcttatcgataccgtcgactctctgttgctgttattgctcacgccattgctgttgannnnnn

SEQ ID NO: 4451 - DNA, 1505 bp, Triticum aestivum
  Clone ID: TRIAE-23APR03-CLUSTER2348_1
ggagagcagccagttagtcaggcggcgttacagtacgtccattcggcgccttaatctcgtgacgacacagacaccaacctcctgtcctgcaccaaacgctcgcaacaagagaaagaaagatcgttcgttcgtttccaacgagattgatcggcctgtctagtctagccatcaatgtcgtcgctccacaggtgcctgccgtggctgatcctcctcctggtgctccgcgacggcggcggggggacggcggtggcggctgccgggaaggtgccggcgatcatcgtgttcggcgactcctcggtggacacgggcaacaacaacttcatcccgaccatcgcgcggagcaacttctggccctacgggctcgacttcgcggacggccaccccacgggccgcttctccaacggccgcctcgccaccgacttcatctcggaggccttcggcctgccggcctccatcccggcctacctcgacaccacgctcaccatcgacgacctcgccgcgggcgtctccttcgcgtccgcctccaccggcctcgacaacgccaccgccggcatcctgtccgtgatcaccatggcggagcagctcgactacttcaaggagtacaagctgcggcttaagctggccaagggcgacgcgcggggcgaggagatcatccgcgaggcgctctacatctggagcatcggcaccaacgacttcatcgagaactactacaacctgccggagcgccggatgcagtacacggcggcggagtacgaggcgtacctgctggggctcgccgagtcgtccatccgcgccgtgcacgcgctcggcggcaggaagatggacttcacggggctcacgcccatgggctgcctccccgccgagcgcatgggcaaccgcggcgacccggggcagtgcaacgaggagtacaacgccgtcgcccggagcttcaacgccaagctgcagcaggccgtcgtccccaagctcaacaaggagctccccggcctgcacctcgtttacgccgacacctacgacgtcctcgacgccgtcgtcaggaagccgtccgactacggttttgagcacgcagagcgagggtgctgcgggacggggatgttcgaggccggctacttctgcagcctgagcacctcgctgctatgtacgaaccccgacaagtacgtcttcttcgacgccatccatcccacggagaggatgtacaatatgcttgccgataaagtcatgaacaccacgcttcatgtatttctctgaatttcagttcagttttctcggttgagaagacaatatatggagggatgactgtatatgttgtgtgtgcgtgtttatgttctatgaaaacgagacatcatgttacactgatccatggcgatcgaccatgtgtacatgtagtacgcaatggactgtaaatgaaagcttttgttagttttgtactccctccgtttctaaatatttgtctttgtaaagattttaacaaatgactacatacgaggaagtgactgggaaaaaaaaaa

SEQ ID NO: 4452 - DNA, 989 bp, Triticum aestivum
  Clone ID: TRIAE-23APR03-CLUSTER23496_1
agaagaagataggagagaagagcagagcagagcagaacagagcgcagcccacttgtccatcccagggcacagcaatggcctcccccaccttgtccccccacccgctcccgtccacgaccgccacgaagctcacctccgccccccccgccgccccctcctccttgctgcgcccggcggcgctcgcgcccgcgcgcagggcggtgcgcggcgtgttcgccgtcagcgccatgcccggccccaagcccagggcaaaggcgaggatcgtagtgggcatcctggaggtggcgctggagacggccacgccgacgccggccccgccggtcggccccgcgcgcggcgacaagggtgtcaacttcatggctttctgcaaggactacaatgccaagacggccgacaagcccggctacatcatccccgtcgagatcaccgtgttcgatgataagagcttcaactttatcctcgaagacaccccctgcatcagtgctgctcctcaaggctgcaggcgttgaaaaaggctcaaaggagccacagcgtgagaagggtggaaaggtgacagtggaccaagtacgaacgatcgcccaggagaagctgcctgacttgaactgcaaaaccatcgagtccgccatgagaatcatagcgggcactgccgctaacatgggcatcgatgttgacccgccgatcctcgtgaagaaggagaaggtggtcttctagtctatttgctggcacgctggaatcgccttagcaatgtccatctgtacatttttgcttcatttttgtacgcaaatatgctgtagtgacagggatttccacctggtcagtgtgagagataaaacagatgtgatcttctgggcaaagctgtaaaatcatttgtttcggcaaaaaaaaaaaaaaaacgcgctgcaggtaggtctgcagtccgcagctatatgtttgggtcctaaaatttcctcattttgaaattcatatcaccattgctctaaaaggggggg

SEQ ID NO: 4453 - DNA, 1684 bp, Triticum aestivum
  Clone ID: TRIAE-23APR03-CLUSTER2355_1
aggaatccgtcagacggagacgagacgacatcggggaaacggagcggacagccgcgctcgatcgtcgggagcggccccgccaacgccatgcgtccgttggcgccaaagaccagcgtcgaaacgcactgccgagtagctaaacatagcgctcctccgccgcatataagcggccagcgtcgccgtccacctctcgcctcaccatacccagacagagaccaaggcacgcagccactatcaagatggtgacggcgggaagaagcaatgccgccaccgccctggcagtggcgctggcgctgctcgggagcacggcgtgggcagccgtggcgccgtaccagccgaggccggccgccggcgggccgccgtcggcggcggcgcgaccccctcgcatccggaggccgcggcgcctacgaggacggatagatggacgcgacgcgggcggtgaacaaggcgtggaagggcccctgcggggtggcggggacgcagaagatcgtgatcccgccgggcaacttcctggtgggcgcgctggagctgtcgggcccctgcacctcctccatcatcatccggctggacggcaacctcctcggcaccggcgacctcaccgcctacaagaagaactggatcgaggtgatgcgcgtggacaacttcgccatcaacggccacggcatcatcgacggccagggccccctcgtgtgggagaagaaccagtgcagcaagcactacgactgcaagatcctccccaacagcctggtgctggactacgtgaacaacgcgacgatccgtggcatcacgctcaagaacgcaaagttcttccacctcaacctcttcaactgcaagacggtgctggtggagaacgtggagatcacggcgccggggaacagccccaacacggacggcatccacatgggcgactcggaggacgtgcccatccaggtcgtacgaggactcctagtcggcgctcagggccccccgctgcccggccccaagcacgtcaagatccacggctcccggtgcggccccggccacgggatcagcgtgggcagcctggggcggtacaaggacgagaaggacgtggaggacatccaggtgaccaactgcaccatcaagggcgccaccaacgggctccggatcaagtcgtacgaggactccaagtcggcgctccgggccacccgcttcgtgtacgacgacgtgaggatggacaacgtctcctaccccatcgtcatcgaccagaagtactgccccaacaacatctgcgccaaggcccccggcgcctccaaggtggtcgtcgccgacatcgtcttcaagaacatcgtcgggacgtccgcgacgccggaggccgtcacgctcaactgcgtcaacaacgtgccctgccagggcctccagctcgtcaacgtcaacctcaagtacaccggcaccaacaacaagaccatggccgtctgcaagaacgccgtcggcaagtccgtcaacgtcgtcaaggagctcgcatgcctctgactcaagccacgcacgcccgcccacccggattcattctttcttttgttaatttgatttgattaattttgtttctttctttttcgcttcctattatcatacgtttgttttcagttttacttaaatcaactggtgtaagcagctgacagttaacttgtcaatgatagcaagtgtctgattttggttaaaaaaaaaa

SEQ ID NO: 4454 - DNA, 1430 bp, Triticum aestivum
  Clone ID: TRIAE-23APR03-CLUSTER235_32
ctacttcgctcccccaaccatctcgctcctctccctctctctttcacacgcacccacctcccctgcccctttccttccagcccggcacgcctgattctgaaatccaaagatcccaattccactttccaggctgcagcggcgggccggggggcggtcagccatggagtttaaggtggtgtcgaagacggccgcgttgcccgcagcctggcacggtacgagccagggagcgcagggccggagcagcgtcgcctttggatcggcgtggaggaaggcgtcgtcgcggccggcgcgggcgctgttcgctgcaactaacaactccgcgccggtggccagggtggagaaacagaggatagatcaaagtcaaatactgactttggacagtatcagaacctcgttgattagactagaagacagcatcatattcggtctcttggagagagcacagtattgttacaatgctgatacatatgatagcgattctttccatgtggatggatttggtggctctttggttgaattcatggttagagaaactgaaaagctacatgcaaaggttgggagatacaagagcccagatgagcacccattctttccagaagatctgcctgagacactgttgccgcctatccagtatccaacggttctgcatcctattgctgattccattaatatcaacaaagagatttggaaaatgtactttgatgaagttcttccaaggctagtgaaggaaggaagtgatggaaattctggatccagtgctctttgcgacacgaccctgcttgcaggcactctctaagagaatccactatggaaagtttgtggcagaggccaagtttcaagagtcccctgaagattacactcctgcaataaaagctcaggacggcgctcaactaatgcagctcctcacctacgagacggttgagcgtgccatcgaacatcgggtggaaaccaaggccaagatatttggacaggaggtgaacataggagctgaagccaagggcatggcgcctgtgtacaagatcaggcccagcctggtcgctggactgtacggcaacaggatcatgccgctaaccaaggacgtccaggtagcatacttgctaaggaggctggactgagcgctcacaaatgtgcagtgcagtgcctgctctgtcgtccgattttctcgcgtcatcaaagaataaacggggcaggaaacggccataggcacattcatattgggactcaacttggaagaacatatttgagacgtttattgtttcatctatatagatttttgtatcacaagagcaagaggagccaccgtgcggtgggactgtggcatatgatcatttctattgctgttggtgttttgcaaagctttgaatcttagagcagctcttgctgattctgtaaaacctcagcctgtataatggttttaaggacgatcggtc

SEQ ID NO: 4455 - DNA, 1548 bp, Triticum aestivum
  Clone ID: TRIAE-23APR03-CLUSTER235_38
cagagaaggaaccctcacgacaggccgacctaccgcgccgggcctccgcccccctcctcaccctcccgcctctccctcgtacggtcggtcctactcctacctacttcgctcccccaaccatctcgctcctcttcctctctctttcacacgcacccacctcccctgctcctttccttccagcccggcacgcctgattctgaaatccaaaatccagagatcccaattccactttccaggctgcagcggcgggccgggcgcggtcggccatggagtttaaggtggcatcgaaggcggccgcgttgcccgcagcctggcacggtacgagccagggagcgcagggccggagcagcgtcgcctttggatcggcgtggaggaaggcgtcgtcgccgccggcgcgggcgctgttcgctgcaactaacaactccgcgccggtgaccagggtggagaaacagaggatagatcaaagtcaaatactgactttggacagtgtcagaacctcattgattagactagaagacagcatcatattcggtctcttggagagagcgcagtattgttacaatgctgatacatatgatagcaattctttccatgtggatggatttggcggctctttggttgaattcatggttagagaaactgaaaagctacatgcaaaggttgggagatacaagagcccagatgaacacccattctttccagaagatctgcctgagacactgttgccgcctatccagtatccaacggttctgcatcctattgctgattccattaatatcaacaaagagatttggaaaatgtactttgatgaagttcttccaaggctagtgaaagaaggaagtgatggaaattctggatccagtgctctttgcgacacaacctgcttgcaggcactctctaagagaatccactatggaaagtttgtggcagaggccaagtttcaagagtcccctgaagattacacgcctgcaatagaagctcaggacggtgctcaactaatgcagatcctcacgtacgagacggtcgagcgtgccatcgaacatcgggtggaaaccaaggccaagatatttggacaggaggtgaacataggagctgaagccaagggcatggcgcctgtgtacaagatcaggcccagcctggtcgctggactgtacagcgacaggatcatgccgctaaccaaggacgtccaggtagcatacttgctaaggaggctggactgagagctcgcaaatgtgcagtgcagtgcctactccgtcgtccgatttttctcgcgtcatcaaagaataaacggggcaggaaacggccataggcatattcatattgggactcgacttggaagaacatatttgagacgtttattgtttcatctatatagatttttgtatcacaagagcaagaggagcccccgtgcggtgggactgtggcatatgatcatttctattgctgttggtgttttgcaaagctttgaatcttagagcacctcttgctgattctgtaaaacctcagcctgtataatggttttaaggacgatcggtcaagtttgtagta

SEQ ID NO: 4456 - DNA, 1960 bp, Triticum aestivum
  Clone ID: TRIAE-23APR03-CLUSTER235_48
catgacatgcaggcccaaatgggaaaatatttaacttcaagggcttatttgggttggaaatcatgacaatacccacgatttctgtacaaactgttccacagaaacttatttctaccatcaaatacaccgtatcaccctttcagggtcaaatgccaagcgcagagctaacgaactgaaacaagcatctacgtgtacacagtttccttcgccacaccggtataattttagtccaaaacattgcagggatcttccttacaagttcgtctttggcttggatggcgggctcacgcgcctggtcaaggtccgcatcgtcacgaactcttctgctgcagaagggtggatcccgacggtgctgtcgaaggtcgctttggtagctccagccttgagcgcaacagcaatgccctgcataatttcagctgcatctggtccacacatggctgcaccgagtaccttatcggtatcagcatcaaccaccagtttcatggtagacttctccacgcgtttggatatgctgttcttcattgggttgaaacttgatgtgtaaacaagaagatcattcttggcttccgccaaagcctcttgttcgctgagtccgacgacagatagcggtggaatgcagaaaacagcacaaggtacatctttataatcaggcttaactgtctggccaccaaacacagttttagcgaagcaagtagcctccatcagagcaacaggtgttaggttaatccgatttgttacatcacccacggcccatatacttggaactgatgtacgggagtattcatcaaccttgatggctcctatttgatcaacctcaacaccaacagcttccaggttcagcctattggagttcggcgcacgacctgtagcaaaaagaacaacatctgcaatgagctcatcccccttatctgtcacaactttaatgccatcggctgttttactcaactcggtcaaatttgtccctggatgcaatcggattccccttccttcaaggttacttgcaacaactgttctcatctcatcatcaaaaccccttagaggaagttctttcctataaaatagatctacttcagcacccaaccccttccagatagaagcaaattcaacagcaatatatccgccaccaagaatcacagcacgtttcggtagctcctccaaacttaaagcctcatctgaagtaatagccagctcctttccaggaatgtcgaccagagttgcccggctaccagttgcaatcaatatgtgcttggtcgtgtgcctttgctttgaaccatctggctgggtgacttcaacggtatgagcatccactatacttcctgccccttcgatcatcgtcacaccagaaccaccaaggattctcttgtacactccatttaatctcacaatttcttgagtcttattttccagcaactttttccagttgtagttgatgtccccgttgatctcccacccgaattgcttggcgtcatcgaattccccccggaaagacgccccgtagacgagaatcttcttcgggacgcagccacgtatcacgcacgttccgccgtgtcctcccagccactcggagctgatggggtggaacgggagctcgcagatcgcaaccttggccccgaatccggcggcggtgcgggagccgcggacgccgccgctgccggcgccgatgacgaagaggtcgtagtcgtaggtcccgccgtcgtcggcgacgaggggcgcctccccatccttgagcatcttccgcgccatggccttgactccggtcagccgcagaaccctaggtggatggatcccggagcggaggagagcaggtgggggcggccacgctggctgctacgggattagcggatggacggattggaaacttgtcccctccggcttaaattcgtttcctgatgggagacgtggagccgacccgcttcgcgtcgcccgccaccggttctccacggctccacgaggtaacagt

SEQ ID NO: 4457 - DNA, 2168 bp, Triticum aestivum
  Clone ID: TRIAE-23APR03-CLUSTER235_52
cacaatccgaagacagggaggaagcgaaaaacccaccaccacacgaacggatccgcctcccccaccattgtcgtttttaacgccacccactccccctccggctccgctcgcctcccaacgctgaaccgaacccacacaccgccatcgccacgccctctgcctcgccggagaagagaagagaagagagggagagggatttcggatccctcgcggcagtcccaactggagcttcaccctctccccttttgggccgttgaaagtcatcacggctagcgttgcagccttccgcggccacgctgctgcgcaggtggagccaacggccaccatcgcttcctccagccccgcctcgcacggcggccgcggggccctcccgtccgccggcggcagcccatctgacctcctcttcctcgcgggcggcggtcgcctctgagcctctcgcccgcccactaaccaaatcccaccctaaccatcatccgctgactgactgaccgactgactcactctccgagagagaaacagaggagtacaaccagcatagcgggagactttcctttgtaagacgttggagatgaagctgacgattaagagggtacccaccgtcgtgtccaactaccaggaagacgctggcgagcggccacgcggagggtgtgggaggaactgcctcggacattgttgcttgcctgtttctgagcttcctgtctatgctttcaaggcaaatccaacaaagctgcctttacaggaggatgctgttcctactgatttcttcatcaatctcctccttgggcagtgggaggacaggatgacccaaggcttatttcgatatgatgtcactgcatgtgagaccaaggtgatccctggcaaccttggtttcgttgctcaactaaatgaagggcgccacctcaagaaacgtcctacagagttccgtgtggatcgtgtgcttcagccatttgactctgccaagttcaatttcaccaaagttggccaggaggaggtgctcttccaatttgagaacagtggtagtgatgacagctacttcctgaggagtgccgcagtcactgttgctgatcgtgctcctaatgttgtggcaatcaatgtgagcccaattgaatatggccatgttcttcttattccccgggtcctggaccatctgcctcagaggattgaccaagagagcttcttgctagcactgcacatggcgggctgaggcagctagcccatacttcaggcttggttacaatagtttgggtgcctttgcaactatcaaccacctccactttcaggcatactacttgacagtgccttttcctgtcgagaaggcagctacccagaggattccccttgctgagggcgggataaagagtggagtgaaggtgtcgaagctaatgaactaccccgtgagaggactggtttttgaggaaggcaacaccctgaatgatctggccaatgtggtttccagtgcttgcatttggctgcaggacaacaatgtgccttgcaatgtgctcatttcagactctggcaggaagatcttcctctttccccaatgctatgctgagaagcaggctctgggcgaagtgagtcaggaactgctggacacacaggtgaaccctgctgtttgggagatcagtggccacattgtactgaaacgtagggatgactacgaggaggcatcagaagcttcgggcatggagactcctcgccgaggtctccctgtcggaagcacgctttgaggaagttgaaggcctacatctttgatgctgcttgtttggttcagtcccaggtggaggaggaaactgatgacgccatttatgcacctgtgctggttggcccttcagctgttggggagggctgcctcgtaattccgtgagacgatgattcaaaaggttatgccctagtaagcgccgcaggtcttcatcgtcgtcatctcagtcagtcattggtcgcctagcttcgcaatacttgtggttgctggtcttaataaagatccacgtgatcgaactgcctggtgtactgactcttgtttattgtgttccctgtttctctcctctggagagcagtactctgcaaatatttcgcagagcatcatgtgctctctttctgtggctcatgtactctttctgttgcttggcaccgacttaaatatgaacataacattgttagtacgtactccc

SEQ ID NO: 4458 - DNA, 1174 bp, Triticum aestivum
  Clone ID: TRIAE-23APR03-CLUSTER235_53
catgattggatttagggattgagtaacttaggcatctgatctggtcccagccaaagagacgcggaaaaaaaattgcgagttcaatcattggaaaagaaaatgaggtgaaattttacgcggtgtaagccacatatttcaaaccgtaatcgtttgctcggtattttctacaaatatattcttgctctcgacatggtacacctagtgttgtatctggaaacttcaacaagcactctacagataactgattgtgtataacttccggagttgaaataaagagattctgattttcacgcagactagcgagaaggctgtcatcgtcactgttccttaccatcaagcaatgattcacggaatggaggctgggcctcctacattagctgcctccggacttgagtgcattactgagccagttcaagccttcaaaaagcccctccccttttatagcagatgttttgaaaattgcccattggcggctcttaatcttgtgaagttctaatgattcagttatggcagcatcatcaagtgcacctggaaggtcctgtttattcgcatatacaaggacaaccgcacctttcagctcatcctcctcaaggatggaatgaaattcttcttttgcagttaccagcctatcagtatcacttgaatcaacaacatatatgatagcctgagtgtttggaaagtagcatctccagtatggcctgatgcttgtttgaccaccgagatcccaaacttggaacttgatgttattgtactgcaccgtctccacgttgaacccgatcgcagaacaggaaacccacttgggatcgtggaaacgacctcccccatctgcagccgatagaggatagtagtcttgccggcattgtcgaggccgaggacgaggatgcgggcctcgcggtttccgaataccgacgagaagagccgcgtgaacacgatgcccatggcggcgcccctacgcggcggaggggcgcgagctagggtttcgttgggggcgtggcggcttgggggcgtgagatctacacgatggtaaggggagatctggagcgagtgagcttgcgcgcgcgagtgcggaagacgaagatctcccccacttcttctcgccgataggagagagtagcttcggcgatttggagcggttggctgtgtttggtacggaggtcgggaggagaaaatgtca

SEQ ID NO: 4459 - DNA, 2457 bp, Triticum aestivum
  Clone ID: TRIAE-23APR03-CLUSTER236_1
ccacgcgtccgatcgaaccaacgcgtagcgcgcgcgcgccgcctcccccctcccccctccgccatggactccgccgccgcggggatgagggactcggcgctcgacctgctggcggcgctgctcacgggccgggccccgccggccgccgccgacggggaccagaaccgccgcctgctcgcgctgctcgccacctccctcgccgtgctcgtcggctgcggcgtcgcgctcctcttccgccgctcctcctccggcgccgcgccgctcgcccacaagtccgccgcggccaagcccctcgcagcgaagaaggaccaggagcccgaccccgacgacggccgccagcgggtcgccctcttcttcggcacgcagaccggcaccgccgagggcttcgccaaggcgctcgcggaggaggccaaggccaggtacgacaaggccgtcttcaaggtgctcgatctggatgactatgccgcggaggacgaggagtacgaggagaagctcaagaaggagaacatcgccttcttcttcctcgccacgtatggggacggtgagccaaccgacaacgccgccagattctacaaatggttctccgagggaaacgagaggggtgagtggttgagcaacctcaagttcggggtgtttgctcttgggaataggcagtacgagcatttcaacaaggtcggaaaggaggtggatcagctcctcgccgaacaaggtggacttacaggaaagattagctttaaaagagaccggggtggaactgggccgtgccatcctgttcttcgggtgcagaaaccgccagatggacttcatatacgaggacgagctgaacaactttgctgaatcgggagccctctccgagttagtcgtcgccttttctcgtgagggtcctacaaaagagtagaggatgccacacatatcaacaagtctttcagtcttagcaatggtcatgtcctctaggacagtcaacatcgtctgcggcgacgccaagggcatggcaagggacgtgcaccgccagcttctgaccggtcctgcattcatttggaatttgatattgcaggaactagccttacatatgagactggagatcatgttggtgtgtacgcagaaaattcaattgagactgtagaggaggcagaaaagctattagattattcaccagatacttatttctcaatttatgctgaccaagaggatggcactccactttttgggggctctttgccacctcctttcccatctccctgtactgtgagggttgcacttgccagatatgccgatctgttgaattcacctaaaaagagtgttttacttgctttggctgctcatgcatctgatcccaaagaggccgagcggctcagacatctagcatctcctgctggaaagaaggagtattctcagtggataatcgctagtcaaagaagtctcttggaagttatttcggagtttccatcggcgaaacctccgcttggtgtcttctttgcagctattgctcctcgccttcagccgagatactactcaatatcttcctcaccaagaatggcacctacaagaattcatgtaacatgttcactagttcatgggcaaaccccaactggaaggatccataaaggagtttgttctacttggatgaagaattcaactcccttggaagagagccaagaatgtagctgggctccaatttttgtgaggcagtcaaacttcaaattgcctgctgatcccacagtgcctattataatggtaggccctgggactggccttgcacctttcaggggcttcttacaggaaagattagctttaaaagagaccggggtggaactgggccgtgccatcctgtttttcgggtgcagaaaccgccagatggacttcatatatgaggatgagctgaacaactttgccgaatccggagccctgtctgagttggtcgtcgccttttctcgtgagggtcctacaaaggagtacgtccaacataaaatggcagagaaggctgcagagctgtggagcattgtttcccagggcggctatgtgtacgtctgcggcgacgccaagggcatggcgagagacgtgcaccgcgcgctgcacaccatagttcaggagcagggatctctggacagctccaaggcggagggctatgtgaaaaaccttcagatggaagggagatacctgagagacgtctggtaacaattgcagaaatgaacaaacgattcaacaccacttaggaaatctagtgaaatgatggaccgaacatgagaaatgcggctctgatttcgaatatgattggcgccgttttttcaggtctctatgaaggatatatatagtagtgggatttttgttgttgtataggaaacctccagctaggtactgctgtagtattatttgtggaacagaggatgacgattcatcgattgttttgtgatgtctggaatgtgaagctaaataaaggtgcccattcgcatgtcagct

SEQ ID NO: 4460 - DNA, 1069 bp, Triticum aestivum
  Clone ID: TRIAE-23APR03-CLUSTER23776_1
attgattatcatactctctcctcccccctgccactacctagcccgtctatagctcctttagctaagagatcataagcctacatcttcttccatacacaccacccagcgagttataagctgcttataagctagctgctgcttgttagatctcgatcgccgaggccttttcttggtcgaatcgagctcgaagctagcgacccgagcagagcagatggcggctgaggaggcgaagaaggtggaggtggagacgaccacggccaccaaggacatcgccgaggagaaggccatcgtgcccgtgcccgacaactccaaggccatcgtcgccgtcgtcaaggatgctgaaggtacaagaggttcatctgaaagagatgcttatctcaccaagattatgtctgagaagagaacaacgctgatcaacgcctgggaggagagcgagaaggcgagagccgagaacagggctgccaagaatctgtccttcatcacttcatgggagcacgccaaggaggcggagatggaggccgagctgaaaaagatcgaggagcaacagaaaaagaagaaagcggcgtacaaggagaagctgaagaacaagctcgcgatgctccacaagtcggctgaggagaagagagcgatggcggaggcgaagcggggcgaggagataatcatggcagaggagatcgccgccaagtaccgcgccaaaggcgaggcccccacgaagctcttggggctcctgaaagcatgatgactgtgtatcgagcaagggatctacactcttgatctacagagcgtacatatgttgggattgttacttacaggtttcgtgcatgacttgttagtggtgtgtgcgtgtacatggttgtgttctggaagccattggtgtgtgtgtgtgtgtgttttgctgttgggaggtttggtatctggttaaatttgtaagggagctgtgtataagcgtaggagtgcaggcctgatggattgatacatttattcttttgatgtaagttttgttcgtcgaagcatctgttagtgtgtagtatttaataaatacagtcttatttgccccaaaaaaaaaaaa

SEQ ID NO: 4461 - DNA, 1784 bp, Triticum aestivum
  Clone ID: TRIAE-23APR03-CLUSTER23784_1
ctccctcgaccatccttagagtaaactaaatgctttaatgaaaatggacttccctcatgtactcacatttcgtcggtacaccattagttgtcctatgtacacatgattttcccacctcattagttacttattagcctgtccggttcatcatagttacatgattggtctcctctgtttgtcagtttcatgtggagattgttgtgtgcttctactcaaccaacatcattaacctgcaggaagtgctggtgatgttctagaagacaatcctgttggcaagttgaaggttttcgtctacgacttgccaagcaagtacaacaagaggcttgtcaccaaggatccccgatgcctcaaccacatgtttgccgctgagatattcatgcaccgtttcttgctctctagtgcagtgaggacggttaatcctgaagaggccgattggttctacgctcctgtttacactacttgtgatctaactcgtgctggacttccgttaccgttcaagtctccaaggatgatgagaagcgcgatccagttcatttcaaagaggtggcctttctggaatagaactgatggaggagatcatttctttgtcgctccacatgattttgcggcatgctttcactaccaggaagagaatgctattgcgcgtggaattcttccgttgctacgccgtgctacattggttcaaacatttggacagaagaatcatgtttgcttgaaagaggggtctattacaataccaccatttgcgccaccacagaaaatgcaggcccacttgattcctcctgatactccccgttcaatcttcgtttacttcagaggtttgttctatgacaatgggaacgaccctgagggtgggtattacgcaagaggtgctcgagcttcattgtgggagaacttcaagaataatcctctgtttgatatctccaccgaacaccctgccacttactacgaagatatgcagcgctccgtcttctgcttatgtccgttggggtgggcgccatggagtcctaggttggtggaggctgtggtttttggctgcattccagtcatcatagctgacgacatcgtgctgcctttcgcggatgcaatcccttgggacgaaattggtgtttttgttgatgaggaggatgtgccaaagcttgattcaattctgacatcgattccgattgatgatatcctaaggaagcaaagattgctcgccaacccatcaatgaagaaggccatgctgttcccgcagccagcgcaacctagagatgcattccatcagattctaaatggccttgctcgcaaactcccgcacccagagaccatatacttacaaccaggtgagaagcatctcaactggacagctgggcctgttggagacttgaagccttggtaacataaaagcttccttgcaagacctggctttgttgatcttgtgaaaagttctgtttcttttatcacctttctctgagaagtccgaagatccatagaattatacgatattgaagtgtgttatatcctctgatgtcactctaactaaaaatagtggatcttacataaacggttgtaacgttgtaactgtattaattgtataaagaagtaaagaaacaacaaaaaaaaaaaaatcattccaccaccgccccccccggggggggccccgggaacccatttcccccaaaaggggggcaaatataccgcccccccgggggcggcgtttatacaccgggggggggggaaaacaccggggggaaacccaaaataaaggccttggggaaaaccccccctctttccacgggggg

SEQ ID NO: 4462 - DNA, 714 bp, Triticum aestivum
  Clone ID: TRIAE-23APR03-CLUSTER23819_1
aacaaacctgaagcctcttcccatccagctcttcccacttgtcaacccccctccgcctcgggggccaggggcggggaggatggcgggggggccggcggcacccctaaaatccttggagagaggagcttccgatgcggagccacggttagagaagctggaagccctgctgctgaaagaaggtggcccctccgagagaagatcttctgtcatgagagatcatgagtcaaagcatgacgcgaccaacaaagaatgtctcgctgagaaggaacagaagaagaagccgaccgtggagaaggagaacctccagtatcgcgtctaccatctcatccgaacaatcaaagcggaggagtcaagatagagacgcctctaataaggtggagctcgtaaacctagtactattttggattcgagagagacgttcatctcgcaaacctgtctatgtgctccgtgttgacaactgttggagttggttaaaacttgtcattccgaggttgatgaaatgagtctggtacgtgtgagctagtagtaatgttttggtcagatcgattattcttgtcgacgaacattgagcagcgtgttgctatcgcagcaaaagatgaagaagaaagatattctacgtgtgcaaattgagcagcgtgtagctatcggtcgcagcgaaagtatgaaggtgaaagatattctgcgggtgcatttgaaaaaaagaaaaaaaaaaaa

SEQ ID NO: 4463 - DNA, 1059 bp, Triticum aestivum
  Clone ID: TRIAE-23APR03-CLUSTER23874_1
gaccgggtgtcccgcagccccctactgttacttcgagaaccgtctacgctcccctcggcgacgcctgtagggcccctgcgagcccgccggtgtggaccgggactccccgcggggttccccgccgccgcgcgcccaggaccatgccccaggggtcccccacacagccggggagcagtaggtcggcagccccggcgccggtggctcgggcgtccggccgccgcggccccggcctccgccgctacccgggcgctggacatccgtagccccggcggcggcaaaaggagaaggacgacgaccacgaggaggaggacgacgaggacgacgacgacgaccagctgcccggcggaccccaaccggttgccctcaggcacccgaaagctgaatgatctcttatccctgaattacatgtaagaccaaatttaaccagggactgagtcaaatcggtagatgtccgttttgctagaatttggaattccagaaatctaagcatgaaaaagctattggcgagtatcactggcagtcaaaagatatctatgccaacgaccatcgtagtatcaggaatagcaaagatgtttgtcggcgaggtcattgaaacagcaagaatagttatgagtgaaaggaaagattctggacccatcaggccttgccacatcagagaagcatacagaagattgaagcttgaagggaagatcccaaagcgatccgttcctagactctttcgctagagtcgaatcatcgctgttgatgtaagtcaggcgtcgtatgattctctctcggaggcaaaaggttatggtaactgtaatggaacttccgctttgcaatctcaatgcgttccgacacttctacttgccatcgcacggaaggtgattgttgggagaacaaagaaaaatagtagccgcagcgtgatggtattttatggtgcttgctactcattggaatttgcatctataagctgtaagttgtgactgtttcatgcttatttactagtggtactatactaccgtgtggttcaattgtatccgttatacctgatcaaccctgattttgttcttgctaaaa

SEQ ID NO: 4464 - DNA, 2316 bp, Triticum aestivum
  Clone ID: TRIAE-23APR03-CLUSTER238_1
accacccatccatcggtcagaaaagcatctaccgagttacctcggcaccatcgagccatcacaagccgatgcacgcagcccgcgtacaaatttccatttcacacccaccctcgcctgtctacctctcgcgcgctcccgccgcccacgtgcactgcactaattttcatagccacgaagataaatattacaaggcatggcacgcagcacggcgtacaaatttacattttacacccaccctcgcatatatacctctgcgcacgctcacgtttcccacgtacgacgggtacccatgcacaggacgacgatgctcggaatcggatcggatggatttcgcctaagtggaacttgaggctggtgaggatgttgttgttgacgtggtcggttaggtggtcgagcaggtcctcggaagggctcgacgccggtgaatgctggcctgcagagacgtgccgaggacgccgggcagtgcggaggcccggctgttacctgatcgtcctttcgacgactggacgctgacgtcgatgctgccttctctgttgcctgggttcggaaccccgtgcggggtttcaggatgggcccccgccggggggaggggggggccgccgcatgccacccgaggtgagcgctggaaggcgccaggaacgtgctctctttcgccgatgggcgcccgggcttgcacctgtcttggtagccggcccggtgctccgccggagccgatgagcgaccatggtccgaaccacgaaggaggcgtgtagcggatcggcccagtaatggtaggtgccccgcggggcgtgattcgtcgccgccctgggaccccagcgtgtaactcgcccgtgctgccgggggtgctacgcaggagccgcaacattggccaccacggacctccaagggggcgtgtcatgccccggccaccggccctaggcatgcgcccgtccggccgtggaagatcctccgccgtaggccaacgccagcctgggcctcgcatcgaacgcgcccgggtgccctcctgggtccggacagccccagaggggtcgaagccaaagtcaccgggcagcgtgccgtcccaggtaggtgagggactgcttggacgcgaaccacagctgcgctgttgtcattttgcttggcaggggggctggacgatgccctgacgacgaaggcggacttccgggaggaagacgacctggagatggaagactgcagaggcctcccaagcagctgcctcccagagagaagaccctgggccgccattgttcctgcaagctcctcctgctgctgctccgagagatgagggaggccttgccggggaggaagacgacctggagatggaggactgcagaggcctccccagcagctgcctcccagagagaagaccctgggctgccattgttcctgcaagctcctcctcctgctccgagagatgaggcaggcgtggtgtgtggtccccgtcggcgccggctccgttgccttcctccccctccatcagaccgctcagctcgacatcgaggcaaccttccgcatcgatgcctccgccattgaggccctcaacgaggccgatgttagctacaactgcaccaccagcagcggggctgccacccgcggcgcgcttggccccttcggcctccttgtcctcgccaaccgcgccctgaccgaacagacgggagtgtacttctatgtgtccaagggcctcgacggtggtcttcggactcacttctgccacgacgagttgcgctcgtcgcatgctagtgacgtggtgaagcgggtggtgggtagcacggtgccagtgctcgacggcgaagatttttccgttagggtgctcgtggaccactccattgtgcagagcttcgcgatgggcgggaggttgacagcaacgtcgagggcgtacccgaccgaggccatctacgcggcagcgggggtctacatgttcaacaacgccaccggcactagcgtcaccgccgagaagcttgtcgtgcatgatatggactcgtcgtacaaccatatatacacagatgatgacttggtagtcgtcgattagactgatcacttacaacaagttatggatcggttgttctcggtcggtggcttccttttctcttggacagttggagatggagtactagcgactctgcctatcacttcatttttgttcttcgttctggtttttggtttagtaagatgaattagatggtgttgatgacagggctatgatgttgatgatgatgatgatcattgttcacatgtaaatcaatttgttggggaatgaaaatggcatggatgccaccaagtttaagtgaaaaaaaaaaaaaaaaaaaaaaaaaaaat

SEQ ID NO: 4465 - DNA, 1976 bp, Triticum aestivum
  Clone ID: TRIAE-23APR03-CLUSTER239203_1
ttgccgtcgccccccattgagctcttttcgttatcttcttgtcccctgtcctgtctgtatatactaagactacttacataggctagtaagccgacacgggacatgccatttaatgggatccaaaaaaccacgagaaaatacataccaccgaaacaattttttttttttttttttaaccaagactacaatatatactaataagcctataattggcatgtcatccaaatcgggacataaatttatgtgagatttaaaacacctgaatccagtccctcccacccccacgctgacagcgattctcgaaaccagcatgcttatgtgctgttgaggtgaaaaaagacatctagactgacccactcattagttattgtccttgaagcctgtaaggaggggctcattcttatcatcccacttgttcaaccttttatgtgcctcctctacctctttcgtccagtccgttcttatggtgacccataatagaatgactgtctgcaaggccgttcccccaatcaaaccaccccaaataccctttgcgccaagattgaagaaaaatccaagaacaacaccaagtggaacacctacgatgtagtaagagccgatgttcacgtaagaaacaaattgttgccatccacatccaacagcaacacctgttagtacaggttggatgccaccgagaacgagtgtgacggcgagaaatgggcagagatccgccaccgcatccgaaactgcttcaccatctgtgaacaagtagctgatgtggttgcgaaggcaaaggatcacaacagcaaggatggtagagattgttgcagagatcccggtcacgacccacacagagaaaaatgcagacttcgggttgccggcgccaagctcattgctcactcttacacttgcagcggcgttgaacccaactgagatcatgaacacccaaccataaattgtcatacatatagagagggaatccagggcaatctcagggttggggagcaatccagcaatgatcaccagcacctgaaagtaccatgtctcaaggcacaacatcaccgcagacgcggcggagagcttgaagaaactcggcaaaccggagaaggcctgccaattgaaccccgtccacgtgtgccggcatgtcgggctgacgatgatgtacacaaattgcgcggcgaccatgatccaccagctcacgctcagcaccaaggaggcaccgagcagcccaaggccaaccttgtatatgagcacccaactcatcaacacatgtagaatgagtgttgccgttgagatgtaagcacttggcaggacgatgctctgcgcctgcaggaacttctgaatcgggaagttgacagcgtacgcgaagatctgaggaatcaggccgtaaacgaagatcgatgcggcacgggctatctccggtgactgtcccatcaacaagaggagtggctccgagaaggcgtacatcacagcaagtggtatgccagttaagcccaacagaacgatagagcgttgtaggtaaattccgagcatgtcgtacttgtgtgcaccgtacgcctgcccgcagagggtctccactgcactgcccatacctagcatgaggccgtaggcgaaggtctggacgccggtgttgccgagcgaggcggtggcgagctccaggttcccgaggtggccggagaagatctgtgtggacatggacatgacgtagttgatcatgtacaccactaccgcgggcgccgccagccgcgacagcagccggagctcgaccgctcccgccgcccacgcgcgctccgcgagcggcgccgacttgtccgtcaggatgctctccagccgacccggcgcgtcatgctcatgctcgtccccgccagccatgatgctcgtaagggttggtagctaggagaagagagattacgtgctcggtcgattggctactatagctaagctagcgcagcgagcgaggagctcctccgatcctgttgctgctgctgctgcttgat

SEQ ID NO: 4466 - DNA, 1038 bp, Triticum aestivum
  unsure (1)..(1038): unsure at all n locations
  Clone ID: TRIAE-23APR03-CLUSTER239937_1
nggtcgacggtntcgataagcttttttttttttttttttctggcacatcaattgattggttattcatctcaagatcgatacagatatcacaaaggactccattattcccaaatcggcagcacactcggatccgaaatcaacctgaaaccccccatcagaggctcgcggccgccggagcgtcgacgacgaagtccagcaccatgacctcgtcgagcatgggcctgagggcggccttggcctcctccaccttgccgtcgccctccacggcgtccagctcctcgacgctcccgaacacggccaccatcccgaactggtaccccttggcccgcgcgggggagaagttctccccgaagctgaccttggcgccgctggcctcgccggcgtccttggtggccgcggccaccttctcgacgagctgcccgacctccacgccctgcttgaccttggcgagggtgaggcgcacggcggcgccgggggcgacgggggacggggcgcccgcggcgttgacccagtcaacggcggtggcgtcgagagcgttgggggcgacgtgcgcctgcacggcggccacgtgggccgggtgcggggcgtaggcggcgaggtcggccttggtggcgtagcgggagtggaggaggtgggtggggcccagcgcctcggcggccggggagcggaggcggagcacggggcccgcgtggatgtaggagacccccgggacgagcgtggagagcgcctgcagcgcggagaccatcgccgcggcggcccccgaggccacggcctccgggcggaccttgatgagcacgatgtgctcgaccggtgccgctacggtgggcgcggcgacggagggggaggaggacatggctgcggcggagggcctgaggcggcggagcggggaggaggcgaggcggggtaggggtaggtggaggagtcgaggggaggggatggctctgaggcaaatcatggttttggtcagtgcgaggggaggaggttaaaatcgggatggggctggggggacagtgaccggcgcggcatttttcaatctcg

SEQ ID NO: 4467 - DNA, 1731 bp, Triticum aestivum
  Clone ID: TRIAE-23APR03-CLUSTER23994_1
cctggccgagcgagcggagctaccatctcagtcaacgccgacagagcacagctcgcacacacacagctcccatggcggacggggaagcgccggggcggctggagagcatcctgacggactcgtcggcgccgctggcggggcgcgtgtgggcggcgggggcgatcgagctccggatgctgacgcggctggcggcgccggcggtggtcatgtacatgatcaactacctcatgtccatgtccacgcagatcttctccggccacctcggcagcctggagctcgccgccgcctccctcggcaacaccggcgtccagatgttcgcctacggcctcatgctaggcatgggtagcgcagtggagaccctgtgcggacaagccttcggtgcgcaaaagaaagacatgctcggaacctacctgcaacgctccgccgtgctcctatgctgcaccggcataccgctcgccgtgatctacgccttctcagagccactcctcgtgctactggggcatgtcaccggagatagcccacgccgcgtccatcttcgtctacggcctcatccctcagatcttcgcgtacgccatcaacttcccgatccagaagttcatgcaggcgcagagcatcgtcctccccagcgcctacatctccacgggcacgctcgtgctgcacctgctgctcagctgggtcgtcgtctacaaggccggcctcggcctgctcggcgcctcgctggtgctcagcctgagctggtgggtcatcgtcgcggcgcagttcgcgtacatcgccgtgagcccggcctgccgggagacgtggaccgggttcacctggcaggccttctccggcttgccggcctttctcaagctctccgccgcgtcggctgtgatgctgtgccttgagacatggtactttcagatcctggtgctcattgccggcttgctccccgaccccgagatcgccctggattccctctctgtgtgtatgacaatctccggttgggtgttcatgatctcagtaggtttcaacgccgccgcaagtgtaagagtgagcaatgagctcggtgccggcaaccccaagtcagcatttttctcagtgtgggtcgtcacttcgctctgtgctgccatctctgttgtctttgccattgtcatgctctgcctacgcaaccacatcagctacttgttcacagagagtgaaatagtttccgacgcggtggcggatctctgcccgctccttgccatcacgctcattctcaatggcatacagcctgtactgtcaggtgttgctgttggatgtggatggcaacagtttgttgcatacgtgaacattggttgttactacatcgtaggcgtaccccttggcattgttctcggttttgtcttcaacctcggcgtaaagggcatttggagtggcatgattggaggaacgactatgcagacggccattctactgtgggtcaccatcagaaccgattggagcaaagaggttgaggaggcgcataaaagattgaacaagtgggatgataccaagaaacagcccctccttacggcggccacggataacagctaattagtggtccagtgtagatctatatttcttgttcaacaatcgagaatcgagctggcattgagattcactgtcagcatggggaattaatttgcatcatgtgtcctgattatcgcgttgtagaaccattcatcaagatttcaaacatgcttcctaatgacatgaggtggccaatttttttgc

SEQ ID NO: 4468 - DNA, 2073 bp, Triticum aestivum
  Clone ID: TRIAE-23APR03-CLUSTER239_1
caaaacaatttttattgctcagccacacgagcgatgagatttacactctgaaatctccacaagtgtgtcagtcaccgttgaaatgattcgctttacttgcatttccatctcaaaaattcacactacatctccgtcctgacacaggcctctctccactcgtccccgagctagcccacatcacgcgctctactaagcaggaagtgcagctcgcgagcttggttggttgtacttgggttgcggctcgcctgcttgccgggcctcgccgcgtcggcccgtcccattctgctggctgtggcatcgggcggcgccggggcgcaagccgtgggcccaatcgcgacgccgtccggggccgggcgcagggggcccaaacgcaagacgccaccatgcccgcccccaacaccctacacgtaccttcgctacatcccggccggccaaacggtgtcccgcgcgcgcgcgccccccgcctcggcccgccctcaaaccagagcaccgcccgcccgagtgtggcccccgacctgtcccgaggacactggagcttcaaggagggcagttcaaaggccacggcgccatttcttattgaaaggagatgaaagcaagggggccaacgtttgcatcaaatgtggtcctgcccaggggtgaggcatctggcatcagcggaagatggcaagataacagaacaacaacaacaattttatcttcaaaacgctaaatgaccattaattctacagcagtcttcagaaccggggggccacatccgcgctccccatcttctcgctgacggtagcaccaaaagacggcgcgcccttcctgtagcagacaaggaactcggtagggtaacccttcaacttgtgaggcttgatttccaggtccgcaaaactgagagcattctcagacactaggttgtctaccggtgagtgccttgatctgatcaagattgaaaatggagggagtcggcagaggaaaaggcactttgtttagcagcatttcccttggagaagccatagcctttgcaatagggaaaggaagattgcacgtatcttggatattcgcgtattgtttcaaacatcatttcagccaaggtcatgaacagtgtaaatatctggtccaccaagctcataggtctttcccatgctggtgccatcatccttgagggagttgacaatggcagccgcaacatccacaacataaacaggctgaaactttgtagatccaccgccaaaaagtgggaggaaaccccaatttttggcatacattgcccatctgttcaaaatccgatcttctgtgccaataagggttgcaggcctcataattgtagcttcaggaaattctttcaacacagattcctctccagcagccttcgccctaagcaatctagaaggtgaagaggctgatgcccctaaagcagaaacctggataaatctcacgatacccccatgctccttggatatcattgcaagttgttcagccatctgatggtttacttcttcaaacccatagtttcttgtttcatactcccgtccaatgaggttaatgaccacatttgacttggccacggcagtcttaatcgaattcacatctcttgggttgtagttcattggaacaatctgacccaagtcacccattaacttcaggtggcggtgagaatcctcacaacctctgaatgggacaagaacctgagatcccatctttgcaagttgttgaacgacatagcgtccaagaaatccagtagctccaaacaccgtagcaacgattccactcacggatgacctccctccggtgcccttgcggacgagatgcccggcccccttgacggccggcgccctcgcggacatgtacctcgcgccatccgccccgcccaacccttggggcgcgagcgccggctgggcggcggatctgaaggcggcgatggcggccgaggaggccggggagaggtggtgctggtcgaggaggtggcgccgcgccgccgccgccgcctgcatcgtcgccgccgtcggtggtggtcgtcggagtcggaggaggggagggagagggggaggccgagagctgtggtgtgtggtgagaggggagtaggct

SEQ ID NO: 4469 - DNA, 1109 bp, Triticum aestivum
  Clone ID: TRIAE-23APR03-CLUSTER24010_1
cccgcccccccaccgtcccttgcatttcttcgccgattcctaccctccctccccctccttccccgatccctcctcgtcgccctcccctcccctgccgacctaccagccccgcccagcccccgccgtcccctagcccagcctcgcccccggcggcctcgccccccatacccctccccccccccccctcccacgcgtatccgtcgcctcctccgcctcccgcatcgccgcgaccccgtcctgattcccgagcttgtttgagcatccgttcgtacaatatgtcggagaagccatctgatgagacgaccggtcaggtgatggcctgaaggagatgtttctgatgtgaaagtggaaactgccgaccagaataaaggaaagtgagatgccatcaagcacaacaggaggaagcaggtaatcaagaaaaagtgatggaaggggtaactgcccaaaaagtcaccactcatatccaaggaccatgagcgagcttactttgattctgctgattgggctctgggaaagcaaggaggacatcctcaaaagcctaaaggcccgcttgaagcacttcgaccgaaattacagcctacccagcagcaagcccgttcacgacgattccttcatgcatctactgacagcgacgagggtgccaactcgcctacggaggctacgaccccgaaccaggagttcaccgaggaggccaaggcagccgagaacaaggaatccaccgagtagctcccatgtccttttttgaacggaactctgccatttgctatgcccatgccgtctcgttgctctagtaataagaactgtgggcgccctgtaaccgctcgctgaattttgaactgaagtgtcgcagacatgccgttatccaccgcgccatgccattccatggctgttgatgcctgtaacagttcggtatgggatcgggaacattatgatgtcgcaccgagtgtcgtccgggtcggacagaataaaagcatgagcctgaaacttatactagtactgtgttgaatgtcgaaccggctgctgcctgctgtctgaactcccccgctgtaaggtttaccgtttgaattccgtggaatttcatgaagggatcgtgtaattcaaaaaaaaaa

SEQ ID NO: 4470 - DNA, 1397 bp, Triticum aestivum
  Clone ID: TRIAE-23APR03-CLUSTER240735_1
acactccatgcactactcctctgcaggcactgtgcacatcaaggtcgcttagccaagatgaatgcacgctcacactccatgcactagtactctgcaggcactgagctcatcaaggtagcttagctaggatcaatggcgtcgagcaggacagcagcgatgctggtcctcgtggccgcggtgctgtgccctgcagccttgtccaagccgtcggcggcgttcatctctatgcccaccgaccacgtcggtggccgtattcctcccgtctcccccgccgatggactcgccttcgacttccatgccgactcctgcccgcagttgcaggacgtggtgcgctccgccgtggagaccgcgctccagagggagatcgccctcgccgccggcctccttcgcatcttcttccacgactgcttccctcagggctgtgacgcgtcggtccttctgacgggagacggcagcgagctccagttgccgccgaatctgacgctccaaccgcgggcgctgcagctcattgagtccatccgtgcccaggtgcacgccgcctgcggacccgtcgtctcctgcgccgacatcacggccctcgccacccgcgatgccgttgccttctccgggggtcagggctacgacgtgccgctcggcaggctcgacagcctcgcgccggcgccgagctcggccgtcttcgatctcccccaggccagctccaacgcctccacgctcatcgacgtcttcgagacccgcaacctcgacaatgtcgacctcgtcacgctctcaggtggccacaccatcgggaagggccactgcagctccttctccaaccgcttctccgaggactccgacttcgtccgaagcctcgcctccaactgctccagcgacttcaaccggctgcaggacctcgacgtcaccaccccggacgtgttcgacatcaagtacttcaccaacctgcaacagggaaagggggtgttcacctccgaccagaagctcaccgcggactggcgcaccgaatgggttgtcaacggctttgccgggaaccactggtggttcttcggccagtttgctgcttccatgaccaagctcgggaatctccaggggccccaaggaaacgtcggcgagatccgtcgcaacagctgcttcgtgcgcaatggacagagcatcctcaccaccaccagcgacgaggggctcgccgcctctgcttgagatcaccgatgttagcgagattaatgtcttaataagagctcgctagctaatgtagcccatgttattctagatttactcttgtttaaaatcatattatggcactttgttctgggactcctaaaaggcgcgcttcgcctcggtgtgctataattcttttatagggccaaaaaaaaaaaaaaaaaagcttatcgataccgtcgattttc

SEQ ID NO: 4471 - DNA, 966 bp, Triticum aestivum
  Clone ID: TRIAE-23APR03-CLUSTER240_4
gcttttgttgttccgttagcaccagcgaaacgcagagcgagaggccgaggaagcgatagctctagcgataaggcactgacagatcaatggctgccacggcgtactccgtggccctcctcggaggggcacgcctccccgccgccaccggcaacgccgccccccgctcctccgccctcctcccgcggcgcaacttccaccctctccgcctccaaggtgcacatgcatgctagtagtatctatcagccgggttttttcggggaaattcttttggctctgacgacttcgccgagcttgcagatgcgcccaggccgtccctgctccgcgtgaaggccgcctccgacgacacgtcggcgagcggcgacgagatcatcgaggacctcaaggggaagtgggaggcgattgaggacaagcccaccttcctcctctacagcggcggcgccgtcgtggctctctggctcaccaccgtcgtcgtcggcgccatcaactccgtgccgttgctccccaagctcctggagctggttgggctcggctacaccgggtggttcgtctaccgctacctcctcttcaaggaaagcaggaaagagttggccaccgacatcgagagcttgaagaagaagatcgccggaacagaataaactcaagttctctggaacgttttcgatggctcctttgtctgtccatgtaatggaagaacacctacttgcttagagcaccatccactgcatttgtgtgttacatacatatctgtatgaaaaaagaaatgcgctttggttggtgtgcggtgacaatagtgaaattgtatcagtttctggaagtcttctattgttttctatatcaatgtgttcatatgggaaacgtgatctgtcgaattgactttatatgaataaaatgaaactcatattgtattgtagaggataagtgactcaaagctgaggcacacctatttttagtatatttatttggtat

SEQ ID NO: 4472 - DNA, 1199 bp, Triticum aestivum
  Clone ID: TRIAE-23APR03-CLUSTER241123_1
atactacacagaaacatcttagtgcccatacaatacactctttcctaattttttgtcccacaccattccatgaccacttttgaggtcactcgtagctttggcgcatccgtagacaacaccaagattaagttcagtaagttgtatctgcatgagatctggggagggccaaacacgaatcagacaggcggtctaatatcaggagatccagccttacacttcggcctgtctactgctaacagttggggaatatatgatgatctcggctcagaggcgaagctggttgccaaggcacaaggctggcgcacagaaatccaccccaactggtactcttggttctccatgacattcttcgagggtgaaagatttaaagggtccactcttcaggtaatgggagcatcaagaccgctaaatgatggtgagtttgctattattggtgggacaggtgacttcgcaatggcacgtggtgtcctaacgaaacgacaagttgtggacgtagctgggcacaaaatattccagcttagcactacaggattttgccacatgaacattccggtccctgcacctacgaagatgggaccatggggtgcaaaggatgccccccttcgcgaaatggaaagaaaatcccaacgtctagaggagtgtcacaatatactttaccagcgtagtaagtgcgattcagttttcctacattggtgaagacgggcaaatctgcaactctggtctttggggtattactggatgcactaattcaccctctactattgaaaccattaagttttgcccaaatgagtttgtgaaggagataactgggacagttggtgacccagactatttgtctcaccttaagattgtcacaaacattaaaacgtatggtccttttgggccacaggacggcaagtctccgttcagctttaccgtgccagaaggaaagaccgttgttggcttctttgcgcagtgtgacgattatatccgtaaaattggtgtttacaccatttaaactgcctgctgcatgttctgtttatggccgtgtgcttaattttcttcaatttcccttcttccagtaataagctggcaagctagggtgtccccctatttatgcccttcgcgttctttcataattcagtcatgtaccgtcgttggtttgttgtaatgttcaataaagtcatctgagattgttttgtttaaaaaaaaaaaaaaaa

SEQ ID NO: 4473 - DNA, 1542 bp, Triticum aestivum
  Clone ID: TRIAE-23APR03-CLUSTER24113_1
gatcaccggacccgcgccccagctgcccgttccccgctccgacctctcccctgtacctccaccgctcctcccctagcagcctgcgatcccgcgacccagccgacggttttctgttcccccctctgacctgtccctccatcctcctcaattctcctccccggcgcccgccgttgacgaggcctcggaggaggaggactcgagcgcgccgctgtctcctgctccgccggctgccctcgcgttgagtttcacagggttgagttaggaggactgcgaccatgaaggccctcattcttgtgggaggattcggcacccgcctgcggccgctgacgctcagcgtgcccaagccgctcgtcgatttcgccaacaagcccatgatcctgcatcagatcgaggctctgaaagatgtgggagttacagaagttgtcctagccatcaattaccaagccagaggtcatgctcaactttctcaaggacttcgacgagcaagcttggcatcaagatcacctgctcccacggagacagagccaatggggaaccgctggtcccggtggccctggcccgcgacaagttcgacgacggctaggccacgatcatggtcaccaagatcgacgaggtgatcagggagtacccgttcgcaagagccgagggggttccacaagtcccatggcggcgaggcccctatcatggtcaccgaggtggacgagccttccaattacggcatgggggtgtcggccggagggagaccgggaacgtgggccggttcgccatggtgctcccggggttctggatggccatcgggcagccgagggactccatcacggggctgcggctctacctggagtccctgaggaagcgggcgccggcgaggctggcggcgggcgcgcacgtgctgggcaacgtgctggtacacgagacggcgacgattcggggaggggtgcctgatcgggccggacgtggccgtcggccccgggtgcgtggtggaggccggggtgcggctgtcgaggtgcaccgtgatgcggggcgcccgcgtgaagaagcacgcgtgcatctccggcagcatcgtggggtggcactcgacggtgggcaagtgggcgcgcgtggagaacatgaccatcctcggcgaggacgtgcacgtctgcgacgaggtgtacagcaacggcggcgtcgtgctcccgcacaaggagatcaagtccagcatcctcaagcccgagatcgtcatgtgatcgggaccatcgcccgcgccacatggtgaaaaagggtcgtatatttcttcatgcgtttgttggtttatttgtctgtctgtctgcaagtgtaaccagaggtgtccaccaaactgccaagtgtctatcaagctctatgtatgtctagacgtgtcgcaagtttttttttctttcttttttgaagacaaaatgcgtctcggttaaatttaagccccgggcttcaatttgtagataggtgtcagatccatgggaataaagcatcagttttccaagtcgtacaaaaaaaaaatcattttaaaaagtccgaaaaaaaaaaaaaaaa

SEQ ID NO: 4474 - DNA, 2043 bp, Triticum aestivum
  unsure (1)..(2043): unsure at all n locations
  Clone ID: TRIAE-23APR03-CLUSTER24129_1
gtagaagccggcaagctcgtgcccggcagcggcttggaaccggtcgtcctcgtccttccacgcccctcgcccctgtcctctctaatttaaccccactaggccttcccgattttgcctgacctcgtcccccccttaacctcccctcctcctgcgattccactcgcacccttcctttcaggaggagaaggtccaaggggggatcagttccattgcacttgatcccattttctcttcgtggtttgcttttgccattttttgattcgtgaggtcaaatagagcccggttcctccccccttccctcagaggcgctgccgcctttcttggcttcttgattgggttccggctgctgctacattcttgactcacttggaaaatgatcaagtgggggatcagcagcgggacgcccgcggattcgtactacgagatccgctccgattgcacagacgatgtgcccaaaagcaagttcaagatcaaggctggcaaaacactgagtgttcggaaatggcaagctgcatttaatcctgatggctgtcttgacattgtctcggtcctaagccggatacaaaaaggaggtgttcacccgactgtcaggggggaggtttgggagttcttacttggctgctttgatccgaggagtacctttgatgagagggaggagatcaggcaaataagaaggctacaatatgctagatggaaggaagaatgcaaagagatggattctcatgttggtagtggtaaagttatcacagcaccacttatcactgaggatggaagacctattaaggatcctttggttttacttgaggctacttcaaaccaaaacacctcagagggtgcttcaactagcaaccacaatggaattgaagtagacgaatctgcagaacgtattactgacaagcaaattattgaatggaagcttacattacatcaaattggacttgacgtgctacgtactgaccgcaccatggtattttacgagaacaaggaaaatgtttcaaagttgtgggatattctagcccgccttgcatggattgacaaagatgttggttactgtcaaggaatgagtgatttatgctcaccaatgattgtgctactcaacgatgaggcagatgcattttggtgctttgagaagttgatgcgtagattgcgaggaaatttcagatgcacagatcaatctgttggggtggctaaccaacttcagcaccttgcatctattattcaggtgctggaccccaagctacatgaccacctagaaacacttggtgnnaggtgactatctttttgcattccgtatgttcatggttctatttcgacgtgaggtgtcatttggggactccttgtacctgtgggagatgatgtgggctctcgaatacgatccggatatcttctttgcagcatgtgaagaagcaagcggtgcacataaaaaagtatcggcctcgtgggttaggggcgtgcgccaggtcgccgactgggacaaggacaaggatgtctctgaggaaactgatggcccagttcccatttcagttttcatggttgcaagtgtgctcaaggaaaagagagaaaaactgttacaagaagctagaggactggatgatcttattaggatattgaatgatgtaaatgggaatttagatgcgaaaaaagcctgcgctggagctctgaaacttcacaagaaatacctcaaactggtacaggcaaagaaaacctaaaaaggcaccggaagatatgcttccactgagggattctttaccatttgaatctacacatacacgaccatatttggcacagaaacagcgagtgaaggttctcatgggtggtcataatcggaagatggccccggatacaggatagatgcaacttctgtatgtaatgatatcacattctctgtatcccacataagttcatatgcttgtacagacatggtgctgtgggtaccttgcaaaaataataatttcaattcaagttgaaatgtcatgcatgttgagattcacctggagagaatattgtagccacagaagtacagaactttgttccaagaaaatt

SEQ ID NO: 4475 - DNA, 1755 bp, Triticum aestivum
  Clone ID: TRIAE-23APR03-CLUSTER2413_2
gcactccattcacggttcgccaaggtcaacaagagtagtgatagatagaagaggccaccatcaccatggatcggcagctgctgaggacggtgaagcaggcgaccaagaaccacgccggcctcatgtaccaccgtctcgtgggccacatcccccacctcctcgtggtcacgctgctcgtcgtcgtggcgccgcagctctcgacgctgacgccggagaaggtgcgcgccctttggaacacagcagtgaacgcgccggcgctggccatggcgtgctgggcggcggcgctggcggcgtacacgtacgcgtcgtcccgccctcagccagtgtatctagtggacctcgccgggtacaagccgccggtggagctggaggcgtcgcgcgccaagaccatcgtgcacttctcgcggtgcgggcggttcagcgagcagagcatggcgttccagaagcggatgctggagcggtcggggctgggcgaggcgacgcacttccccatgtcgctgatccgcctccccgtggacatgtgcgaccggacggccatggaggagtcccacgccgtgatcttcggcgtcgtcgacgaggtcctccgcaagaccggcgtggacgccggcgacgtgggcgtgctcatcttcaactccagcctgctcagcccgacgccgtccttcacgtcgctcatcgtgaaccgctacaagttccgcgacgacatcgtcacgcacaacctcagcggcatggggtgcagcgccggcatcatcgccatcgacctcgccaagcgcctgctccaggtacaccggaacacgtacgcgctggtggtgagcacggagaacatcaccctcaacgcctacatgggcaacaaccgtccgatgctggtgaccaacacgctcttccgtgtcggcggcgcggcgatcctcctcaccaaccgggccggcgaccgggcgcggtccaagtaccagctgatccacaccgtgcgcacccaccgcggggcgcacgaccagagctacggctgcgtcacccaggaggaggacgaggtcggcgaggtcggggtctccctctccaaggagctcatggcggtcgccggcgaggccctcaagaccaacatcaccacgctcggcccgctcatcctgcccatgtccgagcagctccgcttcctcgccaccgtcgtgctcaagaaggtcttccgcgcccaggtcaaggcctacctgcccgacttcaagctcgcgctcgagcacttctgcatccacgccggcggcaggggcgtcctcgacgagctcgagaacagcctcaagctcagcccctggcacatggagccgtcgcggatgacgctctacaggttcggcaacacctccagcagctccctctggtacgagctcgcctactgcgaggccaagcggcggatcaagaagggagaccgcgtctggcagatcgccttcggctccggcttcaaatgcaacagcgccgtgtggagggcgctgcgtaccatcgacgatgccggtgagagcccatggacccaggacgtcgatgtgctcccggtcgacgtgcccaaggtggtgcccatcgatgagacctcttaccaagtcccaatctagctacctctttcccccaacccagctagcaagctagctagctggctggctttgcgtccttggagcatgtatcatcaattttcaggcttaattaattagttgagattttttatgttttcattattaatttgattttcatgtaaaaaactctcaatgaacgggcaacaaaattcaatcc

SEQ ID NO: 4476 - DNA, 1286 bp, Triticum aestivum
  unsure (1)..(1286): unsure at all n locations
  Clone ID: TRIAE-23APR03-CLUSTER24143_4
ccttgacccctctctcccctctcctgtcgcttcatccttgacgccacgccaccgctctcctcccacccccttctatctcaatcgccgctcccccggcggcagacacagcggagcgcatctcgacggcggccatggcgacgaacgggaggaccgtcgcgtccgtcgaccccgacgtcgcgctcgcctacaagttccccgaggtctccttcgcctacgacgagagggacgtggcgctctacgcgctcggcgtgggggcctgcggcgcggacgccgtcgacgacaaggagctccacctcgtgcaccacagggacggccagcgccacatcaaggcgcttcctacctttgcgtctttatttcctaacaagaacagcaatgggcgtggaattgttaatgtgcctggcattcacttcgatgcaagccttctattgcacggtcaacaatacatagagatctacaagccaattccttcatgtgccagtgttgtaaacaaggtnaaggtagctggtttgcacgacaaaggaaaagcactattctcgagatcgaaactaccaccagtctcaaagattctggcgaagtgttatgtatgaacaggagtactattttcttgcgtggcgctggaggattttccgactcttcccgtccatactcgtatacgacttatcctgccaaccagatttctcgcatttctattccaaattccacaccttctgcggtgtatgaagaccagacgcaacaatcccaggcactcttatacaggttatctggtgattataaccctttgcattcagaccctatggttgcacaggttgcagggggttcgcggcccgggcggtcatcaagtcattctgcaacggggatccagcggcagtgcggaacatctttggccggttcctgctgcacgtctaccccggcgagacgctggtcaccgagatgtgggtcgacggccagagggtgcagtaccagaccaaggcgaaggagcgtgaccgcgccgtgctttccggatacgtgctgctcaaacacatcccctcatcattgtcatcaggtgctgataatggaggaggccggctgtaggagccttcccgccaaggacgaagaagaggaagaagaagaagaaacagtctcggggcaattgacggccggagaggatgcacagccagagacagagtgacggcggtggagcagaccggccggcacgtttctgtatcatagtatatcacactttgtgacccgttcagtctaaataaaatcaattttgcatgtgcacctgctcatgcatcgacaccagc

SEQ ID NO: 4477 - DNA, 2401 bp, Triticum aestivum
  Clone ID: TRIAE-23APR03-CLUSTER24162_1
aagcactatccacgccacgcaaccatccattgcttaggaccaactccaccttggcagggtatcaaagaccggaggtttagacaggagtctccggaggtcgtcgaagggactagcgacagccgagcaccaccaccccaccgaggacacgcatatcaccgacaccacacttcgatcacaccgctcaaaccctagctaccaatccccgcaattcctcccctggcccaggttcttccgtagctggatgcccccaacctaggcggcggctcggtggcgtgtgtgcgtgcgcggccgccgatggagccgcgcgtgggtaacaagtaccgcctcggccgcaagctcggcagcggctcgttcggggagatctacctcggtactaacgtgcagaccaacgaggaggtcgcgattaagcttgaaaatgtgaagacaaagcatcctcagttgctgtatgagtcaaagttgtacagagtactgcagggcggaactgggatttcaaatgtcaagtggtttggtgttgagggtgactacaatgttcttgttatggatgtgttggggccaagccttgaagatcttttcagcttttgcaacagaaaactgtcgctcaaaactgttctgatgcttgctgatcaaatgatcaaccgagttgaatttatacattcaaagtccttcttgcatcgagatataaagccagacaattttctcatgggccttggaaagagagcaaatcaggtatatatgattgactttggactggcaaagaaatatagggacacgtcaacgcaccagcacattccataccgggagaacaaaaatttgactgggacagctcgatatgcgagtgtaagcacccatctcggaattgaacaaagcagaagggatgacatggagtctcttggatatgtactcatgtacttcttgagaggaagtctcccatggcagggtttaaaagccggtacgaagaaacaaaagtatgagaaaatcagcgaacggaagattgccacttcaattgaggctttgtgtcgtggatacccttctgaatttcagtcattcttccattactgccgcgcactgcgttttgaagacagtccagactatcaatacctgaagagattgttcagagatctttttattcgagagggattccagtttgattatgtttttgactggaccattcttaaataccagcagtcacaaatgaccagtgctccaccacgtgctattgccgctgctgcaggacaaagctcggggatggctccaattgcaagtaataatagactgtcagccaccgaagagggaagaagtgggtggtcagatgatcctacacgacgtcaagttccacctacaggaataaatgcaggcagcttagcgaaacagaagtcaccagttagaccagatgtgtccgcaccaaaggaagctgtgttgtccagttcgacttttttgggtcggtcaggcgtgtcctcaaggcgacctgctgtttgtagtagccgagatttgccaagcagtgaggctgaaccatcgcgtagtcgtgcaccagacgtgagtccagggacgttccagagaaactcagccccacggaggacctcacagacgcttgactactctgaccccaggcacaagtctaacagcaacaactacgagtccactataaggggcatccggggcctaaatttcaatgccaacgataggatccactactagtatcttctggatcctaaaaagcatgtataatatgtgatctgctgaagttaaagtggggagtgaggccatactttccgagctactctcctaccatagtaccatgtgatccacaagctacgtgctggagcggtgaggcagtttactgacgcaaagaaacgggggctggctggcaaaataaagggtctgcgacagccatggccctaaaatagcacgttgggcctatgttttagcctctctgtacaggttttcttttgtgcgttgagatgttgctttcgtacttttcacataatattatgttttaagatatttaccttactgtcatgtctagtatgtttacattggaatgccttgttggcttgagcaggtaaaaaaaaaaaaaaaaaaaaaaaaaaaaaaaaaaaaaaaaaaaaaaaaaagaaaaaaaaaaaaaaaaaagcttatcgataccgtcgacctcgagggggggcccggtacccaggggggccccggaacccccatttccccccaaataaggagccccatattcacccgcgcgtctattgggccgtactttttacaaactcctacgatttgtgaaaacaccccgtgcgtttacccacattttaaccccctttggcaaacaattcccccttttccgcccggttggggtaaataactgaaaaaggtccccccacccaattcgccttttcccaccagtgatgcgcac

SEQ ID NO: 4478 - DNA, 1746 bp, Triticum aestivum
  unsure (1)..(1746): unsure at all n locations
  Clone ID: TRIAE-23APR03-CLUSTER241692_1
agtaaaaacgaggatatacgcatggctcctcttggcataataggaggctatgtgttttataattacaatgtgctcctcgttcagcagtcagcatctccgtgtctccctccctccctccctctccaccgcccccctagtctgacaccgccaaaatcccaccgcgccacgctgatggcttcgccgccgacgggacccgcggcgccggcgggcttggagagcatggaggggctcgccctcgacatcatcatcgccaaggccggcgcgcgccccgcggccgcgctcgcctgcgccagcacgcacctgcgcgccgccgtggccgaggacgccgtctggcgcagcttctgcgcccgagacctcggcctcgacgcgcccctcgaccccgaggaccgcccgctcccctccttcaaggatgcatataaagtttggtcagagtcttttggtatgtatccattacccctggtaaagagagtgaaacttttttggagctcattaaaaggttggatttctgaaaacttccctgaagcactcagaactttgagtaagggtgcttctgaggctcagataagatcagcagaagacgatcttggtttcaagcttcctatgcccacaaagctattgtaccgcttttgcaatggtcttttgcctttcagtagaaaccactttgaggatgtacgcatggctcctcttggcataatggaaggctatgtgtttgagagctgcacgctaaataatggcagtagtggatctgtggagggctcttttacatttgtgcctgggaggctgacccagccagaaggaggtcttttcgacgggcccaaccttgcattagtggcaagttcatggtatcatcctaaaacgtttattctcaattgttcaagtggtgacctttacgttggcactgccaacttatcagctggagaaatgatgccatgcgtgccaaaatcattgataaagccaactgatagtgatatgccccaagatggattacttttgtggttggaagagcaccttaggcgcttacagaatggcatgatcaagattcgcccgcttaagacgtcgaggtatatctgcttatatccagaagcatccccattgtgttcgtcagcagtgacaaatggtgtaaaggtacgtgcatctgcagtctttgcgccagaacatccttatggggggcatccgggcacatatctgtacagctattccatccgcctgtcagttcctgaggcatgcatgctaggtggagtttacttttcttcctgccagcttcactcacgccactggatcatccgatgtaaagacacggttgtttcggatgtgaatggggaaggtgttattgggaagttccctttacttttaccagggcaggacgagtttgtctatgagagctgcacgccgctgaatggcagtagtggatctgtggagggctcctttacatttgtgcctgggagggtgacccagccagaaggaaaaccattcaacgtcacggtggctccgttccctccgcaagtacccgactacttcctctcagctattgcacctgctcctcttatccgcggagtgtctccgtagactcaccgaccgtcgcgctagtactcccgcctgttgctccgcagttgctccgcgggccgttggtctcgcccacgttcggtttcctgccgggcgcttatggttgtcttgcgccgaccttcttccggttctttgctgtggccctaaaggaatctgtagcaggtggagcttgtctgttnnnnn

SEQ ID NO: 4479 - DNA, 1144 bp, Triticum aestivum
  Clone ID: TRIAE-23APR03-CLUSTER2419_1
ctcctcctttccttctccccacctcgcctcttcccccaaactccgcagattctcctcgccgctctccaatccggccgtccctgggcggtcaccatcgccgcccgccctcacgacgaagcatcgaccccttcccgccgccgcctgcctcgtcgccggcgcatgagagcgaatcatgggaggattttgctgctgcctttccacagacgattttgaggaatatgttcatccaaataatcctgtctatagacaatgcatatccctaaggcagttgtttcacaacatgtttggggggtatactgcagcattccagaggctcgactctaggccaagcaacccagctcaaggagctgcgccattggcatccactaatccaagtactaatataactgagagttcgctgtctgaaacttttcaccttgtttctagaccacccccatatgacattgaccctagatatgcccgagttcaaagagagggactggtatcaaggcgtgaaaagtctataaacctcacgcatgaagagtccccagctcttagacgaaatggcagcagctctggtgtcgagcatttagctgctcaaaagaaaaggagcagcactgatcctgagggtgaacataaggtgcgtcgttctgagtcgactaagagtctttctggaagagcatataacagcagttatgccgtcatcacttcagacgacgaagatgtctgccctacttgtctggaagagtacaccccggagaatccacagatcataactaaatgctcccaccatttccatctaagttgtatttatgagtggatggagagaagcgacacctgcccaatttgtgggaaggaaatggagttctgcgagagcccctgagagatacttccatgctggtcgcatcgggaagagcgggaaaaagtatctgacagcatgggatgctgaagagtctgtaaagggaacccgtatctacagcttgcgatgctggagcctgtaaaagagatcgaagtattatgtgcactcaagcctgtccgcgagtctgcagagcgacatatttcctccagattgggataccacaatctctgcggtggaccgtggttcttcgacgcccgcaacctatctcgttctcgagatcgacttatgtgtactcaaatcagtcta

SEQ ID NO: 4480 - DNA, 1259 bp, Triticum aestivum
  Clone ID: TRIAE-23APR03-CLUSTER2427_1
acctccgctccagcccccccggagcaagggcccgcgcaccagcgcccgccctcccccctccccccctccctcgcgcgcgccgcaccggcccgcgccgcgccgcccctccccctccggcggcttcggcggacggcattgcgccgagcagcaatcgcagtcccagaccaaggcagcgcatgcccttgcccttaccttcggttaagacaattctcttgtcagttaggttagtcatagggacagacagtagaagggctgggctagccagtcgatagtaagcagggacgggcgttttttgtttgtcatttattggtagttgttcataactcggacgaaatggggaggtttctctcatatggtggccggttttttgctggtgcctgaatacatctcttcacatgggccacacagttccacaagtagcgctgttggtttgtgggcaggaatatttatctggaacaactggattgaatacgtgctacatcggtacctgttccacatagatactaaaagttactggacaaacacggcctcattatcttctgcatggatgccatcacaagcatccaatggatgggcttcgacttgtatttccaccaactgccgcagccatcttgtgctatccgttctggaattttgtcaagctcttcacaactacaactaccactcctggcgtgtttggaggtggcctgttgggttacgtgatctatgattgcacacactactacctgcatcacgcccacccttcattcgatccagcaaaatatctcaagaaataccatctgaaccatcacttcagaatccaaaacaagggctttggaataacatcaaccctgtgggaccatgtgtttggaacgctgccttcaacgaaaaccgccggcaagagctcttgagttgttgtaccgccttgcagtgcgagaatcaagactgtccaatggttgataacggattgaacggacggatgaacaaacaattaatcggagacgtcactgaagtgcttacatcctcgatgatgtgtcgcgaatagagtggttccagacttgagcatatgttgtcatgtgtacagaggtttttctatctaaatagtatagcaccagcgtcgttcatttgtggctgttggtggccagtataatttttgggacaaattaagtaattgcattgcttgatacaataaaaagattcacaagctttgctagtattcagcgaaccattcggttttctttccgaaccgttcggttttctttccaaaaaaaaaaaaaaaa

SEQ ID NO: 4481 - DNA, 1297 bp, Triticum aestivum
  Clone ID: TRIAE-23APR03-CLUSTER24291_1
acactctagcacatgcttctctctccccccccccttcttcccctaagcttctcgcccgctcccctcgcaccgcgggagggaggcgcctcgccgcctcctcgccgccgctcgtcgaggctggttcctggcgagcgactgaagcccagccagcatggcggccaacgtgggggaaggccacgagcggcagcggcggcagcgtgggtggcgacggcgggggcaggcttcgatgtgcatcatatgcttggatgctgctgcagggagcccacctctcccgctctgcggccaccctctctgctgggcctggctctaccagttggctgcacattccactcgcacctcccccgagtgccccgtctgcaagtggccgtcggtcgaggaggacaagctcgtcccgctctacggccccggcaaggaccgcgtcgaccccaggtccaagggcgtgccggccggggccgagatccccaaccggccgaccgggcagcggcctgccacggccccgcaggcagatcccaacaaccacttccctaatgcgaaccctaacccctggttcatggggggagggggcgtccctctggccaacgcgcggtgggggaactacaccttctcggccgcgttcggcggcctgttcccgctgctgagcttccaggtgcatggattcccggacgcggccgcgtacgggcagcctgccgggtttccctatgggtacggccatggccatggccacgggcatgctttccatggcgggcacgcccacgccgccgccccccggcacgcgccgcccgggcagcagcagcagcagcagcaggcggacgtgtacctcaaggcgctgctcatcctggttggctttctcgtgatcgcaagcctcatcacattctaggttcgtcggttcccaccattgtcatttgtcaccgtcataataagagaaacaacgattgtcgtgatacttctcagatgttgtgtgcattaccttggcccccccatacaaagccccggtctaaatccgagtggtgcgttttgagcgaaagtgttcatagaactcctgtatatatgtgctatttagacgcggtcctgtgggggggcgcatgtgtaccgtagtagtttcgcgctgattcgcggatgatttgggaaacctctgtttggagtggatgtaccagaccaattatatatcatgtgtaattttgaaaaaaaaaaaaaaaaagagttaactgtctctccacccccaacccgggccccgcccccgcttttcgactgtcaaagtgagtggggtgtccagctatttggagtcaaaatcttgtct

SEQ ID NO: 4482 - DNA, 1676 bp, Triticum aestivum
  Clone ID: TRIAE-23APR03-CLUSTER243049_1
gacaggctaaacctctacactatacttcgagcctcgcccgcccctgccaggacaccaagacgacgcgagcgccatggcgcacgatggagcttcccatggagcgaccaccgccccgctgctcgcgtcgacggagaagccaccgcggaacatgtacgccttcggctgcgccacgctggcctccatgaccacgatcctcatgggttacaatctcgcgctgatgagcggcgcgcagctcttcatccgggaggacctggggcttaccgacgagcaggtggaggtactggctgggtccatgaacgtgtacatgctcgtgtccatcctcgccgccggctgggcggccgacctcctgggccgccgcggcacgctcgtgctcgccaacggcttcctcatggccggcgcgctcgccatgtcgcttggcggcagctacgcggcgctcatggccgcgcgcttcatcaccagcatcggcgttggcttctccctcgtcgtcgcgccggtctacaacgccgagatctcgccggcctccgcgcgtggcgtgctttcctcgttactcgatatatttgtcaacgtcggcatcctgctcagttacgtgtcgaactacgccttggctggcctgccggtgcacctcagttggcgcgtcatgtacgccatcggcgtgctcccaccggtgctcctcgccgccggggtgctcgccatgccggagtccccgcggtggctcgccatgcgcgggcgcgaggacgacgcgcgcgcagtgctcgtgcgcacctccgataccgccgccgaggccgagctccggtttgaggagatcaagcgggtcgtcgaggcgccgcgagaagccgatagcggcgtgtggcgggagctgatctttcgaccgtcagcgatggtccggcggatccttgtcttcgtggtcgggctcaacttcctccagcaagcgttgggcgtcgacgccatcctgctgtacagcccgctcatgttcaagaaggcaggcatgtcgtcgaatagcgccatcttgggcgccaccgtggccatcggtgtcgtcaagacgtgcttcatactcgtggtctcgctcttttccgaccgcttcggccggcggccgctcctgctggccagcgccggcggcgtggccgcctcgctgaccggcctggctctcacactctgcatcggcgagacgtcgccagcgagcacggctgcctgcgtggcgttcacgctggccacggtcgcggcgttttcggtcgggtgggggtcgctcccgtccacgtacacggcagagatcacgccgctgcggctgcgtgcgcagggctcgagcctgggcatggcggtgaaccggctgacttgcggggtggtaagcatgtcgttcatatcgctagcgggctggatcaccatgcccgggtgcttctttctgtacgccagtatggcggccacggcgtacgtgttcgtcttcctgcgcctgccagagacgaagggccggaccctagaggagatggacgtgctcttttccaaatgattatgtcatctgtaggttttcggccacagttcaatgcacgctgttgcggcccgcagcacgtttggtagaaacctttgaaaaaaaaatgtgtgaactcttttgtgattgcatcatcgatagggatcaataaaaggcttctactcctcaaaaaaaaaaaaaaaacaaaaaaaaaaaa

SEQ ID NO: 4483 - DNA, 722 bp, Triticum aestivum
  Clone ID: TRIAE-23APR03-CLUSTER244_126
ctaccatggagtcggcctagttgtgcccgttgagagcgctcatatatcctccacacctccagatctgtggcctgttggttgttgcgtcctcccctcagaacaacaagcccctgcagccgcgcccggatcggatggacaccgccatgcaccccgccggcgccgacgccggcggcctcgccgagctgctcgccgacaacgccggcaccggcaccgagggcattatttgtggtatgccagacttcaagatgggtggaaagaggggcgatgaatctgcccctactgatgctggtgatgaagatggcgaagatgatgacggggatgaggatggtgacttcgcggagggcgaagaggaaatctcggaaggagaggaatatgacaatcccaaggccagtgacaccaagaagaaacaaataggcgagggtgaggagaatggcgaggatgatgaggaagaacaagaggagcaggagggtggaggaggcgacgatgatgacgacgacgacgacgatgacaatgaggaggacgacgatgatgacgatgatgtcgctgctgaagacgatgaagatggagtagaagaggaggatgacgaccaggacaacgacgatgatgaggaggaggacgacgaggactcgctccagccccccaagaagaggaagaagtgaagcccttcgatgccggctgctttagtcaccatgcgatgagatgtgcctgttcttcactgtgtt

SEQ ID NO: 4484 - DNA, 1600 bp, Triticum aestivum
  Clone ID: TRIAE-23APR03-CLUSTER244_147
ccctcccatctcctctcctcccccaccaaatccccaatccgtctcgccggcgccccgcccccaccgcgccgccacctcctcggcctccccggcgcgcccgcgcctccgctccgcccgcctcccccccggcgacaaccaaacagagggtccgggaggatggagctgcagacgtcggggcggcccatcgaggtgctcatggagaaggtgctgtcgatgaacatcgtctcctcggactacttcaaggagctctacaagatcaagacgtaccacgaggtcatcgacgagatctacaaccaggtggaccacgtcgagccctggatgacgggcaactgccgcggcccctccaccgccttctgcctcctctacaagctcttcaccatgaagctcaccgtcaaccagatgcacggcctgctcaagcacccggactccccctacatcagagctattgggttcctgtacctgcgctatgctgcggacccaaagaccttatggacctggtatgagccctacattcaagatgatgaggagttttcccctggatccaatggtaaaatgacaactatgggcgtttatgtgcgtgatgttatccttggtcagtactacttcgacagtcttcttccacgagtgcctctcctaattctgcgacaggttactgcccatcttgagaaaatgaagctcccaacaaagcagtcagggataactggggattctagccgccttggttcagatgatactgcccggcggcctccttcagtgaaggcttctctgtcggtctcttttggtcagcgtgctccacaccgtgcatccacaagggattcatccccagtccgaaagacattgccatctgtacgagaaagggaaaggagtcatgatggcggtcatgccaaatctccacccaggaagcaccgaagtcagagtcgtgagcgcagccgtgacattgagagggaccgttcagatcgcgatcgtggtaggtacaaggatagggagcatggtcggcacagccgtgataacagagaccgtgactaccgccgctcgagctattctgatagggatgtcgagaggcggggccatgaaaggagggatagggactccgacagaaatgggcgttcgagtggccgcagaagcaggagcaggagcaggagtccaagccgtggcagaaccaacggggacagccatcgctccagtccgtttggtaaagcgccggagccatccaacctggcgaagctgaaggatctgtacggtgacgccacaaacgcaaaggacgacgccggcgatgatagagcccgcagggattccggaactgaagaggtgatcagattgggaggcgccaggtggaggtgactgccagaagccgaaaaccatggagattctattctggttgtactagcattgctatacactgcgggcgatgcgcagcagtcaatgggtttcgtctcccctgcgatctctgccttccctagggaaaagtgcctccgactagggtgtacaacgcaaaatctgttgaccggctaagcaatttagtggtgattcaagataaattgttcactttggatagccatgttctgtatctgatatatgatttatgtgttgagctcaaaaa

SEQ ID NO: 4485 - DNA, 1732 bp, Triticum aestivum
  Clone ID: TRIAE-23APR03-CLUSTER244_181
gcacgaggaagccggacccggagcgtgtgacacaacacacaggtgacaggagccgggccactccctctccctgccaagaaacccacacccaccacacccgtcctctccaaaatcccccaaccaccagcctcctcctcctcctcctcctcccagatccgcctccccgccccgcccccagatcccccacgcaggcgagcgaacgcgcgcgcgcgcaggcccagatccgcccgccgccccgccggagcagccatccatggcgaaggaggccggcggcgagggggccatgtcggagtcggtgctgcgcaaggtgctcgtctcctactgctacgtcgcggtgtggatcttcctctccttcaccgtcatcgtctacaacaagtacatcctcgaccccaagatgtacaactggcccttccccatctcgctcaccatggtgcacatggccttctgctcctccctcgccgtcgcgctcgtccgcgtcttccgagtcgtcgacctcccgtcctcgcccgccatgaccacgcagctctacaccagctccgtcctccccatcggcgcgctctactcgctctccctctggttctccaactccgcctacatctacctctccgtctccttcatccagatgctcaaggcgctcatgcccgtcgccgtctactccatcggggtgctcttcaagaaggagaccttccgctcctccgccatgctcaacatgctctccatctccttcggcgtcgccatcgccgcctacggcgaggcccgcttcgacctccgcggggtcgcgctccagctagccgccgtcgccttcgaggccaccaggctcgtcctcatccagatcctcctcacctccaaggggatctcgctcaaccccatcacctcgctctactacgtcgcgccctgctgcctggggttcctcttcctgccctgggtcttcgtcgagctgcccaggctgcgcgccgtcggcatgttcgagcccgacttcttcgtcttcggcaccaactccctctgcgccttcgcgctcaacctggccgtcttcctgctcgtcggcaagacgtcggcgctcaccatgaacgtggccggcgtggtcaaggactggctgctcatcgccttctcctggtccgtgatccgggacacggtgaccccgatcaacctcttcggctacgggatcsccttcctgggcgtgggctactacaaccacgtgaagctgcaggcgctcaaggccaaggaggcgcaraaraaggtggcgcaggcggacgaggaggccggctcgctgctgcaggagcgcgactctcacggcggcgagcgcaagaccgagacccagtcatcatagagccgctcatttcatccgatccgatccgatccaacaacaccaacagcacgcccaatttggttggttctctcagtccggcgtagcaggttccccgaaatgtgatccttacatgtttgatgatgcaaaatctgttcatttcttgccttaatttgtggtaggaaggcaaataaatacaggaaacatgacaatttttgtgccgggcgtgtgaaaatacgatagttyttagcagacagtgctactaccagtatcaaaaaaattgtattccgttgtctattgtatcatcatcatctttgtaccagtaccaagcattcgcattgcatcgagtaagttggtgccgtaragatgtggcgatcgagcagcagctagtactaataaaagattcaattttcaaaaaaaaaaaaaaaa

SEQ ID NO: 4486 - DNA, 1050 bp, Triticum aestivum
  Clone ID: TRIAE-23APR03-CLUSTER244_187
aaaatttcccctgaattttccacaaccacaacaccaacttaaaccagaggcgaaattttctcgcgagagttcgtgtgtagtagaggagttgaggagatgaagccggcggttgaaggtgacgagcgtgcggcggagatcgcccgcatcaaggctgccgcggccgccgccaaaaaggcggcggaagaggtggtggatgtggacgatgagggtgaggacgacgagggagatgaggaggaggaggcggttgacggcgacgacgacgacgacgacgacgaagtcgacgacgatggggaagaggacgaggacgagggggtggagggtgaggataaggggtcggcggcgcagcaggtggtcgacatctccgacgaggacgacgacggcggtgatgaagaggagggcggtgacgatgacgacgacgacgacgacgacgacgatgacgaggaggatgacgacgaagtcgacgaggaggaagagcccgaggaggagctaggaactgaatatctggtgcagccgcttgcccgtgctgaagacgaagagcattccagtgacttcgagccagaagaaaatggtgatggtgctgaggacgaggagattgaggatgacgatgctgaggatggtgaggatcctgtcaaggcgcaatcctcatcaaagaggaagaggtctggtggggaggatgaagatgatgacgacggtgatgatgatggtgatgatgatgagaagcctccatcaaagcgatagtcaatttgttcgtgctgatctgtgatcttctctgcttgggccaagaaggaaaataatcctcatggagaggattgttggtaaatgctgtagctttaggacatctgtggtaggtgtagcagctcaaacttgagtctacccatgttagttgttagtgcatactgctgatgttgattaacagcctccgggaacttctgtatgagcattagatatggggcttgttatatgcttgtgtagcttctgattaaaacctttggaatgtggatgctctgttctgaatcttgttttcatgatatttctcttgaactagcttgc

SEQ ID NO: 4487 - DNA, 1028 bp, Triticum aestivum
  Clone ID: TRIAE-23APR03-CLUSTER244_188
gcacgagggcctctcggccctcttgttcttccccgccggctacaaatcgcccaaaatttcccctgaattttccacaaccacaacaccaacttaaaccagaggagaaattttctcgcgagagttcgtgtgtagtagaagagtggaggagatgaagccggcggttgaaggcgacgagcgtgcggcggagatcgcccgcatcaaggccgccgcggccgccgccaaaaagtcggcggaagaggtggtggatgtggatgatgagggtgaggacgacgagggagatgaagaggaggaggcggttgatggcgacgacgacgacgacgaagtcgacgacgatggggaagatgacgatgacgagggggtggagggtgaggagaaggggtcggcgccgcagcaggtggtcgacatctccgacgaggacgacggcggcggcgacgaagaggagggtggtgacgatgacgacgacgacgacgacgacgatgatgacgaggaggacgacgacgaagtcgacgaggaggaggagcctgaggaggagctaggaactgaatatctggtgcagccgcttggccgtgctgaagacgaagagcattccagtgactttgagccagaagaaaatggtgatggtgctgaggacgaggagattgaggatgatgatgctgaggatggtgaggattctgtcaaggcgcaatcctcttcgaagaggaagaggtctggcgcggaggatgaagatgatgatgacggtgatgatgatggtgatgatgatgagaagcctccatcaaagcgatagtcaatttgttcttgctgatctggtatcttttctgcttgggccaagaaggaaaataatcctcacggagagggttgttggtaaatgctgtagctttaggacatctgtggtaggtgtagcagctcgaacttgagtctacccatgttagttgttagtgcatactgctgatgttgattaacagcctcggggaacttctgtatgagcattagatatggggcttgttatatgcttgtgtagcttctgatta

SEQ ID NO: 4488 - DNA, 1028 bp, Triticum aestivum
  Clone ID: TRIAE-23APR03-CLUSTER244_191
gcccaaatttcccctgaattttccacaaccacaacaccaacttaaaccagaggagaaattttctcgcgagagttcgtgtgtagtagaagagtggaggagatgaagccggcggttgaaggcgacgagcgtgcggcggagatcgcccgcatcaaggctgccgcggccgccgccaaaaaggcggcggacgaggtggtggatgtggacgacgaggtagatgaagaggaggcggttgacggcgacgacgacgacgacgatgacgacgaagtcgacgacgatggggaagaggacgaggacgagggggtggagggtgaggaaaaggggtcggcggcgcagcaggtggtcgacatctccgacgaggacgacgacggcggcgatgaagaggagggcggtgacgatgatgacgacgacgacgacgacgacgatgacgaggaggaggaggacgaagtcgacgaggaggaagagcccgaggaggagctaggaactgaatatctagtgcagccgcttggccgtgctgaagatgaagagcattccagtgactttgagccggaagaaaatggtgatggtgctgaggatgaggagattgaggatgatgatgctgaggatggtgaggattctgtcaagccgcaatcctcatcgaagaggaagaggtctggtggggaggatgaagatgatgatgacggtgatgatgatggtgatgatgatgagaagcctccatcaaagcgatagtcaatttgttcttgctgatctggtatcttttctgcttgggccaagaaggaaaataatcctctgggagaggattgttggtaaatgctgtagctttaggacatctgtggtaggtgtagcagctcgaacttgagtctacccatgttagttgttagtgcatactgctgatgttgattaacagcctccttgaacttctgtatgagcattagatatggggcttgttatatgcttgtgtagcttctgattaaaacctgtggaatgtggatgctctgttctgaatcttgttttcatgatatttctcttga

SEQ ID NO: 4489 - DNA, 2074 bp, Triticum aestivum
  Clone ID: TRIAE-23APR03-CLUSTER244_198
gcacgaggctccaacaccaggcgagcccttggagcgggggatctgctctcctctgctctgctctcgtctcctcccccctcccctcccctcctgaagccagcctccagtcatggcggatctgcagacgccgctggtgcgaccaaagaggaagaaggttctggtggactacctggtgcagttccgatggatcctcgtcatcttcgtggttcttccggcctcggcgctcatctacttcaacatctacctgggcgacatgtggtccgccatgaagtcggagaagaagcggcagaaggagcacgaggacaacgtgcagaaggttgtgaagaggctcaagcagcgcaaccccaagaaggacggcctcgtctgcacggccaggaagccctggatcgccgtcggcatgcgcaacgtggactacaagcgtgtcaggcacttcgaggtcgacctctctgccttcaggaacatccttgagatcgaccccgagaggatggttgccaaggtcgagccgctcgtcaacatgggccagatatccagggccacctgccccatgaacctctccctcgccgtggtggcggagctcgacgacctcaccgtcggtggcctgatcaacggctacggcatcgaggggagctctcacatctacgggctcttctccgacacggtggttgcgctggagatcgtcctggctgacggccgggtcgtccgagccaccaaggacaacgagtactccgacctcttctacggcgtgccctggtcgcagggaactctcgggttccttgtttcagctgagatcaagctcatccccatcaaggagtacatgaggctcacctacaccccggtgaagggccccctgaaggaggtggcgcaggcgtatgccgacgctgtcgcgccgagggacggcgaccccgcaaaggtccccgacttcgttgaagggatggtgtacagcgcgacggagggcgtgatgatgaccggcgtgtacgcgtccaaggaggaggccaagaagaagggcaacaagatcaacagcgtggggtggtggttcaagccatggttctaccagcacgcgcagacggcgctgaagaagggcgagttcgtggagtacatcccgacgagggagtactaccacaggcacacccggtgcctgtactgggaggggaagctcatcctgcccttcggcgaccagttctggttcaggttcctcttcggctggcttatgccccccaaggtgtccctgctcaaggccacccagggggatgccatcaggaactactaccatgacaaccatgtgatccaggacatgctggtgcccctgtacaaggttggagaagccctcgagttcgtccaccacgaaatggaggtgtacccgctgtggctgtgccctcaccggctgttcaagctgccggtgaagacgatgatctacccggagccggggttcgagcaccagcagcggcagggggacacgagctacgcgcagatgttcacggacgtgggggtgtactacacgccggcgtgcatcttccgcggggaggagttcgacggggcggagtcggtgaagcggctggagcagtggctgatcgagaaccacagctaccagccgcagtacgcggtgacggagctgaacgagaaggacttctggcgcatgttcgacgcgtcgcactacgagcactgccggcacaagtacggcgccgtgggcaccttcatgagcgtctactacaagtccaagaaggggcgcaagtcggagaaggaggtgcaggaggccgaggccgccatcctcgagcccgcctacgccgacgaggcctaggccgtcagctcctcgtcgtcactctggatgaattaattcgcttttgctttgcttggttatgattattaataagtagaacttgatggacgggtcgtgtagcgttgcaactttggtgaggttcgtgacactttgtgtgtagcagtgtcattgttggatttgccccgtttttaatctgtggaattggttgttagaacttgagccgggaagatgtgtatgtgtgtcttgtccctgtttgactggactggaataataatgtagtgaaccctggatatgtgtgta

SEQ ID NO: 4490 - DNA, 1075 bp, Triticum aestivum
  Clone ID: TRIAE-23APR03-CLUSTER244_205
gaaaacacccctcaaaaaagaaaagaaaaactcatcgcagagccgccgccgaccgtagcacagcggcagagaagtgcggcaagcggccatggacttctgcccggcgtgcgggatgctgctgcagatccagccggccaccggcggccaccgcctgcgcctcttctgccccacctgcccgtacgtctgccccatcaaaaacaagatcgtgaagaaggcgaggctggtcaagagggaggtggagtccgcggaatctgcccccaagactgagggtgagcccaaggaatcggcccccaagactgacggtgagcccaaggccgatggtcagctcaagcaatctgcccccaagactgagggtacatgaccaaattgacacaatggagaaacatacttttggcagatgtggattcgattagtacatgtctacaagcattgtgaaacttgagtatctggacatgcgaacatgtggagcttctttgatcaaattatgttgcagcacacaatgccaaaagccaccaatcttgtgcaaagtaaagtgatatacatctgacagtgcagaagctcacttcaatgttggtttgttaattggacgcttcctttttttgcggggtaattggacacttcctttatgtgacattgcaggctttttggtacggagatgctttttttgtgtgtgcgcgctcgctagaggtgttgatttggtgtatgaatactcttattcaaccagcacaagaatgggtaggattttgagtccttgcatagcttccattctccagccttgaaacttgtacatgagtttaggttaggggtcgagaagacaatgaaggcaaggggatcagcggccgggcagtggcactctggtcccctgtttacaaatactccctccgtatcaaaatataagacatttttttaggctactgaaacatcttatattttggtacagatgaagtagatgtgtattgggttgccgataataaacacgcacgcaatatacttctttttattactcaaaaaaaaaaaaaaaaaagggatacgataccgtcgacctgtttaaacacagaaaagttgggaacgtgga

SEQ ID NO: 4491 - DNA, 2050 bp, Triticum aestivum
  Clone ID: TRIAE-23APR03-CLUSTER244_206
cttccttccttccttccttccttccttctccaccgtgggacaccgtgacccacgcggcgttatcgccggcgcccggccgtgtcagccagccactggagcacccaccacgtccgtgccgccagcctcgaccacgcgcgcgcaccgccagaaaagatgccctccgccccgccccgccccaccgcgccggcaattattaggacgcacgcgcccacaaacactgcttgaagagcgtgccgctgccctggcattactactagcgagtagtagcgagctgccagtggccagtgggtgggcgtgaacagtgaccaagcaagagtgtggggtcggtcggtcggtcggcggcgagatggccgcgaggttggtggtggtgctgctgctgctcgcgctggtggcggcgtgccatggcgtgagtgctgcggccgcgggggcgtcgccgcgccggcccaactggctgggcgggctgagccgagcgtccttccccaagggcttcgtcttcgggacggccacgtcggcgtaccaggtggagggcatggccaacgccgcgcggccgcgggccttccatctgggagcgccttcgcccacgtcccaggaaacattgccggaaatcaaaatgcagacgttactacggatcagtatcatcgctacaaggaagatgttaatctcatgaaaggattgaatttcgatgcctaccggttttctatctcatggtccagaatcttcccagatggtgacggaaaagttaaccaagaaggcgtcgcgtattacaataatctgataaactaccttcttcagaaaggcattactccttatatcaatctttaccactacgatctccctctggcgcttgagaagaagtatggaggctggttaaatgcaaagacggtgggactgtttgcagactacgctgatttttgttttaagacctttggcgatcgtgtaaagcactggtttacattcaacgaaccaaggatagttgcgcttcttggttacgacgtagggtcgaatcctcctcagaggtgcagcaaatgcgctgccggtgggaactcggcaacagaaccttacatcgttgctcacaattttctcttagcacatggttatgcagttgcaagataccggactaagtatcaggcagctcagaaggggaaggttggaatagttctggacttcaactggtacgaggctcttaccaactcaactgaagaccaagcagcagctcaaagagccagggacttccatgttggctggtttgtcgacccgctaataaacgggcattacccacagataatgcaagaccttgtgaaagagaggctgcccaggttcactcccagtgaagctaaattgctcaagggctcagcagactacatcgggatcaaccagtacacggctagcctcatgaagggccagaaattgctgcagcagacgccgaccagctactcggccgattggcaggtcacatatgcctttgagagaaatggcaaaccgattggaccaaaggcgaattctaactggctttacatcgtcccgtcggggatgtacggatgcgtgcactacctcagccagaagtatggaaacccacctattgtcataactgaaaacggaatggatgagccggggggcctcacccgggagcagtacttgcgggacgcgacgagggtccggttctaccggagctacctcggcgagctgaagaaggccatcgatggcggcgccaacgtcctcggctacttcgcgtggtctctcctcgacaacttcgagtggagctccggctactcctccaagttcggcatcgtgtacgtcgacttcagcagcccccccctggaccggcaccccaaggcgtcggcctactggttcagagaccttctgcagcactgatatgttgtcatcatcttcatcatcttgctgagtttctgcctactgttgttcgaatggaaccataattcagacttgagagcatgttttgctctgccaaatgagaataaaagttgcatgatattttgagcgttgcaaaaaaaaaaaaaaaaaaaaaaaaaaaaaaaaaaaaaaaaaaaaa

SEQ ID NO: 4492 - DNA, 1843 bp, Triticum aestivum
  unsure (1)..(1843): unsure at all n locations
  Clone ID: TRIAE-23APR03-CLUSTER244_208
ctagcgagcagcgagctgccagtcgcaggccagtgggtgggtgcgaactgaaggggctctgcgtctcgtgccatggcgggggagatggccgcgaggtcggcgagccgcgtgctgctgctgctgctgctggcgctggcgctggtggcggcgtgccatggagtgggagccgcggccgcgggggcgtcgccgcgccggcccaactggctgggcggcctgagccgggcgtccttccccaagggcttcgtcttcgggacggccacgtcggcgtaccaggtggagggcatggccgccggcggcggccgcgggccttccatctgggacgcgttcgcccacgtcccaggcaacattgcgggcaatcaaaatgcagacgttactacggatcagtaccatcgctacaaggaagatgttaatctcatgaaaggattaaacttcgatgcctaccggttttctatctcatggtccagaatcttcccagatggtgacggaaaagttaaccaagaaggcgtcgcgtattacaataatctgataaactaccttcttcagaaaggcattactccttatatcaatctttaccactacgatctccctcttgcacttgagaagaagtatggaggctggttaaatgctaagacagtgggactatttgcagactacgctgacttttgttttaagaccttcggcgatcgtgtaaagcactggtttacattcaacgaaccaaggattgttgcgcttcttggttacgatgtagggtcgaatcctcctcagaggtgcagcaaatgcgctgccggtggcaactcagcaacagagccttacatcgttgctcacaattttctcttagcacatggttatgcagttgcaagataccggactaagtatcaggcagctcagaaggggaaggttggaatagttctggacttcaactggtacgaggctcttaccaactcaactgaagaccaagcagcggctcaaagagccagggacttccatgttggctggtttgtcgacccgctgataaacgggcattacccgcagataatgcaagaccttgtgaaagagaggttgcccaggttcactcccgatgaagctaaattggtcaagggctcagcagactacattgggatcaaccagtacacggctagcctgatgaagggccagaaattgacgcagcagacgccgaccagctactcagccgattggcaggttacctatgcctttgagagaaatggcaaaccgattggaccaaaggcgaattctaactggctttacatcgtgccgtcggggatgtacgggtgcgtgcactacctcagccagaagtatggaaacccagctattgtcataaccgaaaacggaatggatcagccggggggcctcacccgcgaccagtacttgcgggacgcgacgagggtccggtactaccggagctacctcggcgagctgaagaaggccatcgacggcggcgccaacgtcctcggctacttcgcgtggtctctcctcgacaacttcgagtggatctccggctactcctccaagttcggcatcgtctacgtcgacttcaacagccccaacctgtaccggcaccccaaggcgtcggcctactggttcagagaccttttgcaacactgatgttgtcatcatcatcatcatcaccatgatcattctgagtttgtgcctactgttgttcgaatggaaccataattcagactgctaccagatggaaataaaagttggcatgatattttgagtgttgcaaaaaaaaaaaaaaaaaaaaaaaaaaaaaaaaaaaaaaaaaaaaaaaaactcgagggggggcccggtacccaattcgccctatagtggntcgtat

SEQ ID NO: 4493 - DNA, 743 bp, Triticum aestivum
  Clone ID: TRIAE-23APR03-CLUSTER244_209
atcccacgctagcaaagcctaccaagcttagccacaaaccagtaagagcaatggcgccctccaagctcgccctcttcctcgccctgaacctggtcctcctcgccgccgtacagggctgcgggccctactgccctcctgtcatccctaccccgccgatccgcccaccgcctgccgtgccatcgaccggcgggggcagctgccctatcaacacgttgaagctgggcgtgtgcgccaacgtgctgaacctactgaagctcaggatcagtgtgccggcgaacgagcagtgctgcccgctcctgggcgggctcgccgacctcgacgccgctgtgtgcctctgcaccgccatcagggccaacattctcggcatcaagctgaacgtgcctatcgacttgaccctcctcctcaaccaagtgcggcaagaagtgcccggccaacttcacctgccccatctgatccatccatccatggatgaatattgtacatgcataatcgttctactcgtaaccagtttgcatgtcatacgcgcgcgccatacgtatgctttttctgttacagttcatatgtcaagcgtttgcatgggctccctcgctcgtgcatgcatgcttgataagcttgtgattgatcaatgtcattgtctcccgttatgttatctaaatgcatgatttgcatatttgtaaaaggatatacatacttgtacacgtacctggaataaaaagtttgttcaatacttcaaaaaaaaaaaa

SEQ ID NO: 4494 - DNA, 1426 bp, Triticum aestivum
  Clone ID: TRIAE-23APR03-CLUSTER244_211
ccatccctaccggccaccgggcacctcgtcgccgatctcgtcacgccatcgcgcccatcgcctcgccgctacttctttatattatcatccatagcagccctccacgaaccaccgcgaggtccacgccgcgggcgacgccgtccaaatccacgcgataagaaccaagccagccttgctttgccgccgtttcgcccttccgctgccgcaccacctgcttataaaatacaccaaagagaatggtgccgctccgcatataccgccacctgatcccgcagctggcagctgcagccaggtcgctctccgcgcccaaggtcgccgcctccgcctcctgcgctccccgcccgatctccccgctgccggccctcgcaatggcggcctacggcaccggcgcttgcgccgacagcaagctcctcttcaggcagctgttcgagaaggagagctccacctacacctacctcctcgccgacgtcggcgaccccgagaagcccgccgtgttgattgaccctgttgacagaacagttgatagagacctcaatcttatcaaggaattaggcttgaaactcatctacgctatgaatactcatgtgcatgctgatcacgtcactggaacaggactaataaagactaagctaccaggagccaagtctgttatctcaaaagccagtggagcaaaagccgaccattctgttgagcacggggacaaaatatactttgggaagcttttccttgaggtgcgagctactcctggccatactgctggctgcgtgacttatgtaacaggtgatagtcctgatcaaccctcaccaaggatggctttcactggggatgccttaattatacgtgcatgcggaaggacagacttccagggaggaagctccgatcagctgtaccaatcagtgcattcacagattttctctttaccgaaggataccctgctttatcctgcccatgactacaaaggtttcccgttacctcccgtggaaagggagtttgcttatattgcgcgccttccaagagataagggaactttcaagacgatcatggaaaacctgaacctgtcttacccaaagatgattgatgtcgctgtacccgccaacatggtttgcggcttccaggatccaccatcgaaggtctgaggtgttccagctgaagcagctttgcaagtggcggtgctcctgctcctggttgttgtgaagtcaagatcagatagagagggcttgcggctgcgttgtacatgaaataatttgtctgcgttgtacattaaataatttgttggctgcaacattggctgatgcggcctctgtctccgtttgacttcaccgtctgttcatcatctatcaacgagaagaaggcagtttgcttgcccttcacctcacctctgcaaatacaataccgtgccccttcacaggcaaaaaaaaaaaaaaaa

SEQ ID NO: 4495 - DNA, 948 bp, Triticum aestivum
  Clone ID: TRIAE-23APR03-CLUSTER244_217
aatcgaccatctccggctcgctcgtcgcccacccccaccctctcatcctccctccctcccccgaccgattttgacgactcctttgacctctcgcgctgtccctcccccgccccgccccgcctgcgtcgccgcgccaagctccaggcgcccccgccccctggtcggtggattccatggccaacagcaacctcccccgccggatcatcaaggagacgcagcggctgctcagcgaaccagcgccggggatcagcgcctcgccgtcggaggagaacatgcgctacttcaatgtcatggtccttggccccgcgcagtcgccctacgaaggtggagtcttcaagcttgaacttttcttacccgaggaatatccgatggctgctcctaaagttaggtttctcacaaaaatataccatcccaacattgacaagcttggtagaatatgcctcgacatcctaaaggacaagtggagtccagctcttcagatacgcactgttcttcttagcattcaggcactgctgagcgccccaaacccagatgatcccctctcagaaaacgtcgcaaaacactggaaatccaatgaagctgaagctgttgagacagcgaaggaatggactcgtatgtatgccagtggcgcatgacaagctaacgcctgttatggatgtaataacaccgtgtcatagttgggcctaatcgaaaaccatttgcttgataaaaacacacttgaaatgatttgcgatggacgaatgtatccagagtggcatcatttctagttggtggttgtatttgtggtgcgtgttctggcacgcttcataacttgctgcttatagaacatgctctgtttctcgttcatcttcaattgtttctccaattaaaaatatctgttatgatccgagtatgtaatctctccaaatgataatagtggcctctgtttgtatttctccccaaaaaaaa

SEQ ID NO: 4496 - DNA, 1714 bp, Triticum aestivum
  Clone ID: TRIAE-23APR03-CLUSTER244_223
tccaagcacccatcccctcacctcacctaaaccccccgcaaccttaacccatccccaccgccagcccccagccgtgtccccaaccccaaatcctcagatccgcctccgctcccccgagcccaagtccacccctccctccccaccgcggcgcgcacgcacgcacccggccaccacccacccggatccagatccgcgcggcggcggcgcaggtcagcaggagggagcgatggccggcggcgggggcgccggcggcttgtcggagtcggtgatgcggaaggtgctgctgtcctactgctacgtggcggtgtggatcttcctctccttcgccgtcatcgtctacaacaagtacatcctcgaccccaagatgtacaactggcccttccccatctcgctcaccatggtgcacatgagcttctgctcctcgctcgccgtcgggctcgtccgcgtcctgcgcgtcgtcgagccgccctcctccccgcccatgacgccgcagctctacacctcctccgtcgtgcccatcggcgcgctctacgccatgtcgctctggttctccaactcggcatacatctacctctccgtctccttcatccagatgctcaaggcgctcatgcccgtcgccgtctactccatcggcgtcctcttcaagaaggagaccttccgctcctcctccatgctcaacatgctctccatctccttcggcgtcgccatcgccgcctacggcgaggccaggttcgacctccgcggcgtcgcgctccagctcgccgccgtcgccttcgaggccacccggcctcgtgctcatccagatcctgctcacctccaagggcatctcgctcaaccccatcacctcgctctactacgtcgcgccctgctgcctctgcttcctgctcgtgccctggatcttcgtcgagctgcccaggctgcgcgccgtcggcaccttccagcccgacttcttcatcttcggcacaaactcgctctgcgcctttgcgctcaaccttgcggtgttcctgctcgtcggcaagacctccgcgctcaccatgaatgttgcgggagtggtcaaggactggctgttgattgccttctcctggtccgtgatccgggacacggtcacccccatcaacctcttcggctacggcatcgccttcctaggggttggctactacaaccatatcaagctgcaggcgctcaaggccaaggaggcgcagaagaagtccgcgcaggccgatgaggaggctggctccctgttgcaggagcgcgatagccacagtgatcgcaagagcgagaaccaggcatagagctccagatcagatccgggcatgcccacattgggaatttggtgcaaagtgcaaagactatagtttggtytacagttgctttcaaggaggtggatgccggttytggtttatytttttaactttagttggatytgaggagcaaaccaaggcaatttgttgatytaggaaatacttgcatttgaacctgtttytggagggttagaaggaacacttatattaccctgttatttatttttgsgtttttgttytgaaaggcggccttgcttcctytytcgctcattccatatttatttggtcgagtagcctaggtaaaaatgtactgcmcattggtatcatttcggtgggtatcatytggtggttatcatctatatataatgagcttactgtaaactatattcaaaaaaaaaaaaaaaaaaaaaaaa

SEQ ID NO: 4497 - DNA, 1826 bp, Triticum aestivum
  Clone ID: TRIAE-23APR03-CLUSTER244_234
ttactagcgagtagcgagttgccagtggccagagggtgggtgtgaacagtgagcaagagtgtgccaccgcgtcgtgcgagcgcgcgagcggggtttgtcggtcggccgcgagatggccgcgaggtccgcggtgctgctgctgctcgcgctggtggcggcggcgtgccatggcgtgggagccgcgggcgcgggggcgtcgccgcgccggcccaactggctgggcgggctgagcagggcgtccttccccaagggcttcgtcttcgggacggccacgtcggcgtaccaggtggagggcatggccgccggcggcggccgcgggccttccatctgggacgcgttcgcccacgtcccaggaaatattgcgggcaatcaaaatgcagatgttactacggatcaatatcatcgctacaaggaagatgttaatctcatgaaaggattgaatttcgacgcctatcggttttctatctcatggtccagaatcttcccagatggtgacggaaaagttaacaaagaaggcgtcgcgtattacaataatctgataaactaccttcttcagaaaggcattactccttatatcaatctttaccactatgatctccctcttgcactcgagaagaagtatggaggctggttaaatgcaaagacggtgggactatttgcagactatgctgacttttgttttaagacctttggcgatcgtgtaaagcactggtttacattcaacgaaccaaggatagttgcgcttcttggttacgatgtagggtcgaatcctcctcagagatgcagcaaatgcgctgccggtggcaactcagcaacagaaccttacatcgttgctcacaattttctcttagctcatggttatgcagttgcaagataccggactaagtatcaggcagctcagaaggggaaggttggaatagttctggacttcaactggtatgaggctcttaccaactcaactgaagaccaagcagcagcccaaagagccagggacttccatgttggctggtttgtcgacccgctaataaacgggcattacccacagataatgcaagaccttgtgaaagagaggttgcccaggtttcactcccgatgaagctaaattggtcaagggctcagcagactacattgggatcaaccagtacacggccagcctcatgaaggggcagaagttgacgcagcagacgccgaccagctactcagccgattggcaggttacctatgcctttgagagaaatggcaaaccgattggaccaaaggcgaattctaactggctttacatcgtcccgtcggggatgtacggatgcgtgcactacctcagccagaagtatgggaaacccagctattgtcataaccgaaaacggaatggatcagccggggggcctcacccgcgaccagtacttgcgggacgcgacgagggtccggttctaccggagctacctcagcgagctgaagaaggccatcgacggcggcgccaacgtcctcggctacttcgcgtggtctctcctcgacaacttcgagtggatctccggctactcatccaagtttggcatcgtgtacgtcgacttcaacagccccaccctggatcggcaccccaaggcgtcggcctactggttcagagacctgctgcagcactgatatatatggagtgcttctgaattacccaaccatcctgatgttgtcatcatcttgctgagtttatgcctactgttgttcgaatggaaccatatgcctactgttgttcgaatggaaccataattcagacttcagagcatgctttgctctaccaaatgagaataaaagttggcatgatatttgagtgttgc

SEQ ID NO: 4498 - DNA, 798 bp, Triticum aestivum
  Clone ID: TRIAE-23APR03-CLUSTER244_240
aacatcctattgaaaaaaaaaccacttcaacctccacagctcagcttccacccactctcaaaccctctcgccggagcccccagcaagccagcaagcaagcaagatggacggcagcaaggcgaagaaggtggcggcgaagaagttcggcgggccgaggaagaagtcggtgaccaagtccatcaaggccgggctccagttccccgtcggccgcatcgggcgctacctcaagaagggccgctacgcccagcgcgtcggctccggcgcccccgtctacctcgccgccgtcctcgagtacctcgcagcagaggtgctggagctggccgggaacgccgccaaggacaacaagaagacccggatcgtgcccaggcacctgctgctggccatccgcaacgaccaggagctcgggaggctgctgagcggcgtcaccatcgcccacggcggcgtgatccccaacatcaacccggtgctgctccccaagaaggccgctgagaaggctgagaaggccggcgccgcccccaagtcgcccaagaagaccaccaagtcccccaagaaggccaccaaggcctagatccggccgtgccggtgaactgatggtgctccggcagccctcgtgtgcctagtgtctctgtgttaagttagctatggtgtgttccagagagtgttgaagcttgtccttttgctttgccccaccatgtaaccgtgaacgaagaggaagcgtcttgcttcctctgttcttctgaatccatctggtgtctaatgcagtgtttgttaaaaaaaaaaaaaaaaaaaaaaaaaaaa

SEQ ID NO: 4499 - DNA, 2038 bp, Triticum aestivum
  Clone ID: TRIAE-23APR03-CLUSTER24516_1
ccccctgcgccgggctcaaacccctagccccgacgaacccaacctagggtttccgcttccagcatgccccgctgctgacctactaacttccatggcgctggcatccttgtccctgccatgaacacggacgcacaactccgctttaattgccgcaagcgctgcctaccggctgacggtcgcctcgacgaccactggcgcggccagcagcgcaagcgccgcggcgtccgcgtcctcgttcccgactgcttcctcgtgcccccgccggaagccaaatccgctgatttcgacatgtggtactacatccgcagcatcccggacatgtgggacaacggcctgaggctgctcaagggctgggtccgtgcgtccaaggatgtgccgcaggatccgtcggatctcacgtgtctcaccaagaacaacgatgtgaagccagggcgcgtgctggccgcggggaattggaaagtagatgaccccgtgaaggtcgccttgaaggcggcggcgccgcctcctcctcggcgggagaaggtgaaaccgtattggaagtatctccacgaggagacgagacataatgacaagagcttgggcgagatcgacgcccgggtggctcttctggagaagacgctcgaggagcagaggagggtggctcttctggagaagacgcttgaggagcagaggagggtggctcttctggagaagacgcttgaggaacagaggagggtggctcttctggagaagacgcttgaggagcagaggacgctggctgagccgcctaaggaggatctgtctcaattctttgtacctttaactgctgaagatgaaaaggaagttcaggattgtttgtatggtaatggttcaagtagcaaagtcctggtgctgcatgaaccgtctaacattgaggttagcagggaaaaatttcggtgtttgagaccacatggctggttaaatgatgaggtcattaatttgtaccttgaattgttaaggagaggggaatgagagaaccaaaaaggttcttgaaatgccatttcttcaatacatttttttataagaagcttgcttgtggaaaaactggatatgactacaaatctgtaaaaagatggactacctccaggaagttgggttatgagctcattgaatgtgataaaatctttgtccccgtacatcaaaatgtgcattggtgtttggcaattataaacatgaaggcgaagacagtacaatatcttgattctcttggcggcgatgattttcgtgtatacgaaatgctggctagatatattgtggatgaagtgaaggacaagagtaataaagagattgacataagttcttggaccaaagaatctattgattgtattcctttacaagagaatgggtgggattgtggtatgtttatgctcaagtacattgatttccacagcagaggagtcagcttatcttttggtcaggaacacatggaatactttcggaggagaacagctaaggaaatcttaagactaagggctgactaagtcttctctttggaaaataaagacaattaagttctgcaaatattaattattgggccattctccaaaactgtgccttcactcttggatgttgctggcaagggtagaaaatgtccattcccctgagaaactgaagagttgccgaccgtgacctataactgctggcgttgaaggatgcagatgctaacaaatttctgtaaagctcttctatatatggatttgattggcaggagcaggaaaaaggaaagaaatcttgaataggggtttgagatttttttttgtaacttagagaagcctagtattaaaccagtggcatcttccttctgttaactcgcttttgtttcagagttggagaaattccttttcctgttttgttagcttcgatggcaaaaaattctgaagttttggtccgtgtaaatttctgtatctattcaccgcagtgacatttgatcgcgaaaaaaaaaaaaaaaaaaccttagtgccacccctgggggccccggacccattcgcctcaaaataataaccttaaaaacaaataattg

SEQ ID NO: 4500 - DNA, 1686 bp, Triticum aestivum
  unsure (1)..(1686): unsure at all n locations
  Clone ID: TRIAE-23APR03-CLUSTER245201_1
nctaggggancccnnggnntgcgagnatncgcnngaccattacctagaacatccaaatcgaaaaatttctaagaaaagaggtctcctgaactaaaaagaagcccttctctctcctccaaccgccggtggtcgctccgtcgctcgccatggcttccgggtcctcggccgccgcacgtcgccttctgctattgcgccaccgccgccgccacctcgttcccaatcaccacttctcttcctcctcggcggacgaagtgctggacgggggccgcgtcaagatcttcgatcgcgatctgaagcgccgacaccgggaccgggcggcgtgggcgatgcgggaaactgacccactggtagacgcggtcgccgataacctcctcgaccgcctcgaggactgcaggaaggcgttcccctcggcgctctgcctcggcggttcggccggcgccgtccgccggtcgcttcgcggccgcggtggaatcgagaaattgaccatgatggacatgtcggtagacatggtgaacaagtggcgggagttggagagtgctactgacgacggccccgagatgaactttatcgttggagatgaagagtatcttcctatgaaagagaactcccaggatttgataatgagctgtcttgggctacattggacaaatgatctacctggagcaatgatacagtgtaggttggcgttgaagcctgatggcctttttcttgcagcaattcttggcggggagactctgaaggaactaagaattgcatgcactattgctcaaatggaacgtgagggaggcatcagtcctcgaatgtcgccattagcacaagtccgtgatgcaggaaaccttttgtcaagggcaggcttcgcccttccaggagttgatgtagatcgatatacagtcaagtacaatagtgctcttgaacttgtggaacatcttagagcaatggcagaaacgaatgctctctttcaaagaagccatatattaaagagagatacagcactagctactgcagccatttaccagtcaatgtttgggttagaagatggaaccattccagcaacctttcaggtaatttacatgactgggtggaaggagcattcatcacagcaaaagcctaagagaaggggttctgccactgtatcatttggtgacataaggaaacaatttggttccaaccaagactgaagaactttatcagctatgaaaacatctctcgaggaaggaaaaggaaacccctatttgctcacaacagaacttggggtttccgaggcttcccatttgtggaaaaagtgtactctgttggttcccaccaagattcgcggaagcgttccttgcatcgcacacaatcctcctcctgtgcatctgggttgatctcgacacgccctgaaaactggaagcggatcatggagtggaagaaggagatgctatatatttgtactccgaccctagcctacgtgtttccactgtatgcaacaaatatcccatcacatggaaaatgatatttttgtagaaaaaatgttgtgatagctttcgccaaatctcattgaagttctaactgaaacttatttgctttgagttgtgaacttatttggtttggagaccttttatgttacattgtgagacatgctatccctatctatctatctatctatctatctatcaaaaaaaaaaaaaaaaaagcttatcgataccg

SEQ ID NO: 4501 - DNA, 1297 bp, Triticum aestivum
  Clone ID: TRIAE-23APR03-CLUSTER24532_1
aagtagtagcaacgcaatagtacgaaacaaaaacttcaggacaggaagagggagggagggagagcgagcgagggaggctccgtccatggccgcggcggcggaggaggcgtccacggcgccaaggagccgcccggaggaggaggaggaggaggaggcgatggcggtgctggacttcgacatgctctgcgcgtccgtgggcatgtcggcggagaggaggaagggcgccggcatggaggcggtggcggcgtgctcgggcggcgccgagagcgccggcggaggaggggtgcagaggatgtgggagggggacgtcgtgattgattgcttggaggaccggcgaatcgcgctcgaggccgcctgttgcccatgctataggtttggcaagaacacgcggagagccaatctcggatcttgcttccttcaggcaatggcttacttcatttcattagttgctgttctggtcagcttagttgccagagcaggagcaaggaatcattcagtaccctggcacgattcgaacagaacaggtgggtctcccatgcgcaccgtcgattcggggaagaatggggaaacacagcggttcccgcggcgctgatggcagccgccctgtctgtctccgccatctgatatgtccttgttgtaccctgtgccaggaggcgagaactttagagatgaataatgtccagtgtggtgtctggcacgggcggggtgataccatttgtttagggagcaacggtgaaggaaacaaggccttcgctgctctacacaaatcaccatttgtgcttataaaatcccccgagttgtgtggcatggacagaatatcaagtggtgctgatgaacatcagccgctcgtcccatcagcgcaaccagagcaggagtaaggaattattctgtaccatggcacaattcgaaaagaacaggtggatctctcctgcgtgttatcgaaagggaaaataaagggaagaatcagtggatccctctgcgacgaaatcatcagccctgcgattctctgcctgtttgttgtatcaagtctgaagaactggtttggcagcaacccatgtatgttgatggtgggcgtaattggcctgttgttgtaaacaccacagcaataatgttcatcatgcaccggatgtgcatatgtgtcatgatgctcagggcttatgtctgaatccaagtgtaaaattctgttgatgcaacgatagttggcgagattgggcatgaatggaatcaaatgttctgcttctttgatgtttcttgtaaaacttgccttccggtgctctctgctaacatcatttacctt

SEQ ID NO: 4502 - DNA, 1093 bp, Triticum aestivum
  Clone ID: TRIAE-23APR03-CLUSTER24655_1
aacactaccatccttactcatcactcaccactcatcatctcccctccgcgtcaccggcgtgcgtgcgtcctcagtttgctccagttcagttgagttcaacagtttgcttctcgctttccctcccgtgatggcacacgtcggcgtcccctggccccagctcgtccgcgccggagcctcggcaatgggcccggcggtggcccccgggctggggtccgcggcgacttgagctggcctgcaaggtgcctctgcgtccgtggcgacgtgcgccttcgccggcggtgggggtcgctgggcgggggggtgtccgggtcgctgatcgggctggcgtcggggggggcggtggcgcggggcgccgccgcgccgccctctcccccgcgccggccgctccatcgcgggcgcccaatcgccccagcacctcctcgctcagcagcgacctcttcgtcgtgggcatcatcctcatcgtgctgagcagcctgcggctccgtgagcaggtggggcgggcggtgcagagcgccgtgcagagtcagataagcgccatcagctcgccgttcacggagcccagcgacctgttcgagaccggcggcgcgagagggctgccggcgcacgcgctccggcggctgccggcgatcaaggtcggcgcggacaccgcggtggacgaggccggggaggcgctctgctgctcggtgtgcctgcaggaccttgaggtgggcgagtcggcgaggcgactgcccggctgccggcacgtcttccacgcgccctgcatcgaccgctggctcgtcaggcacgcctcctgcccgctctgccggcgagacatctgagcccggccgggcaccgccggccggtcgatcccctgcctgtaattaaattaaatcgccattgctcgccgtgcgtcgggtgcccgtaaggggaccggtggcaaaagaggccacttgtgtagcgatgcgtgaatgaattgggaatgtggaattgtggataagaaagaagaattgttcggggccgaaaaaaaaaaaaaaaatctggcttcctactacacttgaagatagtttgcacgttctgatttattgcgcgcacacgaactcccgacccggccggc

SEQ ID NO: 4503 - DNA, 1369 bp, Triticum aestivum
  Clone ID: TRIAE-23APR03-CLUSTER247449_1
acggtcggctcgcaccaactgccccccacccgatccctctctctccctcctccgcggcgcctcgccgtccgacgagatctcgcccgccgctccccgccggccatggccacgcggaaccggacgccgctcttccgcaagtaccgcgacgcgctgcgccacgtccgcgcgccggccggggcgccctccgcctcctcctcccccggcggcgggccggcggtggtcgagatggcctcgctgctgcgtcccgaccgcaactacgcgcccctcagcaccgacgacccctccgcctcctccagtagaggcgcggcgatggttgggctgccaccggcctgggtggacgtctccgaagagatatctgcgaacatgcagcgggcaaagacgaagatggccgagctggctaaggcgcacgccaaggccttgatgccgtccttcggcgatggcagagatgatcagcgagcaattgagattctcacgcacgagataaccgacctgctgaagaggtcagaaaagaagctgcagaagctgtccatgaaagactcctcagaagattcgaatgtcagaaagaatgtccagcgttcccttgctacagacctgcaaactctttcgatggagttcaggaaaaagcagtcaacttatttgaagcagcttcgccaacagaaagaggggcaagatggtgttgatttagaaatgaatatgaatgggtctaagtcgacgtttgaacttgaagatgatgaatttgaggatgtgggtttcactgaggttcagatgtcaaaacttaagaaaagcgaagcgttcactagagaaagggagagagaaatcgaacaggttgcccaatcagtcaatgagcttgcacagatcatgaaggatctttcagttcttgtgattgatcagggaacaattgttgatcggatagactacaatgtacagaatgttgcggcctcagtcgaagagggctataaacagttcaaaaggctgagaggacgcagaagaaagggggcatggtgatgtgtgccactgtcctggtcattcttatcttcatcctgataatcctcctggttttgaagaagatccttttctgacttagccccctcttcttacggtcgtcgacgaacgccttccaagtgaacgccattcacatatactcttatgtgggtagcgactgtgcagtgccgtcgcgttggaattcaggaaagccgctgcccatttgcaccatatgcaatacgatttagcgatcccaaaagatggttcatccgcctgtgttaatagtggctgggccagcagctcccttgagtcttacacattttttgcagcactgctgagtgtagagatgtcgtattcatacgggtaccaatttttttttaaagtgaag

SEQ ID NO: 4504 - DNA, 2230 bp, Triticum aestivum
  Clone ID: TRIAE-23APR03-CLUSTER2474_1
aaaccgcgctgccctattgtcctcccagttagctcggcgggtcccccaaacctcccctcgcatccacccccggactcccgcccaatacaactcccgcctccacccaaatactccaggaaacaaacttcgaacgcccgcccaagaagcggcgccggcgccatgggggatcggccaaagcttcctgcccggtacgagcaggtgaagctgctcggcgagggcaatttcgccaaggtcttcctcgcgcggcagatggatacgaaggaggaggtcaaaattagcgtcttataagaggataagcacaacaacgcggacagacggagcagaagacagtcatggataaagccacggtggcagcaagagaccacatatttagacattcattgctaaatacactacatactggaaacttgcgaataagctggcactagtctagcaagcggcagctgcacgcaatggcggagcatctagcttgatcctctcccttgtgcccctccagcgccttccatggggtagaagctccaaggtctctggttgatcactgcttggctttccggctaccattgcgagacctctttcggctctccttggagccgccaggcttcggttgggtagaccgggcgttaggaataggcacacgatgctcactagccaaagcagggaaaccagcggcagggtttccgaaagtacggcagactcctgcatggctgtgtgagcaccaataggcctatccttcaacatgttctggcgcagtgccatgttctcagctgcgcagcactgaagtgcgtagctgaggcggcgacactccgcctcaagatacttgctcttcgtctccaagtccttcacatatgacttcttcctctcccttgatttcatggcagaatccctattcctcatttgcctcctcttcttcttgctgatgggatcatcgccatcgacctccgtttcgggcgtcaccacctccgcctctgtctccggcgtcaccacctccaccccttcttcctccctcctagagtccccatcggtgctgcccccagcctcagcctcactcccgttccccttctcgcccccctcctccccaccatcgaacagcgcgtcgaagaactcatccacgctgatcccgtccaccggctccgcccccgccgcctcgtcctcctgcatcagaaacctctcgatctccgacagcacctcctcgccggcggggctggaccgggaggtcaccgactccggcgaccccgcctccgccgcatcgaacggagcggggcgaggagctaggagactgcggaggactcgccggcgaaggaggggagaagggcgtccaggtcgaggtcggtgtcctgggaggggtgggatgctatttttgaagccgacactcgtgcaactaggcgccgctgcacgcaatagaggattccctgtctggatcctgtcccttgtggccttccagaaccgcacatcgagcagatgctccaaggtctctggagtcaccccgcttcggtttccggggcccgttgggaggactgcccgagccatccttgcatcccacagaatttgatgcggtagactggagtccaggagtacgaaaaactgctgcacgggtgtgagaggagaaatcagcttctccttctacatgttctggcgaagtgccatgttctcagcggcgcagcactgaagtccgtacctgaggcggctccactccgcctcgatattcttgctcttcgtctccaagtccttcacatttgacttcttcctctccctggacttcatggcagaatccctattcctcatttgcctcctcttcttcttgctgatgggatcatcgccatcgacctccgtctcgggcgtcaccacctccgcctctgtctccggcgtcaccacctccaccccgtcttcccccctcctagagtccccatcggtgctgcccccagcctcagcctcactcccgttccccttctcgcccccctcctcggcgccgtcgaacagcgtgtccaagaactcgtccacgctgatcccgtccaccggctccgcccccgccgcctcctcctcctgcatcagaaacctctcgatctccgacagcacctcctcgccggcggggctggaccgggaggtcaccgactccggcgaccccgcctccgccgcatcaagcggaggcggggcgaggagctcggagactgcggcggactcgccggcgaaggaggcgaggagggcgtcccgggccggggccgccgcccgccga

SEQ ID NO: 4505 - DNA, 947 bp, Triticum aestivum
  Clone ID: TRIAE-23APR03-CLUSTER24792_2
gctcccccttccgacagcaagtgcgagctactgagctctgctccgcccccaccctcccgtcgcgcgcgcggccgccgccgccctccctgatccgagacccagagaagccgtaactttctatctttggagcccattggagatctaagatcttgtatgttcatctggagatagcatgtcatgtctgaacaacaagatcatgttagtaaaagctccagctcaagcatcagcaccagcactcaagaaagcgaggaggaggtgtccgtaactatcggtagcctcctcgctcaagcaaggaatgacaaaggacatagtcttgggaggcgcctcttacatttgggttcaatcccgcatcgtccccgagttaatggagatattcctaatgttgataatgcaaccttggatcatgaaagattgttggaaaggttggggacttatggtttggccgagtttcagatagagggagatgggaattgtcagtttcgagcattggcagaccagatttttcgcaatcctgaatatcacaaacaagtgaggaaggcagtagcgaagcagctaaaggaattcaggaaacactatgaaggctatgtaccattggactacaaggtttacttgaagaaaatgaaaagatctggggaatggggagatcatgtgaccttacaagcggctgcagaccggtttggtgccaaaatctgcttgctgacatcgtttagagacacatgcctgatcgagatagtccccagggatgccgctcctacaagagctaaatacttggtgctcatcgaaccccgtcaccttctgcagagctttggctaagtttctggtgtgaagtacactacaattccttgtatgccaatgaagatcttccgactcgcaagaccaaaaagaagcactggctgttctaggtagggttcgccggtcgttggattcaccactcccccctgattctt

SEQ ID NO: 4506 - DNA, 1685 bp, Triticum aestivum
  Clone ID: TRIAE-23APR03-CLUSTER24890_1
atatactggtttcttccaccgtcggtgacctccaagcccacaaatactggtttcttccaccgtcggtgacctccaagcccaagcccaaaccccaacacccgcgcggctcccgccgccgccgcaccggagatggcggcgtacctgagcatgggcgaggcgcaccgccgcatcgctgactacctctcccgcttggacgacgctatctctcagtccgacggcgccgacctcgcctctctcctcgccatctcctcggcgcccgcctccaccccgctctccgacgcgctcgccgcttttccggattttccccgcctcgcctccgaccgcttcccccacctctccgacttcctccccccgctcctccgcgccatccactcccactccctccgccgcttcggggacgcctactcctccttcgagaaggctgctagcgcgttcctgcaggagttccggaactgggagactccttgggcgatggaggcgatgcacatggtggcgcttgagatcaggctgctagctgagaaggcagacagggagcttgtgatgagcgggaagaacccagacaagctgcaggctgctgggtccttcctgatgaaggtttttggggcacttgcggttaaaggacctaagcgcgttggggcactgtatgttacctgccagctgtttaaaatttatttcaggcttggtactgttaacctttgccgtagtgtcataaggagtatcgaaacagctaggaattttgattttgaagattttccagtgaaagataaggtcacttatatgtattatacaggtcgcttggaggtgtttaatgagaattttcttgttgctgatcagaaactaacttatgctttgatgcattgtaatcctcaaagcgaatcaaatttgaggaaaattttgaagttcctaatccctgtaaagctgtcaattggtgttttgccaaggaggaccctcctggagaagtacaatctgcttgagtatgcagatattgtgacctcacttaggagaggggatctcaggctccttaagcaagcccttgatagacatgaagaccagttactaaaatgtggtgtctaccttgtgttggagaaacttgaactccaggtctaccgaagattagtgaagaaaatccatatcatacagagggagaaggaaccatcgaaggcgcatcaaatcaagctagaggtcttggtaaagactctgcaatggcttggaatcaccatggatgtggatgaggtggaatgcatcatggcgtgcctaatatacaagaatctcataaaaggatactttgcccacaagagcaaagttcttgtccttagcaaacaagaccccttcccaaagttgaatgggaagcccgtttagttcgcagcgatacctcataagcttgtacacctaatggaagtttctcttatctttgatgtacggaacatgacaggtttatgtaaaattaccgcgactctgattgtaacaacatttgtattctagctgcaatgtttgtaaacatttatggttggtagcctccacttaaacggtggttttcatagcttcagtgaggtacaatattgtattctggataaactaaatttgcagactgcaattaaggccatagtaaaaaaccgaactaaaaaaaaaaaaaaaaatatctccccccccaaccctcgagggggggcccggtacccattcgcctc

SEQ ID NO: 4507 - DNA, 1577 bp, Triticum aestivum
  Clone ID: TRIAE-23APR03-CLUSTER24906_1
ctcccccccccccctcccgctccaatccaatctcgcctcaccttcctccctcccacttcccgccggcggccccccccgccgccgagcttctttcgtggagcggcggagccgggtcactgttcttgccctggtgctgcttctcccctccgcatgtcatgggagtggagcgttcaatgtgacggcaacagagcggaatctatgttaggagcctgcgccggagacccacattgtggcatatgcttccgcagcgcagagcttagttgcagctgcattgtctgcctcgatatgtcctagatgtaatgacttgaccatggatctggacacgtggtacctgtcattatacggggggacaatgtgacaggcatttgtcggtgtagctcacaatctaaatgccataatagttgcaatcagaaggactcaagagaacagatttgcttgctcagtgcgcagaattggatcaaggactagcaatgtaagcagcttgatctaagctatctcgacatgccaaaagcaaaggtgcacagaggagatttctcctacaaaacaaacaccattattgcatctagctatcacaagtgcagtgcacaacgctagaatgtcataaggggatatcggtgaaatagtcacagggcactcaatgggaggagcaaaggctgctttctgtgcactcgatcttgctatcaagctcggaagcgacaatgtccaacgcgtgacttgccgtcatggtcgcgtgggcaatgctggtatgagctatgactttgtcaagtgtactcgaaccagctatcaagctcggaagcgacaatgtacaactcatgactttcggacagcctcgtgttggcaatgcaatcttcgccaccacctttgccaaatatgtgccaagcacgactcgactggtacacgcacaacggaacgtgcctcatttgccagcggatttgacccaaactgctgcaggggcgtaccacatcttcccccgagagcattcaggaccattttcacatacctgcgaaatagacatggaatcagatgactggagcacctgcagaatcatctcagtacaaagcgttgagcgattacgtaaggatctcgtcagcaacatcatcatgacaaagcacggggtcgaggtttccattgtcgagaatagcatgcagacagactggagcagttccagatagcatacagtattgttaacaccaatttagtgcagaagatggcgccttttctttctcttgaagaaggggggcttcagttggggaatttcattcagattgggttgtacattgttctttcatagcctgtgaatatgtaggaatgtagacacgaattataggctctagagtgtaaactcttgtcggatgcacgaaagatccgtctctgtgtttgcatcttgtaaaaaatacaattcccatgcagatatctatgcagatgtctccaatctgggaaataaagcagaataaattgagaacattgccatggaagaaaaaagtaaaaaatacaatacccatgcagatatctatacagatgtctccaatctgggaaataaagcagaataaattgagaacattgccctgaaaaaaaaa

SEQ ID NO: 4508 - DNA, 752 bp, Triticum aestivum
  unsure (1)..(752): unsure at all n locations
  Clone ID: TRIAE-23APR03-CLUSTER249322_1
gatctcaatccgaaagcgtagncagagggaggaagatttgattttgggggaggattgatggcgcgaagcgtaccgtacgtgtcggcggcgaagctggtgtccatggcgcgggggaaccgggtggccgtcatcgacgtcagggatgaggagaggagctatcaggcgcacatcgcggggtcgcaccacttcgccagcggcagcttcgcggcgcggctgccggagctcgtgcaggccaccagcggcaaggacaccctcgtcttccactgcgcgctcagccaggtgcgaggtccgtcctgtgctcggatgttttcagactatctatcagagtccaaggaagattcggggataaagaacatcatggtgcttgaacgtgggttcaatggatgggagatttctggccaacccgtgtgccactgcaaagatgctccttgcaaaggcacatgctcttgatcttctggattaccatctggtccatttatactcagcttttgaacgatctgcaattcagcatcgctgctgagctggtcctttctcattgagatgatgatgcataacaatccattgaattccgcaatggcatgtctttaaacatttcatttacaaatatatgacacgtcttttttccagatgatatatgtacatggtatacctaaatataccttgtgcgaaaaaccttctttaaatgtaccggggtggttgtagtggcctggaccagggagctgggcgtgtttgcttttgaagaaaaaaaaaaa

SEQ ID NO: 4509 - DNA, 2175 bp, Triticum aestivum
  unsure (1)..(2175): unsure at all n locations
  Clone ID: TRIAE-23APR03-CLUSTER24940_1
acagttcattagagtcacctcccccctaaaacccaccttccgggcggaggcgaggaggagacaaaaccccgcgcgatgtccggagctcaacgccggggcgggcctacgggcaacggcgaggcccccgggggggggtgggagactatcgaggaaaaggaagaagtggggaaaatcatgtaggagagaagaaggaacaccggggaaaacctcctcaaatacaccgcctactacagatcacaaagctaaaaactacaaagaataacgctgtccaagattgaactgggaggagcatcctgatggtaggcaggctgatatgggttgtgacacgctggcatcacgcacgctgactaaggcaaagccatggcatccaccaaaaaaagctgtcatgaacccacagggaaaagacggaaggcgggcggcgaccaggagatcgcgtggttcaggtcgcggcaggagtaaagtcgaaagcctagcaactgtgatagggactacgggaaaagtggatgtagctcacgaaggaaggaacaggtaaagtggtccagagagtggcagggtttggacgtgcaatgatttgaggtttaaaggtacgaaatgataaaagcgcacgaggagcaaaaggtgcatgaaaagcaagagtacatggaaaaggaggcggatctcgctaaagagtttgacaccgccctggccggtttgctggagtaacagaggccagccagtttctgggacattaggaaaagccaacttgaattcacctgtaacttagctttgccttcggcattaagatagatagtgttcattgtaccttgctgggtgttcagaattttctatggttacttttagtcgaacgtccttgtgagaaaggtgggagcgggatcttttccacgagaatgcactgaccgggtggatagtatgaccaccaactggtcattgagcatgacaaccgtcttgaaaaagagtgaagatgataagtggttaggcatgggcaaccaagaacttcttgagtatttcagtgattatgctgcgaccaaagcacgccatgcatatggtccaggtgggcaccgtggcatgagtgtgctaatatttgaaagctctgctgtgggctatatggaggcagaacgtcttcataagcattttattgatcaaagaacagacagggacacttggcagaatcgcagggttcctttcttacctggtgggaagagacaattatacggtttcctagccagaaaggaagacatggagactttcaatagacactgccaagggaaaagccgcctgaaatacgagatgagatctcataatgagatggtagtggcccagatgaagcaaatgagcgaagataatcaacaactcaattatctgaagaacaaggtggttaagacagagcagcgctctaaagttgtagaagaaaccctgggtgttattacgcagaaacttcgagagactatggaagagaatatattcgtcaggagtaaagctaaagagaagcactctgagtatgaggaagagatgaaatcccaggaaaaattcttccatgatcagatagagaacattcacaaggccacagaagacaaggaaagcgagtttgagaggttgctgcaggaggagcgtgcaaaggctagacagtgtgatgtggattctgggactactgaaaatcgcaggctaaggaaggaacaggtacagcggttcatagagtgccaggttaaggacgtgcaggagtttgaggctgaaagggacgaattgataaaagcgcacgaggagaagaaggtgcagctgaagaaagagtacatggcaaaggaggtggagctcgagaaggagtttgatgccgctctcaccggtttgatggagaaacataggccaggcaccttccaggcctccagctccaggccgtgaagattcacagctatctgagatttgccttctgcataacgacatctaaagatgcaagaccatatgtggtgcatgattaggaatcctgaacttgatggaacatgtatgggtggttatatggccatgattaggaaacctgaacttgtctgagtgtcaagtgtcagtagcatgttttacaccactacctaatgactgcctggggagcaagtgtcgaatcccttgaacatgtttaactgtaatgtcatcttgttgtgctttatgtctgaacttcggtnctggcgggcg

SEQ ID NO: 4510 - DNA, 1140 bp, Triticum aestivum
  Clone ID: TRIAE-23APR03-CLUSTER24979_1
gattccactccgcatcgcgtagaagaacgagccgagcgcaagcgagctaactcacgtcaccgggcagaacgacgcgcaacacccaaccacctccccgtcccctactctcatcctccccgaccgctctcgacaccatcctcgcgcgccggagcgcagaggcaacaagccaggccctgcgcgaccccagcgctgcggcgcccgcgccgccgaggacgttcggcagtctgtgagtcgtctgcggcaccaagtccgggaatcgcggcggggttcggcgatgcggcccacgggggcggccagggggctggggaggagcggggtcggtctggggctctggatggcgcatgcatcggcttgagggggctgcccggcccgccggttctggtatagatggctgctgcgtcctgggggtgatgccaagaaggtctcagacctctagagaatatctggcgcgagtgtggggaaagtaaagatagtccctgacactcatgggaggaaatgtgagatggggggacatgtcgaagcgttcaatgcgctcccaggagggaatgcatgaatggaggagtggttagataagatcccatgggcgctgctaggcgtcgatggcaatcttgttcgcttgctagacgtcgacgggtactatgatcggttactcgcgctgttcggcaagggcgcggcagaaggttttattaaggccgaatgcaggccgataatcgtgtcggcgccaactgcccgcgaagtgctgacgaaaatggagcaatacacccgttcacaccggaaggtggcgtcgcggccgagctggaagctgaccgagctgggctacgggaaagctgcgccggcgccagtggagcaggcatcgtcctgatgtgtggcaggcgtcgtcgtcccgggttgctcaactggcctctgggtttgcaattgcaataatcgtagtgtgttgtggttttccgttgttggttgcctttcatgtaaccctgtacgttggactgcgacttggtctggcgaagaagcctaagattgtgtatcggaatgaatgcagcggcgtgagcaaatgctgactgataaccaccaacgtcagaactctggtgaagtgaaccgatcgggcagtcgttttcttgggtgtgaatgaatgattgtgcatgc

SEQ ID NO: 4511 - DNA, 1801 bp, Triticum aestivum
  unsure (1)..(1801): unsure at all n locations
  Clone ID: TRIAE-23APR03-CLUSTER25044_1
gcacacactctccgcgacaccgtaaaccccggcccctccggcgattccccactctctcagccccgatccactccccggcccccccgcgattccccaccctctcactcccgatccacgcccccgccgccgcagctcgccatggcggccgtcgacgacgcccagggcacccgcccgctggcaggaggcctcggtggtcgcgtagatccgcgcgaccccggcgctggctgggcgccggggcggccgcgtcgccgcccccgcggtcacggcggccgccgacgggaagtccaacttcatctactgcggcacctccgacgcctggtcggttgtcgtcagatagcgactgccgtacatcccctgcgtgcgtccctcgtgggcgagcacgggggagcgtgcctacttcgaggccccggcgctgccggagtaggccgcgcctttgcccggaccacgtcccggcaggtctaccacttccgaccgcgccatgtcgctcatcgggatgcgctacatcaaggaccgccccacatcatcctccgtaagggactacatggccaagaccctcttcttcacctccctcctctacaactccaccaccgagcacaagaagcaagttgctcgctactgcgagaacgtggagatgtgcaggctcacggagcaggtcgtcttctcggacccatacatggtctccaaatacaatcgctggaactcgccattcctcgacaaggacgccgaggcggtgcgagaggatgatgggctgaagttggagattgctgaattgaagtcgatgtttatcgagagagcccaggccctgattcatggagatctccatactggttccatcatggtgaccccagattccactcaagtgattgatccggagtttgccttctacgcgccgatgggttacgacattggggccttcttggggaacctgattctggcgtactttgcacaggatgggcatgctgatcaaacgaatgaccgtaaagcttataagcaatggatattgaagaccatcgaagaatcatggaatttgttccagcagaaatttttgggactctggaataaacacaaagatgggaatggggaggcatacctgcctgccatatacaacaacccggagcttttgagcgttgtacagaagaagtacatgacaggtctacttcatgatagtcttggatttggttcagccaaaatgatcaggagaattgttggaattgcccatgtcgaggattttgactcaattgaggatgccagcaagagagcatcatgtgagcgccgtgcgcttgattgtgccaaggcaatcctgaaggggcgacgccaatttgagagcatcgagcaggttattgtgcatgtccaatcagtaaatcatgactgagaaaaccagccgtctgttctgcgtttccagttgaggagacctcggttgattgttattgggattgagtacccacgctcaagtatcgagatgtgctgctctttgtaaaacatccatgggtcagtgtggcttatatgtattgtgtagtgggctgccttcagagatacctatacttgggtcgagaacatcctgtgtgtatttctagtgcaaggcaggctgccttgcagcatagctgcgagttgaataacagaatgtacaatgtatctcaacgttgtacaattatccatagatacaggcgcggtcgccaccaataaaaccctatctggggtaagggtttggccgtggtcaccaccaaataaaaccatatctggtaggttttgccaagcgaaaaaaaaaaaaaaaataaaaaaaaaacatcccnagggggggggc

SEQ ID NO: 4512 - DNA, 1838 bp, Triticum aestivum
  Clone ID: TRIAE-23APR03-CLUSTER25062_1
tttgatcccttccccccctccagatccattcctcccccagccccgatcccttctccctctccctctccctcttcagatacattcctctcccagccccaggcctcgctcgcctcccccggcgaggcgctagacagcttcagaacgatcccttctccctcttccagatccattcctctcccagccccaggcctcgctcgcctcccccgttgggacggagagagctcggaagggcagggagccatgggttcctgggtccttcttgctgtggttctcgggtccttggtgggagctgcgcgcggctccgagccgtggtcgaacggcacgcaggtctactccaccaatgccaactccggcagcggcagcaacggcgccttcgtcgccctcactctcatccagtccgcggccgccaagggagccgtatgcttggatggaagtttaccgggttaccacctacaccggggatctggatcagggtcaaacaattggcttgtcaatctggagggtggaggatggtgcaatgatgttaaaagctgtgtgttccgcaagggcagtcggcgtgggtcatcgaaccacatggagaggcaactccagtttacaggcataatgagtaacaggcctgaagaaaatcctgatttctacaactggaacagagtgaaggttcggtattgtgatggtggatccttcaccggtgatggggctgacgcggcttcaggcctttatttccgaggtcagcgtatttggcaggctgctatcgatgacttgatggcccaaggaatgcgttctgctagtcaggcccttctttcgggatgctctgctgggggtgcttctgccatacttcactgtgatgagttccgtggaatgtttccatcaaataccagagtcaagtgcctcgctgatgctggaatgttccttgactctgttgacattgcgggtcgtcgagaaatgagagatttgttcaatggcattgtgagattgcagggttctggaagaagcttgcctcggtcttgtacctctcgcatggataaaacctcatgctttttcccgcagaacgtgttgccaaatattcaaactccgacttttatcttgaacactgcttacgacgtgtggcagcttcaagagagtttggctcccagaacggctgatccccggggtctatggcaaagttgcaagcagaattacgcctcttgcaatagcaatcagcttcagtttttaaatggcttcaggaatgaaatgcttaacgctgtgaagggtttctctgggtcagggcagaatggggtgtttatcaactcttgtttcgcccactgccagagcgagagacaggatacatggtactcaagcaagtctcctcgtcttggcaacaagagaatcgcagaagcggtcggtgactggttcttcgagaggggcaacgccaagtacaccgactgcgcgtacccttgtgacggcacgtgccatcaccttgtgttcaaagggaggcatctctaatacgatcatatcctttgataccagcagctgaagtgctgaaaacccagcgagtgggtacaaccgaaaaaaggaaggtatagatagaagaagatgggtgcaagttggtggcttgcccggcgtccatcgcctcagatatgatagggcagggcctcacatgcaaacgcgatgaggtcctctgcgttattttagtttcatatatcgtcgattctttccattgccaattgctactccctcgatgtatctgaatatttgaaccacactggtgtataaccttacatgttcatgtattgaatgtggtaatatgaaattatgaataatgtgcttaaaaaaaaaaaaaaaagagcttaaaaaaaagc

SEQ ID NO: 4513 - DNA, 1650 bp, Triticum aestivum
  Clone ID: TRIAE-23APR03-CLUSTER25089_1
ccctcgcccctcccccctccccccctcccttccccgctcgacccacccaccgcgccggcgatgatgtcgatcacctccgccgctgccgccgccgccgccggcagcccggtctacacgccgctcgtctccaggggcggacggcgcagcaggtgctccgtccgagcccaagcggccgcagacggggcagccgccgccgacggggcggcgtcggagcacaagtcgctggagataatgcgcaagttctcggagcagtacgcccgccgctccagcaccttcttctgctccgacaagtccgtcaccgccgtcgtcatcaaggggcttgctgaccacaaggatcaactcggagcacctctctgcccctgcaggcattacgacgacaaggccgccgaggcggcacaagggttctggaactgcccgtgcgtccccatgcgagaaaggaaggagtgccattgcatgcttttccttacgcccgacaacgattttgccggagaggaccaggctatcagcttggaggagatcaaggaggcgacgtccaagtactaaccacacaacacctgttttgctcgagagggggctatagtcagtcagtcggtcgtcgttgtcgggacctgtgtatgtagtatctctgtaacaacaggaaataagaaatgtctgtctggaatgatgtctgttgtcatccatccgtcttgagagaagttaaggcctgatggttgcactcccgactcgtcaatgttacgatttattgcgtgtttgggctggcgtaaagcgtactccaatgagaagggaggggagggatgttgtgtgacaaaaaaaagaacaacgggtcgccgcccggccgcaggcgggaccccggtgcccacggggagcgactcgggggcccccccgccccgggcgcgcctcccgcccaaaccctctgcccggaaaggccccatcctccccgccccccccccccccccccccccacccctcctccttttcccccaaccccctcgcccccccccgccccgccggcgctccggtcccccacccgcccccccgccggcgggcctcccccctgcggcccgtccgtcccaagggccggacggggggccgggggcgccgtgggagccccggcgggcggcgacggcggagcggtggaggcccgggtgtcgtcttgccataagccctccgcacatcatgcgcaagttctcgcgagcagtacgctcgccgctccagcacctgtcttctgctccgacaagtccgtcaccgcccgtcgtcatcaagggccttgctgaccacaaggatcaactcggagcacctctctgcccctgcaggcattacgacgacaaggccgccgaggccgcgcaagggttctgggaactgcccgtgcgtccccatgcgagagaggaaggagtgccactgcatgcttttccttacgcccgacaacgattttgccggagaggaccaggccatcagcttggaggagatcaaggaggcgacgtccaagtactaaccacacaacatcctcccctcccttctcattggagtacgctttacgccagcccaaacacgcaataaatcgcaacattgacgagtcgggaacacgaccatcaggccttaatttctctcaagacggatggatgacaacagatatcattccggacgcgtggg

SEQ ID NO: 4514 - DNA, 1297 bp, Triticum aestivum
  Clone ID: TRIAE-23APR03-CLUSTER25115_1
aaattaaaaagacagaacaccgaagcaccgaagcgcagctccaccaccatttcacactctcccctgcttcacttcactgagaagcacacggacgaaaagctgcttgctgggagccatggctcccccgctcctcctcctcgtcctcttcctcctcccggccctcgccgccggccaccagcacccctcctcctacggctcctccgccctctccgaatggcgcaacgccaagtcctcctacttcgccgccgaccccggagacgccatcggtggcgcgtgcgggttcggggatctggggaagcacgggtacgggatggcgacggtggggctgagcacggcgctgttcgagcgcggcgccgcctgcggcggctgctacgaggtcaagtgcgtggaggacctcaagtactgcctccccggcacctccatcgtcgtcacggccaccaacttctgcccgcccaactacggcttccccgccgacgccggcggcgtctgcaacccgcccaaccaccatttcctcctccccatccaggcgttcgagaagattgcgctctggaaggccggcgtcatgcccatccagtaccgccgcgtcaagtgccttcgtgaaggcggcgtgcggttctcggtctccgggaagagcttcttcttcacagtcctaatcagcaatgtcggcggcgctggcgatgtcagatcagtgaagatcaaaggaacagagtctggctggctcgacatgggccgcaactggggccagatatggcacatcaacttagatctcacagggcagccggtgtcctttgagctcacctcgagtgacggcacgacaatgaccaatttcaacgttgtgcccaaggattgggagtttggcaaaacatacaccggcaagcaattcctgctctagagaattattgatagcgacttacaattttctcaaagaagaaaaatcatcctatgagttggttgtagtactgtatatccttctgaggaacaagattattattaggaaaggaatataatctctaccctactgtacattcctctgaggaaagagctgattattaggaaaaatatcagtttagtgcaaagcctcagatagttgttctacatactacatgcagttgtaattgtcggatgtactatttcaaatctgatagttgctccagaggcttgatgtatcattcagaaatgttctgatagttgccccagtgcttgatgtattattcagaaaaaaaaaaaaaaaaaaaaaatgtttaaacacaataaagtaaaaaaaagagggggcaaaaaaaaaaaaaaaaaaggtttt

SEQ ID NO: 4515 - DNA, 1958 bp, Triticum aestivum
  Clone ID: TRIAE-23APR03-CLUSTER25142_1
attattcactcgttctggttctggacagccacaccacctacccatcctcccagccagaggcacaggcacagctagagggaggtgagggaggaagggggagagggacgatcgcagcactgcactgacggagggatgaccaaggacgtggagatggcggcgcggaagcggcggcaacggcgccgtcgccggcgaggcctactacccctctcccccggcgcagggccggcgacgccgacgtggacgacgacggcaagcagcggcgcacagggacggtatggacagcgagcgcgcacatcatcaccgccgtcatcggctccggcgtgctctccctcgcctgggcaacggcgcagctgggctgggtcgtcgggccgatcaccctgatgctcttcgcggcgatcacctactacacctccggcctcctcgcggactgctaccgcaccggcgatccgctcaccgggaagaggaactacacctacatgggacgccgtcgcatcctacttgagtcgctggcaagtgtgggcctgtggcgttttccggtacggtccgttactgggctctccaagtcggtttccccctccaactgtacattcggcagggccggctagcgaggcacacgccgcggtggccgccgctgccgacgcgcggcgtactttgcgtccgggtgtcgccaggcgctgcgccaggatccggcgagcgcgtcacggcttcgcccaagtgccctgccccgttcaccaccgcggcctcaggatcctcgttcctgcgtgctgcctaatcactggccgtcgacaatgctggtttgtgtctgaggggaagacatcgtcggctgggtgcgtgggtggggggtctttcacgtggtatgtactccaggttgtttcgctcagaaagttgtggaagggagagctgtatcgatgaccctacatcttcgaaaacaaataaaacaccattcggatagaaattcaggacacggtgaaggcgccgccggccgaaaacaagacgatgaggaaggcgaacctgatgggggtctccaccaccacggccttctacatgctctgcgggtgcctcggctactcggccttcggcaacgacgcgccggggaacatgctcaccggcttcggcttctacgagccctactggctcatcgacttcgccaacgtgtgcatcgtggtgcacctcgtcggcgcctaccaggtgtactgccagcccatctacgccgccgtggagagctgggcggcggggcggtggccaaactcggagttcgtcgtccggcagtaccaccccttctcgggcaagttcagcctcaacatgttccggctggtgtggaggacggcgttcgtgatcgtgagcacggtgctggccatctcgctgccattcttcaacgacatcctcggcctgctcggcgcgctcggcttctggccgctcaccgtctacttccccgtggagatgtacatcgtgcagaagaagatacccaggtggagctcgcagtgggtgtgcctacagctgctcagcctcgcctgcctcatcatcaccattgccgccgccgccggctccatcgccgggataatgtccgatctaaaggtctacaagccgttctccacaactgactgatctatgcttggccgtcgcatggatgcacagatcctcatggacagaatatgcctaaaagctctaattaattaatcaaccaattatcacgtgttcactaaaaattacatgttcaagtaattgttgctctaaacggccggtgtaccagtaccaccggtgctgctgatttcattttcctttgtttgccatccgtcgtgttaactgaaaacggtagagggaaccaaaatagtgtacttccaaagtggtgtgattgtaagtacgttaatgagaaacgaatgttctcatgataactacttgagtggtattaagatcattatccagatgagcctgaattttttccctaaaggatcctataa

SEQ ID NO: 4516 - DNA, 1155 bp, Triticum aestivum
  Clone ID: TRIAE-23APR03-CLUSTER251896_1
ccggagatcgtgagatcccaacggccgcaagcacacaccgcaacagcacacccaggcacgatagaccatccagcttcgcccatcgccaggcacgagagaccaccctgcttcgccgatcgccggagggaaaggccaaagcgccgcgcgcctcgcgccaaccagacgcggcaacggctccaccggccgccgccgcggccaaggggaaaggctcctcgccgtcaccgccgcggacgccttatcgcgccaccgcggtcgtcgcgatggccgcgtccgtcctcgcgctcgccgtggcgctcctcctcggcgccagctcccgggtcgaccacggcgcggccgccgcccccgctggcggaagaggggctccgggtggcctacggtgaggcgtcactggcacgacgcgggatacggctcgggcggcggccagcagtccgtcaccggcttcccccgaaatcgacgactccaatagctactggattgtgagacctactcttgattcatcagccaaacaaggtgatgctgttgaaactggtagcatcatcaggttgcaacacatgaggacacggagatggttacacagccacttgcatgcttcaccattatctggtaacctagaggttagctgttttggtggggatggacaatcagataccggtgactattggaggctagaaattgagggaaaggacaaggtatggaagcgagatcagaaggtaagattgcgtcatgttgatacgggcggctatctgcacagtcacaacaagaagtataacaggcttggtggtgggcagcaagaggtctgtggtgttcgagacaagcgagctgagaatatttggtcgacagcggagggcgtttatctcccagtcgatgaaagcaagtgaacatagcatcaggaattttactgacattttccatttttctatctgttcatgcttttaaattaaacaagggacatggtacccagaactagaatgattgttagtgcagtatttttctatttggaaactccgattacaacttcacacgcgtcatagaatgactctgtcagcatcatcaccctgaactaaattgggcctcggaatgcttgaacccctgggacagtaaagactttgtgtgactatctacaactcaactttgttgtggggtaaatggaagagg

SEQ ID NO: 4517 - DNA, 1577 bp, Triticum aestivum
  unsure (1)..(1577): unsure at all n locations
  Clone ID: TRIAE-23APR03-CLUSTER252480_1
ccccccccccctctcccttcccncattccccctccttccccccaccctccccttaacccttcgactaggactctcctttcctcctatagaaaacacacatattttcatgtgaattgataaggtcacgtctggacaggctatataacacatcattggcggagggagtataacgcaatatggcatttagtttactcggagtgggtcttgccctccgcgtttggctccaccaggtcgccgcaatcgaaccacattgtatcggcgagcctggggaacaagaacctgtaaaagatccagtcgcgaaacagcctgaccatgtaccctcgcacgccccggacgttggtcccgccctgctggacccagccccacaggtatgccccggcgaccagccaggcagcccggccacgccgctcagccacgtagaaggccacgccgtcggcgggcgtggccgcccgggacaaagcgcgcgccagcaccaccccggcctccagcgccaagcacccgccctgcgccatgtcgcgggccctcgggtggaacgcatcgccgccccccgtgaccggcccgcggcccgcgggacccctgagactggccaggggggcgcagtacagcagtggcgcccacgacaggttgccggagtcgaagtggcgcgccacgtccaggtcccccgcccgcatgtgcctgcccaggtcgccggtgacctcccgcagcaacctggcggcgtccctgcccgccacccaccatgcagggacggtgttgttgacgacccgataagtagacatcggtgtcgctgatgggcaccatgccggccctcagaccctccgagaggaactgccggagctccttcttcaggccgtgcccgtccgggtacacggcgagcccgcggacggcggaccggcctgagctcgccggctccgacaggcccagccactgcgacaccacggagtgcaccccgtcgcacccgatcagcaccttggatcggatcaccgtaccgtcgtctaaccgtaggacggcgatctccggggaaccctgcgccttctcggtggcgatcgaggcgagcttggacgagaacctgatggtgcccggaggcagctcctccgcgagcgcctccagcagcgccttccgatgcatcggtctcactctcacgtcgccgctgctgcttttacgccctgcaaagcggaacacctgcgttgctccagtttccagagttgtcactcgggatgtttcgaaggcatcgtagcgggaggtgagcttgtgcgcgacgccgagggcgcggagcgcgaaccagccgttggggaagatggtgagcgcggcgcctgtggagcgcagctcggcgtgccgctccagcaccaggacgccgccgccagccgcgcccacgccgagccgccgcagcgccagcgcggtcgcgagccccgcgatcccggcgccgacgatgaccatctcagcgtcgacgtccacggccgtcgcggatgtccatgctggtgccttgccgccgcgatcggccatcgtcacctaacttgctagctagctcgcgatgattgctcttggcatcttgctcggctatgctttgtcctgaaaatgtt

SEQ ID NO: 4518 - DNA, 917 bp, Triticum aestivum
  Clone ID: TRIAE-23APR03-CLUSTER25268_1
aacacctcactccctctcctcactcctcactcgcaagcctcgctcctctccctccgctcgctctcctcgctcggccgcagcgacaagaagcatgggcctctcggtgatcgctccgccggccggcgactcggcgtccccggcgcaccgccgcgcgcgccgcgccttcctcgtgtccaactacatgatcctcggcgcggcgtccgggtgcggcttcctcacgctctcgctccgcctggtgccctccgtcgacggcttcctcctcatcctgctccacgcgctcaccgtggcggccgccgtggccgggtgcgccgtcatcgcggcgcccgacccgccgcggggccgcgtctacaccgcccacatgtccgccaccgtcgtcgtgtccatcctgcagggcgccgccgccgtgctcgccttctcccgcaccgccgagttcctcgcctacgggctccggtcctacgtccgcgaggaggacggcgccatcatcctgcgcatgatcgggggcctcggcatcgccatcttctgcctcgagtgggtcgccctcgcgctcgccttcgtcctcaggtactacgcctacgtcgacagggagtgcggcggcaaccccatgcgccgcagcgccaaggtcggcggcgaggacggcgccggcaactggccgtggccgttccaggtctgatctgatccgccacaaggatgatgatgcagcaagcaatttatgatgttggggccttgggggaggggtgtctcaagacgagaagagctgagaaccgatagttcttgggagaaaaactagtgtttggtgatattactattcgtttattgggttgtattgtgtggtgtggtatatgattatgttgtactgcggctgttgccacctctataatattatttgaaattcctgttcaaaaaaaaaaaaaaaacaa

SEQ ID NO: 4519 - DNA, 1169 bp, Triticum aestivum
  unsure (1)..(1169): unsure at all n locations
  Clone ID: TRIAE-23APR03-CLUSTER2528_3
acaagatcgagatgtttaccacaatggacttgtgtcctcactgtacgggagacgacgccagcctcaacccagtcaactctcgacggtcgtaattgtagcttatcaatgcaaggcgatgaggcgtcaagagcactgggtgaagagctggtgacacggctggtcatacaacgaactgaaattccgatagcggcaaatgaagccatcaaaatgacgagtctgtgatccctacagaaggaaaggttcaaaatcctcatgtatcaagtacagtggtacagttcaagggcttaagtatatatggagaaccgaaggccttcgtagacagtttaagggcaatggaacaaactgtgcaaggatcgtcccaaattccgctgtgaaactcttcagctatgagcaagcgtcaaggtgtaagttacaggtcaacagttaagatcagcctgaaatgaaaacgaaccggaggaggtccgtatcttataccggccagaaaacgagcagaaacgctaatccaaacagggccttaccggtagcagactggggattagaatgctcagcctagtccactcttgcgccttggagctggagccacagctggcatcatcgccatgtctgctgcttatcccatggatatgttagggggtngagaattactggttcagaagaagaagtctccccgggagagtcggccaagacctgcctgaccaaggaggagtgccacaagaagcgcctgctctgcggcaagggctgcaccatgtccgcccacgccaagtgcgccgccaagtgctccaagtcctgcatcgccacctgctaggcgccccccgccgccgccggcgacggtcttgatcatccatctttagcttgttttggtgaagggaataagggaaggggcacgccgcagctagccgcatgtctgcatgtgtggtgtagcgtacgtagcctctcgatatatctcgtcttcgtgtcgtcgtcgttggtgtagtgttttgatgtggccccgtgtttgtttgtgtgtgtttaggactgatattcgtgatgttatttccatctgtgttttgttatatgtcctttgtggtgataaatttggatgaaattaaacttgaataaaaattggcgcatacggtttaccacatgcatgcaaaaaaaaacggacgcgtgggcggacgcgtgggcggacg

SEQ ID NO: 4520 - DNA, 1196 bp, Triticum aestivum
  Clone ID: TRIAE-23APR03-CLUSTER2528_4
aaggtgcaagctgcgagtagtggtagcacacgcacgcaccaacagttccagcgaccgaagccagcgagacaccgaagcgtccgtgcttccagccagccatgtctcgctccgggtgcctcgcggtgctgctgctcctggtgctcgccgccagggcggccgcggcgatcaagccactggaggaggagccgcagggcggcaagtggacggaccagctcacggcgggagcggcgatcaagccgtcggaggagcagccgcaggacggcaagctggcggaccacgtcgcggcgggagcggcgatcaggccatcggaggagcagccgcaggacggcaagcgcctcacggcgagagcggcgatcacgccatcggaggagcagccgcaggacggcaagcgcctcacggcgagagcggcgatcacgccatcggaggagcagccgcagggcggcgtgcgggcgggccacctcacggcggccaagggcctgctgggggaggagcccgccgcgcggctggcgtacgtccggacggaggagaagaaggacagcgaggaggcggcgacgatgccgttggaggggatgaagcccggcggcggcgtggcgatccagcagggcggcgacccgggcacggtgccgtcggcgtcgtcggggagcggcgagcacgcgaaggaggagagcggcgagcacgccggcaaggaggggagcagcagcaccagcaaggagggggagaagtcggccaagagctgcctgaccaaggaggagtgccacaagaagcgcctgctctgcggcaagggctgcaccatgtccgcccacgccaagtgcgccgccaagtgctccaagtcctgcatcgccacctgctaggcgccccccgccgccgccggcgacggtcttgatcatccatctttagcttgttttggtgaagggaataagggaaggggcacgccgcagctagccgcatgtctgcatgtgtggtgtagcgtacgtagcctctcgatatatctcgtcttcgtgtcgtcgtcgttggtgtagtgttttgatgtggccccgtgtttgttcgtgtgtgtttaggactaatattcgtgatgttagtgccatctgtgttttgttatgtgtcctttgtggtgataaatttggatgaaacttgaataaaaattgcatgcgcatgttaacttgttaaaaaaaaaagaacccacgcgtccgcggacg

SEQ ID NO: 4521 - DNA, 1723 bp, Triticum aestivum
  Clone ID: TRIAE-23APR03-CLUSTER2533_1
caagacgcgcttgcgcttgcgatgcgactggatttggatttcattttttttttttttttgagtgagaaagcaaggatcttttatttaatttgactctttcgttgccatccaaccaccaagatgcgattgcgatgtgaatagattgacgcgtggttgataattgatctgctactacagtacagtgtgtgagtcacttggggtcggggttggtgagcctgacgacctgcttgccgacgttgcggccgtggtagaggccgatgagcgctgcgggcgcggcgtcgagcccgtcggcgacgtcctcgacgtagacgaccctgccctccttgatgtgcgggagcacccacgccatgtactccgggtagaggtgcttgtggtcgggctcgatgaagccctgcatcttgatgcgcttggagacgagggaggtgaggttgcgcacgccgacgtcggcgtccttctcgccggcggtgaggttgtactgggagatgaggccgcagacggcgatgcgtccgtgcaccttcatgttgagcagcacggcctcgagcatcttgccgccaacgttctcgaagtagacgtcgatgccgtcggggaagcgcttcttgagcgcgccggcgaggtcgccgtcctcctccttgtagttgaaggcgtcgtggaagccgaacttgttgatgagtaggtccaccttctccttggagcccgcactgccgacgacgtggcagccgcgtaggccgtgaaaccgggcaagccgaggatgccggtgtagtaggacagccggcacgccgtcgtcgggctggatcttggtgagtatggccgtgaagggcggcttcataacgctgtagtcctcccagccggtcatgccccagacgaggtcgccggcggcgagcccggggcgcgaggagcggacgacgagtgtagccggcgaagggcggcttgatgacgctgtagtcctcccagccggtgatgccctagacgaggtcgccggcggcgaggccgggacgcgaggagcggacgacctgggtcacgccgaacccggtgatggcggcgcccgggacgaaggccgcggtgtaggactgctgctgcgggcgggccatcttggggcgcatgtaggggtcgcaggagaggtaaaggttcttgaccagcaccgagccctcctcggcgtgggtggcctcgtcgacggcggcggcggggagcagctccatgtgctcctccgtggggtagccctccacgtagtccttgaggatcacccgccggctcttgagctccgccatcgccgccgtgggtggactgcaagactaggatctgagggagttgaattggttttgatatttttaggcggcgagcttcacgcaggcggcgccgctgcgcctgtaccacccgctgagcttcgtggccaagggcacggagaggagcttcgtgctggagccgctgcggagcctccaggacgagttctacaccgtctacttcaacctggtcaccgccgccgccgacagctgaaacgtgctgctgaactgacgacccatgtgcagacagaccagagcttcagagagtggcggcagtctggctctggctctggctctggcagtggcagtggcagagacatgtgccacggccacacaattactacctgtactgttggagcagcatctcccatcaccaaaacaatattaacgctgttgcatgttcctcgagctaaaaacgttgcggccgtggtagagaaccaacaaaa

SEQ ID NO: 4522 - DNA, 561 bp, Triticum aestivum
  Clone ID: TRIAE-23APR03-CLUSTER25350_2
acagagaggcggagacaatcccccagacgaggcggcgcgcacggcggcacgacgtacaagggctacaccatcccccacaacaagcgctggcacaccatcgccggcaagggcctctgcgccaccatgtggttttggattttctacagggctaaacaggacggcgctgtgctcttgggtatgcgtcatccttgggatggccatgatgatcacgcgcatggtcatggacatgcacacgagcatgaggcttcatcgtcgtcatcgccgtcccattgagctcaacgctgaaagcggctgacagagaccctgccacgtcgcatgtttcgatgcaagtctctgctaataaaaaacaatcacaactatcattattcacccctgttgtttgcaagtatattttttttagcacacaaactggctttgttatgtattttggtttggagctgtggcgtcctgggaatgcttcggcatgcacgtgttgttgcctattgtgatagccgcagctgttgtcgcacgctctgagaaatcctctgacaatatatgtatcccgttcgagtagcgcattgc

SEQ ID NO: 4523 - DNA, 2007 bp, Triticum aestivum
  Clone ID: TRIAE-23APR03-CLUSTER25406_1
aaccaaactccgaccacacggaaaacccaacctttgcttccccttccttccaatccaccagatcgacgattcgccatgctcccccgtgcaccactccggccatgagcctcgcgctccatggcgccgccccgtgctcgcgccctcctcctgccgctagcggcggccaccgtcctagtcgcctccaccatcttcctcttcgccgccgccggcgccagccgctggcgccccgccgacaccggcctccccgtcccggccacccccgccgacttctcggccgtccctatcggtgtgagtgtaacatccgccgccaagggtaaagagctctccttccttgatgagaatggccgccccgacgaccccagctccggctcggcggcggctgctgaacctgggagatgcgacccccgcgacgctgccgtcagggtgttcgtttacgacatgccgccggagttccacttcgggctgctcggctgggcgccacctcccgggaacggcggcggcgtctggcctgacgtcaggggcggcacagtcccgcgctaccccggtgggcttaaccagcagcacagcgtggagtactggctcacgctggacctcctggcatcctcgtcagcagcaccgtgcggtccggcggcgagggttgccgactctcgtgatgcggacgtgatcttcgtccccttcttcgcgtccctcagctacaaccgccactccaaggccgtgccgccggagaaggtaagcagagacatgtacctacaggagaagctcgtcaggtatctggtggcgcagccggagtggaagaggtccggcggtgccgaccatgtcgtcgtcgcgcaccaccccaacagcttgctccacgcccgatcggcgttgttcccaacagtgttcgtgctgtctgacttcgggaggtaccaccccagggttgccagcttggagaaggatctcattgcgccataccgacatatggcgaagacatttgtgaatgacacggccgggtttgatgatcggccgacattgttatacttccggggagccatttacaggaaggagggaggaaacattcggcaggaactatataatatgctcaaagacgagaatgatgttttcttttccttcggaagcgtgcaggatcatggtgtcagcaaagccagccagggaatgcactcatcaaagttttgcctaaacattgccggggataccccgtcttccaatcgtctctttgacgctatagtaagccactgtgtccctgttatcataagtgacgacatcgagctcccctacgaggatatcctagactattcaaagttctccatctttgtccgttcctctgatgctattaaaaagggctacttgatgaggctaattaaaggcataaacaagcatcgatggacaaggatgtggaagaggctcaaagaagtggataaacattttgagtaccaattcccatctcataaggatgatgcggttcagatgatctggcaagcattggccaggaaggtgccgtcgatccgactgaaggcacataggtttagaagatcttcaagatctgaaagaggaagcaaataaacaggaaggaggtgtatgtattgatgatgtgctccagatgatagggcaagcagtggctaggaaaggtgccttcggttcggacgaagtcacatatgtttagaggattttcaagatctgaaagaggaaccaaataaacaggaaaaagtgtgtatgtatcttgcttctaggctaatctaacacagcattcactgacactggcacatcagttgcattttccctttgaggaacattgtaaattagaagattcaggttgaatgtttggttataccttggaacaaaaacagatagctcagacttttattggtccagttgaatgtatgttaggaaggcaaatgcttattgttaatgtaacatatactccatccgacagatagctcagaatgtatgtttgctcggagtttatcccacttctataatttacttcaaaataaaaaaaaaaaaaaaaaa

SEQ ID NO: 4524 - DNA, 2439 bp, Triticum aestivum
  Clone ID: TRIAE-23APR03-CLUSTER2547_1
aagtggcccaccgtcagaaggggaacgaaggcttcaaaaaaaaaagaaagaaggggaacgaaggggtctacacgccgctgctcccccgttccggcgacgcgacggccgccgaccgcgccaccgggggtggaggaggaacaatcatatagaaaccacttcctaccaccgaccagcttgcatgtattcaggcacttcgtgatcattggagaagttctccatccagctcaatacagctccaggagctaggccctctgctgagggactatcaacgtatcattatccgtcgctttgtggaaaacccatccccgacattccttgaaagggaagatcaccgactcttccatttgaaaaatgcctcgcagttgcgcatggatgacatcccgatcttactgggcgagtatagaactctgctttccacctgagagaggtccacacaactattttgcttggtaagtgcatctgggctaaaaccattgtgctacgaccatcggttctctgcttctgtggtttccgatgcccagggcaagaaggacgacagcccagccacctaggccctagggcaagcaaacagaccattggtgagcaaaattgatgaggaaatgtttgtatttgcgaaatgcatagaaaaacaaaatgccatgatctataatgtttgtattttgatgtacaagctagaatcttcttttattttcttggatgtacaaatgtaattttaaaattttcgaaagaaagagctccatggagctacggaacaagttaattccttcctgtggaggccatggccccccttttgttctttcccattagccttaggataccccagatcagccagaatgtcaagttgaaattaggagggagggctttttttggtgtgtgtacctgcgccctcgagtttatacaggatacatgaatctgtacaggacgccggaatcgtgggcccgtctccccgtgagctccctgccccgtccgccgtaggaaacagtaaatttctcatgtatggtggttgggatggcaaaaagtggctgtctgatgtatatgtcatggacacaatgtcacttgagtggacagaactagcagttactggatcagcgccacctccaagatgcggacattctgccactatgattgagaagaggctgcttatatttggaggcagaggtggaactgggccgataatgggtgatctctgggctttaaagggtatcactgaagaagataatgagacaccaggatggacacaattaaagctgccaggtcaatctccctctgcacgatgtggccattcagtgacttctggtggaccttatctcttgctatttggtggacatggaactggcggttggctaagtagatatgatgtgtactacaacgaatgtgttattttagacagggtctctgttcaatggaagcgcttaccaacaagtaatgagccaccccctcctcgggcatatcattctatgacttgcatagggcctcggtttcttttatttggtggctttgatggaaagaatacctttggcgatttgtggtggcttgttcctgaagatgatcctattgccaagcgggacttggttcctagtgttggttcagacagcaaccatagcactgtgactggtgatgcccaacagtctgcattgaaggaatcagaatcacaatctgatgaatctccgatgttggagttggccaaacgattggggattccactttatgtagaaccttcagcaagttttgttgacgaaatcaacgataaagaactaatggaattatcatctaggctcattggtgaatcacttcctaccaccgaccagcttgcatgtattcaggcacttcgtgatcattggagaagttctccatccagctcaatacagctccaggagctaggccctctgctgagggactatcaacgtctcattattcgccgctttgtggaaagcccatccccggcattccttgaaagggaagatcgccgcctcttccatttgaaaaatgcctcgcagttgcgcatggatgacatccccatcttgctgggcgagtatagaactctgctttccacctgagagaggggcacacaactattttgcctggttggtgcttctgggctaaaaccattgtgctacgaccatcggttatctgcttctgtggtttccgatgcgcagggcgagaaggacgatggcccagccacctaggccccagggcaagcaaacagaccgttgatgagcaaaattgatgaggaaatgttgtatttgggaaatgcatagaaaacaaatgccatgatctataatggttgtattttgatgtacaagctagaatcttcttttattttcttggatgtacaaatgtaattttaaaattttcaaaataaagagctccatggagctacggaacaagttaattctcaaaaaaaaaaaaaaaaaaaaaaaaaaaaactcgaactttctc

SEQ ID NO: 4525 - DNA, 816 bp, Triticum aestivum
  unsure (1)..(816): unsure at all n locations
  Clone ID: TRIAE-23APR03-CLUSTER255229_1
aagtggnatccccccgggcngcctaccgtatgtatcgtgtcatcttccctagaacatcctaaatcgaaaaaaaagggataacttgaccgacttcgccattgacaacaatctatccgcgattcaaacaagaaacagcagcagcgacaccagcaatcgactccgcgagaaccagcaagggggaggatgaaatccttcaagaaggaattcaccctggaggagagggcgaatgagtcggccgccatgatcgccaagtaccccggcaggatccccgtgattgttgaaaggttttcaaggagtaatcttccagaaatggagaagaggaagtacctggttccttgtgacatgccagttgggcagttcattttcatcctgcgctccaggttacatctgtctccagggacggcgcttttcgtgtttgtgcgcgacaccttgccccagaccgctaacctgatgggtagcgtgtatgattcgtacaaagataagcaggatggcttcctctacatgtgttacagcagcgagaagacatttgggtgacatctgcctgactgcaatttggcgtagtgcacccaatcccagtgtacatatgtgacatcaatctcttgttaaatgttaagtgtagcagcctctgccgatctctagtttattttacttgcacgtttcacatctgtattgctcccggaaaaaaggaaaaaaaactgtattgttgtatcaccgaagtaaacttatgcccctgtgcatgatgctgcttgcgaagtcctttggcaaggatggacgtatatatgaatagaagtgttgatgtaaaaaaaaaaaaaaaag

SEQ ID NO: 4526 - DNA, 1757 bp, Triticum aestivum
  Clone ID: TRIAE-23APR03-CLUSTER25554_1
ttagcctggtcgcggtcgtggtctagtcttttttttttttttttttttttttttttttgcaatacagggcttgcagagattttgatttcattataacaaatatattaacaaaagaacattcaaaaaacaaagactaaaagtcaaaacaaatagtacgcgaaaacatacatcgtggatggatagcaacgagaaagagatactttggggcgatgagatcggttaacacatgaacggcggcgagtttaaccgataggtctcccccccgtttgctatcatgtgattgttgaggaggcggtgaaaatcttgctgcgaggagtctccttcggcgaggccgccatgagactttgaggcgaggtccattaccctggtcctcatcacgtccccaggccctccaggatgcatgaatgtgagcaatgcccgggccacatcgtcggccgggatcacctcatgtttttcgtaatcctcgctccgtaagccagcgccatgcggccacagtcggtgcccaattcctagcacatctttgattagcctctcgttgacgaattggtcgtgaacctttggccatgtgagcataggcacgcccgcggccactgcctctaggacggagttccacccacagtgcgtcagaaacgcgcccactgcggggtgcgcaagtatggcggtttgtggagcccaggatctgatgatgaccccccggtcctcgacacgcttctcccacccttttggtggagtccacttctcggccgccctgaccgcccacaaaaacggcttccccgaggcctccaacccaagagcaagttggtccagctgagcatccgatacgagggcgcacgagccaaaggacacgtacacgaccgaatggtccggactttgtgtcgagccaaccgatgcactgtgactttgagtcacccgtggggctctcagaggattgcagttgcggccctacaaagtaggagcgctggacgtacccttggcccgtgtacatgtcgcagtactgctgctccaggcctgagaatgtgttgacggcgaggccgaagcaggcagcttgcatggaatgaaccttgccgaagacgtatcgaaatatcgataagtcgggcagctcggtcctcgggacccgtatctgaggggtcgggaacggaggggccgtcaccatgtcatctccgtcgatcgcggcgtcctccatcatgaggtggcgcatggcgagcatcgggaaggcgccggtgacatggaatgcgacgcatggcacgccgagctcgtcggcgatgtcggcgctccaggtgaagagcatgtcggtgatgatggcgtctggagactgcgcccggacgagcgtctcgtgcgcggggcgcatcagggtttcggtcgaggcggcgatgttgatgcgcatagaatccgcctgagtggccgccttcccaaggttctcgacacccttgggcaggccctccaccgttgggaacggataggtaactatcttgacagttgctgcgctatggtggcgctccagcaaggactggacgatcggaacgttcgccggcgtgactgcgacgatggcttctacggcggcgtttgggctagacgcggcgaggctaacggcaagctcggtgaaggggtggatgtggccagtcgcaaagtgggggaagagcaggacacgcagagtcttgctgccgctgctagtggtagaagaagccatctttatttctttaatttcctactaggagcacaaggctgtgggtccccgccgcccgccccacccggcagcc

SEQ ID NO: 4527 - DNA, 1487 bp, Triticum aestivum
  Clone ID: TRIAE-23APR03-CLUSTER255642_1
ctcgacggtcgccgtcctagatctgaacccgtcaggcggcgacccttcctcctccttgccgccctcgccatgttgcaatccggcgccccctccgcgatctttaaaccccagcacctcaatcacgcctccactccactgccctcgtattcctgcccttagcgcgactcccccttgtcttcagcgctcctcaacctagtgccgcctttcggcctccgcccagcgatcgcattcctgatccgtacccgggccgggccaaacccgttctagtcccgctccgccttcgtcatcggcaggtccagcggcatcgggctcacccccgccacggccgccgcccgggagggcgcgcgggtctccatcggcgcgcgccacgccccccgcctggacgacgcgcgggacggcgcccggcttgccatcggcccgcgcgacggcgcccgcctggacgacgcgcgcgccgccccccgcctcgcgcctcgacgacgcgcccgcggccatcaggcttgccagcgggaaggacgccgggttccacccgccctagacgagggagggcccgtcgacgtgctcgtctgcaaccacggcgtgttcgtgccgcaggagctggagaagcaggacatggaggaggtcaagtggatggtggacatcaacctcatggggaccttccacctcatcaaggccgcgctccctgccatgaaggcacgcacccgcgagaccagtctcccggcgtccattgccatcatgtcatcgcaggctggtcaggttggtgtttatgggtatactgcttactccgcgagcaagttcgcactaactggacttgcagagtcgctgcagcatgaggtcgtttcggacgatattcacgtgtcgctgatcttccctcctgacacagagacaccgggtcttgtcgaggagaagaaaaagaggccagagcttaccactatcatagcagattcatctggtggaatgaaggctgatgatgttgctatgaaggctctaaccggcatcaaatctgggaggtttattatcccctgcaatttcgagggagcaatgttagctatagccacttctggtctaaccccccagagttccccgttaattgcattcgtggaggtgatcggtgctggactgatgcgatttgtagcactatgtttccagtggaattggttctctactattgagaactggtgcgccaagaacaagaaacatgggtgaaagcccaaccctgggattcccagattttcaagggcttacaatttatatacaaccaataatgtaccttgttatccctggactgaatgtatatcccacttgtactttgggatacaatgtatatctgggttattgtttttgaccagttatacttagcacgttgtacacttgtactggacagacagttaaaaattcccttttgcctgtgtttttaaaaaaaaaaaaaaaaaaaaaaaaaaaaaaaaaaaaaaaaaaaaaaaaaaaaaaaaagaaaaaaaaaaaaaaaa

SEQ ID NO: 4528 - DNA, 1672 bp, Triticum aestivum
  Clone ID: TRIAE-23APR03-CLUSTER2559_1
ggcacgcgtctcccgggcccttcctcgtctctctctctctctgaacacccccacccagccgaccaaatcgccgcacgagggcgcgccatggagccggcggtggagaggaaggtgcccgagcaggaggagcagctgcagccgtcgcacgcccgggccgaggacgcgccgcccgccgccgtcgaggaggaggacgaggcggaggcggaggagagcgagcgccgcagccgcgagctcaaggccggcctccatccccttaggcgcaagctcgtgctctggtacacccgccggacgcccgggacgaggtcgcaaaaagcacggttcatcccgatcgaagaggaccaaaaaggcccaaacccactcccatcccctcgtcacgcgtctcccggacccttcctcgtctctctctctctgaacaccccacccagccgaccaaatcgccgcacgagggcgcgccatggagccggcggtggagaggaaggtgcccgagcaggaggagcagctgcagccgtcgcacgcccgggccgaggacgcgccgcccgccgccgtcgaggaggaggacgaggcggaggcggaggagagcgagcgccgcaaccgcgagctcaaggccggcctccatcccctcaggcgcaagctcgtgctctggtacacccgccggacgcccgggacgaggtcgcagtcgtacgaggacaacatcaaaaagatcgtcgatttcagcactgtcgagtcgttctgggtttgctactgccacctcgcacgcccgtcctccctcccgagccccacggacctgcatcttttcaaagagggtgtccgtccactctgggaggatcctgcaaatcggaatggtggcaagtggattatacggttcaagaaggctgtttctgggcgtttctgggaggatttggtgctggttctagcgggtgatcaacttgattatagtgatgatgtttgtggcattgtgctaagttgtcgtttcaatgaagacatcctgagcgtctggaatcggaatgcatcagaccaccaggctgtgatgacattaagagactcgattaagaggcacttgaagctgccacacacctatctgatggagtacaaaccacatgacgcctctctgcgagacaactcgtcctacaggaacacatggctgagaggttaagctttatgtcgtcaaaactagtcatggccctcgttccgaactacagtaaatccttgtggatttccagttctgacgtttcaacccagccatgatgtatgattactctttgtcatgctactatgtactctccaaatttcaaatgctgaagtatcgacttttataaaaaaaaaaaaaaaaaaggttaatcgataccgtcgaccctcaagggggggccccgaccccccacctccccccaatcgggctacccgccccgggcccgtcctcctcggcctcccactttcagaaccggcgcgacccgtggaaataccccgggcagtcccctttcgcaaatccccccttgacccaacgtcccgcccgacccccccggccccgtgcccctgcgcgatggcggggcccgtgtccccgtttcccccccttccccccccgtttggcgccgtcccccggctcgcgcgctgaccgggggccttcgccccgcccctcaaaatatttctgtgaatacacaaccccccgcgacaaacc

SEQ ID NO: 4529 - DNA, 912 bp, Triticum aestivum
  Clone ID: TRIAE-23APR03-CLUSTER2559_2
cggcagccgggtgagtcttaaaagtggggggaaatgtgaatgagctgtgagggaggggagaaagtgagggtgtttttgttggcggaaggcgaaagaggacgggccctaggaatggggggtttgacagtttgggtaggggagggaacgaggcggtgtaataaagaagatttggtggggggtttacaagccgactaatggggaagggcggttttctagaggttggggtgtagggtgggaccacgtatggggaaaagaggcgagtccctttgatcttggcagggaaaacacgcaaagggggacccagagaatggtgttatagcaagaaggaagtgggtggttgcccgtacaccgtttgtggggggaggggatcgcctggacaaagttcgggaagatggttgggcaagggtgggatgtgatgcgggtgtcaaaggaaaggcgtgttgtctggggccggtttgttgggggaggggaatttggttggtgggttctaagcggggggagcgagctttggttatggtgagtggagttcttgtggcattggtgctaagttgtcgtttcagatgaagacatcctgagcgtctggaatcggaatgcatcagaccaccagggctgtgatgacattaagagactcgattaagaggcacttgaaggtgccgcacacgtatctgatggagtacaagccacatgacgcctctctgcgagacaactcgtcctacaggaacacatgggtgagaggttaagcgttatgtggtcaaaactagtcatggcccttgttccgaactaaatccttgtggatttccagttctgacgtttcaacccagccatgatgtacggttactctttgtcatgctactatgtactctccaaatttcaaatgctgaagtatcgagttttataaaaaaaaaaaaaaaa

SEQ ID NO: 4530 - DNA, 1434 bp, Triticum aestivum
  Clone ID: TRIAE-23APR03-CLUSTER25647_1
agccaaaccggtctcgtgcatcgcccactagctagcgtacgtgacgatcgatcaagccaccggtgcactgcctcgaccgatcagttcacgacgacgatggccggcggttcgtcggccctggcgatcatggcgctgggcagtcgtcctcctggcggcgccgtcggagtgccgcgcgcgccttcttcgtgttcggcgactccctggtggacaacggcaacaacaactcacctgatgacgacggcgcgcgccgactcgccgccgtacgggatcgactaccccacgcaccaggccaccgggccgcttctccaacggcctcaacatcccggacatcatcagtgagcagctcggcgcggagcccacgctgcccgttacctgtccccggggagctccacggcggtcgaaggctgctcgtgggcgccaacttcgcgtcggcgggccgtcggcaatcctcaacgacaccggcactccaattccgtcgaacatcgtgagggtgagccggcagctgcactacttcggcgagtaccatgggtaaagctgcgcgcgctggggggcgccgtcccagccggcgccgatcgtgaaccgggcgcgggtgcgcatctgccctcgggcggcaacgacttcgtcaataaatttagcaacctcatcccctttctccctccgctcccgccagttctccctccccgactacgtccgctacctcatctccgagtacaagaagatcctcacgaggctgtacgacatgggcgcgcggcgcgtgctggtgacggggacgggcccgctgggctgcgcgccggcggagctcgcgctccggagccgcgacggggagtgcgacagggacctgatgcgcgcggcggagctgttcaacccgcagctgtcccaggccctggaggagctcaacgcgcgctacggcgacgggaccttcatcgccgccaactccttccgcgtccacttcgacttcatcagcgacccggcggcgtacggcttccggacggccaaggaggcgtgctgcgggcaggggccgcacaacggcgtcggcctctgcacggcggtgtcccgcctctgcgccaacagggaccagtacgtgttctgggactcgtaccaccccacggagcgcgccaaccggatcatcgtcagccagttcatgaccggctcgctcgactacgtcagcccgctcaacctcagcaccgccctccacatcgacgccagcctcatggactgatgatatgctactaggaagctacgtacgtgtcgatccgtaactttgttgattgttgggtgttgctgcatggcgtggttcatgccactctcggttttgaatgtggtgttagttgtgtgttgctaattggaggtcaataatttgtgtaaccagtaatggtgtacgtgcaatgaacgtgtcatacttgccgccataatgaccagtgagatgtatctgcc

SEQ ID NO: 4531 - DNA, 1762 bp, Triticum aestivum
  unsure (1)..(1762): unsure at all n locations
  Clone ID: TRIAE-23APR03-CLUSTER256547_1
acggcagacggcaccgccctccgcacccaaccacaatccctgctccggcaccccctgctccagccttccctcccccctcgtcggcggcgaaaatctccggatccgtccctccctccgttccatcgccaccttctccacccacaagggtttaattccgaggggaatttcctgcctgcctacggcgtaaagacacaactcctgctccggcacccccttccctccccagccttctccaccgctctccctcccccctcgtcggcggcgaaaatctccggatccatcccggcctccgttccatcgccaccctctccacccgcaagggtttaattctgaggggaatttccgagcatttcctgcctgcctacggcgtaaatacaggtctgcgggctgtcctgcttcgtctcgcggtcttcgatgcgtggtggaggcaacacggataggatgcagcaggttcagcacacggttcagacgcacggatatggactggccagaaagcacacttatgactgggtcgttcttacgctcctagctgcggccgtggtcgtcttgcattatgctccgccgtttaatcggttcgttgggaaggatatgatggctgatattaggtacccggtgaaacagagtactgtgccagcatgggctgttcctgtaatctctatgctgtgtccagtgcttgttttcgtagcggtgtatgttgctagaagggacgtctatgaccttcaccacgcaacgctaggtgttattttcgctgtgctgatcactgccgcgttcactgatgtgataaagactgcagtagggagaccaaggccagacttcttttggcggtgttttcctgatggaaggcaggtatatgatcaagtgacaggtggtgtgatttgccatggcgagaaaggtttcttaaccgatgggcgcaagagttttcctagtggacacacgtcgtggtcttttgctggacttggatttttgtcactatacttatctggcaaaattaaggcgtttgatcgcaaaggtcatgtggcaaaactttgcatcgtgattcttcctcttcttcttgcttcgcttgttggggtttctagaatagacaactatcggcaccactgggaggatgtgcttgtcggtggcctgattggatatatcatggcagtgctgtgctatctgcacttctttcctcctccatatcaccatcaaggttggggtccctatgcgtacttccacatgctggaagagcttgaggtgcacaattcaaataatgcacaaaaccagcagtctgcaggtgagcatcatatcggattgaccggccaacaccataacgggagatcaagaaatgatttggaatctggaagtgtgtaactcacccctctgtggaaccgactagcataccttgtacagtaagcatgcgttaaaaacttttttatgtgtgcactaagcaagtattaggagtttagaactagatatgtgctatctccccctcatgtttgtgtacaaaagtcattcgctcagtatattctgacctagttgttctagggccacctgttgtatctaaatgatgtgttaacgtcgtagaccgtgtgagtggccggtggacgtactgagtacgaacttattccgctgttcaacaagcacaactgagcgatgataatgacaagcatatctagagccattgaacattcccaaaaaaaaaaaaaaaaaagcttcgcgttatccattacccgtccgaaccctccaagatgggggggccccccggtaacccaaatatcccccn

SEQ ID NO: 4532 - DNA, 1223 bp, Triticum aestivum
  Clone ID: TRIAE-23APR03-CLUSTER25671_1
ccaccacgcccggcccttccgcctcccactgcgcttccttcgctgagccactaaccgcgaacgccgcggcgagcttctccccgcggaggccggccggcgcgtggctcccgcaccagtcgaggccggccggggcctcgcgctgcagtggcgggcgcgccggggaccgggcgccgggcgcggcgggcccccgcgcgggccgctcggcggccgcgccccggcgcgggcttcgcggctccacgcccgtcgccccgccccgaccccgccggccctgcggaggcgcgcggcgaggccagtcgccacgctctgctgcgtcctgacctcgaggggtcttcagagcttgccggtctcaattgaatgggccctctagctacagaggagagctgaagtgggcccctgtaaaagcacggggcgttggatattccccgttggattggggggttcatacttggacactgatagtttggtagaacaggcagtcggaatgccttccgttgctcaaatattcaaggttcacagtgaagcatttttcagagacagtgagagtagtgtcttgagagatttatcctcaatgcatcggctagttgttgctactggaggcggtgctgttattcgaccagttaactggagatatatgaagaaaggtctgtctatcatgttggatgtgcctttggatgcacttgcgaagcgcattgcacaagttgggactgcttctcggccccttctagatcagccatctgctgatccatacacagcggctttcacgaaactcagcgtgctcgctgagcaaagaggggatgcttatgcaaacgccgatgtaagggtttctcttgaagagcttgcagctaaaaagggtcatgatgatgtctctcagctaaccccaactgatattgctgtcgaggccctacaaaagattaagaattttgtcactgagcattccatggccagtggcccattcgacgacttataaattggtgccaggagacgaacgatgcaatccttgtagaatttcagccccaatttgtttgtaccgtgtccgtgtatcttcatttttgtatcgctcaacattattgattcattctttatagtgaaaaaggagctgtgctgaagtatgctctgataaaaataaaagaatagccgatggagctaatgttaagagctccacggttatgagatcatcacacttacatttttcactcagctgttctttcaaacagacaattgtc

SEQ ID NO: 4533 - DNA, 1133 bp, Triticum aestivum
  Clone ID: TRIAE-23APR03-CLUSTER256813_1
gagaaaaaaacagctgccacgcgcgcatccgtacacccgctgccccggcgtccccctcgccggcccgatggccaacccgcgcctcctcctccccaggatcctctgcgccgccgccgccgccttctacgcctgcctcccggcgcccgtctccgccatccggaaggacattggtattgctgcacccatcatatgcaggcgaactgttcaggggtggcatttgatatcaaatgataacggttatgtatgttctgccctttcaatctatccatggtctcgctgctgcccacgaacaggagcccgcttctcctgtcagggctgcaaccttgatttgcagtgctgcaaccctttcgagtattgtgtatcttgctgcttgaatccttctatgaccaaggaagcagatatgctgatgttgaaggtagctaagccagttactgctggaacttacgccaatatgttcgatttctgcatgggaagatgccgccatagttctgcaagcgtggtccatgaaaatgcatatttgagtgatttccatcattgctttctggtgcagcaaaattcatcgggatcaactgaatctaattttggatcaaggctggatggcattaacgtcatattgtcgaggcagggggaatcatgtagttctgcatgcagagcaaaaggacaatcatgtgttccaagcaggctttctgagttgaacaaatgtcagattttgcagaaatatatgagatgcaaaaatggttgctttcccagtcttgggcccgatcaacctgccgaagttgtagacgaagctccaaaaaatttgaatcctggagcgtgcttgtacatgcagatggatgaccgcctcacctgtgatggctcacatcaacatacccggaggctctgcccttgtgcatgaaacgggaaaaaatagcgtcaatagtaagaaagtcacttgccaggaaacaagcggaggtaatccgccgaaagctgacggctcaaaatggcatggccatttctgcaccgagtttccaaatggcgtatcgcataagaacatattttcgctttgtcctgcgcatgcagttcatcttttgcatgtccagatgcaatcatccttgtccagaacaagcagcttctcaaacacttatctttataat

SEQ ID NO: 4534 - DNA, 1666 bp, Triticum aestivum
  unsure (1)..(1666): unsure at all n locations
  Clone ID: TRIAE-23APR03-CLUSTER2569_1
gaaaacactcgccgctagggtttctcctcaaacactcctctcctctcccctctcccccaacccctcgccgccgccgcatccaaaacccctcccctcatccacctcgtcctctaatggcatcacggcccatcaggcgaagctgctagctcgtgtctcccatccgcttcccgaatagcttgttgatctaccgcatccccccacctccgccgccgccgccatgacgtccctcaaccagttcgatctccttggagacgtcgacaacgacgacccctcgcagctgcttgctgcggcggcggccgcggcggcgaagaaggcccaggcgaataagacggaggcagcgcctgctggaaaggcggcccagactgcggcggcggccaagttgccgacaaaatctgctcccccggcgcaggctgggagggatgcgaggagcggaggcccaccatcacgtggaggatttggccgtggtgaacctggccgcggcagaccgctggtgcgcgcggtccgcgccatgacgaccctcaaccaggttcgatctcctcggagacgtcgacaacgacgacccctcgcagctgcttgctgcggcggcggccgccgcggcaaagaaggcccaggcgaacaagacggaggcagcgcctgctggaaaggcggcccagactgcggcgtcggccaagttgacgaccaaatccgctcccccggcacaggctgggagggatgcgaggagcggaggcccaccatcacgtggaggatttggccgtggtgaacctggccgcggcagaagcggccggtcagataggtcttgcacaggaaactgatgaagctcttaaaattgaggacaatgctcccatcgctgagaagcagggtgagcaggatgatgctcctccaacaacagtggagaagaaagaccacaaggatggtgctgcaaaggaggaggaagagaatgaagaggataaggagatgactctagaggagtttgagaaaataagggaggaacagcggaaagcactactagcattgaagactgaagaaagaaaggttgaagttgacaaggacctgcagtctctgcagccactgtctaccaagaaagccaatgatgaggttttcattaaattgggttctgacaaggagaagaagaaggaaagtactgagcgtgatgaacgtgccaagaagtctcttagcatcaacgagttcctcaagcctgccgagggagaacggtactacggtggccgtggtcgtggaaggggccgcggtgagggccgtggagaccgcggcggtttcaggggcgggtttggaggaggataccagcgcgggcaggcggccgcgccatccatcgaagatcagtcacagttcccgaccctgggcgggaagtgaaggttgtgtgctgtgctgtcccgagcgccatcctcgttgtcttgactggtgtttgcttttaaattttgcccgacgttggattattgtgtcacggttaatcggaacaaataatgtgttctttctttcagtgtgttactcgattttgtataccggagttgatcgtcgggattaggcctctagctagtattgtaggctagctttgcgtttggttaaagatcagatcgtattatgccgtttctagctttactttgttcggaatgatgtcacacaaagcaatcatacgccttgctaaaatcan

SEQ ID NO: 4535 - DNA, 865 bp, Triticum aestivum
  unsure (1)..(865): unsure at all n locations
  Clone ID: TRIAE-23APR03-CLUSTER25774_2
ccagggaattcgcccccggaggcccctttccctaggaatttccctaaatcgaaaaaaccacctccgcctccggcccccaacctcgcctctctccatctgctccggtcctctcctccccttggcccctctcgcccccagatctccaagccgagaatcttccagaagccgtcgaggccctacacccgcagccatgtcagcgagcagcacgccggtggacgcctcgggcgagccgatcccaacgtcgtcggtgctgatggcggcgtccaagcacatcgccgtgcggtgccggccggagaacgtggccttcctcaactgcaagaagaaggaccccaacccggagaagtgcctcgagaagggccgccaggttacgcgctgcgtcttcaacctgttgaaagaacttcaccaaaagtgccccaaggagatggatgcgtatgctgggtgcatgtattactacacgaatgaatttgacttctgccgtaaggagcaggaagctttcgagggtgcgtgccctatttccgagtagcccgccctctgagagcgagttttacccccagtgatctcttgagaaataaggagaaaagccggcaaaccctccaagttgatgatctccctcccatgtttatttgtatgggtgaatagcgcgtcattgagctgctcatcccattcgctcgtctttcttcagcaattacatctctgttttgactttcgagttggatgccaaacttgactcaactgtagccctaagttgttgttgatgatgatgattcttcctttggctttggttggggcggcgggngggnngggncagcagtaccaaagcgcgacggcggggnnaaaggagnaggngggnnnaagggggaaaaan

SEQ ID NO: 4536 - DNA, 655 bp, Triticum aestivum
  Clone ID: TRIAE-23APR03-CLUSTER259_12
ttttttttcctctcgcgccgccggaacagaatcgacccggagggaggaagcagcagcagcaggtcagcgagggaggagtagaggggatggcggacaagaagggcggagcgccgaggaaggaggaggtcgtcacgagggagtacaccgtcaacctccacaagcgcctccatggctgtaccttcaagaagaaggcacctaatgccatcaaagagctcaggaagtttgcacagaaggctatgggcacaacagacgtcaggatcgacgtgaagctcaacaagctcatctggagcagtgggatcagaagcgtgccccgtagggttcgcgtgaggattgcccgcaggaggaacgacgaggaggacgccaaggaggagctctactcactcgtcactgttgccgaggtgcctgctgagggtttgaaggggctgggaaccaaggttgtcgatgacactgagtagaatctttctttatctacatcgttagaatgagctgttattttgcattgcaccagcatgttttttgtatcccatggaagttttggagtatggaatatcgcaagctatctattttccttcatctaaatcttgatggttggttttgcccttcatactgtgctcgttattggcgtcaatacaggatatgctgttgagcttgcaaa

SEQ ID NO: 4537 - DNA, 1053 bp, Triticum aestivum
  unsure (1)..(1053): unsure at all n locations
  Clone ID: TRIAE-23APR03-CLUSTER26097_1
ctaaaggcagtcgggcggcgccccaccccctaatcttccacacgcttccgccgccgacgacgacgacgacgacgctaaccgaccgagcgcgagcaccgcccgccgccgcacgccgccatggtgaacgctccgaagaccaagaagaccaaatgcaaaaacaacgagagcaaaaagaacacgcttaatgaggacaataagtacaagacgggtaaggacaccctgtacaagcacgcaaagtaccggaagggcagggacagtccaggtgcccatgggcaaagcgagccttatgacagcaaggcagtcagggcatatggtggtcttgaccaagcctgtcttccacaagaaggcaaaaacccagctacgaagactctgccgaagctccgaacccatgtgctgcaacggtgacgaccaacgtgccgtagagcaatacaaccaattagaaaatcagtgcggagacaagaaaggcattcagaaggtcaatttctattacaagtgctttgacatgtcttcagtgctgggaggtccacggagtaatagtacttatgtcaggaaaccgttgttagatgttggtcagatccaagcctgtgtcacctaccagaaaggcaataacctacaaaagaacaattgtggctgaagtctgcaaatgccagagtctgcaaagcactactcccaagcgtgccatcaagaggtgcaagcattttgagatcggtggagacaagaagggcaaggggacatctcttttctagactgctttcacctatctggagtggtggtggtcaagaagtattactacttgtgttaagagtttgttgttaggagttaaattaatcagaccttgtcatgtatccaaactcctgtgtctcgcatttaagcaagaggcgacttttggctaagtgaagttttgtagcttgaatcctctttcattccgtataatgtctttattttaaaaaaaaaaaaaaaaaaaacgtcgctatgtaagaaaaactgagtccctctggccttgagaatcccttccactgctanacaaaggcgacattcctcaaaattgaggta

SEQ ID NO: 4538 - DNA, 1575 bp, Triticum aestivum
  Clone ID: TRIAE-23APR03-CLUSTER2610_1
atcagaagctcagaactagcacgactcggggacggggtccggtgctcttcgtctaagatcaatcccctccgcgtttcttgcgcattggagccaaagatggcaaggtcagccatgtccgggctagtgctcctgctgctctgtgcaacctgcagattggcgataggaatcaccgatgggctgctgtccaacggcaacttcgagcgcgggccgcagccgtcgcagctgcgcgggacgcaggtgatgggcgcgtcgtcgatcccgtcgtggcgaacgtcggggttcgtggagtacatcccgtcggggcggaagcagggggacatggtgctggtcgtccccgagggcgcctacgccgtgcgcctgggcaacgaggcgtccatcgcgcagcgtctccgcggggccgtccccggcgcgcgctacagcctcaccttcagcgccgcgaggacgtgcgcgcaggcggagcggctcaacgtgtccgcgtccggccagtccggcgtgctggtcatgcagaccatgtacagcagcaacggctgtgactcctactcctgggcctgggacgccaacgccgacgaggtcgaggtcgtcgtccacaaccccggcgtcaccgaggaccccgcctgcggacccctcatcgactccgtcgacatcaagaccctcaccccgcctcgccgcaccaacaagaacctggtgaagaatggtgatttcgaggaggggccatacatcatccccgggaccaagtggggggtgctgatcccgtcgcgcatggtggacgagcactcgccgttgccgggctggatggtggagtcactcaaggccgtcaagtacatcgacagcgaccacttcgcggtgcctcgggggcgccgggccgtggagctgctgtcggggagggagagcgcgatcgcgcaggtgatccgcaccgtgccggggaagcagtacgcgctgtccttcagcgtgggcgacgccagcaacacatgccgagggtcgctcatggtggaggcctacgccggcagggagtcgaccaaggtgccgtacgagtcggcggggcagggcggcgccgccaagcgcgccgtgctcccgtttcgcgccacgtcgtctcgcacgcgcgtcgtcttcttcagctcattgtacaacaccaggaccgacgacatgagctcgctctgcgggccggtgatcgacgacgtcgccgtcgtcagcgtgcgcgcgcggccgccaaagcgcgcctagaacgctaagctggctggccgtagtgcgttgttgttgcatccttgttaattagacaacggctcggtgcttaagcgctcaaactgcctattgagcttgaatgtgctgtgcactaagggattcgtcggtctgagagaggtgccaccctcagtatgtcacaagctgttggaagacgttaactgtacctctgccttctcttgactgagagatcaccttctcttagcaacgatatgtctcaccacatatttgaggatatctactctagttatgagagataacactaaaagataaccattgtaaatttatttttattgttttacctatattgcgtgcactactacaaaaaaaaaaaaaaaa

SEQ ID NO: 4539 - DNA, 1421 bp, Triticum aestivum
  Clone ID: TRIAE-23APR03-CLUSTER26154_1
gcccacccctccccccctcccccttcaccctcccccctccctccccgccacgccccccaccgatccaaacaccctccccaccctccccccccccccccccccggccgcgcgcccgtgactcccaccaccacccccaccactcctgcaacgaccacggccgcaaccgcgtcgaccgcacagctgggaggatcacctattgcaagatgcgggggggcaggaccaccgtgaggagagccgcggggagaagctagcggggggtgcccggggacgcaacttctgcagccagtcgctcgcaggagcctccttcaggcaagacttcgacttcatcaagtggtggcagcggcaggggaagcctggctccctcacccgtatggtgctcatgctgctgacgtgcagctggcaggcgttcagccgtaatcgcctgacccggtttcccaatgcctttataatttgcttcatcgcgtcgcgccgccggtttctcgcgaccatggagctcgatgttgcgtaggtcaccttgttcggcatgtaaagcacctgtgctccttgaaacatagagcaacaaatcatcaatagcaactgcagcgactgcagagaccgcgccctggaggcgtgcggcaagaactgcacagtccctggcggggctccggcgggcgatgcaccccatagacgtcgccggcaaggtgtgccagcacgacgaggcccgcgccatcgcgtgcagcatgccgaagctccggcacctggagatcgggtacatgctgatcgcgaccaacgccgtggtggagatcgcgtcccggtgccgcgacctcagcttcctggacctgcgcggctgctggggcgtggacgacaagctgctgcaggacaagtacccggggctcaaggtcctgggcccgcgcgtggacgactgctacgagaacagcttcctggaggagtgctccgacgactcggacgacgactccatctactcgtgggaggagttcatggacgacgaggactacttcgccgccgggagcgacgacgacgaggccctgtgggacgacggccacgccctcgaggggctggaggtgaggttctacggcggcgggttcggcgagggcgccttcgccggcttcgactggccggagtctccatgaaccaagccttcttcttcatcaataagctgtcaagagaagcgaagtttgcctgcctgcttgcttgcttgctcctgctgctgctgtcttgatagcatgtttcagctttgaagcatcttcttccgtgttcatgtgcttgtaattgtgtcaaattgtgtcgtctttagctgcttgcagatattggcctggatgttgagtgagcttgtctggaatgtaaaaaaacctgtggtgcttaaaacatagagcaacaaatcatcaatatgaactgttgagaataaaaaaaaaaaaaaaaaa

SEQ ID NO: 4540 - DNA, 1075 bp, Triticum aestivum
  Clone ID: TRIAE-23APR03-CLUSTER26240_1
taatactttcccctaccatcagcagagccacatcagggggcccgggtggaggtttgggtcgctcctactcagaaaccccagattcccaaattcctcctcgacctccatcccgtggaatccaaccaacgcggggaggcacccagcacgccggcggcgatgatccagctcctgttcgtggtgctcgtcgccgaggcggccgtggcgacggtgctgctattcaagacgccgctgcggaagctcgccatgctgggcctcgaccgcctcaagcgcggccgccgggcgcccgtcgccgtcaagaccgttgccggcgtcgtcatcacgctcctcgcctccacgctctacagcatggccgagatcagcggccgcgccggggaccccgaggccggaggcggcgccgccctctctcccaccgaccaggtcctcttctcgcgccacctcctcgaggcgtccctcatgggttacactttgtttcttgctctagttattgaccgactccaccaatatatcagagaactacgtgggctaaagaagaatgtcgaggctgtatcgaagcagaacaaaacgttagaggaaggaaaacatggaagatctcaggagatagcgaaataccaggaagaggttgccactctgaacgaggagatgaagaaactgaagctgcaagtacaagagaagaccgaggaggtccatgttgctgaggacaaggcacttgctattcaaaagcaatctgaaagcttgctgcttgaatatgaccggctcctggaggataaccaacatcttcgggagcagctgcagtcaattgatctcaggctctccaatccttcctgagagaagaatgtattgaagtagaacattatcctatcgtcaacctacttcgtgcttgaaattgtctgtttcacttttggtgcgaagtcgagtttactctttccgtaggatgttattacccagatgacatgctaatttagtaatgcctctcttatcggttttattgtcttacctaacaatatgttgaaacaaaaaaaaaaaaaaaatactccccggtcccaatcaaaaaaccactaagtcagaggggacccgg

SEQ ID NO: 4541 - DNA, 2376 bp, Triticum aestivum
  Clone ID: TRIAE-23APR03-CLUSTER2630_1
gcgcgacgcaccccccacagaacccgcgcccgacccgagcagcagcaacgcaccgtccccagcacagaccccgagcccgagcccaaaagccaggaaggaaggaagcacaaagactctccacccacctactcgaaaccaaaatcccctctccgactctcagaaatccagcgcggcgattctgatctacatacagatccccttgagctccctcgctcgctcgctccggccggtcgtcgagatttggagtgcctgagacgttcatgggtgtggagtgagatcgagagcggggaccgtgaattcctacgagggccgccattcggcttgcgcgtctgcatgaactgtttcgtcaatctgggactcaactccaactccaaccactacgtcgcctgcctcctcatcttcctgctgcatttctccccgcagccgctgctgataaatcaccccaattccaattccaattcaagtagaagtaatcgtcaagaaggagaatccgataccagtactagtaatcattaaggggggaaaacagagctcaacaaatagcgaacagcaacagcacatacggtgaaaatgccagtagtatttgccgcacgtcttctgctatcgttattggtggtgggtttgcaggcattgccgctggaaatgcgcttaggaatgcgtccttcgaggtcgtttttctggaatcccgtggactactcttttgggtttcctgttgatcttggggcatcttgtcttcatggtgtttgtgaagaaaatcccctggcaccgatcattggaagacttgggcttccactgtaccgcaccagtggagatgactctggcctttttcatcatgatctcgagagttatgcactttatgatactaatggatctcaactcccacaagagtttgtggctatcatgggcaaaatgttttagtagaaaagataagggaagggtttgaggctataaggaaagaggctggcaaattatgtgaagaaatgaaggaagatatttctatagcgaaggccattgcaattgttttggagagaaatccacactttaggcaagtggtgattgcacatgatgttctccagtggtatttagtgctgatggagggatgtttttctactgatgcggatgccatctcgctccagtgttgggaccaggaagttcttcttcctggtggccatggtctcatggttcgtggatatcgtccagttataaatactttggcaaaaggtctagatatacgccttggtcacagggttgttgaaattgttcggcactggaatagagtagaggttactgtaagcaatggtaaaacatttgttgcggatgctgcagtcatcaccgttcccttgggtgttcttaaatcaaacaccattaagtttgagccgaggctcccggaatggaaggaggaagcaataagagaactgtcagttggagtcgaaaacaaaatagttctccacttcagtgaggttttctggcctaacgtggagttcctcggagtagtttcatccaccacatatggctgcagctatttcctcaaccttcacaaggcaacagggcatgctgttcttgtttacatgcctgcaggccggcttgcttgtgacattgaaaagatgtcggatgaggctgctgctcaatttgccttttcccagttgaagaagatcctccctaatgcagctgagccgcttaactacctggtgtcacactggggctcagacgagaacacgcttggttcctacacctttgacggggtaggcaagccgcgcgacctgtacgagaagctccgcatccccgtcgacaacctattctttgccggggaggccacaagcgtccagtacacgggcacggtgcacggcgccttctccacgggggagatggcggccgaggagtgccggatgagggtcctggagaagttcagggagctggacatgctggagatgtgccacccgatggccgagcaaacggccaccgtctccgtcccgctgctcatctcccggctgtaaacagtcgcgcccctaaactatctatctattgtcacgtcgggtttgccggccattcattccagtgattgctcggggaaggcagcgtgggagcaatctatccttgctcttcctcgtggcatgaggcgtgtggacgtgtgtgcctgtggtttgcagaataaacttaccgtggggttaaactgtaagtgtgaggctggggtttgtgtttggtaaggcgttattagctgcggcctactggtccagctttatggggcagggttgacggtgtagtatgtgtgatgaaacactgtaggtgtactacattgacattcttaatattggtgatgatggcagattttcttaatattggcgatgatggtagattatccgaaaaaaaaaaaaaaaa

SEQ ID NO: 4542 - DNA, 1786 bp, Triticum aestivum
  Clone ID: TRIAE-23APR03-CLUSTER2634_1
cacttccgtcattactgccgacaccccgtttccacccaccctcctccccccccccaactctcctcccactctccgcccccggcgcggacgccccgccgggcgccgacgctcgcccgcgccctgcggcgagacccccggctcggcgacggcggctgctaatcacccccccccgctccgccgtcccctccgtcgtagtttccgccggcacgccgacgcccgccccctaccggcggccgaaaccccaggcgcggcggcggccggcggcacctgctcagatccgatggcggcgacggagccgccgtgggtgctgatggccacggggcggtcgccgaccaccatcgcgggtgctcaagtactgggggaagcgggacgagacgctcatcctccccgtcaacgacagcatcaggcgtcaccctggaccccgagcacctttccgccaccaccaccgtcgctgccgagcccctcattcccatccgaccgcatgtggctcaacggcaaaggagatcgcgttgtcgggcgggagattccagagctgcctgagggagatacggaagcgggctcgtgatgtcgaggacgagaaaaaggggatcaagatcaagaaagaggactgggaaaagttgcatgtccacatagcatcctacaacaacttcccaaccgctgccggtttggcctcttcggccgctggccttgcttgtcttgttttcaccctgggaaagctaatgaacgtgaatgaagattacggagaactttcttcaatagcaaggcaggggtctggaagtgcatgccgcagtatatatggtggatttgtgaaatggtgtatgggaaaaaatgatgacggaagtgacagcatggcagtacagcttgctgacgagtcacattgggatgatcttgttataatcatagcagtggtcagttcaaagcagaaggaaaccagtagcaccagtgggatgcgagacactgtcgaaacaagccccctcttgcagtacagggcccagactgtagtgccaagtcggatattgaaaatggaagatgctatcaagaatcgtgattttgaatccttcgccaggttaacttgtgccgatagcaaccagtttcatgctgtatgtttggacacgagtcctcccatcttctacatgaacgacacatcacacaggataattagccttgtggaaaagtggaaccactcggaaggaacaccacaggttgcctacacatttgatgctgggcctaacgctgtcctaatagcacggaaccgcaaaactgccacccttctccttcagaggctcttatacactttccccccacagaagaatgacttggacagctatatgctcggcgataaatcgatcctaagcgacgctggtttgcaatccatagccgatgtcgaggcccttccagcgcctccagagatgaaagctccaaaccaaaaattcaaaggcgatgttagctacttcatctgtagcaggcctggggccggcccaaaagttctcaccgatgagagccacgccttgattgattcagccacggggcttgcgaaaggagtgtaattttgaacgacgataggtttccataacagtctttggttgagattaatgtagaattgtcacgttgttgtacactcagtactttcgtcattttgatcttgtactgtaccttcgatcttgtactatttccatcattttgtccctgactgttgtagcctcttaaagaacatgtatatttcttcaataaaagttcgtggaacaaaaaaaaaaaaaaaagatcccatcgatgccatcgacctcga

SEQ ID NO: 4543 - DNA, 1550 bp, Triticum aestivum
  unsure (1)..(1550): unsure at all n locations
  Clone ID: TRIAE-23APR03-CLUSTER263865_1
accctgcccgcttagttcctcccgcctcctccccccccccacccacgcctcgccctccaacacactacttttctccacccccccggccctccatcctccctgctgaccacgcgccggttgcgccatggcggcggcccgcggctcgggatagttggggtataaggcgcgggcgtcgacgcccgaggaggccgtccgcctcggcctgcagctaaaggcgcccggccccgccaactggtgcgttgtgccgaccacctcgggcggggtgggcgagagagagagctggcggcgccggagagccgagagcctgcggccggccgccatgctccgacaaggaggcgacgtcaagaagaggcccctggtcccccgaggaggacctcctgcgcgactcgtacgtccaggagcacggccccggccactggcgggccgtccccaccagcaccggtctgatgcggtgtagcaagagccgccggctccggtggaccaactacctgcgccccgggatcaagcgcggcaacttcacccaccaggaggagaagctcatcgtccacctccaggcgctgctcggcaacaggtgggccgcgatcgcctcctacctccccgagcgcaccgacaacgacatcaagaactactggaacacgctcagccggacgactcggcaggtcgccgagcgcgttcagcgcatggaagaggaggccaacagacgcaagcaagaggaagagaagaagccagcgccggcggcgaagaaggaccagcacccgaggcccaaggctcctcaagcggcggcagcagctgcggcgacacccgagaagcaagagcctgccatcggcgagaaggacaaggcggcagttgaccgggagagcctggaggacagggttaggctgtgcggcgacggtgaagaagtgagggccaaggcagctgccacgccgacagccatggacgcgaaagcggagcacgagaagaaggcggcggcggcgacatgcaccgcctggaaggagcgcattgtaggggagctgaagggtctgacagacatgaagtgggcggacaacacattggagattgcgaggaagaacaaggaggtggtcgccgtcggcgtcgccgccttctcgctcggcttcttcgtctcccagcggctcttcggtaagtgagcagcaatgcgtaccaaggacgaccatctcacatacatacaccaacagtgggtacgtaatatgtacaggctattgttgtgttagtaaaatgtacattgactcaacaaccatgtaagatatctgtggaatcaatcaaagtgtgtacattcagcaaaaaaaaaaaaaaaactatggcaatcagcttccttggtctcctgattacttaggatctgcatagttttcatttagggaaaagaaagggaggttgtggtagctagtgctcctgttatttactgctgtaactgtgacttggtactatgttgatgggttttgggttttgtactttgagtagatccgctgtttgcaagctgcaaaatgtggacgaataaagtcagcttgtcaattagtncaaaaaaaaaaaaaaaa

SEQ ID NO: 4544 - DNA, 1845 bp, Triticum aestivum
  unsure (1)..(1845): unsure at all n locations
  Clone ID: TRIAE-23APR03-CLUSTER26415_1
tccaatctctcccaactctcaccaccaattccttcctcccccattcccttccctccctcaccctcccctccacaaccactactcatcctcatacatagagaagaggcagagagatatagagtggggaagaaagtgagcagctagcgtccaggtccaggtccagccaccctcccccccccgccggcctacctacacaacaacccccccatgcacagatccatccgtccttcctctcttcctaccctaccacgacgttcccccacgcccgcctcacctcctccgcccgctctcgtaaacgcgcccaggccggcccactcctactcccacccaagctcagctacccccagagacctgtaccacccacacccccgcctcccccccctcccctctctcccatcccccgcagctccggcgcaaccgcagcccccacctgtatcctctccttctccctctcctgcgccgaacaacagcaaaagcttgcagtcagcatcaagccggccgccgcccgttgctactacatccgaacgacgacgacgacgacggcgatatacccaagccgaggaagcagacggcgccatggcggccgccgccaggccgactgaggagggaagacagaggttgttgcagggcgggaattaagctgctgctgctgctgctgagagctgctgccagcggctttgttggcgtctagaagcttctaggtgaggcggcaccgccttctaggatcatggctgttgtgccacgctgcgccgcccgtcggaattcatttcagtcgatccatcaaatccgttccttggggtgacattttctattttcgcgttcgtgtgtagtagtagtgataataatatgatggtcctcctccctgtggcgcaagagacgggagcgggctccggcgagccttacagcgagggtgacattcagaagcttggtgccaacacccctcggcctgggatcgcggcaaatgtgcaggcatctggtgagaggcttgtgaccatcagcgacctcaaaagcgaggagaggaagcagaagctcaacaggtacaggaagaagaagatccagaggaactttggcagaaagatcaagtatgcttgcaggaaggctctggcagacagccagccgagggtgcgagggaggttcgccaagatggacgacggcgacatgctcaagccgaggaagtagacggggccatggaggccgccgcgaagccgatgaggagggaagacaaaggttgttgccaggagggaattatgctgctgctgctgctgctgctgctgggagatgctgccagtggctttgttggcgtctagaagcttctaggtgaggcggcaccgccttctagggtcatggctgccgtgccgcgctgcgccgcccgtcggaattcatttcagtcgctccatcaaatccgttccgttcctatgggtgacattttctattttctgcgttcgtttgtagtagtagtagtgataataatatgatgatggtcctcctccctgcggtgcaagagagtggagagccctagccaggcaggctcctcttcttcttctgtgtacaaaggcttgaacttgaagttggtactactaaataaataaaacccaggctcctctccaggctccttttctgtgtacaaaggcttgaacttgaagttggtactaaataaataaaacccaggcccctctcttgtcacttgcttgccgccatgtgataatcttgttgttattgctattaataatcctactagtagtactactcttgtgatgatgatggttggtgaagtgcttgcttacaaattgacctatcagtntcaaggccccaacttccaaaccaaaactatgtccttttatgttg

SEQ ID NO: 4545 - DNA, 831 bp, Triticum aestivum
  Clone ID: TRIAE-23APR03-CLUSTER264172_1
atagccgcccgcgccactagtccactagagtagaacagagtgccgagccaacttcgcccaagagccaagaagcttccgagctccctcagttcccccacgagaaacacccttccgctgaagatcaagctgcagcggcgagcgatggctctagcccggaggttcctgttcctcttccccgccgccgtcctgacatgactcgcctcggcctccgcgtcgcccttcctgtctgacagagtactacacggtcctcacaaacccgtgcaaagggccacaataccctccaaccgaatgttgtgatgctttcaaggaatttgcatgcccatttgccgcgtaaatcaacaaccagagcactaactgtgcagacacaatgttcagctacatctgcttccatggctacccaaaaggcctgttcgccgacgagtgcctaaaaggaaaagaaggggtttcttgtgaaggcatcccagcggtagacaccggcgtgcccagtggcgggcgacaagttcaaggggtttcgcgtcctttggttgtgttcctgtgtggactaggagcattgttgttcccttgagtggtgtgattccctggacttctccaaagatggcgtgttgtcagttgtaagtagtaaggcttaggattcatttgcttctccttgacactctcttccattgctataatgtatccatttgttacagaactacatgacatcttaagattcaacattatatggatgatcacatcctgctattgggagagtgcacatccgaattgtaaatcagggaatcaaatatcaattaactattttccagtctaaaaaaaaaaaaaaaaaggccccta

SEQ ID NO: 4546 - DNA, 2079 bp, Triticum aestivum
  unsure (1)..(2079): unsure at all n locations
  Clone ID: TRIAE-23APR03-CLUSTER26420_1
ccctcgacccccccctcggcacgaacagccccgatccgcctccgcctcgcgttccactacccggcctgtcgcctagtcttctcccccaaatctctccctcaaaccctacagccgatccagccctccccaccgcgccgatcgccatggccgcccccaacaacgacccgcccgccgccagcgccagcgcctccaccagcgacgccgccctcgccgcgccggaggacacctcgatcgaggcgctggcgcggcgcgtgcaggagcacatgaccctcgccaacaaccccaccgcccgccgccacaagttctgggagacgcagcccgtgggccagtttggcgacgtcgccgacgtctccctccccgacggcgccatcgagccgccctccccgctctccgaggtccgcgccgacccctaccctctccccgccgccttcgagtggttcacctgcgacctcgacgacgacgccctcctcgccgacctctacgccctcctcgcccacaactacgtcgaggacgacgagaacatgttccgcttcaactactccccggccttcctccgctgggcgctccgccccccctccttcttccgcgcctggcacattggcgtccgggccaaggagtccaagaagctcgtcgctttcatatccggcgtccccgcgcgcatccgtgcgcgcgacgacgttgtccgcatggccgagatcaacttcctctgcgtccacaagaagactccgatccaagcgcctcgcgccggtgctcatccgggaggtcacccttcgcgtgcacctggagaacatctggcaggctgcctacacgccggccctcgcccgccccgccccccccaccacctgccgctactggcatcgatccctcaacccaaagaagctcatcgacgttggcttctcccgtcttggtccccgcatgaccatgagccgcacggtccggctctacaagctgcctgatgcgccgcttacccccgggttcccccgggtgccgccgcggggtgttgcagcagtcacacgctcgctcacgcccttcctcgcggcgtacctggtcgcgccacgtggtggcgcccgtgttggtgggccctggtggcgacccctggtggctcccccggacagctaccttgtggagagccctgagacgcacgaggtcacagatttctgcagcttttacactctgccctcctccgtgctgaacaatgccaactactcaacactcaaggccgcatactcatattacaatgttgctgtcaagaccccgttgcagcagctgatgaatgatgcactgattgtggccaagcagaagaactatgatgtgttcaacgcgctcgatgtcatggagaacgaggggttcctcaaggagctcaagtttggccctggagacgggcagctgcactattatctctacaattatcgcattcgcaatggaatcaagccatctgagcttgggcttgtgcttctatagggtggtcgaggctcaggatggtgtttgggttatactcttttcagcaggtactccttgtgtggctggtttagtatgcgtctttcctggttgctacaggtgatggtttgatttcggtcatgctgtatgttgcccagtgtgcaatccgtcatagctcttttgtttattgtggtagcaaatcttccatgccttttcatgggaatccacattgatttgcaaatgaggagactggaattagaaattccttttcaattttaagactgtattttcaattagttacattcagtgtgtatggttcaaagaattttatgatggcactcagtttaccaaggaatttttgatagatttgtgttatgctaaatcattcaagtacccttgtgttttgaggtttgcgattttccacccgggtggggtaccangtaagtgtacccaattcgccctatagngagtcgtattacaattcactggccgcgtttacaacgtnnngactgggaaaaccctgcggtacccacttaatcgccttgcagnacaatcccctttngccagntggcgtaataccaaaaagcccnnaccgatcgcctttccaacanttgccancctnaatggnnaaanngggaaccc

SEQ ID NO: 4547 - DNA, 1310 bp, Triticum aestivum
  Clone ID: TRIAE-23APR03-CLUSTER26421_1
gttgacagacttctttccttttgggctggttgtggttgatgggcatctatttgttgttgtgcggttcgtttgcttgccttttgagcccacacaataagaagaaccccaccccctcaaaaaaagaaggggacaaaggagaagaaccctaggcggctctctgtgactcaaacccccgcagacccccgcgcgccccggcgccggcgcgaagcgaagaagaaggcatggggcggccgtacgcagtgaaggggaagaagaagcggaagctggaaggcggcgaagcctcgcgcgcccctccggtcgacgccgaggcggtggaggaagaggtgaaggaaaatgaggaggtgatggagggggaggcggcggcagaggaagcttttgccgaggaggtgggggaggggatccccatcgtgccccgcccggtcgacagtaagcggcggccgggcgctatcttcgtacttgagagggcctgcctcgaggtcggcaaagtcggcaagggtatgcaaatcttgaattcggatgatcacgcaaactatttaaggaagcagaatcgcaatccagctgattacaggcctgatatcattcaccaggcactactagcaatatttgatagccctctaactaaggctgggaggttacaagctgtttatgttaggactgaaaagggagtgttgtttgaaatcaagcctcatgttcgcatgccacggacattcaaacgtttctgtggcttgatgtcacagttattgcaaaagctgagcatcacggcagttgggaagcgcgagaagctccttaatgttattaaaaatcctgttacccagtatctacctgttggcgtacggaaaattggcctttcatatagtgcggagaaggcagttaatttgtttgactatgttgctaagtccaatgatgatgaacctcttgtgtttgtggttggtgccatggcccatggaaaggttgacaaggaatactcagatgattacatacagattagcggttaccctctcagtgctgcctgctgcctgaatcgaatatgcagtgccttggagcagaaatggaacatccagtgaagggaagtttgaaaacgaacattacatctttgtgttcagatttttatgtactcgttagcgcttatagtgttgttgtgctttttcatgtcttatgtctacaatattagttttgtcgagacatgaatcactggctgtaaaagtattaacactgaatgtttcaagtccttatgttcattgcataattgtgcctgcttatgctccttgcagttgtcatttttggtgaaatttgctcgacgcggccgcgaa

SEQ ID NO: 4548 - DNA, 1327 bp, Triticum aestivum
  Clone ID: TRIAE-23APR03-CLUSTER26423_1
gcgtgaccgcgtccctcgtgggcggcgccggcggcgccacggcgggggatcggcatggcttgcgtccggggggggggattcgtcgtggtggggccgaccctctgctatcaggcgagggatgtagccagccgagcctgcgcaggagggggcggagcacgggacggagagggaagcacacgggaaggagagcaggtggcgggatagccggaggcgaggcctagcgcaccagcaggtcatggcatccatcctggagcacgaccccaagacgaagcgcaaggtctacacccgctactccttcaacgacttctcggtcttcgacatcaacgccgagtcgcctatccctccaatgcgatacaccaagaggtgtgtaaatggtttggaactccaagacactgcaaacatacttactgtcaagatagtctcctcggataaaggcttcccaatcgatgtgtatggcactatcatcgctagagacagcattgaccacaagtgcatgtacctctttaaccgcaccagggacaattgccaacctatcaaagtcaagggatgaaaatttgatcttaactggcccaggtcgaggtctggtattacttgatttcatatatctggagatagatcttaaaatcaaggttggcgaggagcctctaggcgagcaaatcagcaagggtttgcttatgattgatggacgagttctgcctagagacgaaaaggttgctgttgcacatcaaactcttgagagctggtttagtattgtggacgtgaggtatgcaactcttcttaatgctgttgagggtacgttcgagatcaagttacttgagggacgattctgtggaaagatcatggctggcatcgagggcattcaacctaggattgtgatttataatagcaaggaagacggtgtggtgtcttgtgaaggacgtacagatatcacactccggcggcgagtcatgaccctccgtctgaatggtatgctcacagttggctttgcagtctgtggtggtggtggtgctgctactagaaaacagaaagttgaattcacaccacagcaccgtggtgaagagaaaaaggagatttgcttcaagtgaaggtcttctggtccttgatggactataggccgtaatcctgtagcaacatgacaagctaagttgtggtgttatcatgcttcaaatgatgtaatgaatcaagtaatgattgtagtgaactaagttatatatttatattgtcatggagtggcatatcggcaacatttgatggaagcagttatgttggaagtgtattatgcagaaatttggacgtttctgttttctgttatctactagatttcagt

SEQ ID NO: 4549 - DNA, 1278 bp, Triticum aestivum
  Clone ID: TRIAE-23APR03-CLUSTER264354_1
acacggatcacattgcagcggctggcaatactatcaaacagccgagcagcaagtacgcaccacatcgtaccattcctagacaagagcatggctccggcgatcgccgcaaagcctctcctaagcgatctggtggcgcaatccaggcaagtcccgtcgagccacatcagagcggtcggagaccgcccggacctcgccaatgtcgaccacgagtccggcgccggcattccgctcatcgacctgaagcacctcgacgggccggggcgtcgcggggtcgtcgaggccatcggcgcggcgtgcgagaacgacgggtttttcatggtgacgaatcacggcatcccggaggcggtcgtggaggggatgctgcgcgtggcgagggagttcttccacctaccggagtcggagcggctcaagtgctactccgacgaccccaagaaggcgatccggctgtccacgagcttcaacgtgcgcacggagaaggtgagcaactggcgcgacttcctccgcctgcattgctacccgctcgggaagtagtcggcacctactcgacggaagcgagagctctggcgctgaggctgctggaggcgatatcggagagccttgggctcgagagaggccacatggagaaggccatggggcggcacgcgcagcacatggcggtgaactactacccgccgtgcccgcagccggagctgacgtacggactgccggggcacaaggaccccaatgccgtgacgctgctcctccaggacggtgtgtccgggctgcaggtccagcgcgatggccgctgggtggccgtcagccccgtgcccggcgcgctggtcatcaacatcggtgatcaactgcaggctctgagcaacgatcgatacaagagcgtgctccaccgggtgattgtgaacagcgagagcgagaggatctcggtgccgacgttctactgcccgtccccggacgcggtggtcgcgccggcaaaggcgctggtggacggcggccaccctctggcctatcggcccttcacctaccaggagtactacgaggagttctggaacatgggcctcgagtcagccagctgcctcgaccgcttccgaccgatcgcatgatcgactgtccgtctgggcaacaaaatctcacgggccacaaatgttgcttgctactgatgatgtgtcgccataggggaggcctatcaaggcgcccagaaccgttagaaatagttttggatggctaagatcagggtgaacggtagaacttttttttttgagcatcagtatagacccaagcgctcat

SEQ ID NO: 4550 - DNA, 1448 bp, Triticum aestivum
  Clone ID: TRIAE-23APR03-CLUSTER26571_1
gcatacacacactccgcaagtgccacccagaaccgaatctcctccgctgcagccgcaagcagcgacagccccggcgaggcggcgactgaggagaggaggggctgctgacagcgggatcgagcgatgacagctgtccggcggcaggcggcggcgaagcggggcggaggcggcgcggccgggaagaacgcattgctggcggcggacgggagcaagaggtggggggagaagttcttcctgctgtacacgcccttctggctcacgctctgcctcggcgtcgtcgtccccttcaagctctacgagagtttcacggagctggaatatctggttcttggattggtgtcaaccgtgcctgcctttctcatccctctgttcctcgtaggaaaggcagatagtattagaagtttaaaagatcgttactgggtcaaggctaatgtttggattataattttcagttatgtcggtaactacttttggacgcattactttttcacagttcttggggcatcatatacttttccttcatggaggatgaataatgtaccccatacaacatttctcctaactcatgcctgcttcttgttttatcacatggcatcgaatatgacacttcgtagattacgtcattctacagctcacctgccacagtctattcggtggttgtttgaagcggcatggattttagcactctcatacttcattgcatacttggagaccctagccattgcaaattttccgtattacgaattcgtcgatcgggacataatgtacaaagttggatcattgttttatgcaatatacttcctcatcagctttccgatgttctcaaggatcgacgaaaaagcagagaagtgggccctttccagggtagccgtcgacgctctgggcgcagcaatgctcgtcacgataatacttgatttatggcgcatatttctggggccaatcgtgcccatccccgaatcaagacggtgtggccagccggggctagcatggttccatgcgcagaatgaaagcgtctagtccgggaacgatgtggattcttctgttcccacgtgtaccgttggctctccgccagtgccagcgttcttcaagaatcaagactgttcgcctctccattggagggatgaaaattgcaccgtcaaggcgtggttcttgctgattaatggatcgatttcttgtctgcatgttgtatttgcttcgtgcgaatagcgaactggtaatttgtaagttcagcctgatctcagaaaccatcttgagtaaggtggaggcaatgaagatttgatgtcaaccagaaagggatttttttttgtttgttgagaaaaccagaaaatggatcttgacgcaccacggtctgagtgcggctcgacagtacccttcggggtgtttggggcatcatttgttccgtgtgtgtccgtttgggttgaaatgaacaaaaacgacgaatcatgtcc

SEQ ID NO: 4551 - DNA, 684 bp, Triticum aestivum
  unsure (1)..(684): unsure at all n locations
  Clone ID: TRIAE-23APR03-CLUSTER26589_1
acgtaatcaatcctctctttctccttcccgctcggctcgggtaggggccgtgccccgctcccctccccagcacacataccccaccccgccgtccgcgatcccgaagctgagcctgagccccaacgtcccggtggcggcggtcgccgccgccgccaccctccgggactgctccagggccctggccaggaccatgggcaacccaaaaccctacgtgccgggttcgatcgacggttcggtgcggcggtggttccgcgggaccgaggggcccgcggcgtccggggggatcatgtccatcgggggcccggctcccggctccaacgccaagtcaacggccgcctccgcggccacctcggaggcaaactcctcgacaagcgccaccaggttctacgtcaagttcgacgatgtccaggggtccaatgtgggcttcaacggaaccaggttttaaaccaaatccatcagaagaaagatgttggcgacagtagtgaaccagtaccataccatgccccactgtgtatcatctgcatcttggattttcgtcagttaatatttctcgcatatctgaagtactagtgctgtgatttcaagccaacagaatgcaagttctgcttttgtttgcttatttgttcagtataaaaacaaagtgaaaacanttaaaaaaaaaaaaaataaaatatattttatgag

SEQ ID NO: 4552 - DNA, 1662 bp, Triticum aestivum
  Clone ID: TRIAE-23APR03-CLUSTER26596_1
actctcctctgtttttccctcccaagtcccagcaacgagggcacgggcactcgccggcgccgccgccgccgccgccgcagcgcgtcatcctcttcctctccctcctccgcgtgtcatgttcgcgcacggctctctcgcgagccagcttgctcgaaggcccctgcgcgccgctggctccccgctcggaacaggggcaggggagctacaagcaatgcgccgaaacataggaaaacagattcacctgtgccgagatggaggcaagtctcaacacaagcatcttccccaaaagctccccttgatgacctatccaattccgcaaggaagcgaacggtggggacttccatcagtgatagtgagaatttggcctcggatgaaaacactatggaggtattcgatcagtgatagtgagaatttggcatcggatgaaaacactatggaggtaatgggagaaaaatatccctcttctgttgaggtagatgttcctctaatgcgttttctcaaaggaaaaggtggatctgtgcagaagcagattgaacaggagactggagttaaaatcattttcccatctgcaaaggaggaaacacttgttgccctcgaaggcaaaagtgctgaaagtattagaaaagcatcagagaggatttcaaagatccttgaagaggctgttcaaagtccaatgctagattactcgcatttcatatcacttccgttggccatccacccggctcttgtcgagaagctaaataacttccagaggtcgatcctcggggcgtctgcatctaatgtggatagtgataaggatgaaagcctaagcgaaggttctatggaagaaattgatgaagcagcgaaccctagtgtttcagtcaagctgccagtcaaagaagaaatttctgtcatagtgaaaatggataataagggctcccaaccagagttcggcattgacaagtcgatattcataaaacccaaaacgtttcacctaacggttcttatgttgaagttgtggaacaaggatcgtattgctcaggcttctgaagtcctccagtcaatatcttcccaggtaaatgaagctttggaaaaccgacctatctccatacaacttaggggtctgtttcaacatgcatgaaaggctcaccagctagggccagggttgtatatgctccagtactggaagttggtggagaaggacgccttgtccgtgcttgcaaggtaataactgaagccttcgtcaagtcaggcctagttcttgaaagggatgccagacaagaattgaggttgcatgcaaccataatgaatgtgcgccacaggaagagcaagaaatcgaaccgaagaaacgattcgttcgatgctcggaatatattcaggcaatacggggaacaggattggggcgagtacccagtaccggcggtgcacctatcgcagaggttcaagtttgacaagggtggatactaccattgctgctgctcgatccccttgcccgctgctcgattcccttgcctgaggtggctcagacggagtgagctccgtgtgttttcaacacaatgcagtattgaatctcaatgtaagatcaatgatataggatttagatgtgcaatacttatggcacatctagatgtgctttagcaaaactgtttatgtattgcttgggcctcgtgggcatatttatag

SEQ ID NO: 4553 - DNA, 889 bp, Triticum aestivum
  Clone ID: TRIAE-23APR03-CLUSTER266010_1
agaccaagaagagcttcagaaacggaaaccgacccaagcgtctcagctcctctgccgcagcggcccgccgcgacgcaagatggggacagacgcccccgcccccgccccggccgcggccgccggagacggcgacgcggcccggaagcggccgggcgggcaggacgcggccgcgggcgccgacagcaagcgccgccgcgcggagcacccctcctccggctcccgcgagcgccacggccagcagccgcagccgcagccgcagcggcagcagaggccggggcgccccggggacgggggcaaggggaagagggagacgatgcgggcgtcgcacatcctgatcaagcacgaggggtcccggcgcaaggcctcgtggcgggaccccgacggcgtcgccatctccgccaccacccgcgacgacgccgccgacctcgcccgcgccctccgcgaccagatcgccgccggggagctccagttcgacgccgccgcccgcgacaactccgactgcaactccgccaagcgcggcggcgacctcggtccattcgagaagggcaagatgcagaagcctttcgagaaggcagtgattgctctgaaggtgggggacatgagcgacgtggttgacactgagagcggggtgcacatcatcctgaggaccgggtgacggcgtccgtggaagctctgtcgatccatatgagattggcttgaaacatcgcgcgttctcttaagcagagaccttttgcttttaacttgcattgtaacagtgctgactgcaaagctactatgggatttggctgtatgccaggattagacgttggtggtgcttgtgttgtctcgataatgttacaacttttgagtgaaattcagttgttattctctttcaaaccttaaataacaa

SEQ ID NO: 4554 - DNA, 1034 bp, Triticum aestivum
  Clone ID: TRIAE-23APR03-CLUSTER26608_1
agcaaatgttagggtattaacgaggtccaaaattgaaggtgtgactggtcggccaatggtgcattttcacggtccttgcttgcccccgttgagagtcttctcgtgcctcacgtctctgcccctctccctctctctctccggtggttctgccgtccggcgtgaggatgggttaggtggttggcctcctgttcatagtagttttaggtttagtagtactgtgagacttgcctccgtggcatttggctttatgccgttttggatctctccatcgacgcgtccgggcagcgtctggtggtctccggctgcctcccaggcttgtcgtccatggtggacggaggcagttgggagtggatctggcacgagctctcttcccctaataagcccgaggtcttcttagatatcgaggattgccctctgcagcagcttgctctttcaggtcacttgggtcgtggatgaggagcaggggtgttgcagatacatgaagcttgcaggtcgtgttcgagcatatcagcagctgattccatggtggagcgacgacgcccttggttggctgccggtctccgctggctcgctgcttcttctggctgaatggcggccgaatccattcctcccggcgtgtgtgccttatggaagccagatttagctggggtgcagccgccggggtgcgcagctttcgcagcccatggcggtctcctcccgccctgccggtcggccccggctatgggaggcagatccagctgttgttcggaggctatggtgtgcaggtgttgcggccatggcgatttcttcacgccaagtggttcgtccccggcggcgatgaggttcaatccgggcggtggctgatagggacccgatcgcgtttcttgctttcagtttggggtcctccatgtaaaagtcaggggcttgtttgttatgtattttactttggagtccttgtaggagctttgtacttccaccgcctttgtgttaaacgaaagctcggggtcgttctagacccctcttcagttaaaaaaaaagacggggcagcgcatacc

SEQ ID NO: 4555 - DNA, 1014 bp, Triticum aestivum
  Clone ID: TRIAE-23APR03-CLUSTER26620_1
atacttctctagtttatactaccccggatccccttgctttgcgcgcgctagtaggagtacgccgcctgccgccatctccgttagactagtcgccagcgccatatggaggactacggcggcgtggcgagcctggtggcgtccggggtggtgttgttggtcgacggcgttcctgctggtgcggccgcggttccccaagcgctgctgcgacttccgcaaccgccctgtctccactatgcccgcgctggctcgcctcgccctccggtgcctctccgtgcaggactgtgcctcccccgtctcccccgggcccctcacgctccccgccaagccagatgagggccctggcggtggaggtggcctacagcatctacgacggggcacgcggccacctacgcggcgacgcgccacctgaccacccccggcagcctctcatcagcatcgtcggcctcgccgccggcctcgcctaccagaggtgtgggacggagctggtggcgtgcctgctcgtcacggagatatccagcccgctgctgcacctcagggagatgctcaaggagctcggcgtcaaggacacggacctcaacctcctcgtcgacatcctgttcgcggtgaccttctcggtggcacggatggtttgcgggacgtacgtcacctaccgcactgtcacggctgacaaccccatcctcatcaaggcgatggcgacgagcttgctgctggtgagcgcctactggttcttgaggatcctcaggatggtcaggcacaagattgggaagaagaggctggcgtccaaagccgccggcaaggaatctatgtgatgccacaagtggtgtctcgccgcaattattgttgaaaatgcacgttatgtagtagtactactatctagcgcattaatcgtgtggtgggtaaaggatgatgtcccaagcatgagatgcatgtattctggtcattttcattttattaatgtgcatgaactgttaatgtcacaagcatgagctgtttcgctcaaaaaaaaaaaaaaaa

SEQ ID NO: 4556 - DNA, 2574 bp, Triticum aestivum
  Clone ID: TRIAE-23APR03-CLUSTER26639_1
tcggaatgcccatgggtccattcaggctacaagcacctgtcggaagccgggttagagcgtcggaaccagcgcaaagagcgatggcggcccagggggggaccgacatggaggtgggcggccacggcgtcgccgtcatcaccagatgaaacccgccggtcagctcggtctccgtcgaggtactcctacgattaaggaaacgccatgtcaacgctctgtagaggaatgtagtcaaaactatagttgtaacgcggaaaggacgcaattcgtcgggaggatgccatattggttcctgtgcggagcttagcaggggaaatttcgggtggataaaggttgattacgtatcaatagacacgccatcgcaatctcggggagggacattaacgtcacctctatctgtagtttgtgcttcccatcttggagggggggtataaggtttcagggactgtcattcagcgacatcaacttcccctgctacttgagggtttggatggattcctatggaaataactcaagtccctgttctaacttaggggctcaaggggttcaggaatttctactgcaaggataagaagtaactcacctccgctcccgacaggaggggatgagaaatttcttaatgctgtaattgacaggaacttagcccatttgctaagaagggtgaggaaaggataatggactggggataggtgcgggaaggttttttatgatcacaacgcgtccgttggatatgaaaagttgaaagaagtggaaacaattagcgaatctgctattgagaatgtgaacttgatggaacacatgtttgatgacttggagatgcacttatttgcactgagttcatttgataagcactcatctaagattgaccatcttctaattggaaagaaaaaaaagtattaaggggccatttttggtccacaacatgtaaaagcttagcatgtgaattcattctagaaacttgttttctcccagcacacttaagcactagttctggtgttgatttcttggatggcaacaacagtcgccattcgaggtggagagttgatgggtattggaatggctatcgcaataatagtcagtctatgtcgtgggcttatggattatggaattgcgaaatttatgatagcgagaattgacaggatgatagtgaatgtacaaaatggggaatttcaaagagaaagaacagacaggatcaacgcgaaggttctgactcttctgaggggagccctagggactgaaaagataaatgaagaggacttgtctattgaggcgggtattgagaatttataatggaagaaacaagttcatgcggagctggagggatgggatcctacccatacgatgataaaaggaaggcaactcctgatcctgaaattatgacgtatattcagaaatctaggagcatggcaggagtcactccagatgctgagttgatgaagctaagtgacaaggacatagtagagatggtgttcttcccagtcataaacgaagcatgccgtgtccttgatgagggcattgcggtcaaggcgtcggatcttgacatcgcctcaatctttggcatgggtttcccaccttacaggggaggggtcatgctatggggggattccatcggcgcaaaatacatccacggcaagttggcggagtgggcgaagcggtacggcagcttcttcgagccttgctcctaccttgccgaaagagcggcaaaagggattcctctgagtgcaccagcagcaagtcaagtcaaggcccggctataggtgatggtaggtctggtatttctgtcagctgaaggaaattatgtcaccgagtaataatgcgcgatgaaggtggtgattagtggaaggggctgaataataataacaacacgtgagctgtatattgggaagcaaaggaaaccgtaactgattgcggttggacccttggaagagttttatgtaatatgcgcaatgattcttaaataatattgcaaatatgctctgtcaattcttttgttacgcaccgaaactgtcccacaacagtcaagaagtcggatcttgaaatcgcctcaatcttcggcatgggtttcccaccttacaggggaggggtcatgttatggggagattcaatcggcgcaaaatacatccacggcaagttgcaggagtgggcgaagcggtacggcagcttcttcgagccttgctcctacctcgccgaaagagcagcgaaggggattcctctgagtgcaccagcagcaagtcaagtcaaggcccggctataggtgatggtaggcctggtatttctgtcagctgaaggaaattatgtcaccgggtaataatgcgtgatgaaggtggtgattagtggaaggggctgaataataataacaacacgtgagctgtatattaggaagcaaaggaaaccgtaactaattgcggttggacccttggaagagttttatgtaatatgtgcaatgattgttatataatattgcaaatatgctctgtcaattcttttattacacaccgaatttgtcccgtaacagcgtgaatgtttaaacctgaatttttgaaaaaaaaaaaaaacaaaaaaaaaaaaaaaaaaaaa

SEQ ID NO: 4557 - DNA, 2003 bp, Triticum aestivum
  Clone ID: TRIAE-23APR03-CLUSTER26695_1
taccccgacgcggtcgcaccggcgtcttacgcgccccgttcttcctagcgcccacttcgggcccaaatcttcggcccggcgcagataaccgacgaaacgaactgactgccgccaaagggcctccgggcctgttggcgaggccaggtcttttgtggcctcctagttcaacgctgccgcactggagtattgatggaatcctttctcatgtgcaaccctttggtttgaagtcgttgcatgaacgaaaatgcgtagaaacaacaactggaaaaatcgaccaaagagcaacccgacggccgtggtgatggaggcgatggggaagcagcagagggaggaggtgctcctccgcgccgcctccgacggcaacctccgactcctcaagaagatggcgcgctggatggggtcagggggccaaggcgaggccgccgtacttgcggcggtggaggacggcgaagggggtcgcccgctgcacctggcggccggggcgggccgggtcgaggtctgcaggtacctcgtcgaggacctccgcctcgatgtcaatcaactcaactgtcaaggtcacacgccactgtacctttctgcctattttgggagagctgctgctgcaacatatcttcttgatcatggtgccgatccactagctagcaaactacggtcacctctttatggcgctgcaatgcaagggcattgtgaaatgttagaaatgctgctttcaagaggactcgatgtggatttaaattctgtacaagggacggcattgcatgcagctgcttgttataaacaacatggcatgatgaagattttgttggagcaccatgccgatcctaacaaggtttgctatcttaataataccccgttgagtttggccatgcggcagcgggacatgtctacagagttgttggaatgtgccaagctactcataaaggctggtgctgatgtgaattttattgaccttgatggtgatagttacgtgacagtggcagcgaagttcggctatcctggcatcatgaagtgcttattagatgctggtgctaaccccgatattccagatgaatatggtagaacaccagttgaatttgctgcctctaacggcagtagggatatggttgaaatgttattccctttaacttctcctatttcaacgctgccggactggagtattgatggaatcatttctcatgtgaaacactatggtttgaagccgagggataaacaaaagtgtgcgaagagaagaactgaactgaaacagaaagctttaaaggcttttaaggaagaggaatattttatagcagcactgctgtatagttgtgcaataacacttgacccgagtccagatgaatatgcaaccctattggcaaataggagtctctgctgtttgcgcaccaagaacggaagagctgctctccctgatgctaccatgtgcagaagggtgcgacctttttggccaaaagcctgctatcgagaagggtcagcttttatgttattgaaggactatgagaaagcatgcaaggcttttgcggatggcttgaagcttgaccctacaaatggtgatcttgcaaatgctttaagggaagcccaagaagctgcgaaggatgctcgtcgccctgaaaattgactgatgtgtcaaaccttacatgcagaatctgaggctctgttttgttgctaagcaccttttgtccatcctgaaaacttctgccaagaatatcccgtggtcgtttaagacttccgttgcacccatcgtttgtaaatataactggggatgaactcgctgaccatagtatcttcattccagtgcatgtgttgacaaactttatcgtcacagaacgtacggcatagtccggtcaccgagaagcgctggaggcggagcagtatgtaattggctcattaattcttccttccccttaccttcgcgggaagtggtaaatgatgaaatttggacttgaacaaaaaaaaaaaaaaaaaagcttatcgatcccgtcaacctcgaggggcggtcaggaacgcat

SEQ ID NO: 4558 - DNA, 784 bp, Triticum aestivum
  unsure (1)..(784): unsure at all n locations
  Clone ID: TRIAE-23APR03-CLUSTER267021_1
ccaaaaagcaagccttagctagttagctttacacagcctccattgaagtgcaagaaccaaatccttagcttacacgtccatcaaacacctcagttggctaccatccgttggagagatgaacacgttgtgcgccaagcccatggggttctctggtggcgtgaagtgccagcggcgggcgcgggtgagggtgtcggccgtggcggcggcgccggagagggtgacgatgtacgacgtgctggcggtggggaacgcggcggggccggaggagatcaaggcggcgtacaggcgcgccgcgcggcggtggcacccggacgcgtgcccgggcggcgccgaccggttcatgagggcgcgcgaggcctacgaggtgctctccgaccccgagcgcaggcggggctacgacatccagctgcgctgtggcgcgggcgcgggcgccgccgggtcccgctccagccccgcgccgcgcgcgggcttcgccgactgggaagcacagctggccgggctgcagtggcggatggcggacacgcgaggcgaaacgtgggggagcaggatgcgccgcggcgccgcgcagccgacattgttctaatctctaaaccgcagcgccggctcgtgctctgtgttttctactgtagtactgtatattctacgtagtttcgccttgttctctccttccattccattttacgcggtgggattcggttggtgatgaaactgtatagtgtagtacagacagtgtacaaaagtacggtagtttttttctttgaaaaaaaaaaaaaaaaacctntac

SEQ ID NO: 4559 - DNA, 1367 bp, Triticum aestivum
  unsure (1)..(1367): unsure at all n locations
  Clone ID: TRIAE-23APR03-CLUSTER2671_1
attagttcgcgcgcgctcgccatcggccctaaggtaacgcgtctctgttcatctcactcaaccacccagcaggcccagcaccaccgcgtcaagcagagcaggtgccgcctcctcctccgcgtcattactcaactcgagctccctgaccgcaaccactcaaccacccagcaggcccagcaccaccgcgtctaagcaggtgccgcctccgcctccgcgtccttgtctgcggcggctgcaatggccgaccgcgtctaccccgccgccaagcccactccgccgcccccaatggccaacggaggcggcggcccggcggcgcccaagccgcagatgtaccagcgccccatctacaggccgcaggggcaggcgaagagcaggcgcgggcggtcctgccggtgcagcttgtgctgctgcttctgctgggcactgctggtggtcgtcctcctcgcgctagtcgccgcggccgcgggcggcgccttctacgtgctctaccggccgcaacgccccagcttcaccgtctcctctgtccgcctcagcacgttcaacctctcctcctccaccaccgcgcccgtcctcaccgactccatccagctcaccgtcaccgccaagaaccccaacaagaagctcgtctatttctacgacgacttctcattctcggccgccaccgccgccaacgcagtcccgctcggggacgccaccgtgcccgggttcgcgcatgatgccggcaacaccaccgttttcactgcgaccatcaccgccgctggtgtcaccgtagaccccagcggcgccggctctgaccttaagatgtccggcgctttctccgtcgctatagatgccgacacgcgggccggcgtcaaggtcggcagcctcaagaccaagaagatgggcatccaggtgcactgcgagggcatcaaggtgacgccacccagtccacctccgccagcgccgaagaaggtaaaggggaagaatggcaccgccctggcgcctgcgcctgcgttggacaacgccgagacgaccgcgatggtgagcaccgccgcgcactcgtgcaaggtcagagtccgtgtgaagatctggaagtggaccttctaggtataatgccaactttagggactgccatgcaaaacattcaggaaacatatatttttcactttatattggaaagtagagaccatgaatatcgtcggtgtaaattccctcaaagttgattctatttttgttcttgtttggaattttcttaaacatatttttggtggatgtataacttggtgatttgttatttgtaagattacggttcgaatgaaaaaaaaaaaaaaaaaagcttatcgatacaaaaaaaagggggagnnnnnnnnnnnnnnnnnnnnnnnnnn

SEQ ID NO: 4560 - DNA, 1330 bp, Triticum aestivum
  unsure (1)..(1330): unsure at all n locations
  Clone ID: TRIAE-23APR03-CLUSTER2673_15
tgctttcattgttcccctccgccgcgagcttccagaaacgaaccacggaaagggggaggaggaggaggaagaagccaagccctggatcgatctccgccgtcggcatggcgcgcgtcctccctctcgacattgagcccggggaggcacccagagctggtgagacggtcgtaagcatgccaagctcttcagctgtggcatcacgcaatggaatcgagcgttctgagcaaaacataaaggacgatgaatgtgcgaggctggtgacaccagctcaacatgcaacagctgacaacaacacagaaattttgcctgagcaaccaatgtcaagacacttcatttggtggctgaaagttctgcttgtctgcttccttcttgtattagcatcttatatcttcgtgaaatttgtagtccgctttgcctttgagaaggtacttttgccaattatgcaatgggaagcaagtgcctttggccgtccagtattggctcttgtcctcgttgcatctctggctctcctcccactcatcttantcccttctgggccttctatgtggttagcaggaatgatcttcggttatggctggggtttcttgattattatggttgggactactcttggcatggttgcatcatattggatcggctcattgttccgcaaacgtctacatgcatggttaaagagatggcctcagcagatagctctaatacagcttgctggcgaagggaactggttccagcagtttcgagttgttgcactattcagaatctcaccatttccatatacaatttttaactatgccgtaaccgtgacagaaatcaagttcaatccttacctatgtggttcagttgccggaatggtacctgaggcattcatctatatctatagcggacggctaatacgcacgttggctgatgtgaagtatggcaagtataagatgacgccggtggagctaacatacaacataatctcgttcgtggttgccgttatcctcactatcgcctttacagtttacgccaagaaggcgctaagccacataaaaagctcagatgatacttgcgcagaggaccaacctggggtgactgcactcaagaatggccaccaggagtgttcccatgcacatcatgtagctttagatgtcgtgtgatgtctattcatcgggagcggattagggtgaagtgaggtggtgttagttgatcatcgttttctccgtcagaggaggcgaggtaggctctgacagcaggtggatgcacctgtctaactagatacatgcccagctaatatggttatactactagtactttattagtttcatgtagttataatcaccagaacatg

SEQ ID NO: 4561 - DNA, 1461 bp, Triticum aestivum
  Clone ID: TRIAE-23APR03-CLUSTER2673_26
ggtttgaagcaaaccggccggccaccaaccaaccaacgctcccgaatctatcccatcatatcatatcaaaccttccgccgccggcgagctactcgcagcgccggacagcccggcccacttgttctggttctctccctcctctgcccctccgccgcgagctccaacggagaggggaggaagaagcaaagcctcggacatggcacgcgtcctccctctggacatcgagcccggggaggcgcccagagctggtgagacggttgctagcacgccaagctcttcagctgtggtgtcatgcaatagaattgagcattctgagcaaaacataaaggacgacgaatacacgatgctgatgacgccaactcaacatgcaacagctgacaacaacacagaaattttacctcagcaacccaagtcaagtcacttcagttggtggatgacagctctgcttgtctgcttccttcttataatggcaacttatatctttgtgaaatttggagccccctttgcctttgagaaggttctttttccaatcatgaaatgggaagcaagtgcctttggtcgtccagtattggctcttgtcctcgtcgcgtctttggctatcttcccactcattttagtcccctctggaccttctatgtggttagcaggaatgatcttcggttatggctggggtttcgtgattattattgttgggactactcttggcatggttggagcatattggatcggctcattgttccgcgagcgactacatgcatggttaaagagatggcctcagcagatagctctaataaagcttgctggcgaagggagttggttccaccagtttcgagtggttgcgctattcagagtctcaccgtttccatactcgatttttaactatgccgtggccgtgacagaaatcaaattcagcccttatgtatgtggttcagttgccggaatgacacctgaggcattcatctatatctacagcgggcggttgatacgtacgctggccgatgtgaagtatggcaagcataagttgactactgtggagataatctacagcataatctcgttcatcgctgccgctgccctcacggtcgccttcacagtttacgccaagaagtcgctgaacaacataaaaggcccagatgatatctcagaggaccaccaacctgctgctggctctgctggggtgactgcactaaaaaatggccatcaggacgtgcatatcctgtagctttgtttacatgtcgtatgatgtctgtattcattcaattcatcagagaaaataggtagctaggctctgacagcaggtggatgcacctgtcttctaactagataaatatgtatggttttactgcttgattagtttcatgtggttgatcacccaacatgtattttggccttgttgttggctactggaaatttggccttctcttgaggtgcacatattttttgtcaaaaaaaaaaaaaaaa

SEQ ID NO: 4562 - DNA, 1041 bp, Triticum aestivum
  unsure (1)..(1041): unsure at all n locations
  Clone ID: TRIAE-23APR03-CLUSTER26742_1
tcctcatcgtcctctcctctcccctgccgccgccgcgccccgctttcccccaccccgctccccaaccctacccctccccccccgcccgccgcccgccgccgccgccgcgtcgccgccgcccgccgccgcgtcgccatgagtcgtcaacctgaggtgctctgggctcaacgctctgaaaaggtttacctgactatctcagtcccagacgcagaagatgttgtgatcaagactgaacctcagggaatctttagcttctcagctgttgctcatggggaatcttttagcttgaatttggagctatttgattccatactgcctgagggaagcaaaacaaagacaaaggtgggttcccgaaacataatctgttcgatccagaaagataagaaatgttggtggaagcgcttgctgaagtcagaggcaaaacatccatacatcaaagttgactggaacaaatggtgcgatgaggatgaagagtctgagaattcgggttcagacgatgactttgatggtggtgaggaaaatgacgaaagcgatgctgatgatggaatgctgtatctccctgaccttgagaagctgagagggaaatgagcaggcaggatatatgaaggaagtaggttgtgctgctgtagcaagtaggcaatcgttaacgctatatagcaagtaaccgttagcgctagaaacctgggatggtggtaccagacttgtgacatggtgccatgtcttcttatctaccgattactactctttggtcgtcgctgagctagggttctgaaatctgaatctagtagccatgagttgtggtttgtggccgacttggttatcggtgttatgtggcaagaagatgtcggacatgtatgctgagcacctcccggtttctctttgacatgatggcaggatcatactcatgtgcacttgaagaattagcggtccttcttttttcaggtctgtggaggatagatgctggctatggattgcctaatggaaacatgatatttcgatgatttttacagtttgtggttgggtncctgggtgccaatacac

SEQ ID NO: 4563 - DNA, 1580 bp, Triticum aestivum
  Clone ID: TRIAE-23APR03-CLUSTER26794_1
ggcgcacacccgcctgcaagggtcgctttcgcctccctctctccctatctcagcccgcgcccccttttgccgccgccgccgacgattcaaccgcccatgtcgatccagggcctgctcctcgaggtcagagtgacggggtgccggaagctgcgggacaccgacttcctctcgcgccaggacccccacgtcatcgtcgactcccccccccgccgactacgcacccgcccgcccgcccatgtcgatacagggcctgctcctcgaggtcagagtgacggggtgccggaagctgcgggacaccgagttcttctcgcgccaggacccctacgtcatcgtcgagtacgccaacaccaagctgcgcacccgcacctgcaccgatgggggaaggaacccgtccttcgacgagaagtttcatataccactcatcgaggggctccgtgagctgagtatcaacgtgtggaacagcaacacaatcaacaccgatgacttcattggcagctgcagggtgccgctgaacaaggtgctcacgagtggctacgatgatgcctcatggcccctccagacacgccatatgaagtctgctggggaagttaagcttatcatgcactttgatgtctcagcaatgaagaacaagatggcaggtaaaacttctggccagtacgctccttcgccatacggtgcctcctcagcttcgtacccagcgccttcagcatatgctgcagcacccccgccgcaccaagcttatggagctcctagccacgcaccatatcccgcgccttctgcgtactcaactccgcctcctcagcagccatacccaactccacctcctcagcagccatacccgcagcagggaggtcctcctacaagtcacccaccacagccatatgggcaaccgtacccgccgcagccatacgggcaaccgtacccaccacaaccttatgggcagcaaccgtacccgccacagccatatgggcaaccctacccaccaccttcagcagcacaatccccttatccacctgcgccgtaccctggagcttatccaccgcggccatattgatacacccagcttcagtgacctgacgtggcggcaccgaaacgaagaaatgataatcagttgtggccgctgagctgtttcaaatggagtacaattcacaagcctactgaaggtgtgttagataactgaaacagcatgtaaatcgtctcctttgcgctagtgttgcgaacagcctagcaaatcatcagaaacgtttactctctctggtatgcactatataagtagcttgcagaacgcgtgatcaagtcagttctatattgtggttagaaaccttctgttttgaagccattatcgacctttctacccgcaagtctgtaactatagttctagctgcttggatgccagcgaatgcgtggcaactgcaaagcctgcagcgtcttgcagccgacctgaaacctgaagtgttttgtgatgctcaataaatttgccttgtttgatatacgccatggtgtgtggtgaatagaatgtgatttcgaatgagatttgtgcggatttgccaatcccaacatcattgatgctaaaaaaaaaa

SEQ ID NO: 4564 - DNA, 1340 bp, Triticum aestivum
  Clone ID: TRIAE-23APR03-CLUSTER26806_1
ccgggggccgatgtcgccccccgccagcacctcctccggccccgcacgccacccgccgcaccccccccgcccccccccgtccgccggcggccgccctcccggccgccgcggaccgtcgacgtcgccggtgaggcgaatagcgcagcacacaggcgtggtggagtctgtggttgactcgatcgagcgcgcatctgtccctcccctccacagcacctcgtccaaccctagccgccacgggcaggagacggcgcagagcacctcgtccgccggccgccggcctccccaccgccgcgaaccgtcaacctcgtccgtgaatcgaccaccgcagcaagcaggcggcgtcgattctctgtctgccccaccacctcttcaacgccgccgccgccgcccctaatcagcgggcggagatgaagccagtggtgggtatcgtggtgtcgaacaagatgcagaagtcggtggtggtggcggtcgaccgcctcttccacaacaaggtgtacaaccgctacgtcaagcgcacctccaagttcatggcgcacgacgaggccgaaggctgcaacatcggcgatagggttaggctggatccttctaggccattgagcaaaaacaagcattggattgttgccgaggttcttcgaagagctaagatgtatgttccgccgccacctgcaccaaaagcttctggtgctacaactcaacaaagtagcagcaagtcatctgtttaaagatcctcagaggcaaacacatacatgtctttcagaatgtctcttctttactgactgacggcatgtccagagaaccatctcattgaataaacaacggctgctacaaaatgttgtttttttgtggtgctcgtcatgttcagcttatcagtttattcatttgcggtcaaaacttggtgatcgagaatttatgttggaccctataccttcgaggttgccccagcaaaattcataggtactccctctgcaaagaaatataggaccgtttagatgctcttatatttctttacggagggagtacaacctaagcatttcctaataatagttctccgtacatggtggaggccgtggtggcgtccatggcggagctgagaccctggcatgggagagagctgccggccatgggatgtcactggtagctagtgtgctcattgtgacttgctgtcgcaatttatggcagcagaattgcaagtttgcccaaatttgttaaataaaaccgcgcttggttccaatgctgttaatgtgggccattcttgtgcaacgtgggataaaaacatggtaacgtcgcccaatgtggatcagtaggctgtttatttaagcatatataaggctgtacgattt

SEQ ID NO: 4565 - DNA, 680 bp, Triticum aestivum
  Clone ID: TRIAE-23APR03-CLUSTER2680_1
cgcgttggttattcccaccgaagtgccgctttcccatcggctcgctcatcgtcctatccaaccccggagcaccaccggcgtagcgggaaggcatccatccatggccgtctccaccttcagtggccctgggattgggctcggcttcggcgtcggctgcggattcggagtcggatgggggttcggaggaatgcctctgaacgtattcggcttgggcatcggtgggggatgcggagttggtcttgggttaggatggggctttggaaatgcttatggttgtcaatatcgatcttcaagggtccagtttcagggcattgagtttcagaaaaagtctgaaggagatgaagcaccaaagcttgcttcgccagggcttgttgaaaagtctcgtccttatggctagtatagctgcgatcatacatttggcacaggcaatgttaccattgcccccttgattgtagtcaattgtctacctggaaagttgtttgaaagcattttgatgttttgatgaacttggacattttcatagtaacagaatgaggataatccatgtattgttttcgtttcggattacggtcttctatatttggctaaaattgtccattaacattatcttggttgggtgcaccctgcaagtttctgttgttactcttgttaagtacctcggccgcgccctcgctaaaaaa

SEQ ID NO: 4566 - DNA, 2351 bp, Triticum aestivum
  unsure (1)..(2351): unsure at all n locations
  Clone ID: TRIAE-23APR03-CLUSTER2681_1
cccctcccctcccgtgcttctctccaccccgcccccgcgccacagcctaaccctacacccgcgcccgcgagcggccgctcagatctgcgagaggtcgagcagccgcgcgtcgcggcgcgatcgggagcccccgcccgccgccggggctgcgggcgggcgcggccccacccccccgtccgccaaggtgcttgatcaccaccacgttgtggtcgggggtggagcaggcggacggtgggtcagtggtgggatcgggctgtcggaggatcagttcaacacctgctgcatcgcctcgctgctccaacagcggcaagaaacactaaccgcttccccaggaagtcgcactctttgggaaaacatggaggtagaaacgcggcggttgcaaatatatgcgacaatgaatggaagtgatatatgtggggaacaataccatgaagtgtttgtgtggaggaaaaaaacgatatccggtatatatcttgagaactatgaaagacggttttagaggagtgaggatggcagattttcaatgtgcgcatttggagaccaaaatttatattttggaaattgtggagaggggtgtagatttgcgaggggcgctggcaaaacagggcaagccatgttaccaacacaataggggcgggcaaggaagttgaaaaagaagtattgggttaaacgattggctgtatgactaagcttggaaatgaaaatcattcgctggggcgtatcgacagaaaagatggaagcttgcaccgcatcatggtaattaatgaagaagtattattcccacaagaggttcttatagaagatttcgattttattatgcgaaggataaaacagtttctactgtgtctagttctattgtcagacgtgttatattgaacttcgggatttggtagttggtcctggacttcccaaaccggattatgaatgcatgcagcaccatactttaaggttccggggcgcaagggggagtataagggaacacgctcgtgaagatttcaagacaagaagatgccgccaaggcgatgaatcactcgctagggtagtgggttgaagaaaagatgatactggaaataaaggaggacctcgctttaggaccattgaaggacgaagtcgacatgttcctgaaccaaggtacgccagtatttatcagggacaggcttcttggcatatctgagtcttctgctaatggttctgaggtcgatgtgaggatggagcctatttcagttttgccgatgtaaccatacatcctatgtgccctctaccgactttataatggggtgagggtggtcatcaaaagtgataacatagacacttctattattgctctggtggttactcgggtggaagcgtgttctgctgtttatcttgttggcagccgtcttgcacatttgtttcttgtgaatattgtctttgtgcgggtttgctccgtcaggttggttgctatgtcaacgctggcagaaacagagaatactcttgtttaaaaggcaggagagaagaagatcactctttagaaagacgcggggaaaaatacaagcgcatggctggctacgctgaagaaccccaatagatcactgcctatttcggaaaattctgctgaacttgcaacgtattatgcaaaataatgaggcagttttccgttcactggagaatctaacagaagtttgcatgatgattaggtgaagcgcagaaaagtttccatgatgtcaagctcagtgacagaagtctcataaggaattcggacttgatagagaccatagaattagaaaacctgctaataaatgcatgcataaccatgcattcagccgaggctcgccaagagagcagaggagctcatgctcgcgaagatttcaagacaagagatgacgacaagtggatgaagcactcgctagggtactgggaggacgaaaaggttagactagaatacaggccagttcacatgaacaccttggatgatgaagtcgagactttcccgccgaaggcacgtgtttactaatccggacaaggctgtgaacgcctgtctcggttgtttgataagggtatagctcacagcgcggtgtcttccaagttgaaataaatttgcagggaccctccattctctcaaaaggttcagaactgtaatataatcgggaatcgccagtatactttccctgaccagtgtaaccttgttgcaaagcttctgatgattatattttggtcctgtatcaccctttggttggtaggaataaagacgtgtacccaaattttgatggtgtttgacactgtaaataagtagatctctgttccaacttcctagagctgtaaacaaaaaaaaaattcccctaaantganccntattacnccgccaatggcct

SEQ ID NO: 4567 - DNA, 1308 bp, Triticum aestivum
  Clone ID: TRIAE-23APR03-CLUSTER26856_1
cccgagtccagagaaccagatcacagatcgctctggcggctgggcccctcgtcgctcgccgtccacctgctagatcgtcgtgggcaggcgacctgtggtccgcctgtaggcgagagtgagggcgtggacaacccctggaggcaatggcggcggaggtcgaggaggaggtgcggctggaggtggaggcggtggcggcggtgtacggagaagactgccgcgtgtactgcgacttccctccccaccttgtcgtccacgttcgccccaacactgccgacgactcctcgcagcagttcgtggaactctttcttggaattaaagcatcctcccagtatccaaaagaaccacctcatgtttatgctgtggaaagtaagggcctcgatgagaatagacaggcatatcttattagcagtatccaagacaaggcaaaagagcattcctactacccaatgcttgtgattctgtgtgaggaagctggagagatcctctcgaatatgaatcatccagcgggggattgtccaatgtgtctgtatcctttagtctcagagaataatcatgattctgctttgccatttatgaagttgatgtcatgctaccactgttttcacagtgactgcattatgagatggtggggctggctccagcatgatgatgccaattctaagaagatagacaacagtatctaccggagaaggattgagattgtccaactcagacaagctatataatgcaaatcatcacaaaggattttgtccagattgccgcaaagtgtttgattaaaaggacattgagcatgttcccgtcctgttggtcgctttctccgctcacctgttggcacgtttaccggcggacctcggcctgccggataatcagttcctcctttccgaggcagcggcgtggtggggtgtgtagttccggtcattgcggcctctccgtcccgtccgcctgggtttctttgacccagcgcccgccctcccctttctgcccgcccggtttgttcggcggcctgcttgtgacccgtccacgagggctgcaggcggcaccaattccggcggagcaaccgcaagctcaacttcagaaacagatccacccggcatggcaaacatcagcggcggcagcaagaaggaaaacaattcaggtcttccaaggagaaaccgagcttatgctcccagaagacagcctcatggccaacctgctggaaaacagtggcagagaagccagcccgataggcaacagtggcagaagaaagacgcagaaacttgtcaatagcatttttgcagctctattttatcgaacatgtatatgacggag

SEQ ID NO: 4568 - DNA, 840 bp, Triticum aestivum
  Clone ID: TRIAE-23APR03-CLUSTER268690_1
aaacagagtacgtagctcaaaagaaaatggagcaggccggccaaggagaaccagagcacgcagctcaaaagaaaatggagcaggccggtcaaggagcgcagccaaccaagaagccggccgcggaggtgacgctccggctgttcggcctggccgacgtggacgccatgatggcgtgggcgtcggacccgcaggtggccgccccctgccgctgggagccctacgagtccacggagcccctgctcgccttcatccacgacgccgtgctcccgcacccctggttccgcgccatctgcctcgccggcgacgacgaccgccccgtcggcgcgatctccgtgtcgccgacggacgacgcctgccgcgcggagctcgggtacgtgctggcgcgcgcgcactggggcaagggcgtggccacggcggccgtgcggcgggcggtggccgcggtgttcggcgaggtggaggggctgcagcgcgtggaggcgctggtggacgtggccaacgtggcgtcgcagcgggtgctggagaaggccggcttccggcgggaggccgtgctgcggcggtactgcgtgctcaagggcgccgtcaaggacatggtcatcttcagcttcatctccaccgacactgtgctggtggactgattggtgtgataactcagcttgatgtatatccacgccaaaagaaaatttcataatgtcatagtatgaaactttgctttctttattaattgttcagtcaagtagtcctccatccgttcacaaaggcaacacgttctattttttttaaaaaaaaaaaaaaaaccgcttatgcctccctctctcctgtgttttcccttgttacctcccg

SEQ ID NO: 4569 - DNA, 1204 bp, Triticum aestivum
  Clone ID: TRIAE-23APR03-CLUSTER26932_1
acaagcctgttctccccagatcccctcctcgtccccgattcgattcgattccccgcatcggccggtaccactccggcccccgccaccccccactcccccgatgttcctccgatcgcgccgcctgcgatcaccccgctctcttctctctcgccagctcagcccgccgccgcttaggaccggtgccgcgggagcgcgatcgccgcgccgccggctagcgcccgcgccgactcctactgccccccgcaagctcctgcacatcgtcgacagccctgattctccttgctccccccgccagaactatctttcggaataccgggggcatcgctgcgcgagtgagtaatggtgtccgcaagtgttgagtgcttctactctctaatgatggcaccttcactactagttatattactacaaatggtattaacttcaagataagagcaattgaactggatggcaagctcattaagtttccaaatttaggatacagccggtcaagagcgattcaggactatcacgacagcatactaccggggagccatgggaatcttgcttgtttatgatgtcacggatgagtcatctttcaacaacaagacatacggaactggatacgcaacattgagcaacatgcctctgataatgtgaacaaaattttgataggcaacaaggctgatatggatgagagtaaaagggctgtttctactgcaaagggacaagcactagcggatgaatatggcatccagttctttgaaactagtgccaagacaaacctcaatgttgagcaagttttcttttccattgcccgagatattaagcagaggcttgctgagactgattccaagcccgaggaccagacgatcaagattaacaagacagaaggttctgagaatccagaatctcagaaatctgcttgctgtggctcatgaggaatacgtggacttctaccatgggctgttttaactttatctgtttattactgtcagcttgttattataggaactgtaagacttaaggagatgactatgttgtggttgttgtgttaccttctatattctttgcagcagcaactattacttttaatgtagtttttgtgatttctaggggtaaaaaaaaaaaaaaaatgcatgttgtattgccatcgtgagaaccatccacttgctgctgatgtaactgcatttcagtttttcaatcggttggttgctacatctgc

SEQ ID NO: 4570 - DNA, 1394 bp, Triticum aestivum
  Clone ID: TRIAE-23APR03-CLUSTER26941_1
atgagcttccttcacccggccggcccttgtccctcccctaggacagctctgccgcatccgccgccgcccgtcactccccccgcgacggcgacgcagatccgccgccgtccatggccgccgccgcccccctccccgtcctcctcctcctcctccccgtctccctcctcctcccggccgccgacgccatctactgcgacgaggacgactgctacgacctcctcggggtgaagcaggatgccaacgcgtcggagatcaagaaggcctactacaagctctccctcaaacaccacccggacaagaaccccgacccggagtcgcgcgcgctcttcgtcaaggtcgccaatgcctacgagatactaaaagatgaagaaactagggagaagtatgactatgctgttgcacatccagaggagttcttctacaacactgctcaatactatagggcttactacggatataaaacggatactcgttctgtgttgattggccttcttttaattgtgtcagcattccaatacataaaccagttgacatcgtatagtcaggccatcgaaagtgtgaagcaaactcctgcctacagaaataggttgaaagcattggagtttgagcgaacaggaggaatttcaagcaagaagaagggcaacaagccgatggataaaaaggttgaagatgagcttagaaatgaagtcgacttgcaaattcagggagttcagaaaccttctgtgtggaatctctgcggtgtccaattgatacttctgccttacttaattggcaagctgcttatttggcaaatttgttggttttggagataccgggtaaagaaatcaccatatgcatgggaggatgcttgctatttgactcggacatcccttaggatgcctgctaacacatggcaaaatattgatgagtttacgaaggaggatctcgtcatgaagcgcctctgggagaaggccaacatggagaggcacatagcggaggcgagaagaggatcgaagcagcgcagaagatagcttctcttgtagcagctcaattttgactgaagattacgagatgaggctgtttaacagcatgtcatgtaggaggacaactacatacctgagtggaaagggaaggcatacatgagtcaggcctgggttcgtcgacccataaacatgggacattgatactgaagaaacataagatacaggggattcttttaccatatcgtacaccgtggaggagttatgtggtgatgataacatttcttacgtctatttggattctatagatacatctacttggatgctatttacatgtctcctttctcgtcttctcgttggtttggttatcatgttcactgttgctatgattttgctgagattgtcttgatttttgttttaaaaaaaaaaaaaaaa

SEQ ID NO: 4571 - DNA, 926 bp, Triticum aestivum
  unsure (1)..(926): unsure at all n locations
  Clone ID: TRIAE-23APR03-CLUSTER26974_1
aactttggggggagttccgccccgggcgtggccaggaatatctgccccacgtcgttccccttccctcttaccttcctgataggaacccgatcaccagcatctcaagaaaaaaagaacccgatcaccggcggcggcggcggcgatggtgtgcaccaagtgcgagaagaagctggggaaggtgatcgtcccggacaagtggaaggagggcgccagcaacacctacgagggcggcggccgcaagatcaacgagaacaagctcctctccaaaaaggagcaggtggactccttacggaaataccaaatgcataatctgtaagcaacaggtgcaccaggacggtaaatactgccacacctgtgcctattcaaaaggggtgtgtgcgatgtgaggcaagcaagtgctggacccgacgctgtaccagcaaagctgtgcctattcaaaaggggtgtgtgcgatgtttggcaagcaagtgcatgtacacgaagctgtacaagcaaagcaatgtgtgagcaggatactcaagtggtggacttggtatgtttaacatgtaagatcatgacatcatgtactagcgatattgctgtggaaaaaggtgttgtgtgcgtgttatgaaaagagcaatttttaacagttgtgtaaacgggcgtggttgtctctgtaatttgcacccttgagcaatgtggatttttgctgccctggcacatgcttctgttatcccgagctattcggtcaccagatttttttttaaagatccagctgatctgctgatggctggcttatattgatattagcaggaagcatacgggaatacaaaggtggaatgtcagatgatccaaggatcaaggataaataaattagtgcggcgcgacgaaaaaaaaaaaaaaaagttnnacaanggagaatgaggnannnnnnnnaagaaaaaaan

SEQ ID NO: 4572 - DNA, 1470 bp, Triticum aestivum
  Clone ID: TRIAE-23APR03-CLUSTER269_69
ttttttttttatccagcacaaacatgacgactggattaatatctgacatgacagatcacaaaacaagaccatacattttcacaacactccctcttgcttcatttcgccggagttcagacggttcaaaccccacgccacaagaacagttcactcaagaaacacagaaagaagaaaagagaaacagatggttccggaaccccccttatgtacattgtcaaactacgctctcttattcactcccatcagtcctaatcagccaccgttacttgttccatcttccaccagcggcatcggtcacctcctcaccagcggtttgtacagcacgaagttcacgtacttagactggaaccggtgagtgagtccgagggcgagcagagactgcgccccccaccctttctcgatgaacagatggttgaggacgacatgctgcggcttcgccttcggagcgagctcgtccgagtgatcggtaccgccaagggcagtcatgaaaagctgaggtggaagagcgggcggatcctgcttggtaagctcctcgtcggttgggaactccatgttgtagctgtgttcaggcgacgggggcgcgtcaaactccgccacgctgtcaagactatctgggatatactcatggacatcaaggaggttggccacctgccctctttcatcagtcacatgaggtagttcggacacatatctcggcaccccatcaacaatcatcctgtaatgatatattccagatggcagaactaacaacacagcgtgatctttccctgacctctctaacaccttccttgatgtccagttatcccatgatccttccacaaacacctcgtttcctccttgactccatgtaatcaaagttggaatttcaatctccggggggttattgttggtggattcatccgagccattcatccatgaatggttgaaaacaggtgaaaattcatttggtatctgcagcggagctactggaacaagagagaagggagctgaaggcaggaaagcaagttcgacgcgctagcaggaagcccgttgttcaccatcgatcgcgacaatgaacttcagggcaaaaacctacttctcgacctactaccgtattgcagccaaagtttgatcaagccaatagcaaatctttccagtcaagcggacgccctccatgctgctgccgctgccccgtgctaccgcctccattgaactggtcggctcgcgctccatcagctccgttgccgcagccgccgagcaccacgctgcagtcttggagaagggccgcaaccgccgagctccgttgccacagtcttcgacaggaagtggatggggtggaggcgaggagatgtggaggagggccggagaagtgagcgccttggccggagatgtcgaggagggcgaggagatgtggcctgtgcgcagcggcggcgccgcacacaggaggagggacagggaacgagcgattctagggttggctgtttcggtttc

SEQ ID NO: 4573 - DNA, 1368 bp, Triticum aestivum
  Clone ID: TRIAE-23APR03-CLUSTER269_84
atctctctctcacacacacatcatctcctccacctctcaaccaagccaaggccaagagctcagtgaagcagcggccatggagggcaaggaggaggacgtgcggctgggcgcgaaccgctactcggagcaccagcccatcggcacggcggcgcagggcggcggcgcggacgagaaggactacaaggagccgcccccggcccccttcttcgaggccggggagctcacctcctggtccttctaccgggccggcatcgccgagttcctggccaccttcctcttcctctacatctcggtgctcaccgtgatgggcgtggtgggcaacccgtccgggtccaagtgcggcaccgtcggcatccagggcatcgcctggagcttcggcggcatgatcttcgtgctcgtctactgcaccgccggcatctccggcggccacatcaaccccgcggtcaccttcgggctgtttttggcccggaagctgtcgcttaccagggccgtgttctacatcgtgatgcagtgcctgggcgccatatgcggcgcccggcgtggtgaaggggttccagaccacgctgtaccagggcaacggcggcggcgccaactccgtcgcgcccgggtacaccaagggggacgggctcggcgccgagatcgtcggcacgttcgtgcttggtgtacaccgtcttctccgccaccgacgccaagcgcagcgccagagactcccacgtccccatcctggcgccgcttccgatcgggttcgcggtgttcctggtgcacctgggcgacgatccccatcacggggaccggcatcaacccggcgaggtccctcggcgccgccatcatctacaacaagaagcaggcgtgggacgaccactggatcttctgggtgggcccgttcatcggcgcggcgctggcggccatctaccacgtggtggtgatccgggccatccccttcaagagccgcgactagtccaccaatcaaccagccgcgaatggaatcttatcgctgttcatcgtcggtcgatcgatcatgtggtggtggtggtggttgctcgcgcgcgcgtagtacgtggatcatgtctcggccgcgcacgctgtaatcatctatatctaccgtgctgttcctcccctcctcggtgtgtgtgcctgtcggcagcgtcacctgttcaagtctgcgagttgtactttcccttccttttgtattgcactacgcacgcgatttaatcgggcgtgcatatctatgtaaattattacgtattatgaaggaaggacgatcgagttaattaacgatcttctcgcctggagatgagaatgatatagatattgtgtgatcatcgtcctattttcctctttgaaaaaaaaaaaaaaaaaaggccccta

SEQ ID NO: 4574 - DNA, 731 bp, Triticum aestivum
  Clone ID: TRIAE-23APR03-CLUSTER27064_1
gccgccaaggactctcatctgcccgtcgacgtgccagccggaggacatccaaccccgcagcagaaaagaaggacttgttccagagccaggaggaggaaatccaaccccgccgccgccgccatgagcgccatgaagttctgccgcgagtgcaacaacatcctgtaccccaaggaggagaaggagcggaaactcctcctcttcgcctgccgcaactgcgagcaccaggaggtggccggcgacaactgcgtctaccgcaacatcgtgcaccacgaggccggggagcgcacgcaggtcctgcaggacgtggcctccgaccccaccctgccccgcaccaaggacgtccgctgcgccgcctgcggccacggcgaggccgtcttcttccaggctacagcaagaggggaggaggggatgactctcttcttcgtgtgctgcaacccctcctgcggcaaccggtggagggagtgaacgatccgcatctcctgcctgcggaggccaccgtcgacccgtgccctttaggccttaattgatcgtgctctggaatttagcttccgatagcttagccgtcttgtcagagcacaagagagctcaacttgtgaaacatataattgtggtttcagtacttgcccgtgaccatgtacttaatttacaaacccttatatgtctctagtgagactaatctcattttataggttggttcttgcctatccactgttataaaaaaaaaaaaaaaa

SEQ ID NO: 4575 - DNA, 1311 bp, Triticum aestivum
  unsure (1)..(1311): unsure at all n locations
  Clone ID: TRIAE-23APR03-CLUSTER27079_1
agtcacacatcacgcacacactcctcgccactccccacagcgcccccaatggcccgccgcccccccatccctccgccccgccgggatcatcgagacgtgatgtcaaacaaagccacgcattggtgctttccctgccgtaggccgattcggtgtcctggccaagatatattccaaccgcaatgctggcatgatatcatacaagaggtgagacgaggataggaggcgctttgcaacaactacggtatgtttgggccacgcttcgatgatcgcctagatggacgatttggaatgatggatgctatgtctgccctcatgcgtcgacggatggcaagaaatgagcagcaatcctgtgtttgatcctaatgcagcttgggcaagtaccacacaaggaaggccgtccccgattggccctaggctgatattcggcagcaacatgcctgctcaggggagcgaaagacagcggagtaaacgtgcttgtcaggggaggccgcagaatcggcgctgaccgtccaaacttcagcggcttccttgtcggcggccccagcctcggaagctctgttcgagcagttgctactgcagaccggcaaccgtcaaggaccagcgccggctccacagtccgtgatcgactccatgccggtggtgaggataacccgcaggcatctgagcgatgatccagtctgcccagtctgcacggaaagatttgaaattggctcggaggcgagggagatgccgtgcaagcacctataccatgccagttgcatcatcccttggttggttcagcacaactcctgcccagtttgccgccacccgctgccgccgcagcgaggatcagacagcaatgcagcccgcccacaacctttggcccacgccggcgaagccgtgagccgcggggttgccggagccggagccgaccctgcgcctgtcacgaggaacggcgacgacgatggagggagccctttctcgttcctctggccattcgggtcgtcgagccccggtcccagctcttaccagtacggaggcggcgggggtgggcggcctgcggtttacgacgacgaccctggccagataacctattccgagtggcactacgacccgtgacactccctcccagagttcctgctccaagctgtatgcgtggtgtggagtttatatatatatatatatatgatgaatctgtgatgggtgcctgtaatttcaccttatgttggctggagctgtgtgtaaatgtaagctgtctactgagcagtgaactatattctgtagtgaagtataccggttcttttgtattgtcacacataaggnnctgtgaag

SEQ ID NO: 4576 - DNA, 1385 bp, Triticum aestivum
  Clone ID: TRIAE-23APR03-CLUSTER27190_1
atgaccccaccgtcgccccatcatgaccccaccgccgcccccatcatgccgccgctcctcctcgccgcgctcgcgctcgccctggccctctcccacgccgccgccggaggaggcaccgggttctacgacccggcgcgggttacccagatctcctggcgccccagggcgttcctgtacagcggcttcctctcgcacgccgagtgcgaccacctcatcaagctggccaaggggaggctggagaagtcgatggtggccgacaacgagtccgggaagagtgtcatgagccaggtgcgcacaagctctggcaccttcttgtccaagcgcgaggatgaaattatctctggaattgaaaagcgtgtagctgcttggacgtttctccctgaagaaaatgccgaatcaatgcaggttctgcattatgaagttggtcagaagtatgatgcccacttcgattattttagtgacaaaaagaacgtgaagcgtggtggtcatcgggttgctactgttcttatgtacctgacagatgtgaagaagggtggagagaccgtgttcccaattgctgagggaagagatttacaacataaggatgaaacgtggtcggagcgcgcgagacatggcctggcagtgaagccaagaaaaggcgatgcgctactcttcttcagtctccacgttaacgcgacaacagatccgagcagtcttcacgcgagctgcccagtagtcgagggcgagaagtggtctgccacaaaatggatccacgtccggtcattcgacaaccctccagatgttatgacggacgcacggtgttctgatgacaatgagcaatgccctagatgggctgctcttggtgagtgttacaagaacgcaaaatacatggtgggcacgaaggacaccctcgggtcttgccgcaaaagttgcggggtctgcgatgcttgaaccccggcaccaatcttaactgaatttgcatggttactgagatgtagattacaaaaccaaataggttcttagtagcatggcattagatgtttactctccttgtcatgtagtttgacctcagagcatcttgatataaagcaaaaagggaattgactttgtttcagaagaatttggatataacctgatggtatcaaatatttccaacaaaaaaaaaaaaaaaatctttcatcgataccgttctacctctaggccgcggcccggtacccaatttcgcccttatagtagagctctccttacacggcgtctcctctgggccggccctttttaccactctgtcttcgacttggtcaacaacacctgggagtatttcctacacattacatcctccttctgtgaaccacgttcacccccatttttcgcccaagagtggggcgttaatataagctgttctatgg

SEQ ID NO: 4577 - DNA, 1689 bp, Triticum aestivum
  unsure (1)..(1689): unsure at all n locations
  Clone ID: TRIAE-23APR03-CLUSTER27191_1
atcccaattcccccaatcccgaatcccccacccccgtcgcccccaaaccctatccctgacctgccccccgcctcgccgccgcgacgatggcaggctcctccggcgccgccgccgcctcctcccgcagccagctcaaaggcgaccgcttttactacccgccccaccgccgccagagccagcagcaccagcagcagggcctgcagagccgccgccccccgacgtcgccctcgctctccccgtccccctcccccaggcggaagacggccgcggcggcggcggcggcggtcgcgtccgtcgacgccgacggccgtgcggattccgacgactcctcgtccacctcctccaagccttcgctggcctccacggcggccgaggtgaatgtcgtgtcctccgcgcctcccgcggaggaggaggaggaggccgggaatctggacaggttcctcgcctctaccacgccctccgtgcccgtccggaacatgcccgagacaagcttgaggatgcggaggagtggagatgccatggattcatctnccttacttctgccttgatgatctctgggagtctttcagggagtggagtgcttatggggctggtgttcccctggtgttaaatggcggtgactccgtgatacaatattatgtgccatatctctctgctatccagctgtatgctgatccatcgggccgcccccgcttcaaagacactcagaagctgcgacttggtgccctccaaatggacgtgttgctgatgctaccccatatagagaatcccaacatgacggacgctgagcgactttgacgggtgcttcttgactatttaattgcctggaacaccttcctagggtagccatcccaccatacaaggacaccccggctttgagggaagcggccattccacctaccgcaacgtgcaggctttccctgcccgccttcgggctggcgtccttcaggctccgcagctccttgtgggcgtcccaacggcgccccggagcaggagagcgtcacgtcgctgatgctggaggcggacaactggctccgctgcgtcacaggttggaccacccggacttccggttcttcgtctcgcactttggcgcgacgtggacatgactgcttctgtcgtaattttcctttccgtgtctgtgcctgttagttatatgctccggactgccttttggcaggccagaactgccccggatgtggattgagtcccgttgctgatacggcacgcggtccactagcgcccctccgcaccgggggacctcccggtctaacggatgtccgtgtcccacttcggcgggccgtgcagatgatggctccttgtgttggtttttaactgttctggcgttggtatctttgaggactgtgggttgccatgtctgaactcagctggctgtgcgttgagcatcagtctgttatggcacatagtgcagcagcgcccctctgccgcgggggttgtatcagttgaaaaaggcctgcctgtatcgtgggcgggctcgactcttgttgtcgtctccaataagtttataactgtctggtgtaggtaacttttttgtggggagttacagatgtgatggaccgaaagcacaattggagacttgtaaaacttttgatgaaaatgataggaaagaataaattatngcattttagagttatataaaacatggtttattatccnaaaaaaaaaaaaaaa

SEQ ID NO: 4578 - DNA, 1068 bp, Triticum aestivum
  Clone ID: TRIAE-23APR03-CLUSTER27244_1
gcgccagatagattccaaagccagccaaccatctaatcagtaatggaggggctcatcccgcgccgccgccgccgcagggaggaggagaagcagcaggggcgagaaggagatctcgcgaggaggcgaccgaccgctgagggccaagtggaagaagaagcgcatgaggaggctgaagaggaagcgccgaaagatgaggcagcgatccaagtaagctgatgggggtggtgacggtgtgctggtagcgtcccatgtgtcgcctgtggctggagcaggctgcgggcggccaggcttgggagggaggcggatttcttctgaactgtggccacgcgacctatgagggccgcaatttagtagggctggtaagctggcatttagtggtacgactggaatttaggaaaaggagccagctaaagaacggtgggcagtgcctcccactccctaccacaaggacacgccgccgccgcaggaggaggaggagaagcagcaggcgcgagaaggagatcacgcgagcaggcgaccgaccatgagggccaagtggaagaagaagcgcatgaggaggctgaagaggaagcgccgaaagatgaggcagcgatccaagtaggctgatggcggtggtgatggcgtgctgtagcttgctatgtgtgtctttggctgcggctgactgcggatgtacttgcttggcatggcggcgccattcatctcatctgtcaactcgtttattccagaaacctgcactttagtaggcctgttatcgttgcttttagttgtaccaggagttctgctatcatgaccgatctaccgaaccgtatgaactctgttttggagctttatttgctgctaatattcggccatcaagtattttatgcttttgctggcatcagcattattgtctggatgctcttatatgttgaaaaaaaaaaaaaaaggagcctaatctaatcgccgaccggtaaccaattcgccctatagctagtcgtcttacaattcactgatcctcgttttacaacgtcgtgactgggaaaaccctggcgttacccaacttaatcgccttgcagcacatcccccttt

SEQ ID NO: 4579 - DNA, 2776 bp, Triticum aestivum
  Clone ID: TRIAE-23APR03-CLUSTER27252_1
tccgacatctcccaattaaacgcctccgcccctctcgtcggaaccggacgcagtgatacctctagattcgccccagcccgccaaataaacctttgccgtcaccctcgcggcagccccccgcttggatgccccaaaatacgagcccgctaggggcccccctctacggctgcaccattgcgccggcgtcgacgccgaagttagaacccctggtgggttaccgggttccgagtcccgccccccctgtggggacgcgggaggccctgatgaggaggtgcattcggatgggcaacctttgaagtcgtcgcttcagcaggcgactgcgcagacgtcggaggaacgcgcgacgggtaactgtaccgacggctgcctcatgtcttcctggtgtaggctgggtggggtcggaggagtgaaagaaaatagtaacttgtaacgaagaagccttttcgtcatatcttgctgttcgtcaaaaacgttacggttaaggagactggatccttcaataaaagaggtatggtgagtcccatcttacccgctcaagaggcctctgagacttattattatttgactgtagacatagagctcgtacttatggccagaagattgatatgcaaactattgttacaactggcaccatcatgcgttgtgccctggtgacacttgttttaactgggatcatagcaaattgcgtaagaatgtgggatatgcaaatgagctggtgtattagcactgttaatggcgatctaagagctatgacttgtgttgctttctcaaagaagtcaaagaacttatttgttagtggtagcagtgaccgaaccatcaaggtttggacctgggatgatacactcattgatgctggcggtgaagttcctctcaaagcaaaggctggtgtagctgcacatgataaagatattaattctctgtctgtctcacctaatgacggccttgtttgcagtggttcggaggaccgaactgcaagcatatggaaactccctaacctggtgtcatcggttgtccttaaagggcataaaaggggcatttggtcagttgagttttcccctgttgaacaatgtgtcataacatccgacaataaactaactgtcaaaatatggcatgttgctgatggctcatgcctgaagacatttgagggtcatacatcaagtgttttaagagcttcattcctttcacgtggaactcagtttgtttcttgtggaagcgatggtctagtgaagctatggacgataaagacgaatgagtgcattgctacgtatgacaagcacgatgggaagatttgggcactggctgttggcaagagaactgaaatgcttgctactggcggaactgattctgatcttaacctttggcacgattgcacgatggaagataagcaggaggatttccttaagaaggaggaggaagttttaagaggccaggaattggaaaatgcagtgtcagattcagactatacaagagcaatacaactcgcatttgagcttagaagaccacgcaggcttcttgagttattctcacagctttgcaggaaagctgatccagaggaccctatagaaaaagcccttcttggtctcccaaaggaagggcttcgcgtgcttcttgagtatatacgtgaatggaatacaaagcccaagttttgtcatgttgcacagtttgtgctttttcgggtgttgaggagcttgcctcccactgatatcctggagataaaaggcatcagcgagctcctcgagggcctcattccatattctcaaagacacttcagcagagtcgatagactagtacgcagcacatttttgttggactacaccttgacccggatgtctgtcgtagacccagacgtagatgcgggcacaaccaaagatgttacaaacgactcgtcaatggacaatgttgagatcactccggcagagcctgcattagagaccccggaaaagccgggcaagaagagaaaatccagcaaaacaagccaatcgagcaagaaaagtagcaagaaggtgaaggcttcttcaaacgctgtttctgtcgaggcgtaaacagttaacactgaccgggtctctcttcacgccaccgattttgtagccgctgttgtatctgccgaatcacatttgttttgcatcgtgacagacactgtacagaatgtattctttggcgtgtcgaaaagacatgcttgcttcaggcatgtacgagcgatctgtttcagttttcaaggcaacaaatgtggatgcaagtctcagcaaaatgaaccacatggattgcttctcgcgggtacccccacggttccgaccaattccaatagtccctgaagggacacctccatcagctcccgcgactgccaacacaagtgccctgacatttgaagctaacctgacttcatgtactagcgcattcctgatcccgcaaagcggtccttcaccattgcctcctgcgacggctgcgaagacagatcatgcagcagagaacaaggatctggagctgacggttggcctgccctcccaacaaaacatgaccaacaacatttcttcccggaatgcagtaggcgtgatccaagttgtttaagctaataattattcttttgggagtcgcattgttgttatagacagttgacagaataaacactagcattttattagtgatattacatgaataaaagcaggaatctgtaactcggtctgtacgctttctgacgtgttgtgctccgtcctagccatctgaattgttgacagcatgtttgatgtgcacagtgttttagcaactggcatgatcattc

SEQ ID NO: 4580 - DNA, 2359 bp, Triticum aestivum
  Clone ID: TRIAE-23APR03-CLUSTER27263_1
ggcacataaccaggccgcgtcacacggccgtcttccccgttctccccgcgccgctcgccctctcccccgccgtcgccggctcgcccccgcggcgcaaggcggtgaccccgcaggacgatcggagccgcgccgctcctcgcctcctccgccctccccagaggcgagtagaccgagaggcggaggcctcccacggcatcgcccgccatgttgcgccggtgcgtgcgggatctgtacccgctgcggtccctcaggaggatccccaggccgatctccagcgaggtccaaagtccaacattcggtcaactcagaagaaactcaacaaaagcatcccaacaaggttcagcacagaaatctgtccctggacctaaagaagaaccttctaagtctggaagcaaggttccaaaggttctgcttggaactctggttgttggtgctgctggtatggccgcttatcgagctgactacatagaccttcactttcagtttatggatgaaaaattgccttcgaccatccgggaacctcacctcgctgtgtggtatgctgatcggcccctcccgtttcaacaagatgatcagaaacaaaaccatgttggatccaaagaatggcattgtgcaggatacacccaagggccttccacctgaagggattccaactgccggtgagcagcctactcctgcagaagaaaaagaaacagaaaccgtaacccagggaacactggccagttcaagatgagcatggtgctgatactaaactgccgtctcaagatactctctctgttgacataaagccaaatgttgtaaataaggcagcaggtgaagttcctcttggacaagctgacaagataagtagcacagtttctccagtagaatcaagccaaacaacggctgaagtacaaaaggatccattaggtgctgatgtaggtgaacagaaatctcttgctgagacatatttactacaggaggagcatgatattcctaaagatgtgagtgctaaggagactaaaagtgatggcattgttggtggtgtaaaagcttccgatgatgggaaaattatgctggatattatagatgctattcatgctgctgaaaaaaagcaggcagatacagatgcttacacgtattctgaagagaaaaggaagttgaaggaaagatacgaaaaggagttgaaggataccagtgcccgggagctcatgtacgctgaagaggcagcaattctggataaggagctgaagaaagagaaaatgaaggctgctgctgcagttaaagaacttcaagaaaaaactgaacaaaagctgatggatgagctgcagcggaaggatgaggaagcaagtcaacaagttgagaaggtacaagagttggcaaaagctgaactggccgcagctcttgcaaaggagaaagcatcccagatcgaacagattgctgaagcagatctcaatatagatgctttgtgtatggcattctatgcgcgatctgaagaagctcggcagagtcattctgttcataagcttgctctaggcactcttgctttggaagaagctctatccagcggctcgccaatccggacagaggtcgatcaattgcgtaaatctcttgaaggtattgataaagattcactgttagaattggctctttcatcgcttccagaagatgttctcaagtatggatcagatacccggatggagttaaaacagaagtttaattccttgaaggcaacaatcagacatttcggtcttataccatcaggtggtggtggtatacttacgcatgctgtcgctcatgttgcttctaacatcaaggtcgaagaagacccatctggagatggtgttgagtctctcataagcagagtggaagacttgattgtaggaggagatttgactgcagcaaccgaagccctgacaggagggttgcaggggaccgcagcggaggaagcagctgccgagtgggtgaagcaggcaaggaaacgcgcgattgcagagcagacgctcaccctgcttcactcgtacgcttcttcgatcacatttacgtgatctcgatcattgatggagcttttgttctttcttctatttggcaagatttacatgccagcgctgcagattttacgatactctcatgtttctctataccatgtcgcaaatgcatggtccttgtaaacagagataataaattttgccgtgtagccacttggtattgtgatactccagtcgccagacaagtttggatagatatgtcaaaactttttttttcttttctttttgctgaaaatgcgatgttcgtggtctagctgctgctatgacaatgtaaggctgcagggaggggaacaattttatcagtcagagtgctctcaaataaaaaaaaaaaa

SEQ ID NO: 4581 - DNA, 1639 bp, Triticum aestivum
  Clone ID: TRIAE-23APR03-CLUSTER27267_1
gctagggcaaaaaaacctcggggtttgttcgtttgggctttcggacggaagagcggcggcggcggcggagaaccatggtgcggctgacgctggagcagacggcgagggaggcggcgccggccggctgcctcgccaccttcctcgacctctcccaccgctccttcaccgacgtgtcgtgcctggggagcttcaagaacctggaggagctcgaccacggccgcaactgcctcgtcacgctcgagggtttgtccgcgtgcagcaatctcaagtggctcccggttatagaaaacaagcttgtgagcctgaaaggtgccgaagtcctctcgaagctacaggtactgaatgctggcaaaaataaattgacaagaatcgatgaggtcaaatctatgacaagcctgggagccttgattctcaacgacaacaacattacttccatctgcaaagcttgatccccatcatcagttgaacactctcgttctctctaaggacccagtgcacccctatcgacgcgccggatcttaagcagtggtgctctgcgcccgaggcgggtgcggctgggctgtcgggatgggattagtggcgcctggtgcacttgacggacgatgtgtatgcccagtgggtcgtgttagtatcctcatgttctaggatctctgctgcgatgagagcccttgtttaggcagcatctgaatttctttcgacagttcttttgcacctgaaatatgtaacctaactttaaaatgtttcttggggttccgtgattcgcggggcgatcctattgcggcgcaaggcaccctagctaaaaaggtcatgaaaattgtgccgaacttgcgcattttcaatgcaaagcccatagaagccatttcccagaatgagaactctgggaaagggagtaagctgaagaaggatgaagagatgcctgatcgtgaccccatcgattctaatacgaaaaaggagaaaaggaaacggtcaaagcaacaagtgcaaagccctgaagaacctgctgccaaagatactcctccagctgccaccattgctgccccagttaaatccgcattgtcggatagtaagaaaaagaaaaaggagaaggtagtcacggagcaggacaagagcagcaaaacgaaaatcaaggattataaagcttctttcgatgataccgaattaaaggccaagaaggaatccaagaagaagaaatctgccaacaaagaagataaggatgcgggaggaatcgatgacacggaggtgtcgtttgcagagttgatgttttctggagacggcgccgtcccagagcccacggcgaaggacaaggcccaggcaactgctgtggatgggaaatttgtcgggggcctggtgattgatcactccaagaagaggaagaaggcgaagggcacccctatcgacgcgtcggatcttaagcagttgtgctctgcgcccgaggtgggtgcgggtggactgtcgggatgggattagtggtgcctggtgggctttgagagacgatgtgtatgcccagtgagtagtgttagtaaactcctgttctaggatctctgttgcgatgagagcctttgtaggcagcatctgaatttctttcgacagttcttttgcacctgaaatatgtgacctgacttaaaaaaaaaaaaaaaaa

SEQ ID NO: 4582 - DNA, 1634 bp, Triticum aestivum
  Clone ID: TRIAE-23APR03-CLUSTER27291_1
attgccatccagtttcagagagcgcaacctcctagcagaccaccacgaaaactcccagaagaaatggggcttcctcatggagcaccccttgctctgtccgtgctcgtgctgctgtgcgtccatggaggccgagaagcggaggcggcgggcggcgggttcgtgagggcgcagggcacccgcttcgtgatcaacggcagcccctactacgccaacggcttcaacgcctactggctcatgaccatggccgccgaccccgcgcagaggggcaaggtcacctccgcgctcagccaggccgccgcccgcggcctctccgtcgccagaacctgggccttcagcgacggcggcagcaacgcgctgcagtacgcccccggcagctacaacgagaacaccttcaaggggttggattttgtgatgtccgaggctaggaagaatgggattaaggtgatactgagccttgtgaacaactacgacacttttggagggaagagtgggcaagcaggcgggggcagggggcgggggcaggccgtcggatctgaacatgacttcttcaccaactccgtcgtcaagggcttctacaagaaccatgtcaagaccgtgctgacgaggctgaacactgtgactggggtggcgtacaagaacgacccgacgatcctggcgtgggagctgatgaacgagccccggtgccagtccgacctctccgggcggaccatccagtcgtggatcacggagatggcggcgcacgtcaagtccatcgacggcaaccacatgctggaggccggcctggagggcttctacggcgcgtcgtcgtcccgggccgcctccgtgaacccggccggccgccaggtgggcaccgatttcatcgccaacaaccaggtccccggcatcgacttcgccaccgtgcactcgtacccggaccagtggctgtcgagctccgacgaccaggcgcagcggagcttcctgggcaggtggctggacgcgcacatcgcggacgcgcaggggacgctgcgcaagccgctgctgatcgccgagttcggcaagtcgcagagggaccccgggttcagcagcgcccagcgggacgcgcagttcggcatggtctacgccaagatctacgagtcggcgcggaggggcggccccacggtgggcgggctcttctggcagctcatggccgacggcatggactcctacggggacggctaccaggtcatcttcgcggaggcgccggcgtccaccaccggcgtcatcacggcggagagccgcaagctcaagatgctcggcaaggcgttcgcgcgggccgagcgcgccaagcgggacgcgggcgggaaggtcaccggtggcaattagagaagaccaccgaccacgactacaacaaaggataagaatgcgtgctttctttcgtgtgtgagtgagtcaagttctcctcgagatgattcaagattattcatccgggagagaaggagtaatatttgtcatccttcttgttaccttccttgggaagaggacatgttttcttcagtgtttttgtggatcacgagatagccaaatgtggactgatcatcatggcttcggaagaagcagccggtgattagaaccttgatcatactggcttttagtttttatccatcttgatcttagtg

SEQ ID NO: 4583 - DNA, 2090 bp, Triticum aestivum
  Clone ID: TRIAE-23APR03-CLUSTER272_3
gaatatccctcgtcccccacagtcggggccttcttaaacccagcccagcttcctgatcagttgtgtggaccacattgctcttggagcacccgtcccctccccgcacctcgccgccgcccacggcacacccccgccgccccccccgctcgccgttcgccaccggcgatggggccgcctcggcggcgtgaggaccccaggggcggccacagcacccggccaggtcccgcaccgcccgccttcacccccacgtaagctccccctcggaccccgccaccacctactgggccccctgccaaagaaaagcagacgggcacagggtggcaagactcgccggggtgggctcatgttcctaagcaacgtggcggcgcccagcgtgtccaccacccttccgagggaaggtaatcgggaaactaggtactcaataacgatatttctgcatcgtgaagacttactcattgacatctaaaatctcgtttcaagattataaaggatactctgaaggaacgctacttcctctttcacgacatgatgaaggatgctacttcaatgtgaccctccaagtatcgccttgcaatattatttatcctcctaatgtcaatcgaaacgcgaaggtatgatttacacctacgttttgcggtgtaacaaatgttcctcaacagtaaccgtttaaactaagagatcggctttatttttcgacaccttcttggataagcccactagcttgctttatgtcgaggacaatcaccgggaacaacttattgatgaggccccgaaatatcacaaccgagtagccctggaacctgagttgacacaagcggtctggaaagttggtaatgtggttcgttcgccagcgtgtcgcgatccgacccttagccggtaggtccggactgtaacgccactggaggaagcatgggggccatcccccacgtcattgtctcgaatctcattcttctggttaatgtgattaagcttggtcgggggagatgtaaacgcattctgcgtgtgagccaggcggcatgcatagcaggctgggaaaatgtccatgagccagcgtggccagaaacggggacgaaacaaaagaaaaaaggagtgcgacatgatcaactcatacggtcccgtcaggtggcaaggtagcatttccggggtgccagcgtacgacgaactccagacatgggtcccatcggcgggctggaagccgcaaggcgccggatgtatgccagaacggacggtgacccaggagacctaccttcgcccgtcctcgtgccctgctaccgccacggccgcgccgagcagcccgcgatgccccagggacgcttccttggcgctggccctctcgccgatggcggcctctctgatattgctgagcttaaccttccaaagacaactaaaatttcttttccaaatggaaaggatgatctcatgaactttgaggccactctacgtcctgatgaaggatactatgtaggtgggacatttactttcaccttccaagtatctccttcctaccctcacgaggctccgaaggtcaagtgcaagactaaggtttaccatcctaatattgacctagaaggaaatgtctgcctgaacattctgcgtgaagactggaagcctgtcttgaacatcaacaccataatatatggtttaaaccttcttttctcacaacccaatgacgaggaccccttgaatcatgaagctgcggccgtcctccgagacaacccacagaagttccagagaaatgttcaaacggcgatgtcgggaggctatgttgataatacccatttcccaaggtgcaagtaaggtctgctatgtggagctctggttccgactcttgcccaattaccctgaatgcccttgcacagtctgaaggatgtggcatgtacccaggaaatgtatcgcatttgtgttagacgtgactgttattatgcttgtttggtggatgtaacggagtcatgcatgttgaagaaacatgctaagcagaaacaaaaacctcgcctgttattcagctgaaaagttggcggaagtgttccaagcgcagcaatcatatgagcatataactgaattatgaaaaataaaagagtttgggcggaaaa

SEQ ID NO: 4584 - DNA, 1463 bp, Triticum aestivum
  unsure (1)..(1463): unsure at all n locations
  Clone ID: TRIAE-23APR03-CLUSTER2734_1
aacacagaggggcagtaaaaattcccgctgcatgattgggtgagtgaagtctcacccaccgcccccccacgcccccccccaccctctccgtcctcctcctcacccacccccacgccgaccacccctcctcccctccccatcccggcaaaccctaccctagccccgactcgccgccgcccgtggaggaggacgcgggcgacggcgatggcgggggaggccggcgcgactgggcgggggtgccgtcggacgggctcttcgcggagttcggcaggctggacgtggccggcatcctgacgggtggcgggcgggcgtgccgcgcgtggcgccgcctcggcgacggcgaccccgcgctgtggcgccgcctcgacatgacccaccacggggacatcctcgagaccgaggaggccgaggccatggcccgcgccgccgtcgaccgcgccgccggcaccctccagtccttctgcgccgacaccttcgtcaccgacgccctcctcagctacatctccggcagggcaccctcgctgaagagccttcaactcagcttgtgtgatgaagtatccaacgaggcgctggcagaggcagtcaagggctttcctcagccttgaggagctggagatcacattctgctcactgaacagcaacgtgtgcgagtcagtcggcagagcctgcccacaactgaaatcatttcggctgaacgagcgctggacgatcctccaaagggggttcgcggcctttgagggcatggatgatgacacgggagcgctcgggatcgcgagcagcatgcctgagctccgcgacctccagctgatcggcaacaacctgaccaaccagccgactggctcgcgatcctcgaccactgcccccgcctcgagtccctcgacgtgcgccgctgctgcaacctccagatggacgacgccctgaggtccaagtgcgccaggatcgggaacctcaggcttcctcgggaccccatctccgacttcaagtaccgggcttacctcactatcagtgatgactaccccggcggtgctctgctggacgtggtcaccgacgaggatgatgccgagttcgttgccatggctgattatgtcgactgcgtgggctcggatgattacatgtatgatgacgtgttcgacgatgtcatgtatgattgtgtccaggacccgggttgtaacgtgtgtgaccaggaccgggttctctcgagcaatgacaggtctcttgggtccgaagcaatgtgggcttggcctgagttgagattcttgaagctgggttcacgcactttgttatcgaaggtcgattctcgtatgtttgtgtctccgatgtgttaactggtctactctcgctgtgagactgggttcgctttatatctgtgattgtaatttacgctgcacttgtgatttggtcacgcaataaaatcctgtaaattaagtactaaaaccaaaaaaaccnaggggggccggtaccaa

SEQ ID NO: 4585 - DNA, 1856 bp, Triticum aestivum
  Clone ID: TRIAE-23APR03-CLUSTER2741_1
cggcctgactgtttcccctcggcccttttctcccctccccttccccgctgcccggtgtcgccgcccggtccgacggcgcagccgcgtcttccggtccttcctctccgccggggactggcggagaggggagtggtggagcaggcgattgtttccttgccagttggctaggaagattagatgagtggttagtaaataggcaggtgcttcgactctgtggggtcgggagcaactgctgcaagactttcgacgagaaacgcgattacatagaacgtccttgggaagacctgtgaactccagcgccgtaaactgttgatgtcccggcaacaaaaaaccgtatggactcgtgttccttcggcgcgggttaagcttggtcaccgaattgagatggacgtgaatgatgaagtaacaaaacttcgatgagaacgacagcagatggaactgcaaatgaagaacacgagtaatggaaccaccttgaagttgttgtagattactctgccctccccgatgcatggtcctcaccgggcgacacgaccaatgaatagactacttcgcgggtttaaaaatgcaagttgcgtccgagacttagcttcagggcaataagcttctccagatcggtctacctgagtctaaatatgttagagtggtgcccgcggcgattaagaccgtcctccctaggcattctaccattctggtgggcttcgactgaaccctaacctccatgaggctggaaaggggtgcctgagcccgatgaacgcttggtcgggttctggatgtgaggagtggagcatgtcgaattccaccatgcttcaggcgttgttctccagccagggccttgtgtggaattataaaccatacttttatgaggcaggctctgctggaactccatatcatgatggtctgttcttctttgatgtttgttttcctcctgaatacccgcgatgtccaccgaaagttcatttccattcgagtggacttcggcttaatccaaacttgtatgagagtggtaaagtttgcctcagcctgctgaacacttggttaggttctggatctgagaagtggggcaagtcaaattccaccatgctgcaggtgttggtctccatccagggccttgtgttgaatgataaaccatactttaatgagccagtcatctttagctctaaagaaaagcattcccttggatataatcagactgcatttgtcctaacctgcaagctgatgttgtatttacttcataagcctccaaagcattttgagaccctcattgtgtgccatttccatgagcgggagcgggccatcctagaggcatgccgtgcatatgcttctggcatggtcgtcggatcatcggtcatggatggccggacttacctccgcaacaagtgctttgcaggtttcaagaaatccctcgatgcacagactgaacttctcgcgaaggagctatccgcgaacagacttcatgcgctacaactgaagagagaggtggatgctgcagataagaccatgtctaccagctaggcttctcgtgtttcagaagacacctgaccattggctgtagtttagcacttgctcgctatttgttagctatttgatgaagaaaatttgccccttgatttctatgtctacccacttttgtggttttagcatgcaaccttagtgcaatacatgttggtagaaacttgttacactagcttcggtgcctgcataaagatggcaatagaacctgtgccgctttgatgagcagcacgaattgacttcttttgtgtgtgcaacccaaaaaaaaaaaaaaaaaacctgccagaaaagccgacccccccagtggggggggcccggtacccaatcgccctaaaatggtggagtcg

SEQ ID NO: 4586 - DNA, 935 bp, Triticum aestivum
  unsure (1)..(935): unsure at all n locations
  Clone ID: TRIAE-23APR03-CLUSTER27427_1
aagcaagcgaaatcggcttcagatgaggctccactcgccgagtctccagcaagccgctgcaggcgccggcgcgggcgccaccaacgccccctttgcagcagctctcggcaaggtgcgtacttccacccaccgcagcctcttactttcaaaccatttcctcttcccctgctgcaccgaccgatcctacttgtgctgttgtgcgcagagttcttcgagctcccttatccatggccgtctcagcttcggccacgcgtcgctgcagacaccgaaccaccgcaccaagagagcagggtgggcggtgcgggtgcttcccctgacggaggagaacgtggagagggtgctggacgaggtgcggccgagcctgatgcgggacggaggcaacgtggccctgcacgagatcgacggcctcgtcgtcgtgctcatgctccagggcgcctgcggctcctgccccagctccaccatgacgctcaagatgggaattgagtcccgcctccgtgacaagatccccgagatcctcgaggtcgagcaaatccacgacaccgagaccgggcttgagctcaacacagagaacgtcgagaaggtgctagatgagatcaggccgtacctttccggcaccggaggtggaagcctcgagctcgttcagatcgacggttttatcgtcaagattgaaatcagtgggcctgcagcaggtgtaatgacagtacgtgtggctgtaacacaaaaactgagagagaaaataccatcgatcctggctgttcagttgacagagtagaaagctgtgcatcaatcaaaggaagacaaaattcagctttgtgattacgtttccatgtcagtacttcagtcttttagttctaatgaatcactgcagtgaaatactaaacatactaatacagttgttatgtacaagaattatgggcnggagagaagaaaactca

SEQ ID NO: 4587 - DNA, 590 bp, Triticum aestivum
  Clone ID: TRIAE-23APR03-CLUSTER27440_1
acgcacgcagaccaacggaatcgggcgacgagggtttctgcgctccaacatcccggcgtcgaggaagagaagacggcggagatggcggtgatggacacggcgttcaaggcgctgacggcagggctgggcgtggcgacgctctacctggccggctccttctccttcaacgtctaccgcggcctcgcctggcactccgagcaatccaagctagaaaaggaaaaggagaagagtgaagattgagaaggaaggatggcgagttagtgtcggacactaccaaccaaaaggacctacaagaaatctctccttttgatgatgtgtgatcattcgtgattatgttttctgggactgatttccggcagttcctttgatgtaatatagatcaggatttggatgatcatacatctttatgtgcactcagtttctatatatttttacgttgttctaaacataagggtgctctgagatggaaaacaaaataagggtgttctgtgaatcttttcccttagtattatacactcttaggaccagttttaaatgaaatatatgatatgctcttttgtttcctgtccaaaaaaaaaaaaaaaagacta

SEQ ID NO: 4588 - DNA, 1499 bp, Triticum aestivum
  Clone ID: TRIAE-23APR03-CLUSTER27459_1
acctatctacccgtagcgtgcccacgaaccaaacgacagcacaccaaccgcgcgccactgatccatcaactccactccactagctacgtaccttccgaccgagcagccagagagatggagaagatggtgatgggggtggtgagggacaaccagtccctccggcagcggccaggggccaccgccggaggcgcagcgtcgacatcctaggcctctccgaccgcctgcatcgccccgtcgtcctacccccccccgcaggtacagcaagagtacgaccccggtgctcgcgaaataagggaccacccgtccggagacatcggcggacacgctcgggcaggccggcaccttgcgtcagaggggtccgcagcgggggactccgtcaacggcgtgcggcacgatacctccttggaggtgaaccccgaacgcaaagatctattgagtggagcctggcgaaggaaatgtcttataaccggtggcaaggcaggacctcaaccgcatcactggaaatggagctggggcaaaggcaggtcttttggtgcaaggactaaaatgggtaacgagctgggtgctgaagatggcatcagtagaccagccgtcgaagaaggagggtggtcatgaaggccttcggtgcgcgagctcgtgctcactgacccggccgaaggggatgggaggcaccgtcaggaaagcaacccagctctatgagaaccatcccagcgccttcatgctccagcagttcgagaatcccgccaacgtccaggtgcactacgagactaccggtccggagatatgggaggacacgctcgggcaggtcgacatcttcgtcatgggaatcggcagcggcggcaccgtcaccggcgtcggcaagtacctcaaggagaagaaccccaacgcaaagatctatggagttgaacctgccgaagcaaatgtcctgaacggtggcaagccagggcctcacctcatcactggaaatggagttggatttaagccagatattttggatatggatataatggagaaggttctagaggtgaaaagcgaggacgccgttacgatggcgcaacagttggcactgcaggagggcctgctggtggggatatcatcaggagccaacacagtggctgcgatcgaactcgcaaagaggccagaaaacaaagggaagctcatcgtgactgttcatccgagcgcgggagagcgatacttatcgtcggcgctattcgagggtctgaggaaggaggctgaggcaatgcagccagtgccagtggactaagttggagctatacaatgcatgtagaataaattcactgcaaccatgttgcaagtgctagtcatacctcatttgtgattcttcagtttgttcatcatgtggaagtcgtgtaaacaacagttcaaatggttgaaaaaaggactttacctctccggaaaaaaaaaaaaaaaaaaagcgctttcccgccccggccgcgtccacgcggaccgctagcgggttcaattacccttaaaaccct

SEQ ID NO: 4589 - DNA, 1519 bp, Triticum aestivum
  Clone ID: TRIAE-23APR03-CLUSTER2745_1
gccgccgccgccgccacgctctctggaccgccgccgccgcctcgccaaaatccggcgtcaactgatcggcggcagccatgagtaagctccaaagtgacgctgttaaggatgccatcacccagattgttggggaggcgagagaaaagaagcgcaagttcactgagactgtggagcttcagatcggtctcaaaaactacgacccacaaaaggacaaacgtttcagcggctcagtgaagctgccccatatcccccgcccaaagatgagggtgtgcatgcttggtgatgcccagcatgtcgaccaggctgagaaaatgggacttgactacatggatgttgaaagtctcaagaagatgaacaccgccgccgccgcgtcgccaaaatccggcgtcaactgatcggcggcagccatgagtaagctccaaagtgacgctgtcaaggatgctatcacccagattgttggggaggccagagaaaagaagcgcaagttcactgagactgtggagcttcagatcggtctcaaaaactatgacccacaaaaggacaaacgtttcagcggctcagtgaagctgccccatatcccccgcccaaagatgagggtgtgcatgcttggtgatgcccagcatgtcgaccaggctgagaaaatgggacttgactacatggatgttgaaagtctcaagaagatgaacaagaacaagaagcttgttaagaagctagccaagaagtaccatgctttcttggcatcagaggccataatcaagcagatccctcgtctccttggccctggtcttaacaaggcaggcaagtttcccactctggttagtcaccaggaatctcttgaagccaaggtcaacgagacaaaagctacagtcaagttccagctaaagaaggttctttgcatgggtgttgctgtaggcaacttgtcgatggacgagaagcagatccaacaaaacatccaaatgagcgtcaacttccttgtgtccctcctgaagaagaattggcagaatgtgaggtgcctgtacgtgaagagcaccatggggaagcgtgtacgtgtgttctaagtgtgtgcgctccagtgaagttgataagatactgggctgtcctgccgacccctgcttgtctttggattagatctgtttcactgataccaattttctgtttgcctaagcgaatatcaacaagtattttatcgtactagtcttatcttgaacagaaatcatgggagcaatggaactgcattttctgtcatgattctgcgttgtgcctgttatcagagatctatatgcgatcttgattgtcatctgaatgtagattttacttggaagtgtttcctataagtgtgtttaaatggataacttatttggttagcctagcaaatctcaggaaaatagaagtttgttatctgtaaaaccggagaagtgggattttgtaaaaacgactgtcagtactatatgcttttggattttcaggatcggttgatgggttcagcttctcagaatccaagccaaaacaacacccccgc

SEQ ID NO: 4590 - DNA, 1942 bp, Triticum aestivum
  Clone ID: TRIAE-23APR03-CLUSTER2754_1
aatggcagcctcttcctcgctcgcccgggtcatatgggcggcgctcctcccccccctcgtcgcggccgtcgcggcagcccccgccgccgcactagcggccccctcgccggccccagcaccgaagccatcccttcccgcctccggccgccctccccttcacccggagcacgcgagcgccgggaacgacgccgccgccgccccgcgggacgcgtgcgccgcgacggtcgagggcgcggtgtaaagcgccacggcgcaggccttcttgccgtagtcgcaccacaaggcgctcatcctctacacctccgacctccactccaagatgaccctcacccgcgacgtacctcctcggcgacagctagtggacggcggacatgtcggggacgcggagtactacgcggacatcgcggggatcaagcaccaaaacggcgccatttatgcccccactcccggctaatgtgcgcttcgcttcttgaatgaggctctatccttctgccattcttttaccatggggacggagactcaatgctactggtcgacaactccgacgggccacctcacatccatgcagacgctcaccgacttgcggcatccgcctcccccgccgtccccagcacctctccgtcgtcgaccctcccgtgatcctcttcggcggctcttacggcggcatgctggcatcgtggctcacgctcaagtatcctcatgtccccatgggcgcaggtgcctcctctgcaccgagcctgcagttcgacgacatcaccccgtggtctagcttctacgacgccgtctcgcaggacttcaagtctgagagcctgaattgcttcagtgtcatcaaggcggtctgggatgtgctggataataggggatcaacccacgcagggctcttggagctcagcaaaaccttcagggcctgcaagaccgtgcgcttccctgattcgctgtctaactggctatggacggcattcacatacaccgccatggtggactatccaaccccagccaatttcatgatgaatctgcctgcttaccctgtcaaggagatgtgcaagatcattgattcttttcccgccggagcagacgtcgtcgacaaagctttcgccgcggcgagcctgcactacaattactcaggggaccagaaatgctttgagatggagggtggcgatgaccctcatggcctcgatggctggggttggcaggcctgcacggagatggtcatgccgatgattgtgtccaatatgagcatgttcccgccgttcagcttcagctacgagaacaattccgagggctgcctcgccaactacggagttcgcccgaggatgcactggatcactactgaatatggtggccataaaattgacaaagttctcaagaggtttgggagcaacatcatcttctccaacgggatgcgagacccgtggagtcgaggcggggtactcaagaacatatcatccagcatcattgctcttgtgacggagaaaggggcccatcatttggacttcagatctgcaaccaaggatgatccagaatgggttgtagaacaaaggagacaggaagttgagatcatacatggatggatagatcagtataacaaggacattgcacagatgtagcattaagaaggcgccattgagtttcacagtcaaggaaaataaatgtggctaaatgcaaaatataaggattttcctttcttctattaggcgataagaaccaatatcggtggtgaatttactaaaggataatgaccatgataggttggtgtttgcttcgttagtggcagagattaaatatttgctttctcctagacaccacttgttcttagccttaagttttaaatagttggcccagctatagccccgctatagcagtttgtgcagggtgccgctaaatgataggctatagaattcatgtacaattctatgaaaaagttatgaaatagccggctatg

SEQ ID NO: 4591 - DNA, 960 bp, Triticum aestivum
  Clone ID: TRIAE-23APR03-CLUSTER27576_1
cagacccgcccccccccgcgcccaacacttcgcaccccccactccactatccaccaaagcacgcacgcacccgagccccacaattcccatcccccactccactccccaccgaaaaaccatggcgcggcggagcggcatgctcctcctactcgccgcggccgccctgcttgccctcggcgcgggcgccgccgtgccgccgtcgtgcgagcgcatcgagtgcccggcgtacgacgtggtggacagcgccaacgggttcgagatccggcggtacaaggacgccatgtgggtgtccaccgcgcccatcgaggacatctcgctcgtcgacgccacccgctccggcttcctccagcttttcaagtacatccaggggaagaacgcctacaacgagacgatcgagatgacggcgccggtgctgacgcgggtggcgcccagcgacgggcccttctgcgtctcctccttcgtggtcagcttctacgtgccggcgaagaaccaggcggacccgccgccggccgagggcctgcacgtgcagaggtgggccggggcgaggtacgcggccgtgcgccggttcggcggcttcgtggccgacgccgacgtcggcaagcaggccgcgctgctcgacgccagcctgcaggggaccaggtgggccgccgccgtgtccgacggccgcaaggccgacccggcgtccgagtacaccgtggcgcagtacaactcgccgttcgagttcagcggcagggtcaacgagatctggatgctcttcgacaccatggccgcgtctgacatgtaactggctagatcaatcagtgaactcgtatatgagtgtcttgtcttttaagcttctatataaccggacgaataatggtggtgccttataaactgcttaagcgaaatagtgaactgttttgcgctgtatggacttgcgagcaataaagtgcctcttttggtgcaaaaaaaaaaaaaaaa

SEQ ID NO: 4592 - DNA, 792 bp, Triticum aestivum
  Clone ID: TRIAE-23APR03-CLUSTER27589_1
cttccggcccgggacactcttggctctgctcgtgttctgactcgacttcatcctcctggaactggaagcaagcaaagcacgctagggtttcccttccgccggggaccctgcaggcccagggctcgtcggcgagggggagcgcggacggcggcagccatggcgtccaccaaggtgcagcggatcatgacccagcccatcaacctcatcttccgcttcctccagagcaaggcgcgcatccagatctggctcttcgagcagaaggacgcgcggatcgagggcaggatcatcggctttgatgaatacatgaatctggtcttggaggatgctgaggagatcaacatcaagaaaaacactaggaagtctctcggtcggatcctcttgaaaggggataacattacactaatgatgaacacgggaaagtaacaacagcccagtgactgttctattgcaaggataactaacaacctacgtatcctgagctcctaggattgcaaacttggggccgtaacagacattcctctctgtgttctcgtctaaatttgattgaaatagaatatgttttgccagagagaataggctctgtgaggtaaaagtgtgttatccagatcatgagcttagcacttgtactagcttaattcagaggcattgatgttctggtggtttgtgctctcattgaaatattaacgtggtggtctgattgttcttttggaattttttaggcccctgtgtaagataaaagtatcattctgtgaaagttcttgtcacgaaattacttctcctcggtttgcaaaa

SEQ ID NO: 4593 - DNA, 896 bp, Triticum aestivum
  Clone ID: TRIAE-23APR03-CLUSTER27599_1
gccccaccgctcctcctccgctaccccccccactcccctccgcacccccgccgaagccaagacggcgcaacgcacacacggaaggcagggaggtcggaacggggcgccacaggggcgcggggaggggcagccggcggccaccgccagggctcagcaagccgccgacgtcacgtcctgcgcgacgaggccgcgtgcagggcagctcggggcccgcggccgacgacacgcgcagcaggcgcacaaacaacctggagaaccgaagacgtgtggccgcgccaagcgcgggacgcgtcccggcaagggccggcgccaagcgccacgccctcctgcgccccgacccgacccagggcagcaccaagccggccatccgtctgcctcgctccgcggcgcggcgtgaagctcatctcggggcgcatctacgaggagacccgcggtgtgctcaagatcttcctggtgaacgtcgtcggtgatgccctcacctacatcgtgcacgcccgccgcaagaccgtcaccgccatggacgttgtgtaggtgctcaagggccagggacgaaccctctacggcttcggcggctaggcctgcgcccagctgctccagtctgccgtcgactctgactctgctagctgctgttctggtgctatgcgtttcgtttctgaatgcgtgcgtgcgtgcgttgctgttccatcggtctgtgtagttagtggatggcgatggatctgaatgcagtaagttcgtcagagtgcgtgtgttgttctatcggtctctgtagtcagttcctctgtggaaggcgatggatatgaatgcaatgggattgttggttctttctaaaaaaaaataggcgggtactgccgattgtgctctgggggggacccggcttaccccaactttcccccctt

SEQ ID NO: 4594 - DNA, 588 bp, Triticum aestivum
  Clone ID: TRIAE-23APR03-CLUSTER27599_5
acctcgccaccacaccgccgcaaccaccaccaccaccagcagcacacactcagaagcgaagatgtccggccgcggcaagggagggaagggcctcggcaagggcggcgccaagcgccaccggaaggtgctccgcgacaacatccagggcatcaccaagccggccatccggcggctggcgcgacggggcggcgtgaagcgcatctcggggctcatctacgaggagacccggggcgtgctcaagatcttcctggagaacgtcatccgcgacgccgtcacctacaccgagcacgcccgccgcaagaccgtcaccgccatggacgtcgtctacgcgctcaagcgccagggccgcactctctacggattcggcggctgacctgcgccctctgctccaatctccatcgactctgactctgctagctgctgctgctgttctggtgctgtggtttcgtttctgaattcagagtgcgtgcgttgttgttccgtcggtctgtgtagttagtggatggcgatggatctgaatgcagttagttcgtcagagtgcgtgtgttgtctgtggaaggagataaatatgaatgcaatgggattgtt

SEQ ID NO: 4595 - DNA, 1508 bp, Triticum aestivum
  Clone ID: TRIAE-23APR03-CLUSTER27632_1
attggcaggagggtgcggccccccggaaagaactaccggcagccggcagcccggcgccgggagggggcaagatggcggcacggaagcaaacggcagcccagcacaaattcctagcggcagccagcagccgggcgccggaagcgagcaagatggcggcggcggctgtggcggcgcgggcgtacgaggcagcggcgcggtccgcgctggcggcgctggagcgcaacctgctgccggacgcggtcacccggcggctcacgcgcctcctgctcgcgcagcgcctccgcctcggctacctcccctccgcgccgctccagctgcaggacctcatcctcttcgcccactcacttgaaggcatgcccattgccatcgaaacggacacagctaaaacccagcactacgagctgccgaccacattcttcaagctagtgctcggaaaaaacctcaaatacagctcatgttacttccctgatgattcaagcaccctagaagatgccgaggttgcaatgttggagttgtactgtgagagggcgcagctgcaagatggccaaagcgttctcgatgttggatgtggatggggatccctctctgtatacatagcaaagaaatataggaactgcaatatcacggggatatgcaactcaacaactcaaaaggcttttatagaagagcagtgtagggagaatgagctatccaatgttgagatcattgtagcagacatcagcaagtttgagatggagcgttcttttgacaggatcatatcgatagagatgtttgagcacatgaaaaactacaaggcacttcttaagaagatatccagatggatgaaagaggattccttattgtttgttcactacttctgccacaagacatttgcgtatcacttcgaggacaagaatgacgatgattggatcacaaggtatttctttactggaggaacaatgccatcagcaaacctccttctgtactttcaggaagatgtatctgtggtcaatcattggcttgtcagtggcacacattatgctagaactagcgaggagtggctgaaacgcatggacaagaacatcgctgccataaggccaatctttgagaagacttatgggagggaatcagctaccaaatggatagcttattggaggacattcttcatctcagtagctgaactttttggatataacaatggtgatgaatggatggttgcacatcacctgttccgaaagaagtagaagtgccgctggacatttctggagcaaagtagaattgtatgttgagaatcatccatcacacaggctatgcctagttatataattatttttgtgtgtgttgagctgttatcctcctttttttttttgaagagaggcaaaagatttgcctcattcattaaataagaggaatagagtttatgttcgtgttacaacagtgacagcgccgcaacacccgaaataaaggtgaccaactactctcgcgtcaaaaaaaaaaaaaaaaaagcttatcgatgccgtcggccgcgg

SEQ ID NO: 4596 - DNA, 1547 bp, Triticum aestivum
  Clone ID: TRIAE-23APR03-CLUSTER27637_1
acccgcgacgaattccgcaaggagagaacgcgaaatatagatccgccgtgaaggcccaacggcggctcaccgaaacccggggccgccgccggcgctcgcacccgaagcccccactccgcacgggcagtccaggcagagatggtggcgatctcgatgtaccgcggcaacctccaccggggcggggacgaagccgcgcgccgctggccggtgcccccacccacgctctccgcgtcccagttccgccgcctcctcgaccgccggtccctcgccgtcccccgcctcgccggggctccccggcccaactcccccaactcccgcccggacgacggcgccgcggggcccgtggccgtggggggaggcgccggaggtggacgggggtcagcagcagcatcaggcccgagcggcaggaggaggagggggcatgattgtgcagatgcagcagcagcagcagcagggggaggaagaggggcagggtgtgcaggatcaacagggggagggagatggccaagacgagcagcagcaaggagatgaggaggagcaggaggagggggcggtggaggatgtggaaatggacgatgcggcggaggtggtcgccggagatgctgatgccggcggcaatggtgaccctgaagaagggcaaggcgaaagcgaaggcttcgaccccaactcggaggtgggtcaacctgatggagttgaagaaaggaagagagagttgactgacaagctggataccttaagtaagaaaaagcatgatcttgtgcagatgctgaagcagattttaaatgccgaagaagaaatcagaacacgtagcatgcaggtttcgctgcgtgctgccatgcctcagccgccagaaaacacagctgatggaagtgttcctagacaggtgccgagaatgaccgttgatgtcaatttcagcgagtttgctggggagtcagatgctggttccaaccagggcactcctgggcgccccttgcatcatgtccacagtatttctccttcaacagcctcctttgctaggtctccattcggttctcgcaaccacaaacctggcaacactccaagaagtccagcacctttctctacagcaagcccgtctcgcttcgcaggtaccgggcatcaaggacaccacccctcggcatcattaccagcaggcaactttgtagcatcgtcgccttcccctgctgcatccggtggctcttcctctgtattcagggactatcgcccgcccagttcaacataattccacaaaacccgaatgaaggccaatgtacatgagtcaccctgaatagtttgaatgctctttgtgctcctccttgcattgttactttattgacaatattatcagattgcgaagagcaactcagggagaacaaggtcatgttgaagtatcattttgtatatctgtgccagtgctgctaaaagggagccatgttctcttctccgtgagccgaggtcgaaatctgatatcactctaattattaaaaccagaatacttgctaccctaatctgagaatgtgaaatagggttgagatattcagcatcaaaaa

SEQ ID NO: 4597 - DNA, 1532 bp, Triticum aestivum
  unsure (1)..(1532): unsure at all n locations
  Clone ID: TRIAE-23APR03-CLUSTER27660_1
tttttgttccaaggtcaaatgacattttgtcagaaacacccctaacgcaaagaagaaaatcagtgtcctatcctgtccagatcgccggcgcgcagcctggcaggaactcccctcctccgaccccggcgccgtcgtcactccgtccctccccgcacaaggaaaaatcagaggccgatctcgatcgcccctaccagacagcactcttcgctcgcgggagagtaccatgcctttcgcaatcatctgagtagtagaatggcctcgaaagctataaggaggaggcctaccgagaaagaaagagagagacatatggaaacaacaatgccggaatctgtcacagcacctcttctaggaaatagtgcccaggggaataaatcggaggggtatgagcctataccggatttctgggatggaaaatcacgcgagtgccttcattgggtgcatagtgtatctacttttattactcagtctgcaagaaagatagtgaatgctttttcggtattttgttcgttccttgcaaggtgctttggtagctcccgtgatctccagagttcaggacatgcccagacaaggttatttgagctcccttcataacagacttagtcataaaaattctggcataaagcgctttgtaagtgtttgtgcagcaaaagatacacatgcaagtgtttgttacaaaagttattctgcaggagtgttttattccgccaaagaataacatccgcatgaaatacaagattatgggagaatatggatctggcacaactctgacccagcaacagatttaaggcctgggggattcatgtccttggaaaacctaatatattttgcaagaaattacccagattcctttcatcggctattacacaaggcagatggtgagagagctgaatgggaatatccttttgcagtaactggcgtaaaaataaatgttatcaaagcgggtatcctcggtttacaatcagaaaataggaggagctcaaaagcaagagttggctttgctcaactacttgaagatgacgagatggctttcgataaccttttctgcctagcttttcagatgctcgatgctcagtggcttgcaaggagagctagttatatggaattcaatgaggttttgaagtccacactaggccagttagagcaagagcttacaattggaggcgtttcacgcgttcagaatctgccatcgttcagaatgttaaggagatagcattatttggtctttacccgaaagggggaaggttgccaaatatgctgctcattcttttattgttgttcaagatgggccgccatgtaaagattactggccatcacatattcggttcatatgcgataccttgaaaagatacttgctcctataggctttggcatcaagcgctttgtaagtgtttgtgtagcaaaagatacacatgcaagtgtttctgttacaatagttatctgcaggagtgttttattntgggaacatgtaatatttgtatgaaatttggggcagtttaaatttaggaatggaggtagtaaaaaaaaaaaaaaaa

SEQ ID NO: 4598 - DNA, 1186 bp, Triticum aestivum
  unsure (1)..(1186): unsure at all n locations
  Clone ID: TRIAE-23APR03-CLUSTER2769_2
ttttttttttttttttctctcttgaacatgatctatcatagaagtagaacagatgcagtacaatctttttcaaattgtgaacaaaatttaacaatggcagtatggacattccatttccactgggtgttgaatgatactccctccgttcgaaattacttgtcgtagagatggatgtatctagacgtattttagttctagttacatctattttcgagacaagtaatcccgaacggagggagtaggttggacggtacagcctcagaagaaagcatcttacacctagtgaaacttgaatgttttatcgatgaaaaatgtcagaaatgcaaatcaaatctagaccctcttcttccgagcagaagatgccggcgacgccggcgccgagcatgagcagagaccgcgcaggatggcaatgacagcaaacacggcgtatggaacatacatctgaagcagcttcgtcgttgccttccctgagcccagcatctcgccaaatattgccgacagggaaggtgagggtggtgacgccgaccatggagggaggtggtggcggcccatcggcggcgggcgaggacgccgtagacggtggcgacggaaagcggccagaggaaggcgagctcgaggcacaagaggccgcggaagaaggggcggcgggtgggccaatgaggtagtcgtcgaactcggcggcgtaccaagcgcttgaggtccgcagctgcgncgcggggtggctgtcaacgacttcctccaggccgatgatgcccgtgctgccatccagcactccatggatctgtacgcggaatacattatgcacagcctaaggcagtagagtgtgtactattactatttttcctttgcccttcctcctatgatgggatgcaaagaagatcccctcggaacatttggggtctgatgaacaaccaagcgagcctgtatttctacattcttgctttgtattagccatattttcccattactgtggcactatgtatctcaaatttgtattcgagaccttgtggtttggctcgtgtattatcttcagttcttactggacggacaataatataacaatttatcacattgatgtctgagatactgtggtaatgccatatctcaaatttgtattctagacctcgtggtttggctcgtgtatcttcagttcttattactgaaggaacaataatataacaatttg

SEQ ID NO: 4599 - DNA, 2090 bp, Triticum aestivum
  unsure (1)..(2090): unsure at all n locations
  Clone ID: TRIAE-23APR03-CLUSTER27721_1
aaccctagctccccttatctgccggcggctatccctccccgccgcggcggcggcggcgggcgtcgcccgctggcgcccatcgcccgccgactaccacgcccccgcgccccgatcctgcccggcggcgcccgccctagcccggccccaaccacccgtctcgccgccgatcagctcactgccactgcgtcgccttaggtcggaccacgccgtactcgggcggccctcttggcccctgcgctcgggagggtcaccgactgtctgtgcgtcgcagggtagcagggggtagcgaaagctaacctgagagaagggtcggggccgtcgtcgcctttgccgctgttggaagccttgtgcggcttgggatctatttatggtgtggagtggctatccctccagtattgaagggccgttcttggcttcctatccacagttgacgatccggaaagcttaaacttgggacgggatcgccagtgctgcaatgtagattaggatgttggactctttgggcacgatattggtgctcgtgcactggagctgtccaactgaaactctgttcttccttagtctgttttctgctccgtttatcgagtccattgcataccttacattgcttattggtagtgtgcttttcggggaactgacaggagtattgcatgtccctacgaataggagtgcagctgttggccctgtatagtgtgccaacggcttgtacaaggtacatgtggcccccaaagcacccaacgtggcgggtcctgcgaattcccgtggcaaagcagtgctacctaccttcggccccccgtccgaggctgcagcattagaaggatcaaaggactttatgaagaggttgtgtgataagtataatatccccactgctcagtaccgcacattcacggatcctgcaaaagctaaagagtacatcaaggatcaaggggcccctattggtggccaagctgatggattggcagctggaaagggcgtcgttgttgctatgactttggatgaggccttcgaagcaattagactctatgatggttgacgagtcatttggttctgcttggttcccgggtcgtcantttgaggagtatcntggangggcgaaggagcctctttctttgcattagtagatggagaaaatgctttgccacttgaatcagcacaggatcacaaaagagttggagatggtgatactggtccaaacacgggtggtatgggtgcatactcccctgcgccaatagtgaccgaagagcttaagagcgtgatcatggaaactataattactccaactgttaaaggtatggctgctgaaggatgcaagtttgttggtgtattatatgccgggcttatgattgagaagaaatctggtctgcctaaacttattgaatataatgtgcgatttggggatcctgaatgccaggttctgatgatgagattggagtctgatcttgcacaggtcctgctatctgcatgcagaggagaactgggtaaggtttcgctaacctggtcacctgaaatcgcgatggtggttgtgatggcgagcgaaggataccctagctcttataagaagggcaccgtaataaaaaacatcgacaaggccgagcaggtttctcctgctgtcaaaatattccatgctggaacagctttggatggagacggcaaccttgtagctgtcggaggccgagttcttggcgtcactgcgaagggcaaggacatcgaagaagcgaggtcgagagcatacgatgcggtggatgtcgtcgactggccggaaggattcttcaggcgagatatcggctggagggcactgaagcaggagcagacggctaactactgatttgttaggttttcctaaatccggggtcagcttccagcgtcaagtgaaatgaagacagtagagtcaccattgttgtggttgcggaattgacaggagcatagcttctcccgtcgaacatgagcatcttttggccatggtttggctccgaaccatttgtagcagtcatgtattttccacaagtcaggcaatgtgtcaattgctcttgaggtgcaataataataccaccaaccaactattttcaagtgaacataaccatgtgatctct

SEQ ID NO: 4600 - DNA, 1032 bp, Triticum aestivum
  Clone ID: TRIAE-23APR03-CLUSTER27737_1
ctcctctcgcccagtcaaagccagagagcaccagcctcagcctggctggcgggctgtctcctctgccgctgccgccttcccctccgcctctaaatcctccgccccgccccgcctgaccttcgactcgaccggcgccgaatccgggacggcgcggggggatgggggtgtcgccggtgtcgccggggggcagcgccggctacgagtgctccttcaagatcctcctcatcggggactcgggcgtcggcaagagcagcctcctcgtcagcttcgtcgccgcagccaacctcgacgacgacatcgcgcccaccatcggagttgatttcaaaatcaagtttcttactgttggtggaaagaaactgaagctgactatatgggatactgctggccaggagaggtttaggacaatcactagttcttactatagaggtgctcaaggaattatactagtattctagtatatgacgtcgcgaagagagagagcttcacaaatttgggtgatgtatggactaaggagatagactcaaactcatcaaacaaagactgcataaaaatgcttgttggaaacaaagttgataaggatgatgagagaacagtcacaagagaagaaggtcttgcctttgcacaagaatctggatgtctgtttcttgagagcagtgcaaaaacacgagaaaacgtcgagaattgttttgaagaacttgtgctaaagatccttgaggttccaagtctcctggaggaaggctcgtcatcggttgtcaagaggaacattctgaaaaagcaacaggaaagtcatgcaaagtatggtggtagatgctgtcaatagattcgtgagtatgattgagctcgctatctgtggtcatcgcatcgcaggcaagttcgtgatacccaaactgtagatgttgtcgcgttctcgttgtacatgagttgtgtctaaacaatctgtgagtagaaaaggtggggaaattggggaaagtaagtacagtagtttgtaaggttttggcagagtggttaaaattggtttgtacaaagggaacg

SEQ ID NO: 4601 - DNA, 1423 bp, Triticum aestivum
  Clone ID: TRIAE-23APR03-CLUSTER2777_2
atcaccgtctctccgcatacatcacctcggccggcgctgctaccgatctcctccagagtccaagcctcctcacccaaagccatggccgcgcggcgtcgctccctcctcatgctcctgcccctcctcctctcccacttcctctccctcgccgccgccttccagtcggacgagctgctcctccacgacgacgacgagttcgagggcacccgggtctcctccaccccctccccccggccgccctcgacgccgccggtagtgtcctcccgccgccgatccgcggacgcgacgcaggcggctggcgcctccgagtccgacaccgtccagttcaccctcgagcacgacctcggagccggcctagggttcgcccccgccgggtccttctccgcccgcctcaagtcctcggcccacggctcccagactctcactaagctccggtttacgaggaatgagttgactgaggatgaaaagaatgcatttaagaaattacttgaagaagatagtttttacacaataaggctaccgtctaatgtgttggatcctacaagaaacgattatatttattcctcgatcaaagcgagatgcattccacgtgacagcttggatgaacatattgtcatccacatggacggtgtaaatattttggctgttaattatggttccgtcggtggatgccaatatccccggccaatgaaagtaccgtcaaaatggacattcaattcatacactattctgaagactgctgaccaagcaccaagaactccatcatttgtagagcaattaatagaaactgagagtggactcggtgaagtgatgaaaccacctgagaaatctttctgggctaaatattggatgtacatcattcctcttggtctcattgtcatgaacgccgtcacagcagcagcaaacataccggaggagcaagctggagggcagggtcaagctccagcacaaagggcgccaattgctgctccaaggagaagatgatggcttcctatattctttgcatgccatagattcacaaagaatggacaggggatggatctgcttgaccttccccagaacaggggcagtactagcggcaacaagactcacttgggttttttttttctcgcattcagaaactcacctttgttgtagaatcacctcagaaaggttgcgtgttctggtcgcatctacacgcgtatttttgcctgttgatagaaattaccatcagtctttaactcggttcaaactgcatgccttaatattcagaactagcttaattaccaatatcaaacattgtatgttttgctcataaccttcctgtatcaacgttttcgtgctgcttgcattgccgatggtttgatgctttgaaaactcttggtgcctgagaatatgtaaatgcttatcttcttggacaaaaaaaaatcattgatgtttaaaa

SEQ ID NO: 4602 - DNA, 1426 bp, Triticum aestivum
  Clone ID: TRIAE-23APR03-CLUSTER27804_1
gcaggccccagctcctccctccgtccccccgcccgccaccgcctcgtccctcgccctcgccctcctccgcccccaccgcacccgtagcccccactcccgccccgccccctcccccgccccctcctccccccccgcctcccccccccgctaccgcagcgtctcgtgccacacttggccataacgtccttcatggtcagctccttgcggctggccggcagggttctcggggtgataaaggtgtggtccaacctcactcaaagcttgttagaaaggctgagactgttgatcctaaggcgtatcgattaagacatgcaaggcctggcaccctatcccagtgtctcgagcagaatgacgacgacgacagtatctatctcagtcccgtttaacacaatgttgaattccagcttaccacagggccagggccccgtccagagcttgatgatcagaacattgtctttggaactgtattagaatcaatgcacgtgctccccaaaaatgcaaccatgccttctcgcataacaccctgccggctctcttttcttctctgctttgccctcctttgccatgatcaatgcaaacgctccaccagagctaactggggacaccaccatcaccgaccgcatattcatggactttagcatctgcccaagcttctttagcaatgaccgcacgttaggagctgaacttgcttcatgccctgattccgagcccctcggacgtgtagtctttggtctctatggtcggctactcccgatcactactgccaacttcaaaactacctgcactacttctgcatatcgaggcacacttgtccacaaggtgcttcaaggtcagttctttgctgctggccgacaaggttctcggcgtgataagggcgtggtccaacctccctcaaagcttgtgagaaatgttgagactgttgatcctaaagcgtatcaactaagacatgcaaggcctggcaccctatccttgtgtcttgagcagaatgacgacgacgatagcatcaaactcagtcctgattatcacaatgttgaattcctggtgaccacagggccagggccctgtccagagcttgatgatcagaacattgtttttggaactgtattagaaggaatggacgttatcaccagcattgcaaccatccctacctacaaaccaggtgaaaggatccaattcttcaatgattttgcacagctgattggcgatgaaagagctcaatctgctagagccatgtgggatcgcccacagaaaaccgtgtatatcagcggttgcggggagctgaaagtgaccaagccatccctttcccctcctagcttgccatgataagtactgtatagatgcaattttcctgtaattactattccatgtagctgtatctctacctataatatgatattctgtatcttccgttcctaaaaaaaaaaaa

SEQ ID NO: 4603 - DNA, 1287 bp, Triticum aestivum
  unsure (1)..(1287): unsure at all n locations
  Clone ID: TRIAE-23APR03-CLUSTER27851_1
aataaactcgcgaggccacactctcgagagtgaaaaggaaagcaaaatccgaaattatcgccatggttctcctcgccgtcgcgtcctcgctcaaaaccctaaaccctaccttgagcccgagccccagccgacgccgtctcctcctcggctcctcccatctccgcctgccgccgctgctctcgcggagcggccgcctccgctgctcggccggctacggcgatgccgccgcgccgcagcaggcggctccgacgacgcagcggccggacgagatcccgtggagcagggagctctgcaactcggtgcggctcatagggacggtgggcacggacatcgagctgcgccagctccccagcggcgcctccgtcgcgcgggggcgcattgccgtctggaagtcggccaccgagaccacctgggtaactcttgcattttgggacgacttggctgttatggcctctgagcatgtaaaacaaggagaccgaatatttgtttctggacggcttgtatcagatactgttgaggaggggcctgagaagcggcaggtttactacaaggttgtcgttcaacagttcaacttcattgagtccttccatcctgtgcggttatattcaaccccaagccagtcttctggcagctatcgatattatgttggtaatgattttacctgtagtacaactgagagtaaaaagggagattacatgagttcctcctctcgttcaactgaagcactgtggcaagcattcttcgctaatcctcttgactggtgggataacaggaaagataagaagaacccaaggtatccagacttcaagcacaagagcaccggcgaagcgctgtgggttgaggggaggaacaaccccaactgggtcgtctcccagctggcgatcttggactcgaggatgggttccctgcaggacaagcagaggaaaccagtctcctacatgtacgccgacgacttcatgacatctgacgccagcgactaggccctgctataggtgggaggaagcttctgatcccccaagcatccagctccagtatcctaaggtgcgttagttgcgccaagtcatctgcgcgtctcggttttcgttgtacatagctaggctccggaggctttattattagtccatctgttccacgtcggtggtagtgacaaatttgtgaacgagaagctctatcatccgcacatcagttgacgcgttccatcggtcgagtcccgctcccgtctaatcagatgactaacaagagtttgcagtttatacgtgggaggtttntgcaaaaaaaaaaaaaaaa

SEQ ID NO: 4604 - DNA, 1609 bp, Triticum aestivum
  Clone ID: TRIAE-23APR03-CLUSTER278600_1
aacacaagctctcatcccatctgtgcgggaggattagagagggcatccaagaaacagcaaagtagcagtacaaacatacttgcagctaagctaagacggatcatggcgatcacaactgctagtgccagcccggccatgcaggaagcagcaaagacgccaagcgcctcgccgccccgcgccacggccgcctcgccggctcgctaccggccttcaccgctggtcatattcagcgcctgcctcgtcctcatcggctccagcgggccgctcctgctgcgggtctacttcgtccacggcgggcaacgcctgtggctctccgcgctggtccagatctccggctggccgctcctcctcccgcccctgtgcgtctccatcttccgcggccgccgccacggcatcgtcaacctcctcctcccgcctcgcctcgttggcgcggccgtcgtgctaggcagcttgtacgccgtgtcgtgcttcgtgtatgcgatggggtcgcaggcgctgccgctgtccacgtcgtccttgctactggcgacgcagctcgccttcaccgccgtgttcgcgttcctcttcgtcgggctccgcttcacgcccttctctgccaacgccgtcctgctgctcaccatcggtcccgcggtgctcggcgtcggtcccgggtccgggaagccggcgggcgagccatccaagacgtactggaccgggttcggcgaggccatcgcggcggccgcgctcgccgggctcgtgctgccgctcgttgaggtcgccatggagcggtttgggcggcggaggggaccagccgcgagcgcgccgccaccctactccacggtgatgcagatgcaggccatgatgggcctcgccggcacgatggtgtgcctgctcggcatggccatcaagagcgacttcaacgcgctgccgatcgaggcggcggcattcgggctcggcgagaccaagtactacctagtgctcgtatggggtgccgtggcgtggcagctgctcaacctgggcgtcgtggggctcgtcacttgcgcctcttcgctcctcgccggcatcatggtcgccgtcctcctgccgctctccgaggtcctcgccgtcatcttcctccacgagaagttcgacgggccaaagggcatcgcgctggtgctctgcctctggggctttgcctcctacatgtatggcgagaaggtccagcagaagaaggcggcggcgcagaagaaccagctgctgcagcagcagatggcgaggaaaaccggagacctcgagctggctaacccttgaagaccggcaaattctgtctatggagtatgggggtggtgtagtaattatttttctaatttcaaaagtacaggacatataagaatagagtaacaagcatttcgtaagacattgtttcattctaggaaacacagagaaatcaagtgctacgtaccattgagttaataaaaaacatactattcagaaaaaaaaaaaaaaaaaagcttatcgataccgtcgacctccccccgggggccgggccccgggacccaaattccccccatagggggggccattaatcggcggcgcctatggggggcggttttttaaaaagctggggaggggggaaaaaccccgggtttac

SEQ ID NO: 4605 - DNA, 1131 bp, Triticum aestivum
  unsure (1)..(1131): unsure at all n locations
  Clone ID: TRIAE-23APR03-CLUSTER2791_1
gggctcactcctcggcaccgtcgtctcctctgagctcgaggaccgaccgaaacgcaccggcgtcggagcggctaggcgaaggcggggcccaacgccggcgagcggcggcagcgtgctccgccgccatggacgagcaggagttccggcgcatgctcgacctcttccccgtcgtccaagcgcggcgcagtcgtctcgggtggactcgtcgtctcttctgagttcgagaccgaccgaaacgcacaggcgtcggagcggctaggcgaaggcggggcccaacgccggcgagcgtcggcagcgtgctcgccgccatggacgagcaggagttccggcgcatgctcgacctcttccccgtcgtccgatcccgcgactactgcaaggatgaagtggaatcatcaagcgaaggcaccacacagcaaacacgagctcaggagataaaaggaaccaaaaagaaggctgcagaagctctattcctgcggaaattgaagacggctgctgagaaaaaggttggagcaacgaaggcagaactattctgcaagacattcgaagaagctcacgagaaacttgtttacaaagaactggatctggatgctgctcaaaggttcctgaatgcctacaagagctgatgatgtgctgttgctagatgcctagaagatttggtttttattcatcggaaactgctgaagatgtgatgatgttaagatctctgatatttcctttgtggttctcatcttccgcgaaaccatgtagacagccctggtcaatcagctacattattcagatgtactgtgttatccttaacatagaccacatgtatttttcttccagctgcgatctgttcgccctgttcttcagagatagaactagcatgtttcttctgtttccaatgacaaaaagtctgaaccggcaaaaaaatatacataaaaaaaaaaaaaaaaaagcttatcgataccgtcccccccggggggggcccgggccccaatccgcctatagggaccgaattacccggctccctgggcgtcgtttttaaacggcttgactggaaaaaccctgggttacccaatttatccccttgggagaaatccccctttccccagttgggtaantaacaaaaaggcccgacccgatgccctt

SEQ ID NO: 4606 - DNA, 1842 bp, Triticum aestivum
  unsure (1)..(1842): unsure at all n locations
  Clone ID: TRIAE-23APR03-CLUSTER27928_1
attcgccccgcccccccccccagtccccgccccctcccctccccccccccccgcccccccgaccagagaggcaggtcgccgccgacgagatctgagagctccggaggccggatcccggccgctcaaaggcacgcggagatgaatctgtttcggctcgccggggacatgacccacctcgtcagcgtggtggtgctgctcctcaagatccacaccatcaaggcgtgcgcaggcatatctctgaagacgcaggagctatacgcactagtttttgcagctcgctacctggatctgtttgtgcattttgtatctttgtataacaccgtcatgaagctggtcttcctggtcgagctctttctcaatagtttggtacatgaggaagaactcgcccggccccacctctcagtcctcaccccgccccctccattcgcccccctcccgccgaccagagaggcagctcgccgccgacgagatctgagggctccggaggtcggatcccggtcacccaaaggcaggcggagatgaatctgtttcggctcgccggggacatgacccacctcgtcagcgtggtggtgctgctcctcaagatccacacaatcaagtcgtgcgcaggcatatccctgaagacgcaggagctatatgcactagtttttgcagctcgctacctggacctgtttgtgcattttgtatctttgtataacaccgtcatgaagctggtcttcctggcgagctctttctcgatagtttggtacatgaggaagcataagatcgtgcgtaggacctatgacaaggagcacgacacctttcgccatcatttcatagtgctgccatgtttggttctggctttcctcattaatgagaggttcaccttcagagaggtgatgtgggcattctccatttacttggaagctgtagcaattctgcctcaacttgtgttgctacagcgcacaaggaatatcgacaacttgactggccaatatgtcttctttttgggtgcctaccgcgtactttatatcctcaactggatttaccgatacttcactgagccccattttgttcactggataagctggattgcgggtatcgtgcagactatgctgtatgctgacttcttctactattacataataagctggaagaacaacgtgaagctagagctaccagcctgagctcgctgtttccttccaagatagactaggtattacggcttgcttaacttaatgggtagacaggaaagatatggatcatatgatacagatgtgcgttttgggtccctggtttttcttgtttccttccaatgttttcggaggtgaaagctaggttcgccttgtatcttgtaaggtaatataaggaggttgtgtacttgtgatactgtttgaaaaaaaaaaaaaaaaaagcttatcgattaccggcccacccctgagggggggggcccggaaacccaatttccccccctaatangggagcccaaattataccccggggccccccttggcccggtcgtttttacaaccgcgcggggaactggggaaaaaacccctgggggggataccccaacctaaaaccccccctgtgggagaaaaacctccccctttttgcccaggggggggaaaataaaaaaaaaaaaggccccccccccgaaggcccctttttccaaaagattgcccaaacccctggaggggggaaagggaaaatttaaacacccttaaatattttggctaacaaccccccgcaaaatttgtggttaaaaacaccctctctttttttaccccnaagagcgcaaaagcggaaaaatccccttataaatataaaaagaatacaccccaataagggtgggggggtttt

SEQ ID NO: 4607 - DNA, 1535 bp, Triticum aestivum
  unsure (1)..(1535): unsure at all n locations
  Clone ID: TRIAE-23APR03-CLUSTER2795_1
gccccccaccagcgcgacggaagcggtcgcgcgagggcgcgcctggcggtcgcgcagcggagctacaggacccacctccactaccccgcgcgcgttcccatttcccgaccaccgacaggccagtcaatcatggactaccaccagtccaccgcgttcccatttccagtccaccgacagaccaatcaatcatggagttcccgcatcgccacggccacggccacggccgccgcgacgacgacgacgaagaccgccgcgcccccgccccctacggccgccacgagcccgacgcgtacggcgcccctcccccgtcctacggccgccgccccgacgacgacgccggtgatgcctacggccgccaccctcccgccgcctacggcgctcctcccccgtcctacggtgccccgcctcccgcctacgggggcggccgcgaggacgactacggcgggcgcgccccggcagtacgggtggtccccgggccccggcctacggtggaggccgcgaggacgactacggacgccacgcgcccgcgccggcggggtacggcggtggtgactacgggcgccgcgtccgtgctccggcctacggcggagggccgcgacgagggccacggggtgcatgaggaatggtgaacaacatctacttgaactttgatgcactccatggcgacaaggaccatggcggtgtgcgcgatggaaccaccctcattctgtgggagtggactgagggcgacaaccagcgctggaagatcgttgcctggtgaatgatgcacatgctacagtttgttggttcaaacagcgcgcgatcttaataataagcaagttactgtatatttctggaataacaaagaggatggggcccaatgtgagcggtcaggcttgttttcaatggggagttatgtatattcgatgaacctgttatgatagagtatatttaagcctagatcatgggtcatggaagcatgaacagactagtccttattacttatgtaatcaggggacataccggcaagaaaccgttgttaggcttatgctcaagaaaattttttatttaacatttgttcgtgtctcctagggtcgtcaaggaacatggctggtgagagtgatggaaccaccctcattctgtgggagtggactgagggcgacaaccagcgctggaagatcgttgcctggtgaacgatgcatatgctaagcaagtactgaatgtttctggaataaaaaggatggcgccgatgtgagtggtgtttctgttttgtttgagcagttatatatattaatgaacttgtaatgatggatttattggcgtagattatgtgtgatggatgcatgaacagaccagtgcttgttattatgcatgcatatacatgctgtgtgacatgtttgtgaaatactgtataatagaattggtttatcccatcaattgctgtaacggagatctatctatatagttgtggcggatattcaattcggctcaaaaaaaaaaaaaaaaaactcgagggggggcccggtacccaattcnccctananggagtcctatta

SEQ ID NO: 4608 - DNA, 2146 bp, Triticum aestivum
  Clone ID: TRIAE-23APR03-CLUSTER2798_2
ccaatccacgcacacccgctcccgtcccgcaagcctcgctcgccctgatccgatccccaaatccctcttcgccgtcgacgccccgaatctcagctccggtgaggccgacccattagcagggcgtgacctcggcgcgcccgccctccctcccgcccgccgctccctcctctccgcccgccgtcgtcccggtcgccggaacccgacaagttggatatctaggaggcaccgcagcgttgcggcgcccaccgcgcggacaccatgtctgcggcgccagccgcgtaccccaccaccagcctccgcgccgtcgcgtccgggaactccttcttcccctgctcgcaccgcctcaagctttcctcctcgcatcgttttagtagtagtagtattggcaatcgtagtaattgcctctgacgtttgcctccccctcgtcgcccacgaccttcggttcgatctgctccttgtgctcgtcctgaggattgtctggttgtgagggctaggtgctacatctctgccttttgcgtttgcgcgagtttggtgtctgtgtctgtgttcgatcaccaggtccgatccagagcgatttggcctgttggaggtggtgattgctgtctctccgaggaaatgttgcctcagattgaatgaacttaaatatgagcaatatatgtgcacctatttctatcatatggtcttattaactttatctagtaaactagggcgtggtccttaagaagtcctttacttgttctattctaatttttgtttttccctgctaagcaggaagttctcttctgaacttcggatttagcttgtggatgggcggacctttggtagactgcagtgctgaaggtgtgagcagcagctcatgtctcagccgcagcacctgtggaaaagcaggttttgagcacagctcttgtgctctccctgaagatgaaaagtttgaagctggaatagcatgtgtgaaagatgatttggttgtcaaggaaatcagtttggctcttgctgaggtgatgcgtgtctataatgacaatgatgatgaagagacagatctgagtgaagactctgacgaaaaagggggattcactttctggagaaatcaaattcggctgaatgattttggtttgatattgacactgaaagtgggccacatcgtcagccttcactgccgggaaatgcgtctgaatcatcaactggaaattcagagaatggaaatttctcaaccaatgggactcaactgttggtttctgctatgaaaggaagccgtgcaaagcggggaattgtgacaaagttgattgtttcatgggcccctgacgtatatgatcctcctgttacttctgactcacacacagtgaagccgcaccagagaagttcaaggaagagccactacaaatacaagcccccaaagggcagcagcagcagcagcagcagccgcactagcagtggcagcaaaaaggacaagaagcattctcaccacagcagcagcagcagcaaaagagataagaaaccttcccatcgcagtagcaatggtggcagcagcagaattgacactagtgatcctcaacatcggaaggcatatggcagcatcactagcagcagaactgacactagtgttcctgaatatcataagttatcaccgtggcagccaccggctagtgccgcagtggaagaagccatacctaccgtacctgtactgaaggccatggaacagatcaaacgtagttccagctgctgcaaggagccgccgataagcatgaaggccatggaacagatcaagcgtagctccagctgctgcaaggagccgccgataagcatgctatcacgccaattcgtggctgccaagtacaaagggatgttttctttcttgagtcagaaccaacttgcttcttgagcatatcgcagagactcctgcgctattcacaggcgttcctctggttatcagcaaggctttcatgttggatggcgtttgatctatgaacttttgtttggacatcagtggacacggttttgaaaattctttggttgacgtatgcatgaccttgagattattaactgtcttttcttattattaaaataaaaactgttttgctcatttatttatgtaatatataagcatgttatgtgtgtaatttgtgtaataagtatgttatgcgtgtgc

SEQ ID NO: 4609 - DNA, 2007 bp, Triticum aestivum
  unsure (1)..(2007): unsure at all n locations
  Clone ID: TRIAE-23APR03-CLUSTER27994_1
acatttccatggaaaagactcatgacaacctcttgacactgatagatcacccatcaggcaccacaaacagaaagagatgctcactctgaacctagcatacatgcttgcaagcgaagtctcgccgtcagagatcaaagcttaaagccttggcatgatccagaaaaatactcaatgctgcatcttatcttttctccatttgactttgctttgaaacaaaccaaccgccaacacttccattccaggcatcaaccatggcttctcctcggcatctgatgaagctttcggctgctcttctcctcctctgtgttggcgtgtgtgtggctcgcaacagtgacttctccattgtcggctactcggaggaggacctgtcgtccaacgacagactcgtcgagctgtttgagaagtggctggccaagcaccagaaggcgtacgcgagcttcgaggagaagctgcacaagttcgaggtgttcaaggacaacctgaagcacctcgacaagatcaaccgagaagtggccagctattggcttcggccgcagacgaggttggccgtcctcaccccccgttcgcgtcgaatgtctgcctcgccatcggccctccactgctgttgcggcctgtgggggggagcagccgaccctcgagggacgaggacgggagtgtgaagcgaggcgcgccagtctgtggacgggatgcacgagcttcgacgcgaagacagacgaggttgaagtgtgcaggcacagcctcaagcacatcgacaacatcaagggggcggtgactaggatagttgaccgggctccaacgcattcaccgacaccacgaaggacggagctgaagctccgccgtccctcagcgtcgcctcaatccttctctggctcggcggggcagcagccgagagcttcaggtacgaacatcgcgtccagtggcgggctacacaccgaggaggcgtacccctacctcatggaggaaggcagctgcggcgacggtaagaaggccgagtccaaggcggtgacgatcagcggcttcgaggacgtgccggccaatgacgagcaggcgctgatcaaggctctcgcccaccagcccgtctccgtcgccatcgaggcctccggcaggcacttccagttctacagcgggggagttttcgacggtccttgcggcgcgcagctagatcacggcgtggcggcggtcgggtacgggtcggacaaggggaagggccacgactacatcatcgtgaggaactcgtggggtgcggactggggcgagaagggttacatcaggatgaagaggggcaccagcaacggcgagggcctctgcggcatcaacaagatggcctcctacccaaccaaggacaagtgatgttccagcctcaaatcctgcatccagaggattgaagatttgaaccatccttgagagtccttgttcccgatctttgcatttccctgctttttctttcacgtttttccttttctcaatggttcctttcggttaatgcgacgaacatggactgaaataataaaatttatttccaagtttcaattaagattgacgcctcagatgctgcatccacaggattgaagatttgaaccatccttgagagtccttgttcccgatctttgcatttccatgctttttctttcatggtttttcttttctttttcaatggttcctttcggttaaaacgacgaacatggactgaaataataaaatttgtttccaaatttctagaaaggacgcggcgcctggcctgcccccctaggcatgtcgtaacccccccaaccctattttcccccacctctgcccgcaccaccccccccccgctttcccgggccggcccggggcgggtatctgtgggcgcaacacgggcccgcggcccctggttccccccgccctccccctaccanacttgtgtcccacacccctcaatcttgctcatatcggctcactcagggcacccgccccacaccaaatcgggagagaagactgtaggagcgaaaaaatcttatgagcgactat

SEQ ID NO: 4610 - DNA, 1752 bp, Triticum aestivum
  Clone ID: TRIAE-23APR03-CLUSTER2808_1
ctggttgcgcgcttggttcaggtcccgttctttcgtgcgtgagtcatgcgggcggacggcgggaggaaggcggcccgcaatcaaccctacccacccctccgccgcccgcggccaccagcagcggccgccgccggaccaccccaacagctacccgcacccgcccgcctcgcacctctcctcacatcctactcaggccctaataatttggaagttggtgcaggcaatctcttgcagaaccctatggacaggtctaaatctccccaaccattgatgaagagccatactagtttgtctggatacggatggccaccaatattgaggaatgacgagcttccgtctgaaactgcatcatgataaaacgcctggattgaagtttgaaacagtagataaagcgcaagaaaaatttggagaagacagttgcccattgtagcaatcaagctgcttccaacgtgtcatacctgtggtatcgccagtgtattggggcatgcactatccaaagtgctaggtgcttctaatggagaacttattccagacgaaagagaagtatgaagaaatacgcgagcatattatacaggaaccttttgactgcgaaagagcccgtgaatggaaacctgatgtaacatgcgatgatcaagaagatatttctcaggatggaagcagactctgggctatcgacaaacccaaatattgcacagcctcctgctggatgggaaaggcagattagaataagaggtgaaggaggcaccaaatttgctgatgtgtactacacttctcctactgcgaggaaactgaggtcactggttgaagttgatcggtacctccaagaaaatccagagtatggagcgcagggtgtaacattagctcagttttccttccagattcctagacctctgcggcagaactatgtcaaaaagcgccctaagaacgcaagtccaagtgatgaagcaacaactaagcctcttcaaccagtggaagttaactccatatcctgggctgcccctcttgcaagtgaggctaaggcaagtgaaccagcttctcatgccgacgaaaagccagttggatcggcagatgtggagctggtccggaagaggaaagcagaaccaggagagtcagatgctaacaaccatgtgtctgatgggccggaaaccaagctagaggatgctcagaatggagatgctaccaccactgcctgaaaagctgcagtctgacgtacccagtgctccgcatcgatgatttcctcgactctctattccttctccattgtatgcgggagctggttttttctgtaatgcgagtccgtaatggccttatatgtgtatcgaggcacgaaccttcgaggtcgaccaaaattcgacgatttgggacagtaagttgactgaatgttgtagtatcggggaagccctgtcgaaccctttcggagcatgtatgttcccctacgtgcttatgtaggagaccttgtcgtgcaagattagatgccttttattttctgctttgtaagatacagagatgtcggtagggaactgttgtgttgtgctgtatgtcggagtcgactcttctattatctatcgagacatgccagttgtagcagtggcacctgcgttaaaaaaaaaaaaaaaaccgcgaataccgtcacgtgggaacgtggaaaaaaaaaagggggttttttttttttaatccccggggggaaaaccccctccgagggggggggggggccccccgcggaaaaaaacccaaaattttttccccccccca

SEQ ID NO: 4611 - DNA, 1223 bp, Triticum aestivum
  Clone ID: TRIAE-23APR03-CLUSTER28111_1
agcttccggactccacccgaaccttgatctcgtccccttcctcccccccggctgcgccaccccgacccatcctccccgtccgcgaccaatatgaggagaggctacagctacagcccatccccaccaccgaggggctacaagggaacggcccagagcccaagtccccgtggtcgttatgattgtcggggtggagatcgtccaaccagtcttttgggtcatggaaccttgttctgtcaccgcagcccatgaccacgttcagccggccatttgatctgtttggtcttcttaaatataatatccaatacatgggattagctatactcatgcaagaaatattttgaagacatgtgttaagagtacttttagaagagaaagaaagctaaagaagttgcaagcatagaaacattcagttaacgattgtttttgaagagaaggagagaaatatgaacacgggagataagagaaaaacaaattcaaataagatcacgattgaagagcaccgaaggtatagttactcgttggagcgatcttcacctgatgaggaagacttctaagcctctattagaactcttatgaagtgcaagggagccacgggggatttgggcttgtgcagtacttcgatcctaaccatgcggcagacgcaaaatactacatggatggacaggtcattcttggtagagaagttgcagttgtttttgcacaggagaacagaaagaagcctgctgagatgagaaccagagaaagtagcagaggtcggtcttacgatcggcggcactctccttccccaagggggcggccatcttaccgcggccgtagctactcaaggtctccatcacctcggcccgcaaggcggaggttcagagacgagtctccctcgcgctcccgctcgcccagcggatcgaggagtgcgagtccattggatgggaagtacggcaggtcctcacgaagagagaggtcgatttcggttagcggttgaagcatcagtagctctgctcgggtctctagaactgtagtggacttgctcgtgggaatctaagtttgctatcgcttttgtgaaccgcgctaaccgtggatttatagagagaagattgccgtcgtgtatcagcaagagtatgtcaaactgtgtctgcggctctgtacctttgcactagattatttagcgcataaataaaatgactctgcattgcaaaatcgtcaaaaaaaaaaagtcgacgcggccgcga

SEQ ID NO: 4612 - DNA, 1931 bp, Triticum aestivum
  Clone ID: TRIAE-23APR03-CLUSTER2813_1
acacgcccgactcgtgctcgccacggctgcacccaccccccaatcccctctattgacctcaaggtgtttgaacgcgcgcgaccgcatggcctccatttccgtcgaccccaaggccacctacgcccacttcccgcacaagcgggcgctagccggagcgggccgcgacgaggaggccgcaggagctcgcgaggagtcggcgcccgggggccgggcggggtcgcgcggtggtgacgccgacgcgcgccccgcgccgccccgcgtcctccagctcctcgatgagccctacgatgacgacgaagaagatcctgccgccggggtcggagcgcccgagcctcgagccgggcgagaacgtgggggtggacgatgtgcgtgcgcttgtcgcgcaacacctgcgggcccccggcaccatgggtatcttagagcaggagttcggggaggacgccgaggtgtgggaccgcgagaaggtcgtcatcatccccgcactacatctcctcccccgacgagcgggccaaccggaacgtcgacatcctctccggcttctccgcggggcccaacagcttaagtacttttacgacatcaaggacctcagcgacttcagagcaaatccggactacaaaggtgtttgccacattgcgctcgcccaagaaggtcactgccgaccaggcgaggttctccttggtacatattctcatacctgctacgctggagcctttggtcagtttgcaagtagaagcgggaactctgatacgttttgtgttatgggatcgggaaaggctcttctcaaggtgccccccaccatcaggttcatattatatggagaaatgccaccttatttactcgctaaggatctgattttacaaattattggcgagatatctgtatctggtgcaacatacagatcgatggagtttgttggatcaacaatagaaagtctaactatggaagaacgaatgacactgtgcaacatggttatcgaagctggtggaaagaatggtgttgtgcctgctgatgaaactacatttaagtctcgagggtaagacatttctgtcaaatatgagcctgtctatagttgctcaggccagattttttacagtgactaccggtttgatgtgtctaaattagagccagtagttgcaaagccacattcccctgacaaccgtgctctagcaagagagtgcaaagatgtcaagattgaccgagtctatattggttcttgcactggtggtaagaccgaggactttattgctgctgcaaaggtgttcttagcttcgggcaagaaggttaaggttcccacttttctcgtccctgcgacgcaaaaggtgtggatggacgtgtatagtctccccgtaaccaggatctggtggcaaaactatgctcccaaatatttgaagaggctggttgtgatacaccagctagtcctaattgtggtgcttgtttgggtggtcctcgtgatacatatgcacggatgaatgaacctacggtctgtgtatcaacgacgaacaggaactttccgggcaggatgggccacaaggaagggcagatctacctggcttctcccttcaccgcggcggcctcagcgttgacgggatatgtcacggaccctagggacttcctgtcttagagatcttgaaaacaatgaatttgtgttgcggaccgtcctgtactgtactttttgttggtgtttgaaactgtagtttagatgtcatctgtgcttcctgctgagaaataagttactcaacgagtagcagttgtaactgagtaaggttttgttgtattcttgcttttccagcattactgagtgtgctatcaggaacaaacataactattacatctccacaggaaggacactattcaagaatgatactgtatcttagtagatgtcaaatgtaaactcctcccaagggaggctgattgtcaaaaaaaaaaaaact

SEQ ID NO: 4613 - DNA, 1035 bp, Triticum aestivum
  Clone ID: TRIAE-23APR03-CLUSTER28174_1
tctctgcccgacatacctggtccaagaatcgagcaggcccccttcccataactcagctacccaccctacgtttcacccactccgtacagcagtattccctcgacctcgccctcgccccacgccgaccggactagattcaagacgagatacctggtccagaatccagatacccacctttcttcttcctctgcaagccggggcagattcacccactccgtacagcagtattccctcgtcccccgccgatcggactgggaaagcgagagcgagatgccgacgctgacgaagctgtacagcatgaaggaggccgccctccacaacacccccgacgactgctggatcgtcgtcgacggcaagatttatgatgtgaccgcgtatttggatgaccatcctgggggtgctgatgttctgcttgccgtgactggtatggatggcaccgacgaatttgaagatgcgggccacagcaaggatgccaaggcgttaatgaaggattacttcattggggagttggacttggacgaagcacctgacatgcctgagatggaggttttcaggaaagagcaggacaaggacttcgccagcaagctggtggattacgctgtgcagtactgggccattccggtagcagcagccgggatatcagccgtggttgccatattgtatgcacggaggaagtgatgactggttataggttgattgaagaaccattttggggtaacaaacacatttatagctggttatggatggagagattatgtacttctgtccaaaggcggagacactgtattgagcccataggtacttgattcaaatatttgtctacaaaattggtggtactatttttattaatatgtcattcaatggatggattcatttcaaaaaaaaaaaaaaaagggtgatgtaaaccctcttacaccttgaggcagctgcttggcacagatttcccccaggccaggcctgcttcccccgcccccgggccccggggtgcgccacagtaatgctatatttgaatattgtgatttttccaaaaaaaaa

SEQ ID NO: 4614 - DNA, 1627 bp, Triticum aestivum
  unsure (1)..(1627): unsure at all n locations
  Clone ID: TRIAE-23APR03-CLUSTER28240_1
tctttttgttctctccggcggggaaagagatgagcggcgcgaggagcaaacgagatcatgtgcaggagctccccgccgccgagaggagccgatgaacgggggccctttggcggcgcggcggcggccgggagctccgcggccaggcaggaacgccgctcccgccgcggaggaagaagggggcgagccgggggcggccggcgccggacagctcctcggacttgtctgaatccccggaaggggggcccgtggccccccggtggtggcgtctaggtgctcggcgtgcgtgtcgcacggggcggtgtccgtgatcaggtggcggacgcggggggcggggccgggtggccctcgcgcggcccggccggggcggaaggccggggggggggggaggcggggacgtggagtacggggcaggggaagggggcttcttcgcggtgtacgacgggcacggcgggtcgcgcgtggcggaggcgtgccggctgcggatgcacctggtgctcgcggaggaggtgacggcttcgtcgtctgcagccctggggcggagggcagggtcggaccgaggacggcgaggacggcgcgcggtggaaggaggccatgacggcctgctttgcccgggtggacggcgaggtcggcgtcgacgacgggaccgacgccggcgagcagacggtgggctccacggccctcgtggccgtcgtgggcctgcgccgcatcgtcgtcgcgaactgcggcgactcccgcgccgtgctctcccgcggcggcgtccccgtgccgctctccgccgaccacaagccagaccgacctgacgaaatggaaagagtagaagcagctggtggcaaggtcattaactggaatggataccgtatcctgngagtgctcgcaacttcgaggtcaatcggagactattacctgaaaccatatgtgatagcggaaccagaagttaccgtcatggaccggacggacaaagacgagttcctcatactagcaagcgacggcctgtgggatgtggtgtccaatgacgttgcctgcaagatcgcgaggaattgcctaagtgggcgtgcggcctccaagtacccggagtccgtctccgggagcacggcggccgacgccgcagcgctgctggtggagctcgccatcgcacgcggcagcaaggacaacatcagcgtcgtcgtggtcgagttgcggcgactgaagagtagggcagcggcggtgatcaaagagaaccgcaccaggtggcactagtgataatataggagtggccggctggatgggatgtcacattattcgagcatggcgacagtgagagagagaaagaaagaatttgcggctgagttcgctgggatggttgtagttaagagggctcagggacgttgtggccttgctgccgtcgagttgagtgtgctatttgtagccgtgctgcccgttgtattgcgttgcgttggttctttagttcttctatatatggtgactgacgttcggggcgaagcggcaagaagcataagctgctttcgtcagttctgatttgataattgggtttttccatgcggttggagtttgagtaacgttttgtaggtggtccatggattacctttgccatgaacttgggtgatttaatagtttgtgagatgactgc

SEQ ID NO: 4615 - DNA, 1840 bp, Triticum aestivum
  Clone ID: TRIAE-23APR03-CLUSTER28244_1
aactctcgctccccgcttctacagtgggtaggcagaccctcctctctccctcctccccctccgctcctcatctccacttgagaagaagaagaacacagcaggcagaaaaaggaaaaaagaaatatatagtttatccttttcgtttatctctttgacggatcaagaacaggggagggagattggagggggaggaggaggagcaatcgggagtaaattcgcagcaagagacgagggattcggcgtggatagatagatagataaatcagttctcgcatcggtttattgattgctcattaacccagcattcccgccgctgccattcttgggaggagtcagcatggttccgtccgggtacgactgcgccgcctccgtcctgctctgcgccgaggacaacgccgccatcctcggcctcgacgacgacgaggaagactgctcctgggcggcggcggccgccaccccgccgcgcatgaccgtcgcttcccccccgccgccggaggcgcccctggtggaccccccctcccaggcccaggagtgcgtggtggtgcttttctggacggacattcagaacatgcccgacgtgtggtacttcctgcttgattggatttggaaggtcatttagcatttgaatttcgcgccgttgactgcggtcctgtctgtcaactaccttgataggttcttctccgtctatccccttcctgaaggcaaagcttgggtcacacagctcttggcagtggcttgcctgtccctcgcttcgaagatggaggagacctatgtgccgctccctgtcgacctgcaggtggttgaggcaacttctgcgtttgagggaaggaccataaaaaggatggagcttttggtgctcagcaccttaaaatggaggatgcaagctgttactgcttgctcatttattgactacttcctgcgcaaattcaatgatcatgacgcaccctccatgctcgcattctcccgctcgaccgacctcatcctgagcactgctaaaggagctgattttttggtgttcagaccttcagagattgctgcaagtgttgcacttgccgcatttggggagcgcaatacttcagtagtcgagcgggctacaactacctgcaagtacataaacaaggagcgagtgttaagatgctacgaactgattcaagacaagatagcaatgggaaccattgtcctaaagtcagctggatcatcaatgttctctgtgccgcaaagcccgataggcgtgttggatgctgctgcatgtctcagccaacagagtgatgatactgctgttggatctccagcaacatgctaccaagcctcttcggcaagcaaaaggaggagaattggcagatgaccggtctcatgtcgtgctgtgcttcaggtgtgttgctcaccgttttggccgttttgttgtttcaaacatctcaattcagtttggtcactcgagaactatagtgtggtcaagtagttgctggaaggaacaaaaacaccatagtcaatacttgacccataaaaacaaacagttcgccgcgagcctgttcatgcaatcgacatatgtaaggggcatgctaagctgttagtgtccagagatgcatgctagtgtaggcagagatggagcaaggaagttgcatgttgtagagatgagagctctattgccctgtttttgtatttcggttccatattcagtttccaatgaactttgggcaagggctgctctgatcattgaggcggtgaatgaaaatgatcctaaaacggatcggctgagatacagaacagtttatatttgttctgatgagttataaattttgtcgacattatatgttgttccattttcgaaaaaaaaaaaaaa

SEQ ID NO: 4616 - DNA, 1026 bp, Triticum aestivum
  Clone ID: TRIAE-23APR03-CLUSTER28306_1
cgccccgtgcccaccccgccccccgacctcgaccccccccccgaccccccgattcgctcctccgccgctgctccctcctcgtccacctccacgccgagctcgctcctccgcggggaaccactgccgagagcagctaaggaaaacctagaataggtggtgttatctggcttcgaattgctgtctagacatttcttgatcttcactcatcagaaacttaaagcatgagctcccatcgcgtgaagtggaatgaggacaatcctgtatgagattgaatcaaacaaagccaggtgaggcacgaaggataaccgaggcccaagacaaccagtatcaccctatgatgggtacgtgaagatgggtcactatcaccaacacgccctttcgacaagtgtctagatgagactgttagtgctgaagctatattgactgctttaaatggtgtggcctcttcaagtaaaaatgattcaaaggatgatgagtgggcatcctcagatgatgatgcagatgccatggaacaggatggtgactcagaagctgacagatcatcagtgagtttcaaagagcatcgccgcaatcactacgatgaattccgcaaggtcaaggaactgatgcgcactggatccctggttgaagacgaggcccgtgcgaatgagcgagctgcaaacaacgtcgaggacaaaaccgcaggagagaaggcaacaggtgacaagagtgaatcgtcagcatcacctcaagtatgagccgcaaagtgaattctgtggtcgctaagcctagggaagttcaactaagcgggagcatgcagtttgcgcctgctctgtgtgtattgctggatccttgttttcataccagatcggatgattttctgtacgcaaagaacctgttcctctttcttattttgagatgttgcggtgcctaaaatggtggagaattctagttgaactagctacttcacgttcagtcaggaggctagaatttgcctgcgccgctttttataatactggaactgagttatatggacaacccttgagc

SEQ ID NO: 4617 - DNA, 1493 bp, Triticum aestivum
  unsure (1)..(1493): unsure at all n locations
  Clone ID: TRIAE-23APR03-CLUSTER28335_1
gttaatcaccaccgtggagctacgagcgaccagcgatggcgcgcgtctccaattccaaaaagcgcatgctccagaccaacaccagcagccgcaacaagaaggaggaggcgaccgccgccagcgccaacgccagcgccgcggggagcgccgacggcagcgccgtccgcgtcatcgcccacgtcatcttctccctcttccgcttcggccacgcccacggccgcggcaagaacaagctgctggtcaccaacacgtacgtgatggtcggctgcggcaaggacgacggcccgcggagccgcaagggcgtcgacgtcatgtaccagctcttccgcttcgggcccgtccgcgacttcgagtgggttgatgtgctgattcccgacactcactgggtgctgggacccggattcgtcgacaagaatcggcgtgacaagggcgaacctggatggtttgccgtatggcgatacaagcggcgccgcaaatgacgtctgtgagtttggcaagatgcttatgctctctggggacacaagacggagtgcagtgagaagcaccagattgactatgtcgcacatgatgctttgccttatgctgatacaagcggtgctgcaaatgacgtctatgagtttgtcaagaagattggaaaattcaaggaaacaaaaaggaccgatggagtatcgacatcggaccttataatgaggatagtgaaggactacaaccagtatgtgatgaggaatctagcacgaggttactcaaggaaagatatgggcgtgagctatgttaaggagaaacactgcaggtgaatatgaagataaataaactgcgggagactgtgaaggcacaacaagaaaagttgcaaacggtggcgaagacggctgggataaaccacgaagagtggctggcgaacgcggatcgctgggtggctggcttcctggagaagttcgaggagcactgccacgtcatggagactgccatcaaggaccggatacaggagaggttggggaggcaggccggcaaaggcatagccggcggtctcatgcggcagccggtggcggcggcctgatctttcaaaccaggtctttgtgatggtgtgaacgaacaccgagaaagcgagaagttgtttagctgtgcttgtgtcatggaatgtgatgcttgtgctgagtaaagtggttgagttagctgagcaaatcctttgtattattattactgttctttttttgttgctggaggatgtgtgtgtgtgtggtttcacagttttgtacgcagatatgatgtctatagcagggacgtttggtgtcgagcggcttacctactatgtggaaaaagttttgttaccttgatctttgtaggctgtatcttttgtaatgaaaaaaaagaagttgctccatttttcggcttactccatcagaaaaagggagcacaagattaaccccatannttaaatttttaaaanaaaaanaaacnaatnaangaataaaaaaaaaaaaaaaaaagcttatnna

SEQ ID NO: 4618 - DNA, 1999 bp, Triticum aestivum
  Clone ID: TRIAE-23APR03-CLUSTER28355_1
agctaggcagagcccgacccggcaatcctttcccctccagaaccctcctgccccctcccctcccctgccaccagccgccgccgccgcctcgccgaggaaaccctagacccctcccccgtccaccccgtccgtccgccgctccgtcaccgccgccacccgcttcagatctcgaggacttccgcccacgatggaggactgggagactgatgattttcaaccagtcgcacctgttgtgaaagcccagccgcttaaaagtgactgggaagatgaggacgtggttgtatatttagctcagagaatcataggaagctaggcagagcccgacccgtcaatcctttcccctccagaaccctccctcccgccccctcccctccccgccaccacccgccgccgccgcctcgccgcggaaaccctagacccctcccccgtccgccccgtccgttcgccgctccgtcgccgccgccacccgcttcagatctcgacgacttccgcccgcgatggaggactgggagaatgatgattttcaaccaatcgcgcctgttgtgaaagctcaacctcttaaaagtaactgggaagatgaagatgtggatgaagatgatgtcaaagaatcttgggaagaggaggaagagaaacctaagccacaacctgtagaaaagcctgctccaaaacctagtgctaaagctgctgtgaaaaaaggcaaacagccctcaacgagtactgaagtagttgatgatgatgttcttgatgatcctatttcagagaagcttcgccaacaaaggctagtggaagaagctgactttaaggcaacagcagagctttttgcaaagaaggacggcagtgaaaagtcactagagactttcatcccgaagtctgagagcgactttgcggaatatgctgagcttatcgcaaacaaaattcgcccgtatgagaaaagctttcactacatgggtctacttaagaatgtcatgagactttccatggcatcgttgaaaggtgcggatgcgaaagaaatatcctcctctgtcacggcaattgctaatgaaaagatcaaggctgagaaagaagctgcagcaggcaaaaagaaaggaggagcaaaaaagaagcagctccatatagagaaaggagaggaggactttgttgcccgaccgggtgcatcttttgacgatcccgacgagttcgacttcatgtgattggctgggaggggaatagcctcttccgtgtaatacctttgaggcaaagcagagactagggtttgcggcggtctgtattcccttcagaggcacctgaacacttggaactgcgtgggaacatgtcttatctatttgaggttgattttgacactcggagaataagaagaacgcttgcggctccctgaggcgtttttcttgttcaaaaaaaaaaaaaaaaattttaatagtaccctttgagttgggctcgggccctttttccccaactgtactatagcgtgttcggaataagctgagcttcttgcaaacaaaattcgcccctaggggaaaagctttcactacatgggtctacttaagaatgtcatgagactttccatgaccccgttaaaaggtgcggatgcgaaaaaaatatcctcctcggtcacggcaattgccaatgaaaagatcaaggctgagaaagaagctgcagcaggcaaaaagaaaggaggagcaaaaaagaagcagctccatatagagaaaggagaggaggactttgttgccggaccgggtgcatcttttgatgatcccgacgagttcgacttcatgtgattggctgggaggggaaaagccttttccgtgtaatacctttgaggcaaagcagagattagggtttgcggcggtctgtattcccttcagaggcccctgaacccttggaactgcagtgggaacatgtcttgtctatttgaggttgattttgaccctcggagaataaaaagaacgcttgcggctccctgaggggttttttttgttcaagacctgtttgtctttttttt

SEQ ID NO: 4619 - DNA, 2021 bp, Triticum aestivum
  unsure (1)..(2021): unsure at all n locations
  Clone ID: TRIAE-23APR03-CLUSTER283646_1
tttttccnctcttnggtgggggnctnctttttnntaangagggggctttttnnncaaatcggancacacanntanacactnntttggggtaaactcttgncatannaaannnnnnntanngatttnnnntatttggttaaannnnaagaagnnganttaaaaannnttatnncgcggatttatacanaagaannaaagcgttacaaaatttccatttnccattctagggtnggcgcaanatnttggggaagggnnttcggcggcgnnnnctnttttgnttaatctcgccaacggcgcgtggggcgggccgttggctcttgcaccaactgggaaagggagatttcctccgggccgatatgcgtggcccccgtgggttcccccccccacccttgtcaaagccgcgcgcctcaccccgtgggcccgctcccttttggggggattgggttccgggccccccctcgaaggcggccgtatcgatgaacttttttttttttttttctgaaggttgagcaacaccatattttctaacaagcagtcatcctctcccagcactccatatttacagatgaagaaagcacaagctatcacaaaacctgattaacaagtggcaattgcttattactctagctagctgaccactggcgcattgcctggtattacctcaaaacatttatcacaaaactcaagtctagtgtggtagaaatagtagagcagggccataatcatatacagtaatctctctgtggtgtggtaatttttggtttctgtcctagtgatgatgatgatgattataagcagtaagaaaaggctggtgctttttcagctgtgtttccatccatccacctccctttcttgcctgcctgctttctccctgaaaagctaatggtggaatccacatcgagaagcacaaccgaaggcaatggcgggcaccgaagtggtggccgctttctcgctccattcactctgcaactgggcgtgtgggtcgcagctttgtcaatggcggggtggtgcgcgcctagcagtcgatgatgaggttgccgaacggcgcgcggtgcgggatgcccttgcgccgcttggccgctggaggcggaggcggcggcggcgtggacggcgtgaagctctgcctggcggcattgcgcagaggagaggaggaggaggccgcctcggagtccgacgagcccttggcgcggccgggcctgctggcccgcatcatcctcgccttgtcgttgccgcccccgtcggaggagcagccggcgaccttgcagccgagggagcagaagcggaagttgtcgaggaggctgcggctgcagacctcgcagaggttggcgccgccggcgccgccgccggccttgccgggctgcttctgctgggggcgctcgttgaggaagacgacgcgcgcgctgttgatgacgtaggtctgcacgccggcgatgtccatgaagcgctggatgtccgacacccggatgacgtcgtggtagagggagcggcggatctggatggtgtggtggccgcgtgcgcgtgcgcgaggcacagcgagcagagcgccgccgcgcccggcggccgccccggcggcgcagtcgaggcagaacatgttgcactcgccgctccggtgcgactcggtgtgcgtcttgcattgcgcgaagaagcgcgcggacagcagcgggcgcagccactgcggccactgctcctcctcccccgccgccgccgccacctgcgcctccgcctcctcttcgtccggctcaggggcgccgcctcccatgatcctcctgttcttgaggcggagctccttgaagggcgactcgtggtcgatggccatgcccgcgcaccgcaccaagaacaagaagcagaagaaggggttgctgctcctgctggggcctcgggggaatcgaagagcaggcggcggttggtgcgcgtggaagggaagcggagcggcggaagaagcgatatatggacggatgggctgggagtctagatgccgcccccccggggaggggtttagtagaacggaacggcaggggaat

SEQ ID NO: 4620 - DNA, 2178 bp, Triticum aestivum
  Clone ID: TRIAE-23APR03-CLUSTER28412_1
acgcccaggatcacgtcacgtgcagtctttgctggttaggttgtctcgcgttgatggctttggcgcgcgttgacggctttgccgccgcaacacgcacccaaaaatcctaatcctcctcgccgccggcgaccatggtgtcgcagcacgacatcctcctcgccgcgggcctcatatccgaccacttcggccccctcgtagcgaaggtgtgcgactgcctcctccgccacggggcgctgcagctgacggagattgtgcgccgtctcaagctcccgcaggggcaagtgaagaactctctcctcgtcctcatccagcacaactgcgttcaggccttctcatcgcccagaggcgataggaccatcacgctctacttggccatcttcgacaatgtcctgcatcggctgcgcttctcaaagttcatctctgttatccgcgcggacattccagagtcagaagctcttattgagggattgcttcagaatggtaggctaacatttgaccaacttgtgggacgcacaatctctaaagtgccagaaggcaccatccgaccagcaagggaagaaagtacgaatgaacttcaacagacttgtgtatgcacgttatgtggaacgttgcccaaaagctgaaccctatttcaatccacaggaagatgaacaatctacaggtgcaaggagaagagttccaaaaactgccgaggaggttctttcacttgagcagaaagttgtcaatactgcaaccctttctgatccagaaaggttttctgagatcccatacagcatggaggatgcatcaaaaacgaatgattgtcctcataacgctgttgcgggtgctaagcggaaacacggagcctttgaggtagatgaagagctcaactcaacaattgcagagaatgaagtactttggcgggtaaattttgagaaatttatattttgtctaaagaagaagttttgtgcagaccgaaagaagccaaagctgaaggttggcacacatcctatctgggagtcattttttgaagctaacttacctgacaaagatacaaactctgtgacatcatcaataaatggtattttggagaaactaggacaaaaggaaggaggtgcggcaatgtcaattggtgacataaaaccagtcctgctggatttacagtgtactacttccgatggggaagaatttacttttgatttacgcaaaatggttgaagcatgtagaaatgaggagatagagtcgcttgtgaaaaagaaatacgggcaagaagcttttacaatctttaggctattggtcacacaaggttgtgcagttgagacagatcaaattattgacacaacaattctggacaagcagattgttcattcaactttgtacaaactatggaacgacggctacatagatacagagaaaatcgcttccgcagcaggaacagggtacgcacagttttttgtatggagagccaaaaatacatttcgtgagcagttcatcgataatctctaccatgctgctttgaacttgcgccagatggtgaattacattgctgaacttctactcgagggttcgaaggacgaaacaaagctgcggaacagaaagaacattttgatcctggccctcactagacatgatgactctctcatgctgttccatgatttttgagaatacaggctatccattcggttcgtctggccaaatgccactcgtaccggcaggcaggcaggccaccgatgattggaagcggataatcacaataattcgcaagttgcgggggcgcagatgctgcgccacttggagcggctaccattatctatctatcaatccgcgcgcgagaggtagaggtcgcaagcgcgtcgtcatgcacgtatgaccatggacttttgcgagccgtatcgcacccatgtgcgcacacacatgcatgaagcaaccctacaactaatgcgcgcgcatacggccaggtcaactgctgcagttagctggagacaaataacgattctttctttccggaagttgtagatgaaagctaaatcaaaccctgaactttgaatcccggaaattgacactctgaacttgtaatcccggtctattttggaccctatacctgtttggcacatcgggaatacaacaatcccggttggggttaaaaaaaaaaaaaaaaaaaaaaaaaaattaaaaaaaaaaaaaaaaaagcttatcgat

SEQ ID NO: 4621 - DNA, 937 bp, Triticum aestivum
  Clone ID: TRIAE-23APR03-CLUSTER28431_2
gactttaatcttgttcctaacgtatcgcccacagccctccacgtctcccgcaccagcctttattgccagcaccatccctatcccctccaaaccccccctgcatccatccatccctatcgccgtcggcgcctcaacccacgccgccctcgctccctccccacgcgcaacgcgcgatggcggcgatgaaggtggtgcggaacctggacctggagcggtacatgggccggtggtacgagatcgcgtgcttcccgtcccggttccagcccaaggacggcgccaacacgcgcgccacctacacgctcggcccggacggcgccgtcaaggtgctgaacgagacctggaccgacggccgccgcggccacatcgagggcaccgccttccgtgccgacgacgccggcgacgaggccaagctcaaggtcaggttctacgtgccccccttcctccccgtcttccccgtcaccggcgactactgggtgctccacgtcgacgacggcctaccaggtcgcgctcgtcggccagccctcccggaactacctctggatcttgtgcaggcagccgcagatggacgagggcgtgtacgaggagctggtggagagggccaagggggaagggtacgacgtgagcaagctccggaggacgccgcacccggagccgacgccggagagccaggacgcccccaaggacggcggcctgtggtggatcaaatccctctttggaaagtaataggcgctccttctgccaaagcagcagagatgcagtagcaccagctggtgtggcttgtacagttcaatctagtagtatgttcgtcggtgcagggaatctgaagaatatgtttttgcttgtttgtggcgtaggtacatgttctgcagaataatctgtttgccgggtaaggtctggctgtgttcttaccttaagactgttgcttgctcggattcag

SEQ ID NO: 4622 - DNA, 2129 bp, Triticum aestivum
  Clone ID: TRIAE-23APR03-CLUSTER28456_1
agtgttcctcccgtcccccgccgcacccagttgccttgttgctttctccttctccaagtaaactcagtttccacagctccgccgcgccgccgattcgccagccatgccgacggtatgcataaaatggcagaagcaggtatttccaggcatagagattgatactagccagccgcctatggttttcaagacccagttgtacacactgactggtgtaccccctgaacggcaaaaaattatggtgaagggtggaatattagtcttggactcgtggttattcagtttatccccagaggttcgttcccctccacggccgcacccagttgccttgttgctttctccttctccaagtaaactcagtttccacagttccgccgcgccgccgattcgccagccatgccgacggtatgcataaaatggcagaagcaggtctttccaggcatagagattgatactagccagccgcctatggttttcaagacccagttgtacacactgactggtgtacccccggaacggcaaaaaaattatggtgaagggtggaatattgaaggatgagacagattggtctactttgggacttaaagatggtcaaaagttgatgattaggtacggctgatgaaattgtgaaagctccagagaaaggccctgtgtttgttgaagatttaccagaagaagagcaagcggctgcattggggcatactgctggtctctataacttggggaatacatgttacatgaattccactcttcagtgtctgcattctgttccagagattaagtcagcattactgagttattcagataacgtgaggggcaatggggtggatcaagcatcccatagtttaacagttgcaactcgtaatacttttggagagcttgatcaaagcgttcgaccagttgcacctcttcacttcttacagatgctgcggaaaaaatacccccaatttgctcaacagcaaaataatgtttacatgcagcaggacgcagaggagtgctggacacagctgatctatacgctttctcaaacacttacatcagaagcaagtgaacctactgctgctcagatgaaggaacttttcgggattgatcttgtgagcagggtacactgtgcagaaagtggtgaggagagttcagaggcagagtcggtttattctctgaagtgccatatatctcatgatgtaaaccaccttcatgaaggactgaagcatggtttgaagacagaacttgagaaggtttccccatcactgggccggactgctatttacacaagagagtcgagaataaatgagttgcctaggtacttgactgtgcagtttgttcgtttcttttggaaaagggagtcaaaccaaaaggcgaagattttacgtaaagtggattaccctctggagcttgatgtctatgacttctgctcggatgagttgaaactaaaacttcaaactcctcgacaggtgctgagagatgcagaaagtgccaggtttggtttgaaagtagaggtgaaaacaagcagctcacagaatatcgaggggtcatcaactagtgctggggaatcatctagcatggacattgacaaagctgattcttctgtgccaaagaaacaattaactggcatctatgatttaattgctgtcttgacacacaagggaagaagtgcagattctggccactacgttggctgggttaagcaagatgatggaaaatggattgagtttgatgacgacaacccaagcatacggaaggaggaagagattttgaaactatctggtggaggcgactggcacatggcatatatctgcctttacaaagctcgtgttatctgaacctgagttgataagttctcagccgaatttgctttatatttccaaagttgtgtgcattccttgcctgtttttgtgtgccacatgagcggatgtattaaagtattgatgaattttccagtttggttcaaatgaagtgatcagtgtccattctgatgttccttgtctactagaatatttatcagcactcaacaaatatggagaaagatttgtttgattttttatttaaacattatttatttccaaaaaaaaaaaaaaaaaagcttatcgataccgtcgacctcgagggggggcccggtacttccccaaagaggg

SEQ ID NO: 4623 - DNA, 2099 bp, Triticum aestivum
  Clone ID: TRIAE-23APR03-CLUSTER28494_1
gcttcacacctcacaccccgccccctgccccctgtttcatcacacttcacacctcacgcgcgtacgcttgtctagttcgtccccctcgccggcgacccacccatccattgatggcagcgacggcggtcgtgggcgccgcttctcgctcccgtctcctcctccaccaccaccgactccctcaggttccagccggtgggggaggttcgctgagggtgggcgcgctcggggccggacgggattggagacgacgggtccgggtcggggttagggttttcgcgcgctactcctcccagccacaagacttctctagtcgactccaagatagagctggtgaattgccgaaattagtagaggatcttctccagacgtcgattagcacagggcctcgaggtgcctttaggatggcgcaagggatccaagctctccttggggttggtggggagtggctaaatgacttctcgaagacagctaacacgtcagaaggaattccagctcagatgcgtcttggtttgctttcccctctttacctcagaaggctttttgaacgcatgggtgcaacttatatcaagctaggtcagttcatagcgtctgcaccaacttcctttcctgcagaatatgttgaagaattccagaactgttttgaccgagcaccacctgttccttatagcgagatcgagtcgatattgcgtgaggagttgcagcggccattggatagtgtctatgagtacattgatcccgtgccaatagcatctgcttcaatagcacaggttcatggggctagattgaagagctctcagaaggatgtggtgattaaagtcctgaaacctggaattgaagatactttggttgccgatctgaattttatctatcttgttgcacgtgttttggagtttctaagccctgaattagagaggacatcactggtagctatcatcaaggacataaaggaatcaatgcttgaggaagttgattttagaaaggaagctgtaaatatggaggctttccagagatacatcgaagcaatgggatttgataggcaggccaaatctccatttgtgtatcagcactgtagcacaaagcgtgtcttaactatggaaagattgtatggtgtttcactcaccgatcttgattctataaggtctcttgttcctgatcctgagttgactttagtcactgccctcaatgtctggtttggaagccttgatctcatgtgaatccttccatgcggatgtgcatgcaggaaacctatggttgcttcgtgatggacgtgttggatttatcgattttggaattgttggtcgaatatccccaaggacttgggctgctatggagatctttttggcttctttcgcaactgaggattacaatgctatggcatcggccctttccgaaatgggtgctacagggaatgatctagatgttgactcctttgcaaaggacttgcaaaatatattctcatcgctacaggagttggatactgaaattatagtggcagctgcaagaagttctgatgctgcagctgtatctgctaatgttgttgtagacgagaggcagatgaatgcactgtttcttgatctggtaagggttagcgagtcatatgggctgaaatttcctagggaattcgctcttctcatgaagcaacttctttattttgatcggtacactagactgctggctcccagcatgaacatgctgcgagatgagaggattaacattacttccaacaagcacaccagaacgatgaattgattctatcttccatcatttgaggaattggtgcaagacatggacaagtgatattgtgagttgtgacaagcttatgcaaccattctagaactgtgtataatttaatacgaccagcatagaagtgaatcacgtgaggggaaacataacactggctcctgttgtggaacttaggcatcttggagcggaaattgcttttggatctcgggctacatgtagactggaatttgaaaattataaaatcataattttcaagttttaaaaagttctgaatatatatacacctacaatgggatgtatactactgctcagttcacttgtatacactgatataagacgtttttcacgcgtcaaaa

SEQ ID NO: 4624 - DNA, 1482 bp, Triticum aestivum
  Clone ID: TRIAE-23APR03-CLUSTER284_26
gagtccacttgaatcacacggacgtttcaaaagttcagcgtggcgtgtgcgctgacgctgggtcgagtcggaagcgcaagcccagcagcatctcttctcccccctttccgatctccactccacagtcctacctacccatcctccccttccgagtctccacccatacccagccgccgccggcggaaagagcacggcgagatgagctcggggatgggcaaggtggtgtgcgtcaccggcggctcgggctacatcgcctcctggctcgtcaagctcctcctccaccgcggctacaccgtccgcgccaccgtccgggacaccgccgaccccaagaaaacgttgcacctgcaggccctggatggagccaaggataggctgcacttgttcaaagcaagcttgttagaagaaggctccttcgatgctgccatcgcgggttctgactgtgtgttccacacggcttctcccttttatcacaatgtcaaggatcccaaggctgagttacttgacccagcagtcaatggaacactcaatgttctccgttcctgcaaaaaagcctcaatcaagagagtgatcataacgtcgtccatggctgctgttgcctacaatgggaagcccagaacacctgatgtagtagttgatgagacatggttttcaagtgcagaggtctgtgaaaagaatgagcaatggtatgtgctatccaagacccttgctgaggaagctgcatggaagtttgcaaatgataatggatttgaaatagttacaataaacccagctatggtcatcggtcccctgttgcagcctacactgaatactagcgcagaggcaatattgaagtttataaatggatcatcttctacataccccaatttcagctttggatggataaatgttaaagatgttgccctggcacatattcttgcatatgaagttccttcagcaaacggaagatactgtatggttgaaagagttgctcaccactcggagattgtcaagatcatacatgaaatgtaccccaactttccagtgccagaaaagtgtgcagatgacgcaccatttgtccctatctaccaggtatcgaaggacaagataagaagtttgggcatggagctgattcccctggagacgagcctcaaggagactattgagagcttgagagagaaaggatttgttacttctgagtcgagccatctgtgaaacttcctttgctttggcgtcactggatgcatgcatgtttatgtacacctaaaataaatggaggcatattgcactctgtgaatccgttgtgttttcatggattcgagtctcaagatgttccttagaatatgggcaatcaggagcatgcttgcaaatagaaagactcactacttagtctcgatgacatgctagtggacttaactttctagcgacatatagtgtatatatatttctacatgactttatatgtatactatactctagataacttctggaaatgatccaattgag

SEQ ID NO: 4625 - DNA, 1009 bp, Triticum aestivum
  Clone ID: TRIAE-23APR03-CLUSTER284_34
cgcggccgcgtcgacccacaaccctctctctgactaaccctacaccgcagcgactatataaaagctttactcgtcagagtctctagggttcttcgtttctccctcgcgccgccgcctcctcacccgtcccggcgcacttggagctcgtcgtacccgcgcgccgccccaccatgatcatctccaagaagaaccgcaatgagatctgcaagtacctcttccaagagggggtgctgtatgccaaaaaggactacaatctggcgaagcacccgcagattgacgtgccgaacctccaggtgatcaagctcatgcagagcttcaagtctaaggaatatgtcagggagaccttctcgtggcagcattactattggtacctcaccaacgatggcatcgagttcctgcgcaacttcctcaacctgccatctgagatcgtgcctgccactctcaagaagtctgccaggcctcctgggccgccctcttggctctggcccacctggtgaccggcccaagggggccacctcgctttgagggtgacagacctaggtatggtgacagggatggctaccgtggcggtcctcgtggtgcacctggtgactttggtggtgagaaaggtggagcccctgcagagttccagccatcattcaggagctctggtggtggtggctttggcccgtggtggtggtggcggctttggcccgtggtggcggcggtggtggtggctttggcgctagcccaatggagtgaacttccccctagtttggatgtgatgtttttgagtttaagttttgcatgatggttttatgtagtgatgtttgcgagatcgatcagtctacatatctataatatgctatcttgattcactccagtaaaatagctctgcgaaatacttctgtttctgctcgtgttttgaactgtctaggtggtactccatggtgtgagtagacgtttgtatggtggcggcgccagccgccaggtttttgccccattgattcgtctgattgcaggcggtagg

SEQ ID NO: 4626 - DNA, 1143 bp, Triticum aestivum
  Clone ID: TRIAE-23APR03-CLUSTER284_5
gctggagctccccgcggtggcggccgctctatacatagtggatcccccgggctgcaggaattcgcacgagaccattacctagaacatcctaatcaaaaaataggtaatcataccacaacccgagcattctacaaccactttcatcaacgccatacacgtctcctaccctcacagttcgttgctccgcacatcagcaggacttgcaatggcgggagacggcgagctgaagctgctgggcgtgtggacgagcccgttcgtcatcagggtgcgcgtggtgctcaacctcaagtctctgccgtacgagtacgtggaggagaacctgggcagcaagagcgcgctcctcctgggctccaacccggtgcaccagagcgtgcccgtcctcctccacggcggccgccccgtgaacgagtcccaggtcatcgtgcagtacatcgacgaggtctgggcgggggccggcccgtccgtgctcccggccgacccctacgagcgcgccacggcgcgcttctgggcggcgtacgtcgacgacaaggtcgggtcggcgtggacggggatgctcttctcgtgcaagacggaggaggagcgggcggaggcggtgtcccgggccgtggcggcgctggagaccctggagggcgcgttcgcggagtgctccaaggggaaggcgttcttcggcggcgacgccatcgggttcgtcgacgtcgtgcttggcggctacctcggctggttcggcgcgatcgacaagatcatcgggcgccggctgatcgacccggcgaggacgccgctgctggccaggtgggaggagcggttccgcgcggcggacgcggccaagggcgtcgtgccggacgacgccgacaagatgctcgagttcttgcccaccgtgctcgcttggatcgccggcaaagcgaagtgaactgtgtctgtgaggccgtgacatcgccagctcgtgacatgtgtgtttgtgtgtgcctgagtccgtccagtgtgtgctgaataaatgcaccgcatgtcgtgtgttgtaccaagggcaaacaatgctgaataattttgctgtttgttgattccccaggaaaaaaaaaaaaaaaaaaaaaaaaaaaaaaaaaaaaaaaaaaaaaaaaaaaggaaaaaaaaaaaaaaaaaaggccccta

SEQ ID NO: 4627 - DNA, 683 bp, Triticum aestivum
  Clone ID: TRIAE-23APR03-CLUSTER2852_1
atcatcagtctcgaactctgccgtagtgtagcacaccacactcccgcggtcccaccagctcaactcaagtcggcagatccgtccgccgcctgcgctcccacgccattctctgccgacgagagctccgccgcagatttgctcccccggatctgctgtcgagatggatagagaagccaagaaagaaggttttaggaagtatcttgaatccagcggcgtgctcgatactctcacgaaagctcttgttgcgctgtatgaggagaacgacaagccatcatctgcagtcgagtttgttcagcagaaattgggtggtccatcgatttccgactatgaaaagctcaaagccgagaagttggatttgcaactgaagtataatgagcttttggagattcacaaggaaacaagtagacagttggaggaacttaagaatttgaagatcgacgcaccttggaactaatggaagcaacaagtgttgacatagtagcttgttaccaagcaaatatatatgcctcaaacatttcttggatcaactttgccaaccaagtcatgtaaaaaagaaacatccattggacgctccttagtccctttgaatgacgtgcgtgttccactcaagaccaggagtaccaatacatcaatcgacatactgctgaacttcagcactatgattcttactgaagagtggaatc

SEQ ID NO: 4628 - DNA, 1758 bp, Triticum aestivum
  Clone ID: TRIAE-23APR03-CLUSTER28533_1
tgacaaccgcaccgcaccgcgcccacacacgccacgcagcgcctcggtaccatcgcgttcctgctcgtagcttcgtgtcccgtcccacccccggcggcccgcaggatccgtccggctgcggtgatttgatttgatttgtgatttcggttcgtgcggcggcgatggggatgctgtcgcggccggaggaggtgccggcgctgctcaggctcaagctggcggcggggcggatcaggcgccagatcccgccgcaggagcactgggccttcgcctacgacatgctgcagcgggtctcccgcagcttcgcgctcgtcatccagcagctaggccccgagctccgcaatgccgtctgcgtcttctacctcgtgctccgggccctggacaccgtcgaggacgacaccgccatccctaacgaggtcaagctgcccatccttcgggacttctaccgccacatctacaacccggactggctcttttcatgtggagcaaacgactacagagtgctcatggataattttaggcaagtctccacggctttcctggagctaggcgaaggataccaaaaggctattgaagaaatcactaggcgaatgggagaaggaatggctaaatttatatgcacggaggttgaaaccattgatgactatgatgagtactgccactatgtagcagggctagtaggctatggactttctaggctctttcatgctactggcacagaagatctggctccggatcatctttcaaattcaatgggtttatttctacagaaaaccaatataataagggattatttggaggacataaatgagataccaaggtgccgtatgttctggcctcgggaaatatggagtaaatatgtcgataaacttgaggatttaaaatatgaggaaaattcagaaaaggccgtgcagtgcttgaatgatatggtgaccaatgctttgatccatgcccaagattgccttcaatacatgtcagcattgaaggacaactccaattttcgattttgtgcaatacctcagataatggcaattgggacatgtgctatttgctacaataatgtgaaagtctttagaggagttgttaagatgaggcgtgggctcactgcacgggtgattgatgagacaaaatcgatatctgatgtctattctgctttctatgagttctcttcattgctagagtcgaagattgatgataacgacccaaatgctgcgctgacacggaggcgtgtggatgcaataaagaaaacttgcaagtcatccggcctgctgaagagaaggggttacgatctggagaaatcaaagtacagaatgcctatgctgatcatgatcatgcttctgttggtggctattatcttgggtgtactgtatggcaagtgatccggtcaagatggtcctcttatgttcttagtggcaccgcctcccctatgtggttttgcacgtgtacttcctgactgcagatggatggctggtttgcatgtagtattgtgctatgtaccctgctggtgccatgcatgctagttctttttgttctttgtttctgtcgtcccgtatgttgtttcagcttgtaatttgtttgaatctaggagagacttccttagtgacatgtatcctatgaatttggcgtggcgccttggttgtcaatgattctacattttgtttatttgtgactaatgtatgtgatgcatatcgttttgccgtgccacctgcgcaacttgattataattgtccaacaggcttcccaggggggggagccccccgt

SEQ ID NO: 4629 - DNA, 1531 bp, Triticum aestivum
  Clone ID: TRIAE-23APR03-CLUSTER28593_1
caacatcctaatcgaaaaagttgttaaaggcagcggggacagggccaccgcccaccgccgtcgtactcgtggaacttgcttgcttgccaccccgtcctttgctgctaccgccgcagccgatcgatggccgattcggccggaaagcggcctccaacgccggcgccggcctccggcggaggcggcatggcgtggaagctctctttagctctgttcgtgttgctcgcggcgttcctgtacaagcagattcagcctccggctccggaaatcgttggctcgccgggtggcccccctgttacagcatcaagaacaaagctcaaagacggcaggcatttggcatacctggaatctggcgtcccaaaggagaaggccaagtacaagatcatttttgtccatggattcgactcctgcagatacgacgtgcttcaagtttccccggagctggcacaagagctgggcatctacctgctgtccttcgaccggcctgggtatggtgagagcgaccctgacccggcaccgtctgagaagagcatcgccctcgacatcgaggagctcgccgacaacctgcagctgggccccaaattccacctcatcggcttctccatgggcggcgaaatcatgtggagctgcctcaagtacatcccgcacaggctctctggggtggccgttctcgggccggtcggcaactactggtggtcgggcttgccgtcgaacgtgtcatgggacgcctggtaccagcagctcccacaggaccaatgggcggtctgggtctcccatcatctgccatggctgacctactggtggaacacccagaagctcttcccggcctccagcgtcatcgcctacaaccctgccctcctgtccgaagaagacgcgaagctcatggagaagtttggaatgcgaacctacatgccgatgataaggcagcagggggagtactactgcctgcaccgcgacatgatggtcgggttcgggaagtggggttggagccccctggacctcaaggacccgttcgccggcggcgagggcaaggtgcacctgtggcacggcgcggaggaccgcatcgtgccggtcatcttgtccaggtacatcagcgagaggctcccgtgggtggtctaccacgagctccccaagtccggacacctcttccccgttgcccaggaaatggccgacgccatcgtcaagtccctgctgctcggagagcagtaaccttccactccgatcatctatctctatgtagtatgcttcttgtgcagtacctcagcgccgtgtggttagctcctcctcacgggcaccgaataacaggtgtttctttcggtctggaagacgacgatagacacttgtatatatctgtgagggctagggttcgtatattcaagccatggccatggaattccaaaaaaaaaaaaaaaactgcaatagaaaattgcagagatgagcgtgccctaggtacccctgtccgggcttacaggatccctcattttttttaggtcaaaatttggccataaacttaacaaatataaaaagtttgttc

SEQ ID NO: 4630 - DNA, 1336 bp, Triticum aestivum
  Clone ID: TRIAE-23APR03-CLUSTER28594_1
gagaagcgcccccctttccgatggcctccacgtcgtcgtctccgctctctcttgtcctcctccggccgctcccatgcagatccctcctcctctcaaagcacaggaagccatttcccaccccaagaaccggccgcctggcagcttcagcagcagcaggagctcagcagcggttgctgcggccgccggagaccggccgctggagcaggagctcgaggagcggcagagacttcgcgtgcttatcctacaacaacccgcccccgccttccgataaggattcgaacgagtggcccatccttcgccggtgggatgtgccgtgggagtggcaaactgttgtgctcagcatggtgggctgtggagtaagctttgctctgacaggattggttgagcagtcgatactgcaatacgtagggttttcagccgcgggggcaactatagatgagaaggcagaaatactgttcctcggacaacttagcgtgactgctgttgtgcttggtgttatatttagcatcaccaataccttccgaccattccctgatgatgtcttccgttacgatgtcaaagaaccattcaagctgcaaaatggctggcttctatgggctggtattggcctctttggtgcagtcatttccattgctttagttggagctgccatgacctatctgaatggtgcacctccagagagagagaaggactcgctggtccctttactgccactaattggctcatcaactctcagcactgcctatttggtggggattactggagttctagcccccattcttggaggagactgtgttccgaggatttctaatggtgtccttgactaagtggtttcctactccagtctgcgtgattctcagtgctgctgtatttgccttcgctcatttgacacctgatcaattcccacaactgtttgtacttggtgttgcactggggtttacatatgctcaaactcgcaatcttctagctcctattacaatacatgcattttggaactcgggagttatactactgctaacctttcttcagttgcaaggatacgatatcaaggagctattgggggcgtcttgaagtctttataaccgtccagattttagctttgtgcatatccttgagtaacttctgcaaaaagatctggaagaacaatgagctttcctttattcgactgcttagtgtatgatcttactcggcaaggcacgcaatgtatggtctacaagatgtcttacaaaatatgattatgtatggttcgtttcatactactgccaacctacgtggtggaaaatgttcaatcatacaaatagaaaatacggttattgctacaagaaaaaaaaaaaaa

SEQ ID NO: 4631 - DNA, 1142 bp, Triticum aestivum
  Clone ID: TRIAE-23APR03-CLUSTER285_6
gcgcatcaccatcagcatgctctcccataattagttttttctgcctcagagtccaacttttgtcttgtttactttcagacgatttcatctttgccattcgtgcttataaagatcgcagttcgggccttgccatgcatatatacacttaagcaacagatatacaggacacgagtatcagggaggaagacgaggaaaacgttgatggccggcggtgaagagctgaagcttgctgggggtggtgggcgccccggggttagccccttcgtgctccgcgcacagatggcgctcgccgtaaaggggctgagctacgagtacctcccggaggaccgcgggtgcaagagcgacctcctcatcgcgtccaaccccgtgtacaagaaggtgcccgtcctcatccacgacggcaggcctgtctgcgagtcgctgctcatcctggagtacctcgacgatgccgttggccttgtcggcaacggcaagcccatcctccccacagacccctacagccgcgccgtcgctcgcttctgggccgcctatgtgaacgacaagctgtttccttcgtgcatcggcagcctcaagacaacgaagcaggaggagagagccggtaaggtggaggagaccctgtccgggctccgacacttggaaggtgtcctcgcagagtgctccaaaggggaggtggaggcgccgttctttggtggtgactccatcgggttcctcgacatcgcactcgggtgctatcttccctggtttgaggcagtaggccgtctggccggcttggggccgctcatcgacccggcgaggacgccgaaactagcagcgtgggcggagcggttcagggtcgcggagccggtcaaggcgctgctgcctggtgtggacgagctggaggagtacatcactacggtgctttatccaaagtggaacgtcgcggtcaccggtaactaattaaagatcgtgtcgtcccactagcggcggaggatcgtgtcaatccaataattcctctgccttctgagttgttttcaccccaagagttgaactgttgttactactaggtccttagtgtctcctcgtcatggatggcgcgtatgcgtgcactctcttcgatctgagttgttgacatgtggtttcatgaataaattgaagcttcgtcc

SEQ ID NO: 4632 - DNA, 1291 bp, Triticum aestivum
  Clone ID: TRIAE-23APR03-CLUSTER28621_1
ccggcccccccccccaccactgcaaccctgtccaggcccctcaaaaagaaatctaggacaagcaagggagctgctgctggctagccaggcttacttagccttggttgagagcgaggaatcgagccagatttcatgccatcctagctcgcccctaccagacacacgtcctgcagtggtgctgaattttgtcaggtttcacgttgctggttgggaggtgaggtgagggcgagaggttcgggaggaggagatcagaggtcggaggtcggagatgggtcgcggcaaggtggtgctgcagcggatcgagaacaagatcagccgccaggtgacgttcgccaagcgccgcaacggcctgctcaagaaggcctacgagctctccctcctctgcgacgccgaggtcgcgctcgtcctcttctcccacgctggccgcctctaccagttctcctcctcctccaacatgcttaagaccctcgagaagtaccaggaggtacattttcgcttcccaagatgctgccgtgccgactaccgatgagatgcggaacaactatctggagtatatgtagctgaagtcaagagttgacgcctctcagcgctcccagagcttgcccctaggcgaggatttggctccactgagtacaatcgagcttgaacagcttgagggtcaagtaggcaagaccttgaggccgatctggtcaagaaggacccaagttctgctcgaggatgcgtgccacctgacgagaaaggagcaaatattgcaggatgcagatatgaccctgagaagaaagctgggcgagaccgcgctggaggcggcacctgatcccccgccgcacccgcagcagcagcagacctggcagggccaccggggcgtgccgccccacacccctccgcagccagagcacttctgccaggccctagaacgctatccttcccgcctgccagtatttcgtgccctggaggtgaacccgccgccccctgcatggagggcatagctacgcacccgcattggtctgtctaccgttccagtcgatcaacaagatgcaccgcttggcatgagcgattatctatctcaaaaacaatcaacaacaagatgcgttgcctgcctatgtgtcctgcatctccaataggctcctatatatatcaactcggctgtttttgtgtttccttttcaagtgcttgtggatttattttaagtaatgtgtacagggtttgtctgatttgttattagcaagtgttggatttgatttacagtagcgtaataaaccttcctttcccgatacatgtaggcaggctcacg

SEQ ID NO: 4633 - DNA, 2029 bp, Triticum aestivum
  Clone ID: TRIAE-23APR03-CLUSTER28749_1
acccgccccacctcctcccctccccgcaccgcctcccccccccccccccgtcgcgtcccccgcactccgtggccccgccgcctccggccgcgttgcgcgtgccggcgccccgcccgtcccgcggcatagccacccgacccatccatcctcctaccagtccgcctcctcaaccccgccgacgcccgcgcgtgaagatcgcccgctccccggccggccgccggcgtccagagcagatacatacagatggacagccataattctacgtcgccccatgttcctgaagtaaccatggacatctcatccgcttctggagcagctgggaacaaagcttgcagaggtgctgcttgcgacttctctgacgccagtaacacctcgaaagattcaaaggagaggtctgcatccatgaagaagctcctaattgctgtgatcctttgtgttatattcatggcggttgaagtggttggaggcatcaaagcaaacagtcttgcaatcttgactgatgctgcccatctcctttcggatgttgcagcctttgccatatctttgttctccctatgggcagctggttgggaagcgacacctcagcagtcatatggatttttccgcatagagattcttggggcactggtttccattcagcttatatggctcctcgctggcatacttgtctacgaagctattatgaggctcattaatgaaagtggcgaggtacagggctccctcatgtttgctgtatcagcttttggtttgtttgttaacatcataatggcagtgttgcttggtcatgaccatgggcacggtggacatggacacagccatggtcatggccatggacattcacatgaccacgatcatggtaactcagaggatgaccattcccatcatggagatcatgagcaggggcatgtacatcaccatgagcacagccatggtacttctattaccgttacaactaatcaccactctcattcgagcactggacaacatcaggatgttgagcaaccattgcttaaacatgatggtgattgtgagagtgcccagcctggagccaagcctgctaagaagcctcgccgcaacatcaatgttcacagtgcctatctgcatgtaattggggactccatccagagcatcggcgtaatgattggaggggctctcatctggtacaagcccgaatggaaggttattgatctcatatgcaccctcatcttctctgtgattgtactgttcaccacaatcaagatgattcggaacatacttgaggtccttatggagagcacgccccgcgagatcgacgccaccaggcttgaaagtggtctccgtgagatggaaggtgtgattgctgtccatgagctgcacatctgggctatcacagtggggaaggtgctcttggcatgccatgtgacgatcacgcaggatgctgatgctgataaaatgcttgacaaggtcattgggtacatcaaggcagagtacaacatcagtcatgtgaccattcagattgagcgagagtaaggcacatgtcaggtagttggggataaaggtgtgtgcctgttaacggtctatcatcttaatgcagttaatgttagacttgcacttgcaaaggcgttgcaggttcatctagctgttgcctttggtgctggagaaatattatatgtacgcgttttcgttagcccattagttgaatgaactattcgggtggtcctagtcgtttgtattcacatggatgcaatttccagacaaattttgagccccttgtgagtttatcaacctgcatgtgtagtttcagtgacaccctttcttagcactcttatgtaaagatctgctacggtatggacagtactgggtatggatgtttattcagtttctgttagctttactaagcttgcttccagcagtttttatgtgcgaatttgcaccttgtgccattgtgtgctttctgtcagggatgtaggtcatctggtgcctaaaatgaagtgcactgctgccagttttaatgcatccattccactattgcacaaaaaaaaaaaaaaaa

SEQ ID NO: 4634 - DNA, 2251 bp, Triticum aestivum
  unsure (1)..(2251): unsure at all n locations
  Clone ID: TRIAE-23APR03-CLUSTER28771_1
acaggcaccgccccccaggtttgtccgtgccacgagtggcgggtctggaagccgcctccctctcccctctgtcctccccctgcccgtcctcgacctcgccgccggccagcgatggagcggcgatccaccacccgcttctcgccttccgagattgcgaggatggggaagttggtttcatcagacagaaaagagcaagtcttggttgatagtttctgccagaagcttgtagaagaatttaatcgttctccaagctcgagtcggaagcagagctctacaggctacacaggttcgaggatgggtccttgataagctccctgcatcaactcctaaacctgcttccttgcctactacttctgaagaaaagcctttagcctcagaaccaagatgcgttagtttctgagataaagacttcagcttctgaagaaaaagctttagctcttgatacaagtatttcaaacaatgaggatgcactttctccagatccggagacagcacaggcagctccccccataattgcctgtgccactggtggttggactggaagccgcctccctctcccccctgtcctccccttgcccgtcctcgacctcgccgccggccagcgatggagcggcgatccaccacccgcttctcgccttccgagattgcaaggatggagaagttggtttcatcagacagaaaagagcaagtcttggttgatagtttctgccagaagcttgtagaagaatttaatcgttctccagctcgagtcggaagcagagctctacaggctacacaggttcgaggatggttccttgataagctccctgcatcaactcctaaacctgcttccttgcctactacttctgaagaaaagcctttagcctcagaaccagatgcgttaatttctgagataaagacttcagcttctgatgaagaaaaagttttagctcttgatacaagtatttcaaacaatgaggatgcactttctgcggatttacccaaagagactacagataaggttcctgaatttgaagacttgcagtttgaggctaagtcatcaaaggattctgcatggtacgacgtcgccctcttcttggcacacaggaagacaagtttgggagaagttgaagtccgggtgaggtttatcggatatggggctgaagaagatgagtgggtgaatgtcaggaaggctgtccgccagcaatccattccgctggagtcctcagaatgccgaagcattgtcaaaggagatcttgtcctgtgtttcaaggagagcaatgatgaagcactgcatttcgatgcgcacgttgtggatgtccagcggaaacagcatgatataaggggatgcagatgcctcttccatgttgaatatgatcatgatcaaagccaggagatggtgaacctcaagagaatctccaggcggccaagatacctttgatggcttctgctaacatggatctgcttcctgctgctatccgagcttgtgtcgtactaacgggagccctcgaatcttggttgagaccgctgcactctgattgtttgttcttattgatgtactgtgtctagtagtaaaacacccgggagagtagttaagccccctctttggcacatagctgctgtaacggctatgagtaggctccgtgatagccaatttttgcacacacacgagaaagttggtgccaaagcgggcggagagccggattttaactggtgtgttggcagcagattaccatgtcactatgtcagtgtttgccgttctgaacctcttggggcgatttgcctctgcttcaaaaaaaaaaaaaaaaggggacatcgaggccgccggcgcctttccccctaaccgccccacttccgcgccagttttaattcggtctaatcggtcagcacaccttccgatagcggcccggcgccccgcgatttctccgaaactttccagaaccgtctcgttgctatctaccgacatacataacctcccacgctcagtcttttcccctcgccaaatatgttaaaatactgtcgtccatcaccttaggccaacacaacgatggggagctgggaactaccagaggtacacaatacagccttctttacttaaacaactttccgtctgtttgagagtgagaggtagtggaaacgaataggtattatataagcggcccctgcaactcaatatcggcgctttatacacaactgacgtgttcccgctcgcccgcgtccatcgctcgcctctcagatgcttccccttcctttcacaacgacatccatctcn

SEQ ID NO: 4635 - DNA, 785 bp, Triticum aestivum
  Clone ID: TRIAE-23APR03-CLUSTER2883_2
agaggaaatcaatcaagaaggcgaggaggagcgtcggagcggcgatggaggggtgggacaagggcacgaagagcgtggtgggcgagatcccgctgctgtcgacgcgggcgggcccccgggacggcgatccgtggcggcagcggctcaaggaggagtaccgcgccctcatcgcctacacctccgtcaacaaggccaaggacaatgactggttccgcatctccgccgccaacccggagggcacccgctgggagggtacctgctggtacgtccacaacctccgccgctacgagttccccctccagttcgacatccccgtcgcctacccccaggtcgcccccgagatcgagctccccaccctcgacggcaagacccacaagatgtaccgcggagggaagatctgcctcaccgtgcacttcaagccgctgtgggccaagaactgcccgcggttcgggctcgcgcacgctctctgcctcgggctcgcgccgtggctcgctgcggaggtgcccatcctggtcgattcgggcatggtgaagcacaaggacgacgaggctgctcctgcagatgccgctgctgcgtctggctctgccgctgcctcttagttgcaagacagttacagtatgtcttttctgttgttgctgacagtgacagttacagtatgatggttgtcaaggggattggaggattgaaaatccactcggttgtggactaataagagcaagcaatacatataccctaggtgtccaaaaaaaaaaaaaaaaaaaaaaaaaaaaaaaaaaaaaaaaaaa

SEQ ID NO: 4636 - DNA, 1045 bp, Triticum aestivum
  Clone ID: TRIAE-23APR03-CLUSTER28865_1
atctaacatctttggtcagtgacattgagagaaccatctttggtcaggagccttcttggttggtacttgaaagcttcttcttcctcttgttcttgctgctgctgagaggttgtgagggattgcgatgggagtggggggcaccttggagtacctgtccgggctgctggggggcggcggaggccatggccatggccacggccacggcaacaggaggaggaggaagcagatgcagacggtggagctcaaggtcagcatggactgcgaggggtgcgagcgcaaggtcaagaacgcgctctcctccatgaaaggggtccgatcagtgaacatcaacaggaaagcagcagaaggtgacggtggcggggtacgcggatgccagcaaggtgctgaggaaggcgcagtccacggggaagaaggccgagatatggccctacgtgccctacagccaggtcagccagccctacgtcgccggcacctacgacaagcgggcccccgccggctacgtcaggagccaggagcccggctacggcaacgtgtccggccaggtcagcaggcaggacgaccagctcaccgacatgttcaacgacgacaacgccaactcctgcgccgtcatgtgatgtgatgagaggaaaaaaaataataacctgtgctgatgttctgcatgcggctggtgatccctggaaggaagtgttggacaatgtttgtgagttcatctcaagtagtagtagcgaaactactatgcagtagtagtgctgaagtatgaatgttactactagtagtagtttggagtgctgattaggatcagtgttgacgatccaaccctcggactgtcacgggtatgagtcgagaaacccatggatcgtttgggtaacttggtcgtgcagaaagacatctcaatgtttcgcaaaaagagagagagagaaagacatctcaatggtctgttctaaaaattaaagtaaaacttaggccttgtttggttgcgagggatcccgtcgtttccctgagtgagtaaaccatgagtttatttcggttaaaaaaaaaaaaaaaa

SEQ ID NO: 4637 - DNA, 2235 bp, Triticum aestivum
  Clone ID: TRIAE-23APR03-CLUSTER288_1
cccacccccccacccctcctcactccacgctccttccctcacaccacaccacccctctctctctctctcactcgcgctttccgctctcgtctcctcctcttcctcctcccgtcagccccttcttccccggcgttgatccgatcgacgtcctccctcctccccggcgttgatccgacgcgctcctccgctgcctggccccggcaggccgcgctgctccggcggtggatccgatcgacatcctccgcgcgcgggcgccgagatcgtcggcggggcgggcatgggccggggacttcataggcgggcgcacgagccggtgagcggcacgcccgcccctctggactgccgcgccgcggaggcaacggcggggtgcaggtttcgcgtcggggtcggcggcgggggcggcggcgcccccggccgggctggatccaccccgacgtggacatcacgcctcggcatggcacatccctcgccgccatggtctcgcggcgggcgtgcagtacggaatgggcgctccagcctctcccggtgctcaacccctacgttccactactctggggactttcgcatgctctgacttcattcatgtggtctctgcggccctattgctggattagtggttcaaccaggcgttgggctgtactgtgatagcgggcacatctagatggggaagacgcaaaccgtgtatttctgaccggatgcatcctcatctgcattgctgatgcggtcgtcggctttctcggatgacattgaagccgagcagggtgagagtaaggaagattgcagattttatagccggccacggtgccacggtggaaaattcaatcttctgttcttggatggcactgggaaatatcctaggatactcatctggttccacaaataactggcacaagtggtttccgttcctccggacaagggcttgccgtgaagcctgcgcaaatctgaaaggcgcatttctggtggctgtgctgttcctggccttctgtttggtgagaaccgtgttcttccccatcgtccggacaagggcttgctgtgaagcctgcgcaaatctgaaaggcgcatttctggtggcagtgctgttcctggccttctgtttggtgataactgtgatcttcgccaaggagataccgtacaaggcgatcgcgcccctcccaacaaaggccaatggccaggttgaagtcgagcccaccgggccgctcgccgtgttcaaaggcttcaagaacttgcctcctggaatgccgtcagtgctcctcgtcactggcctcacctggctgtcctggttccccttcatcctgtacgacaccgactggatgggtcgtgagatctaccacggtgaccccaagggaacccccgacgaggccaacgcgttccaggcaggtgtcagggccggggcgttcggcctgctactcaactcggtcgtcctggggttcagctcgttcctgatcgagccgctgtgcaagaggctaggcccgcgggtggtgtgggtgtcgagcaacttcctcgtctgcctctccatggccgccatttgcatcataagctggtgggctactcaggacttgcatgggtatatccagcacgccatcaccgccagcaaggagatcaaggatcgtctccctcgccctcttcgccttcctcggaatccctctcgccattctgtacagtgtccctttcgcggtgacggcgtcagctggcggcgaagagaggcggtggccaagggctgtgcacgggcgtgctaaacatcgccatcgtgataccccaggtgttcatcgcggtgggggcggggccgtggaacgagctgttcggcaagggcaacatcccggcgttcggcatggcctccgccttcgcgctcatcggcggcatcgtcggcatattcctgctgcccaagatctccaggcgccagttccgggccgtcggcggcggtggtcactgagcatggcaaaggccgaagggaacagcccggatcgtgattttccagagtctcgcataggcgtaactagggggctctcgcctaaggactccgtagagcagaataagaattgtgaggaacctgtatgtgttgtgtctgtatgtgcgtgtaagtcagtgcgtgtagcggaaaatggacagaggaatgtgggcatccatcaccggctggggtgtcgtctttgggttgtgacttgtgtgtagcaaaccaaggtgatcaagtgaggggaaaagaatggatgatgaactttcagcgacaaaaaaaaaaaaaaa

SEQ ID NO: 4638 - DNA, 1081 bp, Triticum aestivum
  Clone ID: TRIAE-23APR03-CLUSTER289183_1
gaacatcctaaccggaaaattaatcgatgctacacagcaataacgcggcagaagaaagatccagcagaaggcaacaacagccaaagactgaaggagaggggatccggcttccggcgaaatggctgcgctgccgccacctccgccgtcgctggagccggagatcggccccgacggcctcgcccgagactcccccgtcctggcctacactgagaaggtcattgcggaggagcagctgcaactgaagaaatatattcaggaaaattattccaaaattcgggatgttgagaaggagctagagaatctgactctagaagttaaactgacagctggaccaaagaaagcagcactcgagcatttgaggaaaaagattgagatgtcaactgagagaatacgtttggctaaggtgaaagaggacgaggcaaaaaaggcctgggaagctgctgcacaagttgttaaagaggaagaggaggctaagcagaggctatgtgatgatctgaaccggttggttcaagagagcgcggcttcacaatattcgaggttagaagagttaaagaagcgtttagaatgtctaaatcccatcagggcttctgtcgatgtttctggtatcaacattgtacagcaggctgccacaaattcggtacctcagcaacccacttcacaaaatctagcgaatgcaattgcccctgcaagcaatatccacaagcccgccaccagcggatcacagcaacaaagaaccgctgaggcggaaaggaagcagagatcatcaaactcgggaggaagagggagaggcggtgtgatggtcctccccaagggaaggggaagctctggatcaggatggacaggtgctgggtttgagacatgatgctgggatccgtagttatatatacttgaaagaattggcatggttgtcttggtataaaacgatggcttggttgtcttggtataaaacgatggcttggttggaactggaaggttgaaagtgtaatggaatgtcgatcctttttggatgtgttagaagcgtgagagggatttggcgaaaaaaaaaaaaaaaagaggtggtgggatagaaagaaggggaggt

SEQ ID NO: 4639 - DNA, 2635 bp, Triticum aestivum
  Clone ID: TRIAE-23APR03-CLUSTER28928_1
aaaaaaatctactctttcttcttctccaatctctctctctctctccagtctccctcaccggctccgatcacccggcgggtgggctcgcggcggggcgcaccccatcccctcccccccatggcctggcggctcgccctctccaaggctggaaggcggtcgtcgagtgtggtctacaatgagctagtgagtacaagtgctttcaggacacctgcaaatggcaccggcggagttctcaaggcgctgcaaggagaggtaccgatcaagctacgtcggtagcttcgcgcgcaggctacgagactttgacacgccaagtgatgcctcccatctcaaagagatctaaagaagtaacccagaacgggtcgagcagacctttgagagccacccttccttacataccagcccctgggctctctcccagtatgtgaaggcccttgcagcactcgccggacaggaagaaaggcggctcatgcagaaagtgctggcagggcatggcaactcagcaacgccgggcaaaccgatttaagtaaaatgacgtttttttatggtcagcagggcaaagcattagctgccgctgaggagagcagccgtactctacgtaattgagctagttgggagtacaatttatatgtgttcctggtctgttggtatgatgcagcctgaacaagaagaagatccgttcatggcaagggagccgctgattcatgtcaattagaatttgtaatcgctgtatcaattagacagattttcatttgatcgttgcggcgcatactcgtatgtgtgtcgcaatgcttggttaagttgtaacgtgtcggttatacaacatagttcactacctacgagatcccaagcgtttcacacgccttggtggcaagcttccaaaaggtgttctacttgtcggcccacccgggacagggaaaaccatgttggcaagggctatcgctggggaagctggcgttcctttcttctcctgcagcggcagtgagtttgaggagatgtttgtgggtgtcggggctagaagagtgagggatctattcagtgcagcaaagaaacgatctccatgtataattttcattgatgaaattgatgcaattggtgggagcagaaacccaaaagatcaacagtatatgaagatgaccttgaaccagttacttgttgagctggatggctttaagcagaatgatgggatcattgtaattgcagcaacaaacttcccccagtcactagataaagcccttgttaggcctgggcgttttgaccgtcatatcgtggttcctaacccagatgttgagggccgacggcagatcctggagactcacatgtcaaaggggttaaaagcagacgatgtggatctgatgaccattgccaggggaacacctggattctcaggtgcagaccttgcaaacctggtgaacgtggctgctctcaaggctgccatggatggagcgaaatctgtttcaatgaccgacctcgagtttgccaaggacaggatcatgatgggcagcgagcgcaaatcagcagtgatatccgacgaaagcaggaagatgactgcataccatgagggagggcatgcgctggtcgcgatacacacggccggtgcccaccctgtccacaaggccaccattgttccgaggggaatgtctttgggcatggtcacgcagctgccagagaaggaccaggaccagcgtatctaggaagcagatgctggcaaggctggacgtctgcatgggagggcgggtggccgaggagcttatattcggggagagcgaggtgacgtccggcgcgtcgtccgacctcagccaggcgacccggctggccaaggccatggtgaccaagtacggcatgagcaagcgcgtgggcctcgtggcctacaactacgacgacgacggcaagaccatgagcacgcagacgcggggcctggtggagcaggaggtgaaggagctgctggagacggcctacaacaacgccaagacgatcctcacgacccacaacaaggagctgcacgcgctcgccaacgccctcatcgagcgcgagaccctcactggcgcccagatcaagaaccttctgtcgcaggtaaacagcagcagtgacacccagcagccccaggccgctgaggttccacagcaaacacccgctgccccagcctcgccccagtctccagcagcagcggctgcggccgccgcagcagctgcagcacagcaagcggcagctcaagccaagggagtggcgggcatcgggtcctagcctcgccgggcaacaagagaacatcgtcaatccagcaaagtgccattaattagcatgccgttttttttatggacaacagggcaaattcttagctgccgctgaagagagcatctgtactctgtagtaatttagctagttgggagtacaatttatatgtgttcctggctgttggtatgatgcagcctgaagaagaagaagaagatccattcatggcaggggatctgctgagtcatgccaaggagattttgtaatctctgcattcattagacctcttatcatttgatcgttgcgatacattgtatgtcgcaatcttggataagttgtaacgcgtcggttatactccggtttagaccgcctgaccttgttgctgggcaactttttcgatgtttaaaag

SEQ ID NO: 4640 - DNA, 1075 bp, Triticum aestivum
  Clone ID: TRIAE-23APR03-CLUSTER2902_1
gcacgcggcacgaacccccactctcgagagattctcagtctcgggctctcaaggaaggatttggtgaactcgctgaattcgctgtgatcaagagctcggggggttaattagtttgttggcatggagttggagatggtgagccagcacggggcgctgctgaaggtggggctgttcgtgctggtgcaggcgctggtgtacctcatcctcgcccagtcctcctctgtcttctccaccaccaagaccctcggcctccccccggcgcgctccctcagcgcccgccgcatggtacaaacacatcaatcaagcaagcagcacattcttgtgggactctgatcagtctcggcctctcagggaaggaagagaagagactgcttggtgaagtcgctggtttcgtgtgatcaagagctcgggtatggagttggagatggtgagccagcacggggcgctgctgaaggtggggctgttcgtgctggtgcaggcgctggtgtacctcatcctcgcccagtcctcctccgtcttctccaccaccaagaccctctgtctgcccccggcgcgctccctcagcgcccgccgcatggtcgcgctgctctccgacctgccgctgccgctcggcggcgagccctcgccccgcgccgccttcgtggagccgccgtcgcccgtacccctcgcccaccagaagaaggattagttattaaccaagcgcgactggcggcagggacacggaccgagctagcaagcgatcgtttccgagctactagtagtagtactcggtgcgtgctgtaggagctattcacgccattctttcattgattggttattggtttgttctttgggattggatatgtaaactgagctacacgccgtttgggtttgtacaatcaagtgaagattatgttttgggctaaaaaaaaaaaaaaaaaagcttatccgataccgtcgcacttcgaggggggggccccggtaacccaattcccccctattagggagtcgtatttacccgcgctccccttggccttcgtttttacaacgcccgtggcctggggaaaaaccctgggggtaacgaaattcttctttt

SEQ ID NO: 4641 - DNA, 1845 bp, Triticum aestivum
  Clone ID: TRIAE-23APR03-CLUSTER2904_1
cgaccgcgtcctcaccctcctcccccccccactccgacttgacgcccacagatcccccacgggcccactcagcttcctcgcgcgccccccacccgagaggtcgctcctgcaggggccgccgcggagctcaaaccggatagttcgaaataccaatatgccagtagcagcagtcctcccatgccgtcacgtcttccacgcagactgcctggaggaaagtactccgaggagtgaagcccatgaaccaccttgcccgctttgcacgcgaggctcccgatagtgaaggatgtgtatcattctcggagcctcttcacgccgccctcagatccgctcgcaggaatcatggcattcgcttttcttctggtgatgcgggtggtagcagcagcagcgcaaacccttctcgcaacgaccacgtgctgaagagaaatcagtctgcgctcgcgccagcgcgcagcggctcgctgttccggaaccgtttcaagaagcagttccccttcaatggggaggctcgggaaggccctgtttggtgggacggttttccggaaagttccgatctccaatccagcgagagacatttaactgctctgacgtcagccagttctgcatccccattctcagaaacaagtcagctggcatcttctggtaaacgaccagcttcacatctacctcgcaatcatctgggaaggcgatcctttatgtcaacaccagtctacccgctagtcttccgcaatccagtgtcagaagcagaagcctcgggggtggctgaggctagtaatgctgggcgtaccacaccgagtgatgacagcctggcttctcctgtgtggaggcgcagtttggcgagtcctgagctcaagttccatgacacactgagtgaacttcggaagatggaggcttctcctgagccgaacacgagctctaggagggaaggattcagatggagcagtgctagcagctatgattttggatatgatggtgatgccattgacatttcagaccatatcagcattgactcccaaagatccccaacaagttcaacgagtttcctgaaatgtggcttatgcgagagattcctcaggcagaagtcgccatggagctcaaaccggatagttcgaaataccaatatgccagttgcagcagtcctcccatgccgacacgtcttccacgcagactgcctggaggaaagtactccgaagagcgaagcccatgaaccaccttgcccgctttgcacgcgagctcccgacagtgaaggatgtgtatcattctcggagcctcttcacgctgcgctcagatccgcccgcaggaatcatggcattcgcttttcttctggtgatgcgggtggtagcagcagcagcgcaaacccttctcgtagcgaccatgtgctgaagagaaatcagtctgcgctggcgccagcgcgcagcggctcgctgttccggaaccgtttcaagaagcagttccccttcaaggggaggctcgggaaggacctgtttggtggcagggttttcaggaaggtcggctcctcgtcgtcgtcggggggccaaaaggacgaccgtcagccgccagcagctaataagcctgaccgatccatggagtaagtaagctagagcgaaggcgcgccgcctctatattgtgccccgctgttactctatccttgtaccctgtccaaatccgtagtagatgtatccataagctgtgaaatgcagtgccgggttgcgctgcgagtactcgtccaggacggagctgtttgttttgtttggacggtgcctgccttggatgtggcaccatcagtgcgtgaactaactgtgctgtgctttaatcatgactcgtttgccgccaaaaaaaaaaaaaaaa

SEQ ID NO: 4642 - DNA, 1295 bp, Triticum aestivum
  unsure (1)..(1295): unsure at all n locations
  Clone ID: TRIAE-23APR03-CLUSTER2913_1
caatacccaagctcgcaacaccacccacgccgatcatcccaaagctcaccacaccacgcacgcggcgatcacaaagtgcacttgcaaagttgcaccgctcgagtcgagccacacgtttgatattcataagtgcagttaggaactactcactgatcttccagacatggcgagtcctcgcggtctggcagggctcctctgcttcgccctcgcggccgcggcagcgagcgcggcgcagtaccgggtcggcgagcagcggggctggagcgtgccggcggccggcgccgagccgctgaacacgtggtcgtcgaggatgcggttcatcatcggcgaccagctcctgttcgtgtaccccaaggacacggactcggtgctgctggtggatcaggcggcgtacaacgcgtgcaacaccacgacctacgtgagcaagttccagggcggcagcaccgtcttcacgctcgaccgctccggccccttcttcttcatcagcggcaacgaggccagctgcaaggccgagcagaagctcatcgtcgtcgtgctctccgtcgaccacacgccgccgggcctcctgccgccgccccctcccccctccatgccgccgtcgtccgcgccgcccatgcccagcccgacgtcgcctccttccatgacgccgccgtccgccgcgccgatgcccagcccgatgtcgccgccttccatgacaccgccgtccgccgcgccgatgcccagcccgatgtctcctccttccatgatgccgccgtccgccgcgccgatgccaagcccgatgtttcctccttccatgacaccgccggccgccgcgccgatgcccaccccgatgttccccccttccatgacaccgccgtccgccgcaccgatgccgagcccgatgtctccggcggctgcacccggggcaaccccggactcgccacaatcgccgactggtccagcgccgtcgccgggtacaccgggaggcggatcatcgccgggcacccctggatccgacgcgagcagcccgccggcgccgggcgctgacggggccaactcgaccacgccggggagcgcggctgctccggtgacggcaggcctgatcggcacgcttgcagcaggcatcggctacgccatgctcgctatctgagtgttcttttcttttgtatagtgtgtaaattgcgagatgccactcatgctctgcagaggatttacctttgaacgtacagtatttgttttccgatggtgaaattataataagagatagtacgtttgagctttctaaaaaaaaaaaaaaaaaagcttatnganaccgt

SEQ ID NO: 4643 - DNA, 2076 bp, Triticum aestivum
  Clone ID: TRIAE-23APR03-CLUSTER29141_1
aagcctcactagcttctctcgcgcgtaatttcggccacgggccatgccgcgggcctgcggcgtgaggcagcagagcaaacgacaaattcgcccatgtctagatgcattcaccatctgccctcttctgccgatttttttttgtttggcttttccgactgccttttctgcctctctctgtccattgcgcgcggatccactcgtctgatcccgtgctggctgcagattccgggcggagatggaggtggcgctgcaggcgggtgatgccgcggactgggtctacaagggagagggcgcggcgaatctcatcctcagctacaccggcaactcgccttccatgtttggcaaggtactgcgggctaaaaaggtcctaaatgacaaggcacaaccagcaccaaactgtgtaaacttctcaagctacgagcacctcgtgtggggtgacctcccagaattgatcgagtctgtcaagcaaggttctgtggcacaagcctatgcagtacatgtcatgagccaacatctggggcacgatcatgttgatggcggggttcgtgtctctgtgtcgacagattttctggagatgggtggaaagaatttgctactcgcgcgtcctgtttggcgattgaatgcaatcacaattgatatcaaggcagattctgtccttcgaaggtcttcctgcttcgtctgtcctaagggcatccggaattgacacctgaacggatgcggccataaaaactcctgcttggtcccttctatcttcacaatatatatcaaagggctgtgctatcctgaaacaagtatcacggtacaagatgcatcaacacctcgaatttcatcagtggggcagatatcgaaagacaagtgaatatgacccccttgatctattctctgggtaaattcatagaggacgcacggccatcacgaccgtttactcgactcttgagcactactctgggccattagtaaatatctgcatggccgttaagccattttgctccactcctcagaagaccagcggcaattccagtcaagactcccttggacctaagaggatgggcggtgggcctcatctggccctcgctaatgaaacagagaagtgtcttgaagatctgaggaaggttagtgggctacaactatctgactttattgagctcctgtcagaggcaatatctaaatctggagtattggataaacttttggccactcaaaaactggatgatcatgacatcgaaggggcgattcatctgtattacaacatcatctctcagccttgtttggtctgcaaaaatataactgatgctgagctattgcacaagtactctgtgttgcattctcttcctttggacaagagctgtaagatagtcagggactttcttatttctgctaccgcgaaggactgtagcctcatgatgtgctttcggccacgagagtgtgagagaacagatcctgagtatgattcagtttttctccagtcagtgaaccgagcctatgattacaaggcatactttgttgatctggatgtgaagcctctggataagatgacacattattttaaattggaccagaagatcgtcaatttctacactaagagcggggaagtcgggcgagttccttgtgattctcaaaagggggttggcaccagtgatgacacagcggttcagccacaacattgagtagctccttcaacttgaagcctctggaccgggaagggcacatgccattggtcctgttgtttcgtcttgcgcctgttgttgtaaccttgtaagtacagctccattgtcgaggagctcttcccttccatcgggaaaaacgcggtcactgctgtttgttgtcgctgttactgtagcttatgagtggtacatcatgtatacctaccgggtggctcgtcgcggcagaaaacacaccaggaattcgatacagacaccaagatgcatgaacagacttttacagtggcaaccacatgttgcagtatctgcagcagagatgggagctcaggtttgccttgcaggctacggtgtagccatttcaccgcttccctccagagatgataactggcgtatgtactaaaaaaaaaaaaaaaaa

SEQ ID NO: 4644 - DNA, 1043 bp, Triticum aestivum
  unsure (1)..(1043): unsure at all n locations
  Clone ID: TRIAE-23APR03-CLUSTER29157_1
cctttctcccctttcggtgggtgtctgcacgagggagggaagagcccctgacgatgtcggtgccggaggcggggcaatcggcggggagggacgagcaggagatggacaattaccattttccccatccggattcgttgggagtcaggacgagggagggaagggcccctgacgatgtcggtgccggaggcggggcaatcggcggggagggacgagcaggagatggacgattacgagcagcaccagaccagagtgctcatggcgctgatgcagggcttgtgcgccgcaaggtaccgcaaggccgacaacaccccctgcctcgtcgaccagggcctctacttgggttctgttggagcagcactgaacaacgaggctctaaagagcttgaacatcacccacatcttggttgtagccagatcactgaatcccgcctttccagcagaatttacgtacaagaagatcgaggtacttgacagcccagacactgatttgggaaagcatttcggtgaatgctttactttcatagatgagggtatctgcactggtggcaatgtgctggttcactgctttgcaggtcggtcgcggagtgtcacagttgttcttgcatatcttatgaaaacagcatcagatgagcctgcaaagtgccatgtcactagttagaagcatccgacctccaatagcacccaatgcgggctttatatcccagctggtgaactttgagaagtctatgcaagtggagcagggacaaagaacgttgcaatctaactaactacagggtaatttttagccacggaatcagcgttacaagaatgcagatgatacagcagtctcccctgtaataaatgttccctgtaatgcagatgatacctttgccctcttcatttagggccagtttgaatcacggggaattttcctgttgactggtaaacgacctgttccattttgatgctcaatgctattcagcagcagcagccttctgtaatgaaagatgnacttcctccgtttntaaatataagcccttttagagattaaaaaaaaaaaaaaaa

SEQ ID NO: 4645 - DNA, 1848 bp, Triticum aestivum
  Clone ID: TRIAE-23APR03-CLUSTER29167_1
aatatggacttttctctcttctcatcctcctcgttcagcttcgagtgtctcttccagtttcagcttcgagaaagctcgtcgccgctcgccgccacgccgggaaggaatcgccccaaaaagcccgcgcacaccggtgggtcagcgcacgaggagcgggagcagccaccactcgccggcgatggagagggtcgtggtggtctccgaggacgccgcagcctcggtttcctccgccccgtcctcctccttcgcggaaaccagggtcatctgtcgcgtatgtcagaagcagttcgcgcagtacacttgtccacgctgcaactcccgctactgttcacttacgtgctacaaggggcatagtgtgcaatgcactgagtcgtttatgcgtgagaatgttacggaggagcttaagcagattcagcctgaagatgaatcaaaaaggaagatgctcgatatactcagacggttccacttggaagaagaaatggagtccgatggtgaagatgagtcaatgctgtcagaggagcttattcagaacgcccgctccggcgcccttacctgcctcgagggcctctctgtgcatggcaccgaaccatttcggcgtgcgctggcctcgggggagctcagccagatgctgcctccagatgaatcaaaaaggaagatgcttgatatactcagacggttccacttggaagaagaaatggagtccgatggtgaagataagtcaatgttgtcagaggagcttattcagaaagccatctctggtgacgaaatcaagcttgaggacctctctgatgatgaaatcaaacgatttcgtcaagctctggcctctggtgaactcagcaagatgattgaaccatggactccatggtggaaaaatccttcagctaaatcgatctctcttagtcatgcgtccggccagcttatcagacagataagtacagacgatactactctatcagatccaatgactgcgtcagagtctatcatcaatgaaataccagaagggccagaatatcctctcccatcactcaaacagctaaccagggcagagccatctcctctgctcactgttcacttggttgatattctctacagttactgcttcacgcttcgcctctacaatggtgactggcagtctgatcctttgggtgcttcaactgttgccttgtctatgtcgaaagtcatgggggacggcgctaagcctgagacagtatctgaagcgctcacaacatgcatagaggagacatgctccccagcttacaggcacaccggaggtttcaggtttgctattggacttgtggatgatatcgtcacaatcctctccttaggaggcaatgcagtggtttgtgcattgtgtgacttccacaggctcatccaagctggtgagagcatcctcaaggaagacaaaatgggcgagacggaaaaggcacagagcttcaaaaagctccatgccgcgggtaggaagctgttcttcatgacatgctgggctcatgagcagccaagtgaggcctggccatcgttggctcgcatcgttgaggtgcagaaagtggcttttgaggagcttgacagtggaagcggactgaggaaggcaggtagaaagaacaaccctcagtccaaggttcttatcgaggaggtgtaagcatatcaacgcagtactgctggaataaccgcactttgttttctcgccacccttttggtatctcccagctgtatcatttgatccttgtgcccttcttcatcttcaagtgcagtggcttaaatgtataaactgtcatctttggaagatgtgatagttacatttctgaagttctcatattaaagcgacctggttaatcaaaaaaaaaaaaaaaa

SEQ ID NO: 4646 - DNA, 1880 bp, Triticum aestivum
  Clone ID: TRIAE-23APR03-CLUSTER2918_1
agtaaaaaaatcccgtgggcatgcgccggttccctttggactttggcgttatatccatccttccctttggactttggcgttatatccgtcctcgagcccctcccctcccgtttccgccctcgccccctctctcgaccccgcctgattccactggcgctgctgcttcttctccgccgggggggacaggagacacgctcattgtggaggagctagagccgcagatgctttctttttcttggagtggcgccgccagcagcggcggaggggggcggttccggcgcgggccccctcacggacggggggcggggggctgaccgggtacgtggacgtgcccgtgggaggcgggggggacacccagaacatctgcatctaccacaagcaggacgtgtacgcgcgcctcttccctgccgggggagggcgcgccggcggcggcctcgcaggtcggtcatcgatgggggcgcccgccaccctgtgtccagtccgggcggtgcgggttggggcgcgcgggcgggtcgacgtcgacgccccggtgcgctgggaggtgtggatgctcagccgggtcaagaactccttgcaggaccaggtgctggggttcgccgtcgttccgctgccgctccccggagcgtcgtcgccgccgagggtggcacgctcgcgcgcgagttcccgctctccaccaacgacctcttccactccccggccgggttcttggagctcgagctctcgtacatcggggtcgtgcccgatgtcattcccgtctcgcccacgcccaagcctgcgctggccgatccggatgagtgcgagaacgccggcggcggagccggcgctggcgcagggaaggactacgagaacatggagttccctgacatgaatcttgtggaggaaaaccagattatgctctcggaatatgttgggctgccgtgcacggccatggaaacgcagagctccgagagcctcctgacctcggaggacgtggatggcgccgccaccgagtcccacgacgctggcgtgcgcgtcgtgcagagcttctccacggactacagcaccgccgactcggccggcgccttccggagcgagacggcagccagcagcgtgtccaccacggagtccccggccgcggccgtcccggccaccccgcagtccaacccgtccgagccgtcaggaaacgccctctcatcagcaggccagaaggagaaggcctcggacgcggcggaggtcgattcgtctcccaccgttcaggagagcccggcggtgaactcgcccagcaccgtgtctgagaacgcggtggacaagccgccgccggcgatgagcttcaacttcgcggaggaggtgcaggtgaaccagaaggagatcatggacatgtacatgaagagcatgcagcagttcacggagtcgctggccaagatgaagctcccgctggacatggacaatggcagcgacaagagcgggagcggccccgccgccgcctcgcccacggattccagcggcaccgactcgagcgcggcgacgaagaaaccgacggccggggctgcgcaggagaaatctcccaaggtgttctacggaagccgagccttcttctagttctaggaggaaggaagccggagtagtgccgccggacggaccccggactagaagatggcatttgcagccatccgtctcagctgaaaacttggtagcgcagaggaataacacttttctcatgctgttgttttacttaggcttcgtcagatcccaagacacatgcggaaattagctgccctgtatgtcttacttttaatgtatcgctactctaatgagaaatgcttggcttcttttgcttgagtatacacatctgaattacttttaattcgcaaaaaaaaaaaaaaaaaagcgtttccattccc

SEQ ID NO: 4647 - DNA, 949 bp, Triticum aestivum
  Clone ID: TRIAE-23APR03-CLUSTER291_2
aagccacaattcaccaccgcggcacgcacacaagctaccgtcacaagctcgtactcccgggaacaccaagagcggcatcatccatggcgtccactcgcgtcctccacctcatcatcgccctcgtcctcgccgtcgccgccgccgcagatgcggccaccatcaccgtcgtcaaccggtgctcctacacggtgtggccgggcgcgctcccaggcggcggcgcgcgtctcgacccgggccagtcgtggccgctcaacatgcccgccggcaccgcgggcgccagggtgtggccgcgcaccgggtgcaccttcgacggcagcggccggggccggtgcatcacgggcgactgcggcggcgcgctggcctgcagcgtgtccggccagcaggcccaccacgctggccgagtacaccctggggccagggcgggagctgggacttcttcgacctgtccgtcatcgacggcttacaacgcgcccatgagcttcaagcacgtctggcggtcgtgccgcgctgcgcgctgcgccacggacatcaccgacgagtgcctcaagaatctgctagtgcccgtacgatgctactacgcgtgcgacaaattcagcgattacacctatggctgccggggacagtcgagaacactgcctcgcgacaactactcgagttcttcatgcggagtgccccgacgcctaccgctaccccaggacgaccaaaccagcacctcaatgcccagccgtagccaactactatacgcgtcctctgccccgcccgaaatgatttacacatggatcagtaagtagaggacgtactactccttgtggtcttccttacttatgatgatcaacgatcatttctgtgtgtgcccatatataatgtcacatgtgcgtgcgtgcatggctggtgcgtgccattcagcgaataaatgtataaataaaatggaaatgtaatttctacgatt

SEQ ID NO: 4648 - DNA, 1395 bp, Triticum aestivum
  Clone ID: TRIAE-23APR03-CLUSTER2932_1
gaatcacacccacacccacgcacgccacaggagagaccgaccgcgcgcgcgcgctcgaacacggcacggcggcagccgccaccacctgagattctggcgcccggacccacctgccaccatgagacccgccaccccgtccacctcgttgacaatggcggtggcgcggctgcgctcggcaaccgcggcggcggcggcccggctccaggccggcgctcgcgggccggcggctgcctcgaggactgggggctgcggcggaggccccggaggcggtcgtcgaggcgggcagcgcgcggtgggggccgatgggggcgcgggagtactacgactaccggcgggccatctacggcgacatcacgcacaaggccatcctcgtcgacgccgccggcacgctcctcgcccccaccgagcccatggcccaggtgtacagaacagtaggcgaaaagtatggggtgaagtactctgaggatgagatcttgatgaggtacctgcatgcatatgcgcagtaaaggggcagatcgtggctcaggtatgttgatgatgggaggcccttttggcaatatagagttagtccttcttaaacctgaagaggctgctcatatttagagtgactttatcattactatacaactgagaaggcctggctgctcattgaccctgatgctgaataggtttttgaagcctttagatgggcttgtgtgagaacaggtgttgtatccatcttagacactcgcctcagacgaccgttacacgagctgagttgtgatcaatggtttcggcgccgttgctgtctcggctgagattgaagcacaacaagccaaacccaaggaattttcctgaaggcctgcgagttgttggacgtgagaacctgaagcggctgtgcatattggggacgaacgtacggaatgatttgtggggagctagggacgcaggctgcgatgcctggctctggggcagtgatgttcactccttcaaggaagtcgcagaaaggatcggagtcagcgtgggtatgggcaacaatatgtgattcgccacgcttgcttgtaagcggactctgctgcgcctggcgggcggtcagtgcggatcgctgcccttcccttcttcctgtcgagtatatgctcgccgagccccctgagcttcaataaaaaggctgggaggtggtgcttaggttgcctcctctgtacatagtgccgacccttctttgctcaggtgtgtgtgtggctgtccggccgctgtacatattttccagggaagtgagaactgatggcagtgtctctctgtgacaaggccttaatttcctaagtctatattgtagcaacaatgtacgtatgtaattaagcgaactcgatttaccctttggatcaaaaaacagcggaaaaaaaaaagcccttcccaaag

SEQ ID NO: 4649 - DNA, 703 bp, Triticum aestivum
  Clone ID: TRIAE-23APR03-CLUSTER293512_1
acagctcactccagcactcctcctccctcccgcttctctctctctcccactctgctggtcggcgagaggctgcctgccatgtgggcctcgccagggaggctgccggcgatggaggaggaggaggaggagtgcgaggcggacgcgggccgccgggcgccgatggcgtcctgctggggccgcttcggcctggcggcgctgtggcaccggctccggcaccttttcctggcgcggcggagggcgcggcacggccgctccatcctcggcgccggcgggctcaactacgacccgctgagctacgcgcagaacttcgacgacagcagcctggagctccacgagccggacttcacggccaggttcgcgccggcccgcaacgcctgctcgcccaggcgggcatgacgacgcgccacttctcggcgccccggtggcatacggaggatccttttgccacttcccggggcctttgtgcgcccctttgaggggtaaaaaggctttatttaacccacggattttcggataaatggacatgtaccaaatgtcaagcgggggacgcaagtagttttcgtttttaatcgcgggtgtaaaaattccctgtggtttcttccgaaagaaagaaaaaacagcatgggttgtgatgaacggcataggagccagtcagggcatgtctgtttggtcaccaaagattcggaacaagttcctcccgatt

SEQ ID NO: 4650 - DNA, 1031 bp, Triticum aestivum
  Clone ID: TRIAE-23APR03-CLUSTER2935_1
cggatcgtatcatcccatacatatacaaccccccccctgcacgacgcggtctctacgacgcggtctctcctccgctccgctccggtcaacccaagttcctcctcgcctcccaagccgtcttcctcctcctcgcagtgatggctgatgaggatgagtaccgatgcttcgttgggaacctgtcctggtccacaactgatgaaagcctcaaggatgcattctcaaaatatggcaaagttaccgaggcaaaggtggttatggacaagttttctggacgttcacgtggatttgcctttgtgacctttgatgagaagaaagccatggaagaagctatcgaggacatgaatggattggacttggaagggagggccatcactgttgataaagctcagcctcaaggggctggtagagatcgtaacggtgaccgtgattgttgatcgtgaccgtgggtctcgtggtggccgtgactatggcggtggtcgtgcgccgcgtggtggtggtggtggggactgcttcaagtgcggcaaacctggacactttgctagagagtgcccagatggtgacggcgggagaggtgaccgatatggtggcagagatgataggtatggtggtggtagatctgaccgtggcggtgatcgttctgaccgtggcggcgatcgttctgaccgtgaccgttctgaccgtggcggcgaccgttctgatcgtgacggtgatcgatctgagcgtggcagtgaccgatattctagccgtagccgagatggtggaagcgggggtgatcgttacagtcgtgaccgatcaggtccctactgatggcctggatcttgagaagtgtgtttcatccaggtatgaaaaccctatctactatcatgaggtgtgtttccttgtgtctgaaactttgtgatcatgtatttgaatcataatgatgtaccgtgagtaagcagatcctttattacagaccatattactgacctgcttattatttgcttcctggttaatgtgagtcacatggactttggccacaaaaaaaaaaaaaa

SEQ ID NO: 4651 - DNA, 1289 bp, Triticum aestivum
  unsure (1)..(1289): unsure at all n locations
  Clone ID: TRIAE-23APR03-CLUSTER29379_1
ggaccctttccccctctctctctctctctcgccccagctgctgcctgctatgccccagcagctattggagctcggccaacctgaagtgcctgagcgttggctttggaacctgttcgtcgataagagcccccctcccgcttcgcacacgccacatatagcaatctttgctgctgcctcccgatccgctgtacttccggcatcgcgagccagagattatcaccgatccatcgtttcttttcctctagcgccaggagagctctatcttcttctttttttgcggagattggtgctgctgcttggagtagacgccagctttgtggcagatttataggataactttagctggattatcttagcacaaggtatctctgtaaaacactccagtttcagtaaccaaactgataaacagaagcagccgattcattggtagcccaaaccaatctatagtatcttgctgctgctgagctgaaccgatcaatgggtagaggaagaggcagaggcaggaaggacagcggccattgccaggagccatgaagacaaaggaagcagcggtgaagaggttgtgcgccagagaaaaaagaggagagggaggccgcagaagcacttcgccgataaaatcgaacaggttgatgttgagaatttcgtagaagacgtcgatggcggcgatgaagatggcaaagatgttaaactgaatgcaagtgctggtgtgaagagaggcaggccactgaaggagagccccaacatcgtcctggaagagaacagcaattccagcgttcgatcaagcagcgatgaatcggccaggaccaatggattcaggcagattgggaaccggaggaagagcacgccacggcgagcagcggaagcgggcctagaatgcaagtgatcgctgagcaatgccatgccaatccatacaattttcggcaccaggtagccttcataatttgtttcaaatgtaaacatgacatgcactgagtgctgaaattcgtgtgtttatgtggacgcaaaatgtatgaactggtgatagaacacctacggaatcttggtcagctgttgtaggctgattgctactagtattttggtctgcttgtttgtagcagagcttttcttgaggacgactagggatgatagtattgcaattttgatcatgttgttggtgctactcaggataagagttatctatccaagcagttttatgtatttttggctccaaaaaaaaaaaaaaaaaagcttatcgatnccgtngccncnanggggggnccggtnccaanngnnnnannnnnnncctnnct

SEQ ID NO: 4652 - DNA, 2238 bp, Triticum aestivum
  Clone ID: TRIAE-23APR03-CLUSTER29419_1
ataccaagtgaggaagaaaaacgacaccaaattatacgagcatctccatctcctctcccctcgcgcaaagggaggagggagaggccatccactccacggcgccgatcgatcggagcagcggagaggacggcgcgcgcgtcggcgatgcggaaggggccgtcgcggtcggggtcggcgcggcaccagcagttccgcgcccgtgccaagacccgcgtcgacgacctccaggacatgttctccggcctccagtacgcccgcaaggaggcccgctccaccgacgccgtcctcctcgaggcgcagctccaccagatgctccgcgagtggcgcgccgagctcagcgtcccgtcccccgcctcctccctccaggcagggaacaacaaccgggacccgtcggatccgccgtccgagacaccgcggccgccgcagctggcgccggccgaggaggaggacgacgccaccagcaagctcgtcgagcagaagccccggccgtccgctaatcagactcacaagcacccgcggggagaccccgactcgaagcccgagcggcccgagggagcggagacggagccagtgacggcggcgcggctgccgccgtcgctgggtccgggagttatcaccactccagctagtgccgggttccacgatcagatgtactatgtgaaccaggagcttagtgttgaggattttctttacgacgatgattacaagataaaccttcctgggtccaatccagaaatcctcaataaccttgaagggattggtcatcaagaatatctgcagttcaatttgccacaagagttgccccctaatgcatatcttgatatgaacaactatgggcagaatgctggagatggtttcctccacatgtcagacttgctcacaacaatgtctccagcacctgcttcatttctgaggccaaagtgcgctctctgggactgccctcgtcctgctcaaggatctgaaagctggcaagattactgcagcatgtaccatgctgaattggccgtgaaggaagagggccctccaggcacaatgcctgtgatccgcccgagaggtattgatctaaaagatggccctttgtttgctgctcttagtgcgaaaatccaaggaaagcatgtcggtgttcctgtctgtgaaggggctgcaactacgaagtccccttggaatgcacctgaacttttcgacctttacatctttgaaggtgaatctatgagagaatggcttttctttgacaaaccaagaagggcattcgacagtggaaaccggaagcaaaggtcactgccagattacaacggccgtggctggcatgaatcaaggaagcaggtgatgaaagactttgggggtctaaagaggtcatactacatggatccacagccatccagcagctacgaatggcacctctatgagtacgagatcaatgaccgcgacgcttttgccttataccggctcgaattcaagtcttcggaagcaaagaagagtgctaagtcaaaattcacttgcagtccactgattgaaatccagcagcaaatggtcaggctgagcgcagacggtcacgtggagaacaagcggactgcccgtgtgcggacacaggatgtcagcacaaacatctacccggttcagaacaacacggctcaggccagtgctccggacgcttaccaggcagcgtcgcaggtggaccagatgacgtttttgaacggcagtgttgtttatgggcctcatctcccatatggctactcgaccgaaggaggtgacttctattggaactcaaatgacggggcttgataaaaccatcttcgacttgtggcatattttcggcttcaagttctaaccgtatcagctgtaattaaggggtctactttattggcaatggcctccataatttctattgggaatggcctccgtgattctaactgtaatggttgggccaaatttaaatttacaggaaacgtctctttgaggcaaaaaaaaaaaaaaaacagcgtgtcggcgccgcgtccagtgtcctgatagtagcatctccttggtgcacagcgcatgatgagagatggattacaacatttgataggtgtcgacatctttggttagaggtttattgcccatttgatggctctgttttgtgtgttgtgttgggcatgcgtttttctgttccgaatcaatgctgaatttgcgtatgtcatccttcagctgcagctacaggtttgcaacctttagaaaggaaagcacatattggtatttatc

SEQ ID NO: 4653 - DNA, 1959 bp, Triticum aestivum
  Clone ID: TRIAE-23APR03-CLUSTER29430_1
gagtcgccgccacaatgcccctcccggcactcccctccccgcccccagccaacccccgcctaatagatgattggattccgagtcgtacgcgactctcccacctccacaaatccacagcctcccctcccctcccctccccctcatccatctccggcgacctcccagctaccgacgaatcccaaccatctcgcccgccgccgaagccgaagccgccacgagttcatcctctaccgagcgtcgtcatcccgtctgctttggggtctccgcgagccgcccgcggtcttggaagccgaggaggtcctagggttggccatcctgcgtgtttgtgttcgctgaaatatggagatacagacttcagggaagcccattgatatgctgatggagaaggttctctgtatgaatattctttcttctgattacttcaaggagctctacaggatgaagacctatcatgaggtcattgacgagatctacaaccaagttgatcatgtggagccttggatgactggcaattgcaggggtccttccactgcattctgtctcctctacaagttcttcaccatgaagcttactgtcattctgttgcttggtttgttgtagcatcctgagtccccatgcattagtgctataggattcttgtatctgcgatatgtcgctgatccactgatcttatcgacatggcatgacccctacttgttggttgatgaggctttctcccctggatctattgctcgcatgactaccatgggtgtatatgtgcgtgatcttatacttggacagaaactatgccaactagctggacaaatttcttagccagtactactttgatagtctccttccaagagttcctagtccagtatttcgtcatgtaacaaccgatcttgagaagatgaagctgcctactaagctttctggggttactggagagtcgactcgtcacggatcagaagacactgcccgccgccccccttccgttaaggcttctctgtcagtttcctttggacggcgcgcgccgctccgtgcctccactccggtgtctgcccccgtccggcggtccctctcccaggaggtcctccggtgaccaccttcaccatttcgtcgcagtgtaagtcgggaggggccttacaatgaccgttcaagtcacgaccgagaaggtaaccgttcaagccgtgaccgagatactgaccgttcaagccgtgatcgagatactgaccattcaagccgtgaccgagatactggccgttcaagccgtcaccgagagcgtgatcgttcaagccatgacagaaagcgtgattatgaccgtgacagcagggattgtgactattacaggtccaggcattcagaagaaagaagggattaccgaagcgagcgtgacaatagtagacacagacgctccagctcatgtcataggagcagaagccggagtcgtagcaggagcaggagccggagtcggagcaggaatgagcatcgatctagtccatttggggatacaagcaaagaaaaggctgctgctgcctcgagcaacctagctaagctgaaagacctgtacggcgacgtaactgagaagaaggatgacagtgatgccaggtggcttcaccatgattcatgtgccgaggaggttatcaggttgggaggccctaggtggagataaatttgaaccgccgactctgtcatcaaggtcatgttactccaccgtttgatctaccggcttctgcattggcattagtgagagtttagtctttgtaaacacttgtactttatgttggttcatcaatccatgtctttcggacgtgcagtcagtctaccaaattcatcaacacaacgttatcatgttaggctgaatgtttgacgtgtaccaactgggttacatgatgtctggcactagagcaaaaatgaagaatgcaatgatacatctctttcatttgaagaaagaatcatacaaaaaaaaaaaaaaaaaaa

SEQ ID NO: 4654 - DNA, 2001 bp, Triticum aestivum
  unsure (1)..(2001): unsure at all n locations
  Clone ID: TRIAE-23APR03-CLUSTER2950_1
caaaaacagcgactcgccctcccgtgcgcgacctagccgccgccgccgccgccactcgccggccgaagccgccgctgtcccgcccctggtacaggtgcttagcaccgcctcccacccaggagccggcccccgcatccagtcgcaccgccgccgaggccataggaagcgggggttcccgctccaaccatgcgaaccaacctgggtcgagcacaccggcagtagaaattgggggcgagcaaaggagcacaactagcgacggggtattagtggtatgactaacaaggggatgaagaatccgaggttgttgatagcggtgaaattgcaaggtattttcacatatagcttttatatggctgtggtagacggccgattgtgacttgggggttgctgatattattttttaataaggagatttttgatgatggcacgccaagttattcttgcagactctattgaacaacttacaatgtacatatacatagcagaaataaccaccatgaaattacacctgtcatgccaaattgatgacctttgccattagcaagctcagcatataaagtcttggacaaaaggaaagatcaatccaactatcactttattcagccctactgcaatccttgttggtctaggctactactgcctctctagcctgtacgagcgtctgcttcttggaatcatttctttacttctcgtagcagctaatggtgacgacagcgccatcgtactcctggttcttgtcgcgacatatattggagagctagtgtttgaagagtggttagaagtacctggcccgtttgatgcgtagcttgctttccctgagcagcttgttgcatgggttgattttgactgtaaaaattcagtccatcttgtcagcccggtcagctccctcatggccatccatctcttgcttcacccctttcacctcggcgccatagggcatcagcatgttttctatgccacaactcaacgtaactgagcagcaccggcacccactgcacgcgccatgaatttttagcttaactatccctgttcctggctcaaatcatcggtattcaatgtcaccaccatcatcttgaacagccggacgaatgcgggtctccaatagttcttttatcatagcaactatttctgaatcatcctcatgaattgctgtgtccatagcagctgcggtatttgagtccaggaaaagtggctgtccagatgagtagaaatccattatcgcagcaaagacctcaggcttaagataatcccatgaagtctcgtcagattttgtcacagttacaaaatcagatccaaagaatactcttgtaactccttctatcgcaaacagcgccttcgccaaaggagatgtcatggcggtccgagcatgagggaaatcagagctcccaacttccataaccggctttccaggatggaacatgagcgactgcgggttgggggtcgactgcgtctggatgaacatggtcctcttctgccctccgagccgatcccatggggaaggaggagcggggttcctgtgcgcggcctggcgcgcgaagggcggcgaattgaggcggtctagagcgccgccggccgccgacgagaggaagcgcggcgcggggagaacccgcctctggaggagctgggacacgagcgcgagggccctcctcctcgccatcgccattctttgcctctgcttgcgttgcgctcttctcttcctcttcctcttggtcggctgacaaattcgttccttcttcttggttttatgtcacctatacattgccattttcgtggatcttttggtctggcaaagctgtttattatactacctgatttttgagtaatgcattcgtatgatacctgtaactgcggattggttgtccatttgctgatcagttcggtgccgagaaatatacattgttaatgttgaggatattacttatcgttagcggggcgtcggctggggattagagattaatcagaaatcggcnattaatcaattttatcgnatcgngctattaa

SEQ ID NO: 4655 - DNA, 1038 bp, Triticum aestivum
  unsure (1)..(1038): unsure at all n locations
  Clone ID: TRIAE-23APR03-CLUSTER295137_1
anaggaaaaggcnctagagcttcataggttttcgcttttctattaataagtactatgtcttgctttgctaacttgtaatgaaagaacaaatgaataatgcatgttatgctgcttatgcagcagggacattggacacgttcacgcgaaggaggcttgcttgttgcgtgtctgcggatgggccgagagcttggacagcaggaagaggccggcggaggaggcgagcaccgccccggcgaagcaggccatgtcgaggccggtgacgagcggcacgctcttgaacttctcgaggacgcctgcctggagcagcaggatgacggcgtggccgaacctcgacttggcctgcgtgacggaccggatcctcgcccctttcttcagcctctcgtagatgggctcctggacgcgctgggagccgtagaacatgccgtgcatccccatgccgaacgtgagcagggcggtgccgatcagcaacatgtctaatgcttcgatgagaagtttgatgatctcggctgcatctatcgtctgcgacatggcacggaactgcaaggagaaggactgcagaacaatgccacaaccctcgagaagcatgggactgaacccaggagcgatcctgcgacgccgatgagcgtgaacgactggcatctgacgatgccctggtggataacggcctcgacgaccttggcccagcgacgccgcgtaagggccagccacgtcgcccccaactgccggagcaccagcctccgggtgacctcgtacgccagaggcagcaagagatccacgctgcccgcttcccccggcaggcgttgcttctcctcagtggtgctggtggtggtcgctcccagggtgatcagcgccgccctctgctcggcggcgcggctgatcttcccttgcctcgccttggtgtcccacaggaacgggaaccgggagacgggatgcggtacgacggccggccgaccgccggggacgacgacggcagggaccggatcctcgctcctcggnncagtcccatgttttctcgnnngctgaggtattnnnnnngag

SEQ ID NO: 4656 - DNA, 944 bp, Triticum aestivum
  Clone ID: TRIAE-23APR03-CLUSTER29514_1
acccgccgccgtggtcgcatcgcacgcaaacagggttttggtcgcgagtcgcacccgccgccgtggtcgcatcgcacgcaaactttcgagtctcgagagaggcgacgaagagagcgagggcgagggacggcaatagggcttggaggatgggcgctggggaaggagaggcagctgggagcaaggagaagagcagcggcgtcgcccggacgtccctggacggcctgcgggacaagaacgtgatgcagctcaagaagctcaacatggcgctcttccccgtccgctacaacgacaaatactaccaggacgccatcgcctccaaggacttctccaagctcgcttactatagtgatatatgtgttggagcaatcgcttgtcgcctggagaagaaggaaggaggggtggtccgtgtttatatcatgactctgggtgtattggcgccctaccgtggtcttggtcttggaacaaagctgctgaaccatgtttttgatctctgtgcgaagcagaacatctcagagatatacttacacgttcagacaaacaacgacgatgccattgctttctacaagaagtttggtttcgaaataacagagacgatacataattactatacgaacatcactccaccggattgctatgttcttaccaaatttatcggccaggctgctacaaagaaatgagcagacaccgtccctgctcttgtgacagagttgtgatcttgttgcagtgtgttcttcattttcattgaggtttaacattactttgagaacacgattaccttggctgcatcactgagacatcatttttacattgactgtgttctttgaaaaaaaaaaaaaaaaaagcttatcgataccgcccacctcgaggggggggcccggtacccattcgcccataatagggagtcgtattcgcggctccccggggcccgcggttttttcaagcgg

SEQ ID NO: 4657 - DNA, 735 bp, Triticum aestivum
  Clone ID: TRIAE-23APR03-CLUSTER29568_1
caagttagagaatccttcgtccactcgcagtcgcacgcacgcacgcacgcaccaacttcccacgccacagcacacaggcggcggcggcggcggcggtgatgggaggcgagggcgccagttccagcggcggggggttccgcgcccggatagaccactacctgtacagcggcgagaagaagcacgtagtcgcaggcatcgccatcttcgccgccattttcggggtgccctggtacttcatgacccgaggggcaaagcatgactctcatcaagattacatggagcgagctaacaaggcaaggtcggataggctttcttctggacagccatcatcactgaaagaataaagcagctgtctcgaccggccccagatttgcccaacccctgcatatgcagtttgcattatgaatctgaaggcttaatcttgtgtcaaataaacagaccatctctgttcctgaatctcagagtagtgctattgtaatacagtaatagaaattttgttcgccggaatctcatagtagtgtctttgctattctaggaggagatgatggacaaatcatggtatttttgtcccacgaattgcagtccggagcccaaaaaaaaaaaaaaaaaaaaaaaaaaaaaaaaaaaaaaaaaaaaaaaaaaaaaaaaaaaaaattaaaaaaaaaaaaaaaaaagcttatcaataccgccaacctcaagggggggccccggaacctcgaggggggggcccggaac

SEQ ID NO: 4658 - DNA, 1929 bp, Triticum aestivum
  Clone ID: TRIAE-23APR03-CLUSTER29572_1
gcctcgggatccagggcggccggggcatcgacttccccctggccttggcctcggcctccttcgcgcccccgccccccacctccgccgccctcctccgccccgcggcgttctcctccgtctccgctgcgtcgcaggcgagggtgggtgtggtgcagatgacctccgtgggggacctcgacgccaactacgccacctgctcccgcctcaccaaggaagctgctgcggctggagtcaaatttctacttgtcatggccttggcctccttcgcggtgtcgcccccaatcgccgcctgcgccgccgtcctccgccgcgccatgtcgttctcctccgtctccgctgcgtcgcagacgagggtgggtgtggtgcagatgacctccgtgggggacctcgacgccaactacgccacctgctcccgcctcaccaaggaagctgctgcggccggagtcaaatttctttgcttccctgaggtcttctccttcataggatccaaggatggcgagtctgttaagctagccgaaccattagatggcccaataatgcagagatattgctcacttgcaaatgagtcaagtatttggttgtctcttggagggtttcaagaaaggggcccagatgattcacaccagtacaacactcatgtattaatcgatgaatctggaaaagttaggagctcataccggaaaattcatttgtttgatgtggatgtacctggcaacatggtgtataaggaaagccgtttcacgacagcaggtgataccgtcgtagcggtggatagcccttttggacgattgggccttactgtttgctatgatttgagatttccagagctttaccaatgtttgcgttttaagcatcaagctcaggtcttgctcgtaccatctgcattcacaaaggtaactggggaagcacactgggaaattctccttcgtgctcgtgcaattgagacacaatgttatgttattgctgcggctcaagctggaaaacacaatgagaaaagagaaagctatggcgattctataattattgacccatggggaacagttatagctcgacttccagatcgactgtccactggatttgcagtagcagatatcgacttgtcaaaagttgaggctgtgcgaaccaaaatgccaatctctgtgcaccgcaagtttgagagcatctggaagtcctcatcactataatagttgaaggtggtcttgcacgcttcgccgctcttattctcacattccggagattcttcttttgtgtataataactgccattttgttcacaagatggtccagttcgattgggatttccagtgagacatgtcatagaactaaataagctacaactgtagtagcatatctagtaaatagggcatatccaaacatggctcagagcaccttatgacttggtttgagatggcttctacctcagcttatggtccagataaaccagaagccgttccaaacccaaagcttaggaacagcttaggttgtgtttgattgggccttagggtcttttaagccaaaagctcaaccaaatccagcgaatttgatgtttgtgtgtatgttgacatgtacaaatgcatggtagcggtactttcatgagtttgtcacttttaaaaaaaaaaaaaaaaaaaaaaaaaaaaacaaaaaaaaaaaaaaaagaaaaagaaaaaaaaaaaaaaaacccccctcgttgggtcccccccaccccgggggccggaacccccccccccctttcccccagccgggggccccgcctcccgccgccgcgttttacaaccgctgggatggggaaaaccggggggtaccccaattaaaacgcccttggaaaaatcccccctttccccaatgtggggaaaaaaaaaaaagggccccaccaattcccctttccaaaagttgcccccccggatggggaaaggaaatttttaacctttta

SEQ ID NO: 4659 - DNA, 1445 bp, Triticum aestivum
  Clone ID: TRIAE-23APR03-CLUSTER29601_1
acacagattgtgaagctctgcatctaccccgcccgcccttctccctcctcctcccctgtttttctttctttctttcttcccttcttttttgctgggctcctcttcccctgccgttccccccgtcccgctcagagcgcgccgcccgagtgatcggagtgcgccgagtgcggcggccgccgtcgccgcacctccccccccctgcgatccgcctagcctcgcctcgccgccggcgatcaacacagccagccctcccgccgtcgagacgcacccccctgtccccaaggactgaagagatcgggttgctgcggctcgttttgtgatgcacgagactctgtgcaaatgtgattacgtcgggagttatgctggggctatcagtgttgacagcgggttcgggcgcgtgagccggacatggactgcccttgtagtgaccgtggtttgctgcctggattggataaggaatatgctatctcgagccactcatgtggcaatgtgtagggatatttagcgtcacccaagggttcgggatcttggaggtaatgtgtactgtgatgcgacatggaatggggagtatgaatcgagaggttgatgtaataggaaggccgaacatattatctgaactggagagggaatttggttcggggccatggttgctcttccgtggccaactccccggtcatctctcagaggccaatagtggtttcgacgttttcgtcaatggacgccgtggtgttggcatgcggagggcagatgttgcagattactttgttgggcctggattagaagatctgattgagcagttgactcataatgatcgtcgagggccaccacctgcctctcagtcatctattgatgccatgcctagtgttaggatcactgccaggcatctcactggagactcgcattgccctgtctgcaaggacaagtttgaactgggatcagaagcaagagagatgccatgcaagcatttataccactctgattgcatacttccttggctagaacaacacaattcctgtcctgtttgccgatatgagctgccaacacagagctctagtggtgccagctgctcacgctcaagatcaaccaaccaaaatgacagttcaagcagctcaagtagcagtgggagaaccagcgggcgtcagaggagaaggaatccgttctcgttcctatggcctttccgctcatcaagttctagcactggttctcgttagattagtttggttacctggttggagttcacaatgctatttttagtgaagatgctgatcaaatgtgctttatgtgtgtcacgtcttacacccaatatgtaatgtatggcttgttatagtcgccccacaaaatggatttccttgcgagtatatagtcatctatcttgctaaatttcgtagcagctgattttgtttgcttttacacaagtcagtataaacttctttttttgagatttc

SEQ ID NO: 4660 - DNA, 1871 bp, Triticum aestivum
  Clone ID: TRIAE-23APR03-CLUSTER29631_1
ggctttaccccccctcacctatcctatttgctcctctgacccaccccaagctgccggcctacccaaaggcggcccgccccctagcagccgccggcctaccccagcaccgtccacctccatcgccctccgcgctccacctcaccgcgcccccgccgtccgtctccaccccgtccgcaatctccgacatccgtttcgaggtatgagcttctccacaggtttcgggtgtgccggtgcacaccccgctcgccatctggatccgccggcggctgggatgacatttcgtggtgtcaccccgacgcagagcctgaggcagatgccgtgttccgcttgtcctggccgattcgactgctccgcgcactcgtgccaatctgggccgcggcgcaaccccaagaagtccatgtacgacctccagaccgcgatctcgttgctctatggagaggataatggtgcagttgctccccccaggaaggagcagggtaacgcgaaagacatcgaaaccttaccgcttgcttatgcttctggcaactacgtcgagacccgggaaataatcatggtcgttgcggaggcgccggccccaatgccgtgaagaggatgattgagatctccatgaagggggtggagttctagattgtaaacacagacttccaggctatgaggatgtcgcccattgacccggcaaataggctgccgattggccaggaactgacaagaggtcttggtgctggtgggaacccagaaatcggcatgaatgcagccaaggaaagccaggagttggtagaaaaggcagtgtctggagctgatatggtttttgtcacggctggaatgggaggtggaacaggcactggcggggcgcctgttatagcagggatcgcaaagtctatgggtatattaactgtcggaatcgtgactactccgttttcatttgagggaagaagacgggcactccaggcacaagaaggaattgcggccttgaggagcaatgttgatacactgatcgtaatcccaaatgataagttactgactgctgtttctccaaatactcctgtgacagaagcctttaatttggcagatgatattctccggcagggtgtccgtggaatctcagatatcatcactgtgccaggtttggtcaatgttgactttgctgatgtacgatcagttatgtcagatgcaggttcatccttgatgggaattggaacagcaacaggtaagacacgagcaagagatgctgcactcaatgccatacagtctcctctacttgatattggtattgaaagggcaacaggaattgtgtggaatatcaccggagggagtgacctaacattgacagaggtgaatgcagcagctgaagtgatatatgatctcgtcgatcctggtgcaaatctaatatttgggtctgtcatagacccatcatatactggtcaggtgagcataactttgattgcaactggattcaagcgccaggaggaaagtgaagtccgacccgcgcaggctggaggcgatgttaaccgcggccgcagctccaggttctcttcatcttcccaggacgaaggcccgaagctgcaggttcccgagttcctacagcggaaagggcgtccagggttttccagaggctaaagcattttttccagtgtcatgagcttctcagttcctctagcagtaggctctttgttttgtttcgttgcaagctttaggcgatagactgtgtgtgtgatagcattagactgcatatgaaaacctatctttgtcagcgtgtaaccatccatggcggtctcttctaagccatcgcatggccctgtttggaacttctttgttcctgcgggaaataagctgattcttgtgacctgcaaaaaaagaaacgcgccggatcg

SEQ ID NO: 4661 - DNA, 1370 bp, Triticum aestivum
  Clone ID: TRIAE-23APR03-CLUSTER29685_1
acggcggtggggctgccgttcccgacctcattttttacagagactccggcgactccagtccatcgctcgtggaaaatctcagggtcaaagcaggaggcacaccttgatggcgcccctggagtcaggctcctcacagctcttcttcgacagcagtgcgatcgacggcccgttcgatgtctacgagtgcggtaccttggcaggcaccagagtcgtgccagatccacctccacctggaacctcttatggcaagcagagaagttccaggaatgctaaaaaggctcgtcgtgttcatggctctgaggaggtcgaggactgctggaacaggctattcttggaaggatatcaagccgatgtccgcgtatcgacgggcgatggcagccagatcttatcgcattcgtgcattcttggcatcagatctccggttctgagaagtatgttggaagaagctagaattgaacatggtttcagaaacatcctgatttccggtgtcccatcagaagtagtccgtgtcttcatcagatttctgtattcttcacgctttgagcagggtgagatgaagaagtatgcccttcatttgctcgtactctctcatgttttctcggtacaatcgctgaagatcgtctgcaccgaccagctcgagaggttttttcttgctcctgataacgtggtggacgttctacaactggctagactctgtgacgcaccaaggctctcgctcatctgtacccgtatgatcgttggagatttcaagaccatctctctgtcagaagggtggaaagtgatgagacgggccaacccaagcctggagcaagagcttcttgagtttcttgttgaagtggacacaagaaggcaagaaagagctaaaaggatggaggaaaagaaggtttatcttcagttgtatgaagctatggaagctcttgttcatatatgccgagacggttgtaggacgattggcccctgggatcagaaactcaagggcagtcaggttgtttgcaagtttcctgcctgcaagggcatcgagttgctcgtgcgccatttctcggcatgcaaaaaacgtgtgcctcgcggctgcgccaactgcaagcgcatgtggcagcttcttgagctgcattctcgaatgtgttccacaccagacacctgcagggttcctctatgcaggtgaggtcttgtctttgttggtcaggatcatttcatttagacacacaagttttctaggttaatacaacagatgtttgctttcataaaaaaaaaaaaaaaaaagcttatcgataccgtcgacctcgaggggaagccaattggagcttgacgtgtagttcgacagtaataacgtgagcactgacagtaagtacaggtgtgtatcatctaggttt

SEQ ID NO: 4662 - DNA, 1284 bp, Triticum aestivum
  Clone ID: TRIAE-23APR03-CLUSTER29727_1
gcgcggggggaacggggagaggcttgcgttgcgtgctggaggagcggaggaggcaggagccggcgtcgtgtttgagtaggagtaggataagcggattgctctctcgtctcggagatttccggcgagaaggactcgagcggatcgagtgcgcccgcccgcccgccggcctcgccgatcagccgcgatgaactgcgagacgtgccacctcaacgaactggagctggagccgctggagatcaaagacgtgctgcgatgcatcttgcataccatattctttcatcgaaccctcactcttgttcggcccaaggatgttgactgcgacctctttgagatcacatatgttcaatgtggacttgcagaactagaaaaggaggtcgatgaaaagatcaaccagttcattgcttgggctgaaaagcatccaaatcggaaaagccaggtgtgcctctctttcttcgatgagaagaacaagcacccgggctggttcagcagcaagactgagagggtttactgggaacaatggttcatcaatttgcatgtcacaagccctaaaggacaaggcaaatcacgtggctccaaagcaccggcaaatactaaaggacaagcattggaagagaccagctcaagacgtgatgcgctgagcttgctgatccaagaagtcctgttccagatcattaactacgccaatgagaaaaaagaccatattcctccaatctctgacagaatattcaatcatgagattttggtccccaggtgacaccttttccttggacgtgtgttcacagctcttctgattctgtattcgggtggaacgccgacgttcttcggagggcattgagtagtggacattcgtactcactgaactgaagatctttgttagaaactgcactaaacgaagatgttggtatcgatgtgctacctttcgcagtgatgccacattgcccctttctcacctctccattgatcgtttggttataagacgttgtcagagctgctgactcatggaagcaatgttgtgtacagaataatgtagaactgctagtgaactgactctgttatccatccaatcatgtaattcccacttgtttagctgtaaatatttctcttgacagtctgtgtccaaaaattattaccatgttattatgcagatgtgaaaaatatgtgtattctggatgttatgtgcactggtgtttattcagtgtgctgacataagggagaaacctggagtgggaagctgttttgactgactaaaaaaaaaaaaaaaaaagcttatcgataccgtcgacc

SEQ ID NO: 4663 - DNA, 838 bp, Triticum aestivum
  unsure (1)..(838): unsure at all n locations
  Clone ID: TRIAE-23APR03-CLUSTER29744_1
agggagggaaaggaaaaggacttgcaagccagacatcctcctcgacctcaaagcagagagaggtggcaatcgaccagctaggccagttctgaacctagagagaatacaatgggcaatagcttgaggtgctgcctggcttgcgtgctcccctgcggcgcgctggacctgatcaggatcgtccacctcagcggccgcgtcgaggagtacggcaggccggtggccgccggcgagatcctctccgccaacccgaaccacgtgctgagcaagccgtgctcgcagggcgtcgtgcggaggatactcatcgtctccccggagtccgagctggagcgcggccagatatactttctcatcccggcgtcctcggtgccggctgagaggaagaagaagaccggctccagcgctggctcgcaaggcgccgctggcggtcgcgccgtcaaggacggcaaaccctggccacggcggcaaggcgcgcagccacgttaagagcaagccgtcgtcaggtcacggcagtggccgtgacgtgcagtccgagaagaggtcgttgcaccggcggcgagtgagcaccggtggccggaccgccgtgtggaggccacacctcgagtgcatcgtggagggcacttgactagttcactacctagttaatttttgttctttcttttcctttttctttggcatgggtgtcatttttctctcttgtgcgcatggttaatgtgtatgcttctttgtgaccctttttctaagtgtacatccatgtaatgtttttcccttcctggatatatatgatggacatggagagggaaggttctggaaaaaaaaaaaaaatttagntgntgttcan

SEQ ID NO: 4664 - DNA, 1427 bp, Triticum aestivum
  Clone ID: TRIAE-23APR03-CLUSTER298160_1
caaatacgattctgctgtaatccggcgatgtccgccatccatggatccacctgccccgcgctgctctggcgagcaccacacccacctgcgccgtgctgctctggcaagcggccgcatccacctcccaccgcgttgctccagcgagcagccgcatccacctcccaccgcgctgctacggcgagcgcctcgcctccacctgcccccattttgctccggtgagcgacgcgcctccacctgcgctggaacggcggctacaccgtggactagcggacgagatgctggaaacggccttggcgggagctgcagtcggcgacattttttgctacatccggttactatttttgctggaatcagcaacatttttttgctacgatccacattttagagtgctttttgctggtaaccgctcccaaattttgctaccatggtttttttgctacaaccgttgcatcccttgtcttttgatttttttgctagatccatctatatgctggaacgattccaagttttgctaccacggttttttatttttgctactgccgtcttagtttttgctatcatccctgtttttgatttttttgctggatccatccttttgctggaaccactctattttttgccacacggtctttgaattttgctaccaccgtcttcattttttgctacaaccttatttttgatttgttttgccggatccatcttcttgctggaatcactcccaaattttgctaccatcgttttgttttttgcttccactgtctttgatttgtgctaccatccgtcttttttatttttgctggatctataatattgcttgaagggattgaaccagctatttattctgttgaaaccagcgatttgttttgttggaacaacttcttttcagagcgggatgaccactggaaccacaagcgaggcggtggtgctgcaccagcgacaacgatgaccagttgacgggattgacgatggctggtggcgatgctggaaacgcccacccggcggtgctacaaccagtgggggtggggacactcgctgagctgcaaaggcctacaacactggacatatttgtttcgacagaagggtgggcagccccgccaaggggcgcgcgggaggctactgttgacaccaggggcgtggggcgcgtgctgcccgacggcggcgaggcaacccggaggggaacttcgatctcccagtgggaggggcgcgcccttgctcaatgcgagcggacggcttttttttgtttcctttggcgaaggaaaaaaacattgcggatccaatcgaccggcctgtggatgcatgtatcgggcggttaggggccgcccgcccaaaaggtttcggccggcgccccggcgcttagtggtcccctttagtgaaaaaccaagttgcccttctatacttatcattaaaaaaaaagggttgcccttttt

SEQ ID NO: 4665 - DNA, 1168 bp, Triticum aestivum
  Clone ID: TRIAE-23APR03-CLUSTER299496_1
ttttctttttcccaccgggttttggggtttccccacacgcttaatggcccgcccggggttcccccccccccctttcttggacggccccggcggccggttcatgccccccatcgggtttttttgttcttttcccccccgttcggtatcgataagcttttttttttttttttttagctcatcaacaaatttaattggcagaagaaaggaagatccacagctccgcaaacttggaagatggaatctagctatacataacaagaatctaatctcctagcccttttcggggcggttactttactcatttcgccctatgtacacggctggggccaggcagctcgccggcgtccggacgcggagaccaattcagtcctgtaaaattgcgcattcggggcggcggcggccggatgcctggaccgaatcgggggctcggctcactggtagccgcccaggccggtgagcagcagctcgtgcggccgcagcagcgtcggggtggccggcgccgaggcggcgcccaggtagaagaagtcgaagtcggaggcgtcgggcacgccggcggcggcggcccagagcgcgccggccatctcgtcggggatgagcggcgcgcggcagagcgggcaggtgcgctggtcgtgctccatccagcggtccaggcagccccggtggaaggcgtggcggcagttgctgagccgccgcacctcgtcgccgccgccgatgccgctgaggcacacggcgcagtccccgtcgacgcacgccgcggcctccagctcgtcgaaccgcaccacggggagcacctcctcgatgaccatggccgtgacgggccggaactcgggccgccggtgctgcagcagctgcgccgccgcggcggcgtggtcggcgcgcgcgtggtcctgcggcaggtgctcgtccccgagatccagcaggtcgccgaggccgacggcgtcgaaggcccagaggaggaagcggcggaggtaaccgagcaggaggaggaggtggagcagctgcttggggagcagaagctcggagtagccgaccgggaagcccatgcctgtcgcttgcctgtccttgcccaggagaagcgtccgcgccgcctgctgaccgctgcggcctcggcagggaggatgagaggcaagtgtgaggacgacggtgtgctggtggtggtggcaggcgt

SEQ ID NO: 4666 - DNA, 1462 bp, Triticum aestivum
  Clone ID: TRIAE-23APR03-CLUSTER3008_1
tccaacctcagtgttccctccatttcccgccgcgttctccgggcccgaaccgccacttcctcctcggcgaccacggccgcggtgtccgccgccgggcgatccagcgccttcctccccgtgcggacccgccctggatggccgggagagcctcttccgtggagcgcgtgaaggagcgtgccaccggcctcgacaagttcgtcctccgcgaggcccgcggcagctccgccgaggtatacttgtatggaggccaagtaacctcttggaaaaataactctggagaacaacagttatttctcagtaagaaggcttctttcaaaccaccaaaagcgattcgtgggggcatacaaatttgttttcctcaattagggaaccacggagttgttgaacagcatggattcgctaggaaccgactttggagtgttgatgagagtcctcctcttccagataccacttctgattgtcatattgacttgatactcaagcagtctgaagaagatatgaagacctggccacacagttatgaacttcgtttgcaagttgctcttagcccgaggggagatctgatcctcacatctcgaataaaaaataagaatgctgatggcaagccattccaatttacttttgcataccacacatacttttcagtctctgatatcagcgaagtacctgcccgggcggccgctccctccggcgttcgtccctgcctgccggccaacctgccctgtaccgtacaaggcgatgcagttgtatttgagtctgaagtggacaggatatatctaagtgccccacccaagattgtgacaattgaccatgagaaaaaaaggacattcgtattaaggaaaaaggaacttccagatgttgttgtttggaacccatgggacaggaaagcaaaagcaatgccagattttggtgccgaggagtacaagtgcatgctgtgtgtaggggctgcacgtattgagaagccaattactttaaggcctggtgaagagtggcaaggaaggcaggaaatttcccctgtgccatccagttacagcagtggactgttggatcctgaaatgattcaacagatgcaacgtatctagatcttttggtggttgaaatgctatgaagtctcttcagtgtcaataagataatctgaatgttcttcatccaacttccagctttcttttttgtgtacaattccaaagtagcctgtggtttctctggagcagcactggagttgaaatctccatcgtgatttaaaggaggcggagaatttttgtctatctttagggactttatgtacattcataatcagtcgctttacattacaccatttttttgccctattataggaggctgatttgaaactgcacaaatagtattgtgtcaattttgagttgcctcgtgccatattgcagcactttacccgtatggtgtgtaatacttcctccgttcactattataagacgctttgattttt

SEQ ID NO: 4667 - DNA, 1050 bp, Triticum aestivum
  Clone ID: TRIAE-23APR03-CLUSTER301_22
gatccagccagctgcaaggagatctcttgtactggtaccggcgctggcacttgactggagccagtagagtagtacagtgcagtacgctctccccctcctccctccctcctcagtccgtccagtaacagagagagcagagcagagcggagcggagcagagctgttgctcaccagtagcagagatcccaagcaagcaaggcaaggcagcggaggaaggagaagcggcaatggcgggcggcggcggtcgggggcgcggggaggaggagtacgactacctgttcaaggtggtgctgatcggcgactccggggtggggaaatccaacctgctgtcccgcttcacccgcaacgagttctgcctcgagtccaagtccaccatcggcgtcgagttcgccacaagaacactccacgtggaggagaagataatcaaggcgcagatctgggacacggcggggcaggagcggtaccgggccatcacgagcgcctactaccggggcgcgctcggggcggtgctcgtctacgacgtcaccaagcccaccaccttcgagaacatcagccggtggctcaaggagctgcgcgaccacgccgacgcaaacatccggatcatgctcgtcggcaacaagaccgacctcaaggacctccggggccgtccccgccgacgacgcggggggatacgccgaggccgaggggctgtcctacatcgagacgtccgcgctcgaggccatgaacgtcgaggaggccttccagctcatcctcggcgacatctaccgcgccgtcagcaagaaggcggtggcctccgaggaggacagggcaggggccgccggggtcaaggaaggtaagaccatcaacgtcgccgccgccgctgacaatggcggcgagaagaagtagtgctgctcagcttaggatggacggatgatgcccagcggatgtatgttatgtgatggttgttttttgagttttacaagccttgttgattcattttgtcagatatcctcctacattgttagacctgaaactcatatatattcagttactatatatatatcaagttcat

SEQ ID NO: 4668 - DNA, 1341 bp, Triticum aestivum
  Clone ID: TRIAE-23APR03-CLUSTER301_28
ccgggccctctcatatacgccaccgcgcgcgccccgctccgctcctcctctcccttcccttcccttcctcggcgaccgccccaggaagcgcctccccgcccgcctccgccaggaaggaagggggccgtcgtcgggtcgggtcgggccggccatggcctacagggcggaggacgactacgactacctcttcaaggtcgtgctcatcggcgactccggcgtcggcaagtccaacctcctctcccgcttcacccgcaacgagttcagcctcgagtccaagtccaccatcggcgtcgagttcgccaccaggagcatccgggtcgacgacaaggtcgtcaaggcccagatctgggacacggcaggccaggagaggtatcgggcaattacaagtgcgtactatcgaggggccgtcggtgcgcttgtcgtgtacgatgtgacacgccatgtgacctttgagaacgtggagaggtggttgaaggagctccgggatcacacagatgcaaacattgtcatcatgcttgtcggcaacaaagctgatctccgccatcttagggctgtatcagtggaggatgccaaggccttcgctgagagggaaagcaccttctttatggaaacatctgcgctggaggccatgaatgttgagaacgccttcactgaggttctgactcagatctaccgtgtagtcagcaagaaggccctcgacataggcgatgaccctgctgctccaccgagaggacaaaccatcaatgttggtggcaaggatgatgtctctgctgtgaaaaaggcagggtgctgttcatcctaaattcgttttgcttgtgaagagggaccatatgctcacctgattatatgggtaactgcaaatatgacatcctttttgtctcctaacctggttgtttgtgagattataccggtgcaccaagaatttcgtttagatatcaagatttaaccccaggttgataaggggggccatgctaactttggaatgtcagtgattttgtggttgccttttatggtttctttgctgctgtattgtcccacctcaattgacacaagaatcctctcaacatttcactgcgcagcctaacctgataaaggttgtaatgggagctatggttcattacttctcttggctttcctgctgaatggatgtgtactatgtagccctcagagattatactgtatcttctgtatcacaataggttatgtctacttggtaaatgtcatctgtaactggtagccagttttacactgttatattgtgtatcttccttcccagatgtacagaatttgcattgaagatccaaaaaaaaaaaagaaaaaaaaaaaaaaaaaaggccccta

SEQ ID NO: 4669 - DNA, 1289 bp, Triticum aestivum
  unsure (1)..(1289): unsure at all n locations
  Clone ID: TRIAE-23APR03-CLUSTER301_29
ccacgcgtccgcttctctttgtctgcttgatcgtcccgttcctcttcatcatcctccccccttccttccttcctccacccacctcctccccccctcccctctccggcgcgccctccctcccccaccggcgaatccgcaaccgaatcgaatcccaggatccgcgtcggcgggcggcggcggagccacatggcgcaccgggtggacaacgagtacgactacctcttcaagatcgtgctcatcggcgactccggcgtcggcaagtccaacatcctctcccgcttcacccgcaacgagttctgcctcgagtccaagtccaccatcggcgtcgagttcgccacccgcaccctccggggtagaaggcaagaccattaaagctcagatatgggatactgctgggccaagagaggtaccgtgcaatcacaagtgcttactacagggggagctgtgggagctcttttggtgtatgacataacaaagaagctatcatttgaaaacatcaataggtggcttagtgagctccgtaaccatgctgactccaacattgtcatcatgatggttggaaacaaatccgaccttaaccacctgaggtcagttcaagaggaagaagggcaggcattagcagagaaggaagggctatccttccttgagacctcggcactggaagccttgaacgtcgagaaggcgtttcagactatcctttccgacatccatcagatcataagcaagaaggcgctcgctgcccaggaggctgcaggaagtggacctccgactcaaggaaccaccatcaatgttgccgattcatctggcaacacaaagaaagggtgctgttctacctaggtgcgaacagagaagtggtgattctgcaaaaggatgctcacatggatcttacggcgccctaggtgtctaggtgttagttcggtcccttttgactccttttggcctgtaattctggtggggttgtattaaagttcatactgctagaaagaaattatccttggtagataccgtgtgtagttgcaaatttttggtagagaccattgtttgtcagtcagacttactacagtttcagagcattatcatgtttccttttaggtacatgtttgtcctcctaagacatttggtgcccccgaattaccggagcaggaacaatgggggtatagatatatatctcttgtatttgttatatgtggattgtggtgttatctgaacatcttttgtcctacaaaaggcatgttgttaaaaaaaaaaaaaaannnnctcgtaaacatacgaaatataaacttgaaatt

SEQ ID NO: 4670 - DNA, 626 bp, Triticum aestivum
  Clone ID: TRIAE-23APR03-CLUSTER3024_4
ccatcgttcccactcacaaaccaacccaacacccggcggtccactatccagatccagattctctatcctgaccctgctcctgcgatccccaaccgaccctgctcctgcgatccccaaccccaatccaagaccaagagcaacagggagaccatgagcgccatggtcgcgtcgtcgcttaacccggaggccccgctcttcatcccggcagcgttccagcaggtggaggacttctcaccgcagtgtgggtgggacctcgtcaagtccaccgcctggtttcgcgaccactggtaccaccagcaccagcagctcgacgatatggtcgactccctcatcgccttcgaggccgaggacgccatcgctgtcgaggcttcgcacccgcagccgccagcggcactcaatattgacggggtgctcaaggcgctgaggctggcgtccccaagcccaaagggcggcgacgccctgcgtggcttctcggagaagcctaggtacaccgagaagcccaccaagtacgccggcagcccgaggagcggtggcgcaccgcgcttcatccaccagcctcgctaggttgggatgtcaagcttcaagaatcgagcaaatcctacgctttctctgcctgcagtgatgca

SEQ ID NO: 4671 - DNA, 1160 bp, Triticum aestivum
  Clone ID: TRIAE-23APR03-CLUSTER30250_1
atttatacttgtataaaaacaataaaagcagtttatttcatccaacaaccagatcgtggttcatcatacatccaattccttgcttatttgccatcacctcaaggtcaaggcacaaattaacccgaatcactagtctagtcagtggacgacggtgccctccgccttgcgcacctcgacgctgagccgcgggccgtcgccgccgccgtcctgcagcagctggtagcaccggatggcgcggacgcggaggccgttgtcgggtcggacccggtcctcagcgcagtgcggctcctggcggggcccttccgccggctgccgcccgtggctctgcctgaccccggcggtccactgctgcccgccaatcccctgcacctccctgtccttctccgtgacccggtgcgactggctgaactccacaggcacgttcaggtactgcttcttcttggtgcccaggtggcactgccccagcgtcacggtgaaccgactcggcgcggcgccgcctccgccgccatggacgtcgccgtcgctgctgctgcttccactccctggcaacgccggtggcggagactcctcctcttcggcgctgtcgtcttcctcctcgcgctggcagcagtgtctcccgcactcggagtcgtcgaacaccttgacggtgagcagggcggcgccgtcgtagcagaagacgaggagctgccccagctctatgccgttggcgcggacgaactccttccagcccctgccgaggtgcatgtcgccgtactcgttggcgacgacctccacgtcccacgcgcgcgcccctccgccgtcgacccgcagcttcacgccccggagctcactccctcacgaacttgtcaggcagcggcaaggccgcccaggcttctcccaggacattccgcttgtagaactcgaaaccagccaggtcagggctgtcccgcagctgctgcgccatctccgccgtctccgtgtccctgtgagagcgcagaatcaccatggagcacacgggcgaggccactggctggtctcagtctcactctcactgatgggaggaggaggaggctgcgaatcttgtgatggagtgggatgggaggaggggaggaggaggcgaggaatctcttgtaaataaaacgctgggatcgatgtaactgcgcagcaccaacgcatacact

SEQ ID NO: 4672 - DNA, 1375 bp, Triticum aestivum
  Clone ID: TRIAE-23APR03-CLUSTER302_3
aaaaccccacccgtcggcggccgaatctcggaccgcccccgcgaccgacccccccatgctgcgctgccacatcccgccgcaatgcggcccggccccgctcggccgccgcggcctgccccgggcgtcggcggcggtgcgctgcgccgcgcgggccccgtcgcgggggaccgtggcggcggcggcgcaggtcgcggcggcggtggccacggccgaggaaaaatgcgaattcggcacgagggggtggagcggcccggctggcggagcggctgcggatggggagcctcctcgaggacggcctctcctacaaggagagcttcatcgtgcgctgctacgaggtcggcatcaacaagaccgccaccgtcgagaccatcgcaaacctcctccaggaggtagggtgtaatcatgcacaaagcgttgggttctccaccgacggttttgccacgactacaacaatgagagaacttggactcatttgggtcacaaataggatgcacattgagatctacaaataccccgcttggggtgacgttgttgagattgaaacatggtgccaagctgatggaaagatcggtactcggcgtgattggatccttaaggatttagctaatggtgaagttattggaagagctaccagcaagtgggtcatgatgaaccaaaatacacgcagacttcaaagagtcagtgacgaagtcagggatgaggtgtttatccactgtccgaagagtccaagattagcattccctgaggaaaataatggcagtctgaagaagattcctgttctaacagatcctgcacagcactcgaggctcggtctagtgcctagaagagctgatctggacatgaaccaacatgtcaataatgtcacttacattggttgggtcctcgaaagcatacctcaagatattattgatacccatgagttgcaaacaatcactcttgactacagaagagagtgccagcatgatgacatagtcgattctctcacctatatagaggaaggggaggagataaattctaatggatctctgttttcagcgccgcacccagaagagcagcgtcagttcttgcactgcttgagatttgctggggctggggacgagatcaaccgtggtcgcaccgtgtggaggaaactagctagataaaaagtgatatgtatttgctcatatgtattgtgctgttccttttgttttactgttttgctctttgcgaccggcgccgcatcacgagagaatcaactgtacccggaattttgtgattacctttgtgacctgtgtaacaatcaatgccaatctgtggcaaatgttggacctcagctggtgttcatccgttttggactatgcaatatatgtatgtatacaagacaaaaaaaaaaaaa

SEQ ID NO: 4673 - DNA, 1502 bp, Triticum aestivum
  Clone ID: TRIAE-23APR03-CLUSTER3033_1
actctccctaccgtcgctttgctaggcgcgctctctcgtatccccggcacctcgcgcacccccctttctcctcctccacctcccaccccggctctctcgcatcccgatctcccctgctgctttcttctcctcctcatcccaaaccctagcccccctccgcctcggccaccgcttcgtcgccatggccgccgccgccgcggaggagttcgtgaagggtcgcgtcttccccaacggcgtcgcggtcatcaccctcgaccgccccaaggccctcaacgccatgaacctcgaaatggaccttaggtacaagacatttcttgatgactgggaaacaaatccaaacgtgaagtgcattcttgttggaaagcagttctccgcgtgccttctcagctgggatggatattaagggcgttgcagcggaaattcaaaaggacaagagcacatcacttgtgcaaaaggtcttcacagctgagtactctttgatttgcaagatacatgagtatgcaaaaccttatatatgcttgatggatggtgtgaccatggggtttggaattggattgtctggacatgggcgctaccgcattattacggagagaacactgctggccatgccggaaaatggtattggcttgttcccagatgttggctttgcttacatcggtgcaaaagcgccaggagggggtgcagtcggagcttaccttgggatgacaggaaaaagaatatcttcacctgctgatgctctattcattggtctcggaacccattatgtaccttccggggacttgggttcactcaaggaatccctcctgagtgctaacttcactgctgatcctcacaaagatgttgagtcactcctgactgggtacaagaaggagcctgagtcggtgccccaattagaaaagcttttaccggatatcgtttcttcttttggtcctgataaatcagctactgaatctgtggaagagctaaagaagcgtactcaaaatggtgatgccacagtgtcagaatgggccaatgatgctttagcaggacttaagaaaggtgctccgttttctctttgtttaacacagaaacatttctctcgagttgcatcatcatatgggaacaatgaaaattatctatctaagttggctggtgttatgaaattggagtaccgtattgccttgagatcgtcggttcgaaatgattttgctgaaggcgtacgcgctgtcttagttgacaaggaccagaatccaaaatggagtccagcaactctggaagaggtaaacatggatgaggtcgaatcagtgtttgaaccattagctgccgatgctgagttgaatgtgtgattttctgtagcagcccagaatgctgtgaccacctgaacaccctttgtccttccgatgatgtaataggaaattactacaaacctacacacggctatccattgagccaataaatttgcctggagtgcatcgtctgaaaaaaaaaaaaaaaaatcagcatttgatgcagcgatttatttg

SEQ ID NO: 4674 - DNA, 851 bp, Triticum aestivum
  Clone ID: TRIAE-23APR03-CLUSTER304_5
atactcgaagcaccagcgcagtagcaagccatggccaacgcaatgttgctccccgtgctcatctccttcctcgtcttgcccttctccgccctggccctgacccaggacttctgcgtcgccgacctgtcctgcagcgacacgccggcggggtacccgtgcaaggccggcgtcggcgcgggggacttctactaccacggcctcgccgccgcgggcaacaccagcaacctctgagctcctcttcgtcaccgagggcaccatcctggcgggcttcatcagctcctcctccaacaccgtgtacaccaagacgctctacaagggcgacatcatggtgttcccccagggcctgctccactaccagtacaacggcggcagctcgccggcggtggcgctcgttgcgttcagcggccccaaccccggcctgcagatcactgagtacgccctcttcgccaacaacttgccgtccgcggtcttcgagactgtcaccttccttgacgacgcgcaggtcaagaagctcaagtccgtgctcgccggcaccggctaagcattaatcaagcaagcaggtctctatgcaaggtcgtcatttatcctggtgtccccgtgtcggattacgtacctggacgataacaccgccacagaaatggtttctacctataccgtgcatgcatattatatagtagtgtgcatgcatccatcatctatatatcgccaattgggtcgtgcaatattttctagttttgtcaaaattttcttgtcctaaattgttgtatagtgtttctatgagattgttttcttccttcaaaacgtatcataatgtttcaccgtgtactcagtaagagagctttgtatccttt

SEQ ID NO: 4675 - DNA, 1933 bp, Triticum aestivum
  Clone ID: TRIAE-23APR03-CLUSTER3050_1
atgtacgagcggccgtgcttctcccggatttcacgagcggccgtgcttctcctggctttcctctcctagctagcgatggcgaccgagggcctcccgatgctgctggcggacgcctctcgctctccgtggggcgtggcgggggccgcggcggccggggcgctgctgtggttcgccgcctgggtcctggagtgggcgtcgggggcgccggggccgctgggccgggctctccgggcctacggaatcatgggcaggcggtaccgcctcttcaccggcgacataccggcgatggcccggtccaaccccatggcccggtcgcggcccatgccgctccgctgccacgccaccacccccctccgtgccgcccatggtccccaacgcagtctaggaccacgggaaagtgccatacgcccgatttggcacaacgccaggcgtagtaataccggaagcagaactagtgaaagaagtttggtcacatcagtataggagcgtagggaaagagttagagaacgctgcttgctaatgggcttgcaaatcaagagggtaagaaaatgggcaaagcaaagaagaatcctaaatcgaacatttctccatgacaggataaagaggatgctgacagttttttctgcctattgcgaagaacatgattacaaggtggtagaatacgatgtccgctgacgggttctatgtgggaattgacttctgtccctgcagttgcctgaatcttacccggggacgtcatctccgtagaacagcaatttggtagcaattttcaggagggtatgaaaatattccagctgcaaggggagatgggtgaacggctaatacaggcttttcggacattttttatcccaggttattggttcttcccaacaaagaacaacagaaggatgagagcaattgatcgtgagatccgcatgattctgcgaggcattattgggaaaaaggaaagagctattaaaaatggtgaagctagcagtgatgacttgttaggattgctgttggagtcaaatatgcaacaatcaaatgggaaggcaaaactaggactgagtattgaagatataattcaggaatgcaagctattttactttgcaggtatggagacaacatcagtcttgctcacatggacactaattgtgctaagcatgcacccagagtggcaagagcaggcaagagaggaagtgttgcatcactttggaagaaccacaccagattttgagaacttgggtcgccttaagattgtaacaatgattttttatgaggttcttaggttgtacccgcccataaccttccttacgagaagaacttacaaggcaatggagcttggcggcatcaaatatccggcaggcgtgaaccttatgctgcccattctctttatccaccatgaccctgatatttggggaaaagacgcaagggaattcaatccacagaggtttgctgatggcatctcaaatgcagcgaaacatccggcggcgttctttccttttggagggggtcctcggatatgcatcggccagaactttgcattgctggaagcaaagatggctctgagcatcatcctccagcgcttctcgttcgagctctcgccgtcctacgtccatgcaccgtacacggtgataaccctgcagccgcagcacggtgctcagattaggctgaagaagatatgagcatgctttatcatggggcagtgaatgttagcttttggctgaataaacatagcaattagttcatgttgtagtcgcaaaaaaaaaacacaggtttacttttatgtactcttttttgaaataactgagcgaattgaaatagtagtttcagttgaattagtcgtttgcttcagttcataatagtactgcaggtctgtaacttttttccattcaatggaactcctatcatgatactcgcagagaaaaaaaataaaaataaaaaaaaaaaaaac

SEQ ID NO: 4676 - DNA, 1260 bp, Triticum aestivum
  Clone ID: TRIAE-23APR03-CLUSTER305_55
agacgcgcaacgcatttcctccccctcccccccgcttgcgagaagaagcgcgagagacccccgagagaaccctccagatgcatccggccgccgccgagatgcagccgcccgtcggctcccccaccgccgctccccaatccgagacccagcacccgctgtctacccccgatccctcctccccccctgcgcccgcaccggcgccggccccggcccccgaggcggcggccgatccgccctcgtccgcgcccgccctggcgccggtgcagctgcagccgcagcagcagcacaagaccgtcacgtggagcgagaagctcacgtccgagtcgcccacctacgtgccgaccgccgcctccgcggaggccagccagtacgtctcccgcgggcccgccgcctcctcctccaagggcgcggtggaggcgatgaaggacaccctgtcgaggtgggggaagtccatggcggagaccaccagcatggtcgagagcctcagccgcgacacgtggcagcacttcaagacagggcctagttttactgaggctgctatgggacggcttgctcaaggaacaaaggtcttagcggaaggtggctatgaaaaaatatttaaacagacgttcgagattctgccggatgagcagctgaaaatgtcttacgcgtgctatctatcaacatccgctggtcctgtcatgggagttatgtacatttctacagctaaaattgcattctgcagtgacaatcctctttcttacaaggcgggaaacaaaacagagtggagttactacaaggtggtcattcctcttcatcagctaagaacagccaatccttcagtgagcaaagtaaatcctgctgaaaagtatattcaggttgtctcggttgaagggcatgagttctggttcatgggtttcctgatgtacgacaaggccgtgtccagcctgcaagaagcccttgacggtgctcgggagttgcaaccataggtagatatcagacggaagtttcagttacttcagcctgtaacatccccaggggcatcgccagttctccattcgatgtcttcccgctctgagcgtctcctgtttaagacatatccttcatgctgtgccccttggagctttcggttcggtacactctcgagcttgtatacgtgtttgttcttgttctttgcgttccccgtgttgtaatgatgatgatgatgatgatgatggtatatgggaaaaacattggagctgtccattttaaaaaaaaaaaaaaaaacccttttttggaccg

SEQ ID NO: 4677 - DNA, 1146 bp, Triticum aestivum
  Clone ID: TRIAE-23APR03-CLUSTER305_58
aagataagatcgatcgcggccgcgccagagagagagagaaaaaaaatcttctcgtcggtagggtttcgggggctgcgatggcgatggaggcgcggatgaaggggacggtcaagtggttcaacgacaccaaggggttcggcttcatctcccccgacgacggcagcgaggacctcttcgtccaccagtcctccatcaaggccgacggcttccgctcgctggccgagggcgaggtcgtcgagttcgccgtctcggagggcgacgacggccgcaccaaggccgtcgacgtcaccggccccgacggatccttcgtgcagggcggcgcgggcggtggcggtggcgggggcggcttcggatcccgtggcggtggcggatctcgcggcggcgggggcttcggcggccgcggcggggacggatctggcggctacagaggtgggtacggtggtgacggtggcggaggctggggcggccagaggagatccggcggtggaggcgccggtggggcctgcttcaagtgcggggagcctggccacatggccagggactgctcggtcaacggccccgccggtggcggcggcggcggcggctgctacaagtgcggggagcaaggccacatcgccagggactgcttcaacggcggcgcgggcggaggaggcggcggctacggcgggggcggcggcggcaactgctacaactgcggcgagccgggacacatcgcgagggactgccccaccagcagcggcttcggcgggggcggcggcggcgggaggttcggcggaggaggcggcggcggcaacgaccgctcctgctacaactgcggcgagcccggccacatctcccgcgactgcaccaagtgaggggatatctctgcccctcccccctctatagattgcgcctaaatacctctcgtcttagttttgccgatcgatcgatctgggcccaagcgcccagcttcagccgcctcgcttattttatcttcctccccccttccgttctcggagtccgtcctagggaaaagtcagtcagtcagtcagtccgtgtgatggttaattttgctatgaattggtctctggtacccgtaccgtactctcagttgatgtttaaggtcgtgatgatgatggattattggtgatttttgtggtgatgatg

SEQ ID NO: 4678 - DNA, 2118 bp, Triticum aestivum
  Clone ID: TRIAE-23APR03-CLUSTER305_82
ttttttttttatcaatgaaattgtactcttcctcacaaacgatgtattggttatttctaatgaataaagtttcattttatttcaaaaaaaaaagagggcgccattggtcctccacacgcatttttaaagcaaaagaaagcattatgatcaaccattggtactgagaaatggcagagcacatgtgtcttaatttagcacaacaacgccgtgatcagggagtagtgcttcactctcaatgcttgaattaccatccacgcgagctaagatacacaacaagccggccaagtgtctcgtccactgccttgttccatacgtgagccatctcagctgaaactcctctaccggtggttgcacttgtctgataggagaaggatgctcccccagaggccgcgtcggcgtcggcaagggagcggtagatggagcggcgctggtggaggacgaaaccccccatggaaacggagcgcagggcgaacccgaggaggcgctcctccgcgaggatgctgatcatcgtggtggcggccgccggcgagacgccgaggttgttgagaagtttcctcttttcgtgtacatgctggccgaagggcggcctttctacttcttcctcccggccaagatgcctaaagggaggcagctcatcttctgcacggagtctatggcgtggtgccatggaagcttgcaaaagcatgtgaaaataaaagctacagccccgatacataccaagagaagaaataggctcacaacggagcgatgcaacaatttggtcttcataaggttcaacaataggatgttgtctaggaaacaaaagctcctagagaagaagaaatgggatgtgctcattagcaccgatgctaccgaagctcaaggatttctatttgaaggaggggatgattatgcaagcgttgtttatcttgatgaggaggatgtagatgttcatccgggtactcgaggacggcggcgaggtagacgggggcgccggagccgacgcgctgggcgtagcggcccttcttgaggtagcgcccgatgcggccgacggggaactggagcccggccttgatggacttggtcaccgacttcttcctcggcccgccgaacttcttcccggccaccttcttcagcttgctgccgtccatcttcctggcttgctcgctccttgctgggactccggcgagaggtggattcggtggctcggtgcagactggacctcggccgaggtttttttttttttttttttttttagacataaagcaattaatagcaagccaacagcaggctagtcatcagatcagtagataaaagcaagcataataactgtttccacatgctgtggaggtccacgaaagaaaagcagtaagggttttaagcttttcttcgctactagtcaaacagagacatctccagcatgccacagcccaggagcacgcatctaaacattctccttacataacattacataatccggacatcgacatggcaagctaaaccctaagcagcaaacgctgatttgcaccgctgctgttccctcatctactatttactcctcgtcctcctcggcatcatcctcaacgtcagaaccttcttcgtcagcgtcagtcttggccttcttggagctggtgctctccttcttgttcaccaccttgcttgctggggcatctgccttcttgccgccatactttgccttctcctcatccgacatgctgcgccacttctccccggccgccttggtaacggccgcgacgccctttgcctcggggtgcttctccatgtactgtggcctgaactcagccaggaaagcgaagaaaggggtgggggcgcgcttcggcttggcgacgccgccggtggccgtcttgttcttgccggaggccttgaacgcggtgtctccgttggccttggacctcatggcggcggagcgggcgagcggttagggctttggggagggtgaggagggcgtcggtgcggaactgctgcggactggggagcggagggaatggggacggggaaggacaacgaaagggggagaatgcgacgtgtttttcgcaaggatggtctaagttaagggcccgggacgaatcccgcagcccggggatccataattcaaagcggccgccaccgcgtgaaact

SEQ ID NO: 4679 - DNA, 1812 bp, Triticum aestivum
  Clone ID: TRIAE-23APR03-CLUSTER3072_1
gcccgtatttcccggttcttggcaccttcgtccacagggtgcgtgcgacgctgcagtacagggaggaggaatagcgtgcaagaacagcaggagcgagcgggcacgcaggcagccacaaagcgctgctgctgctgctcccagccccgcccagcctgcgctctgataattgagtaacgctgacccacctttcacctcccctttttttataatctatagcatatataatcatatcatcccgactcatccctacacttatttctcggttcttgttcaccttcctgtcttttccagatttcattggaattccatatagggcctccaccacattcatttgctttgattgctaccagctgttcctcttcctccgttctccagatttcttggctccctgggtctccctgtcttgcccggagattgcaatcttgcggagctcttctttggtttcttgttccatgctgggagccatggatgagaggatcccgcccccccctttcttccagtactcgccgtgtggcgtccattcttcccctcaccaccacaaacccataagctagtccaccttcgtgagggagaggcctatttctaacaggcttgccaagagggagatgctagggcctttcctgcaaggtcttccattttgtaacgggcttttaaaccaagaaattctgcgggcaccttctttgccacctaacccggacccgggggacccccgaaggcccgagctacacacaatgaaactatatcggggcggggtacgcttacctggtagttcctgccatgctttcctgtttactgcccgcccccgccggttgggcctaccccgggcaccgtccctgggctggaatggtggtcctggagttgttggcggccctgttgtgaagaaacttgtcaggatggatgttccagcagaaaagtatccaaatttcaactttgttggccgtttgttggggccacgaggaaactccctgaaaagagttgaagctacaacacaatgtagagtctatattcgtggacgtggttcagtgaaagatactgtgaaggaaaacaagcttagagctaagcctggctatgagcacttaaacgaaccactgcatgtgcttatcgaagctgagttcccggcggatatcgttgatgcgcgactaaaccaggctgtggtcatactggaagatcttctcaaaccagtagatgaatccatggattacttcaagaagcaacagctgagagaattggcaatactgaatggaactctaagggaggaggaaagcccaagcccaagcccacatctcagtcccagtgtatcaccgttcaactccaccgggatgaaacgcgcgaaaacgggccggtatcgatcgtgcttctgaatactgatttgcctgaggtgaccatggtttgaacagatcgcgcgcaaacctgttctactgctggaaatgattcatgatgcatatgggggaccggccttgaggctggtcgcatctgtgatacgagctgagatatatctttggatgaatggtcgctatggaagaaattcgttcggtctgctcgaggaatcggggcttgctgtttggtcttattgattattctctgtgtatctatctgactcccaaatattaacgttatcggttcggattagttaaccgtgattgatctgtggttcaagtaaaatagttgtggacaataatccgggtttttgtcagttgtaacatgtccgaggggggttgatgttcttgtgaacagacattgttggtccaaagttatgaaccgcaagcaacgtcatgaagatgactcgcttgcctcccaaaaaaaaaaaaaaaa

SEQ ID NO: 4680 - DNA, 591 bp, Triticum aestivum
  Clone ID: TRIAE-23APR03-CLUSTER3072_2
atttttctcggttcttggcaccttcctgtcttttctagatttcattggatcccatatagggcctccaccacattcatttgccttgatagccgccagctgctcctcttcctcccttctccagatttcttggctccctgggctccctggcttgcccagagattgcaacgaaatcttgcagggctcttctttggtttcttgttcatgctgggagccatggatgagaggatcccgccgccccctttcttccagtactcgccgtccggcgtccattcttcccctcaccaccacaaccccatcaggtcgtctgcctccgagagggagaggtatattgctgagttacttgctgagaggcagaaactagttcctttcctgcaagttcttccattttgtaacaggcttttaaaccaagaaattctgcgggcatcttctttgccacctaacccaaattttgttgaacctgagagattcgattatggtagcccattaagattagctggccaccctatgaacggtcaaccaatggatatggagggatggactggaatgcatgcagagcatatggggatacaccattcaccatccatgggctgg

SEQ ID NO: 4681 - DNA, 1648 bp, Triticum aestivum
  Clone ID: TRIAE-23APR03-CLUSTER3078_1
atctatagaactttcctcgccgcctccgcctccacctcctccccccctcccacctcccagccccaaaacccgggaaaccctcgcctcccctccccgcgcggcgtcctctccccgccgcacgcaccccaccccaatcggagctgaaaaaggaggaggagcagaacaagatcccccagaagaaggcggcggcgtcgaaggccgacgaagcgaagaaggagaaggtcgtggacgacatgccctgcgggcataaagaaaaagaacaaaagaaagaacgtaaagaagtacgttcagtggctccacccgtccggcccgaaccagacccaaccaaccacgaccgccgccaagaagaagaaggaggagaagaaggcgcgcaagaaggcagctaaatgttctattcaggggcgcccgtcagccaggtccacgttcttgtcgaccccaagtcgatctccttgctttgtctgttaggcaaggctggagcatgacagaatgatatgaaatgtctcatgtcactcggcctgtatgtcctatggaggggggagtggattgatgtttacacccacaagcgcgatggagaggaagaaggtacaatggatgactgggatcaggagacccttgagaaagttattgcatcaaaaaacgcagagtaccagcagaataaacctactgatattgtttgcaagcaccttcttgacgctgtggagaagaagcggtgtgggtgggttggggtttgttcatctggcgggttggagtgcccttgccggcatgcccttccgcctggttatgtcctaaagtctcagatgaaagccttactagaggaagagagtaagaaggttgcaattgaagatgagattgaagaccagcgcagaaaggttcaaaccacaacccctatgactacagaattgttcatggaatggaaaaggaggaaggcagaagaaaaggaagctggtctggcggccttgcgggcggatagggctaagaatgaccgtatgagtggtcgtgagttgttcatggccgatgcaagtgtgtttattgatgatgctgaagcatatgaagtttatgaaagacgtgaagagccacaagccaaccaggaacagggcaagaaaagtcaggatgaaggtccaagctcatcaacctctaatggcaaggaggccgacgaggagctggatgatgaagatctagatgatgacgatgacctagaccttgacgaattaaatgaactcgaagcaagcctgtcgagaacttccattcaaattcaagaaccaggtgaggggacatcatcttgaacagggaggtcattgagaagtcgtactccatttttgcgctccaaatcggcctacttgctttattagatacaaaagggtggagcatagatgcaagtggacattagtttcaagtgactatgatcatcatctgttttgagggagcgatgattaactgatgatgcccagtgttaagaacatgacatttgatgtttcctgtgttgccttgttgtctttgtgggagttattttgctactttgtgaataacagcaccaacgtttttctagccttgtgcaaaacctatatggaaaaccttggtgcggacctatttataagtggtggcccaggattgtagtctttttatcccctttgtttaacagaatttgtgg

SEQ ID NO: 4682 - DNA, 2067 bp, Triticum aestivum
  unsure (1)..(2067): unsure at all n locations
  Clone ID: TRIAE-23APR03-CLUSTER3080_1
acatcagacctcgccgcaccctcttcccatcagacctcgccgcaccctttctccccccgcattgccgccgccgccccctgctgccatggcgaaatcatcgtcagcgacggcgacggcgacggcgtcgtgcaccacgaggaggaaatctcactccgggggcctcacctatgcggaggtgcagaccctaagcatggcccccctctcctcgcgctcctatcccaaccaggcccccaccctcctggcgctcctctccccaactgcgtcgctcagcattgcgctcgcgtcgttccttccatccccgtcctttcccgagccgccgctcccctccatgccgtccgcctcggccccagccgccgccgcaggaggtgcgagcgacgaccccgagatcgtgttgggggcgtggctgcggcggtgcttcgatgagttcgttgccgcgctcgtcgagctcagcgtgtccccgcaaagcgacgaggcgatcagggaagtggcgcaaggtgcgttcattcctctcgtgaagttgccacacgatgggcgacgctgtggttcatgctacgaattcaattgatgatgttctagagttgcttgggtccaagtacgctaagtatgctgatgtttgtttttttacttatactagcttagataagatcgccaacagtctgggcagtcaaaccactggctctggaaaagatgtcttgcagaatggggatgacggggctgaagacaggagtgctgtctgtgtacgcaatgtatacaatattttggtgcatattcccgcgttggattttaagaaggaatcaaagtttgatatgtggagtactgttggcctttcttcaaaaggagagaaggacacctctgagggctcctctgctacgcgtataagcaaaaagttaaaattgaagttcaccaaagcatggctggcctttctcaagctaccacttccacttgatgtctacaaggaggtccttgctacacttcatcagaatgttattccttcaatgtcaaacccagccatcttgtgtgatttcttgactacatcatacgacattggcggtgttatcagtgtgatggccttaagtggtctattcatccttatgacacagcatcagcttgaatatccaaaattctatgataagctctatgcattactgactcctgctgtgttcatggcaaaacatcggtcagtgttcttgcaacttctggatgcttgtctgaaatcttcgtatcttcaagcatatcttgtcgcttcatttgcaaaacgattgagtagactcgccctttcagtgccaccagctggagctcttatcatcattgctttaattcataatctgctgcggaggcacccatccattaattttttggttcattgggaagtcgctcaggatgatggagtagctagtctacctaagaagattggcgctgacccttttaacaatgaagagacagaccctgcaaagtctggcgcaatgcgaagttctttgtgggaaatagacacgctgcgccatcactacactcctgcagtttcaagatttgttgcgtcgcttgaaactgatctcactgttcgggccaaaacaatggagatgaagatcacagactttagttcaggctcctatgcaacagttttccgagatgaggcccggcggcggataaaacaagtcccacttgcgttntacagaagtacgccaacatctttatttcaagagtcagattttcctggatggacctttgggtgccagtcgaatatgggggcgcaagctagcgtagaaggaaatgcggtccacacgctagaaaccgttgatgcctcactcgctaaaaggtcacgggtgtagtcgtgtagatctcagtagggccagacagggtgtaacatttcactgcaagtgcagtgttttcggaaatattgtctcaaagcgattttagcagtactccagtgttgtaacncaatatatgagctgaaagtagtgaagtataaaaccatgtgaggaagtttttcttctggctactgccggtntaagatgtaatcgtgaatttttgccaattatttatgtagagtaacaaatgccgtttcagctt

SEQ ID NO: 4683 - DNA, 2170 bp, Triticum aestivum
  Clone ID: TRIAE-23APR03-CLUSTER3089_1
accgccacctccctcccgcctccgtcgcgcgcgcgcccggcggctgcaccgagccaccaccgcgccacatcccgaggcgctcgcccctccccaacgcgcacccggatcccgacgccaccccaccccaactcacacccaccggcacgcgcgccacaaactacacccccgaggctcgcgcagaccggctgtgcatcccccgcctcctccacgcccacgccgacgcgggcggaggggagcggacgcgcgggagcgctggatcccgcggaggatctagaggcggtcaagcagccgtcgcccccccgccccggggcccgcatccgctaccgcacgccctcctcgcccgacctcctcctcctgcccgccgacaagatgcgccggtactcgcagctgccgggcgccggccgccaggacccgctcgccgaccgcgtgcaccgctaccgcggggtgctgctcgtcgtgctcgcgccgctcgccctcgtctcgctcgtgctcctcctcatgccgcgcgcgcccgcggggcactcccagaggccccttgcagcaggggccgcggccgccggggctaagaagtacgccgtcatattcgacgccggcagctccggcagccgcgtccacgtcttctgcttcgacggcaacctggatctggtccacattcgcgccggcctcctcctccgcgccccgccctcgccgggacggcccgcgtacgccctccgcccgcgcggcgcggcccgacccctcgccgccctcattgagaaggcgcgggaagtggttccggccgaattgcgcgaccagacgcctgtcagagttggggcaacagcagggctaagagctttgggagcaggaaatccgaagagatcttgcaagcggttagggatcttcttcgtgaaaagagttcatttaagaaccagccggattgggtcacagttcttgatggaactcaggaaggtgcatatgaatgggttaccattaattatctgttgggaaatctgggaaagacctatgcagacacagttggtgtggttgaccttggcggtggatctgtccaaatggcgtatgctatcccagagaaggatgctgaaaaggctcctaaaccagcagatggtgaagaatcatacgtgaagaagcttttccttaaagggacaacatatcatctttatgtgcacagttatttgcgctatggattgctggctgctagagcagagatcttaaaagctggcaatgccaatggttacagcaactgtgtattggctggacatcaggggcaatacaagtatggtggcaatacatttgaagcatcggctgcaccttctggcagtagtttttcggaatgcagggctgatgtagtgaaagctcttaaagtagatgaagcatgcactcacatgaaatgttcctttggtggcatttggaatggtggtggtggtgctggccagaagaatctctttgtagcgtcgtttttctttgacagggctgccgaggctggtttcattaactccaatgcggctgttgccaaggtcaaaccctcagactttgaggaagctgccaagcgtgcttgcaaattgaacgtgaatgacgcccaatctagctaccctggtgtccagaaggataacgttccatacatttgcatggatcttgtgtaccagtacacactgcttgtggatggatttggtgttgatccccaacaagagatgacattggtaaagaaggttccttacagcgacgcgtttgtggaagctgcgtggccactcggaagtgccatcgaggttgcatcttcatcataggcagcaaccagtgtagcatcagaaacatcaacgtgggagcatgggcatgaccaccgtagaagaagttttggattcaggggtctacatttagccggttctgtgtgtgcttccccctgaagtcgccattttgtcgcccggtcagttcgtccagcctcccctcccatacagtataggttcatacgcaaggacatgaggattacggcaccaattgtactgcagccagacgccattggaaggcgcattattatttttgtactgatgatgagagtagacgagagcattccattctttctgacttccacttgagatgggcataaacacattgttcacttaccgtaaatgcattgttcgttgccatattttaaaaaaaaaaaaaaaaaaaaactcgagac

SEQ ID NO: 4684 - DNA, 1358 bp, Triticum aestivum
  Clone ID: TRIAE-23APR03-CLUSTER309079_1
cacgtgtaactgggtggcaggtctcccacagtagagccgcacgaattcccccaaaccctgaaaaggtcacgccgccgctgcgactccggccgccggcctcccctcctagatggaacctcagcaagagtcgaccgtcgacggccgcaagaggcggcgtagaggaggagtcgggaaacgccagaaggattcttcttgctcacaacaggcacctccgcctgcccctccagtggatgcggcctcccccctggagaagcggcgtcgcaaggccggcgaggccgccgcaatacccaaggggcgcaagcctgcgagcctactcgaaaagatgcgtgcaaggttatctggaggtcatttcagaatgttaaacgagaaactgtacacttgcagtggccaggatgcatttgactactttaaaaacgagcctgagctttttgacgtgtatcatgcaggatatcaagagcagatgtcacattggccagagcagccagttaatgtgataatcaagtggttgaagagtcataacaaatcatggaccgttgctgattttggatgtggcaatgcagcagttgctaaaaacgtgaagaacaaggtcttctccatcgatcttgtttcagatgacccttcagtgattgcttgtgatatggctcataccccattggagccatcctctgtagatgtggcgatattctgtctttctttgatgggaaccaactttccgagttatctacaggaagctaacagagtcctcaagccaagtggttggcttcttattgcggaagtgaggagtaggctagacccgaacaccggaggtgctgatcctgataagttctccgaagccatcagccagcttggcttttcccttgtttcgaaggatgagaagaacaaaatgtttgtcctgttttatttcaggaaaaaggaaaagagcaaggtggcgaaaaacattgaatggccccagttgaaaccttgcttatacaagcggcgatgatctcatcctccactatggtcgctccagacctcttccagagtgtggttaaattaatcgatgtcttgtgctaaactagtcatccttttctactcctatttcttttacctttgggcagctgtatgttcaaagaatcagaccacaccagatatgacctagtaagcgctgtaactcgaggcagtttagaagtgtattattatacagttctgaatctgcttcatatcttctttcctgggccttgtaaacgagtggaggataagttcaacaaagggcattatttctgcgttacttattatatttgatactccctctgtaaagaaatataagatcgtttaactcgaggcatgatttctttgaaaaaaaaaaaaaaaaagcgtat

SEQ ID NO: 4685 - DNA, 1285 bp, Triticum aestivum
  Clone ID: TRIAE-23APR03-CLUSTER30927_1
cgctgtcgcatgttcgcccgtccactctcgtgtcctttctctacctcagccgttgcatcgcagccccagcctcctcttcttcctccctctcaccgttcattcgggtgtagcgatggctgtggcctccatgcttcatgcaccgtctctcctagcagtccagaccttccgcggacagaggaatgctgccgctaaccgctcaccgagagcggcggctttcagagtccgggcagcgaagcttccggccggagtccaggtgccaagcgcgcagcccaccctgagtgagccgttcctggggttcaccaagaccgcggaggtgtggaactccaggccccgcatgattggcctcatcggaccaaactctctgtggtggccgaggttaatcagtgtacagcaatggctgtggcctccatggttcatgcaccgtctctcctggcagtgcagaccttccgcggacagaagaatgctgccgctaaccgctcaccgagagcggcggctttcagagtccgggcggcgaagcttcctgccggagtccgggtgccaagggcgcagcccaagctgagtgagccgttcctggggttcaccaagaccgcggaggtctggaactccagggcctgcatgatgggcctcattgggaccttcatcgtggagctgatattgcacaaaggtgttcttgagataatcggtttcgaagtggggaaaggcctcgatattccactgtagtctgctctccctccttgcctataagatgttgatgctcgggagataagagccacaagaaagcgttaccaattatgcgcaaaaaaaaaaccgttaccaatggctatgctatgcatcatagcaaatatataatggagctctgagcatttcattgtgcttgctatttttcatttttacactcgtcttaccaaagtgatcgacagagtgatcttcaacacttgacaatattctgctgagatgggtgatagtttgtaccgttaatatgaaaacttgttcgttgttttgaaaagaaaaactgaagttgtccatgttttgaaaaaaaaaaaaaaaaagaaaaaaaaaaaaaactatcgatacgccacctccaaggggggccggtacccattcgcctaagtgagtcgataccgcgctcactggcgcgttttacacggcggactggaaaaccctgcgtacccacttatcgcttgagcaatccccttcgcagctgggtatagcgagaggccgcacgatgcccttccacagtgcgcagctgatggcgatggaaattgtagcgtatatttgttaaatc

SEQ ID NO: 4686 - DNA, 1043 bp, Triticum aestivum
  Clone ID: TRIAE-23APR03-CLUSTER309596_1
aaacagcactcatctcaagtctcaacgacaacgagcctccacacgcgcacttctagacgtgggtgtcatggcgggtccggcggagaggaagatgaaggtgtgggagctggtgctgcggtgcctcgtcggcggcttcggcgcggtggcggcggcgctggtggtcaccgacagccagaccaggaccttcttctccctcgagcggagggccaagtacaccgacatgaaggctctggtgctcctggtggccgccaacggcgctgccgtcgtgtacagtctactgcaggcggcgcgctgtgccgtggcgatggcgaggggaggcggcgcgctggtcatgagcagaagggtgctcgcctggtcggtcttctccggcgaccagctgctggcgtacgcgatgctggccgcgacggcgggcggcgctgcagtcgtcgctgctcgggaagctcgggcagccggagctgcagtggatggggatctgcggcctctacggcgccttctgtaggcaggtcggcgcgggcatcgcgtgcgccgtcgtcgccggactcgccgccgtgctcctcgcatccttctccgcgttcaacctgttccgcctctacggcggcaacaaggggagcaatagtactagaaacggcgcaacgtggtactaggatagaaagtcaagtcagtgaagataaaatcgatctcagctacttcagatttcagattgtagagtggatcggtgaatcttttttaacttttcttggtgtgactcaacaagctggactgaagacatcgatcctaaagcattgcggctcctatgtcaggacttcagatcttggtgttctgcaccaaaatacgtagttccctttccaattacaatcaaaatatggtgttggcctgaagctggtgtatatgtgaaagatcccccttttggtagagcacacactagcgcactaccgcaaggcacgcgtgctggtagaccactgacccttcgggaaaagaagatcatgatgtaaatcgcagcgaaaggtttaatacgcaacattgtgtatcatttcattgatagg

SEQ ID NO: 4687 - DNA, 1408 bp, Triticum aestivum
  unsure (1)..(1408): unsure at all n locations
  Clone ID: TRIAE-23APR03-CLUSTER31066_1
gcatagggaagggacacgaacatcaggacgggaccaggcggacgaggcagtgtgaccgacagggggacggttccacccaccccccgggcgagccagggcaaacagagaggacggacggaagaagtaagttccaggcagaggagacagagtgaccgacggagggaaggttccacctacccaccgagcgatcgaccgggcgggcggcgatccatggcggcgaacgggcatcagatccagccggcggaggaggcgatgaagctcatcatcgacaccgatcccggcatagacgacagcgtggcgatcatgatggcgttccaagcgccgggcgtggaggtcctagggctcaccaccatcttcggcaactgcaccaccgcatacgccacccgcaacgccttgatactgtgtgagaaggcaggccgccccgacgtgccggtggcggagggcagcgccgagcctctcaagggagggaagccgcaagttgccgactttgttcacggatccgatggcctcgggaacgtatcagttcctgaacctaccaccaagaaagcagagcaaaccgccgcagagtttctggtcgacaaggtgtcgcagttccccggggaggtctcggtgctcgccttgggccctctgaccaacctcgcattggccatcaagatggacccctcctttgtgagcaaggtgaagaagatagtggtgctgggtggagccttctttgcagcagggaatgccaccccttcagccgaggcaaacatccacagcgacccagaggcggcggacatggtgttcacgtcgggcgcggacatcgccgtggtcggcctcaacatcaccacccaggtgagcttcacggaggcggacctgtcggagctgaggaggtccgggggcaagcaggcgcagttcctctgcgacatctgcaagttctacagcgactggcacctccactcgtacggcgaccccgccgtgttcctgcacgacccggtgagcctcgcggcgctggtccggccggagctcttcacgttcaggaagggcgtggtgcgggtggagacccagggcatctgcagaggccacacctccatggacatggggctcaagaagttcaagtcggagaacgcgtggtcgggctacacgcccatctcggtggcgtggacggtggacaaggccaaggtggtcgccttcgtcaaggagctcctcaaaaattaatcaggagttcatgatctgtatatctggtcatcaaatgatttgaaaccgtagagatccgtcggtcgatcgacccgtaatttatgtgtaccccattctgacgcacttcatgcagacacattgtctcgtggaattattgaactgctcgtcgtgaattgtcatgatggaacccaaaaaaaaaaaaaaaaactgggtatccnccaaaaaaaaaaaa

SEQ ID NO: 4688 - DNA, 2141 bp, Triticum aestivum
  Clone ID: TRIAE-23APR03-CLUSTER3106_1
gctgtcttttttttttggataaacaagttactgctttactctttcgtctctaattacaccccagggagggtccgccgggtcaagcattcatccatgcatgtgcgccacgcagactcggccaggacaaccatgcatatatgcatgtgctccaagcctacaataactttccgcccccgctgcagtctcccgtgagaggtagtctggaacctgacgcataactgattggctaaaatgattccacagaaggatgcagacactccctgctccctccctcactccccacgcgcgggccacggcgaggcgagacggacggagagcccgggcgacgtcctcttgcgggcgttggttcggtggctggaggccctgggcaacgtcgtctcgacgttccgtcttttttttttttttgcataaacaggctactgctttactcattcatctttaattacaggccagggagggtcggccaggaccagcatacatgcatgcatgtgctgcacgcatactggagtactgctactctgtgtatgtttgtgtacatatatagtataataacttactactccctccgtaaactaatataagagggagtaataatcatctagctgaaatgatttcacaaaatgaatcaatcgatcgatgctgaccctctcaatcccctccctctctttccacgagaaggagaaggcgaagcaagaagaacagaaagaatgggcaaccaactcatccatgagttggatcagtggatgcatatcccgggcaccttccactggaacttgccggccctcttgtcgggcaccggcgccgccgtgtagttcctccacacgtccagcacattcctcaaatcatgcagcttggccccgagcccgacgcagcagttggcgtgcagggtgcagatcttgttgaggtccctgctgagctgacagaagccgctgatgtaggtggtgtcgaggaactggatggcgacgccgaggcggtccgtcatgtcgtgcttgatgaggttgaacacgtcctgctcgtgcttgccgaagaagcggtagcggccggcctgccagtggcggtagaactcgatggtcttgttgcaggagcgcacgaagaggaagccgccgttggggaagttgccgaggctgtaggggtcccccatgaagacgtcgctggagatggcgatgtccgcccccatggagatgtgcttgaacgggtcacggaaccacatcacgtccacgtccgtgaagaggaagttgtatccgagctggaggatggtctgctggaacttgttgcggccccacatcatctcgaggtagtccttgctcatgaagaacttctcgccgcggtagtcgacgccggtcgtcctgagaaagtagcagtgcgggtgcacgagctggcaccccgcgtacgccgccgggtccatggtgacgatgacgaggtggtcgagcaggcgcgccacgccgccctccccggtgcggaagctctcgaagaagaggtccagcagcgagcccggcttggtccacgccgcgttgatctgcgtcatgatcaccgtccggtccgccgtcgccgcccgcgccagcacctcctccaggtccccgtacggcgacgcctggacgggggcgggtgccggagcggcgacgacgacggagaggttgcgggcggcgtcggcgtcgtcggcgacggagcgcaggtggtggtggtgctgggcggcggtgccgttgttgtggctccatgcggcgacgtcgacgaggctgcggccggggctggcggacatgaagaagaggacgcagacggtggccacggcggcgcccagcaggaaggacaccatggggctaatgttgctgcggggctagaatctagagagcctctctctcttgggtggcggtggacggagggagcgggcggggaattgggcttgaagaagcaaggaagcgggggcttttaagagggaggtggtggaggatggcgcgtcgtggcgggcggcttagagacgacagatcatcaacttattcccactgattgagcctgcctgattaccagagcccgagccggtggtgtcttatttctctgcgggtgtgggtgttaatggagcaggttatggctactggtcacggctttggatgggctcatgtagttggaacgggaggggggaaaggagt

SEQ ID NO: 4689 - DNA, 1090 bp, Triticum aestivum
  unsure (1)..(1090): unsure at all n locations
  Clone ID: TRIAE-23APR03-CLUSTER31151_1
agattggattatcggggctgcgagagggagagggtcggagcggcggcggcggcgagatgtcggcgaagaaggggctctcgagcacgctgcggaacctcaagtttatgcagcgggcggcggtggcgcagaagattgaggacaaggccgatgtggaggtggaggaggcggcggccgaggtggtgatgacgccggcggccaacggagggggtgtcggctcgtcggtccaggtcgccaggaagtgtgtagttgtcatggagggtaatccgcttccaggagctgtaaagggtcgaatgtcattccaaaatttcaatccatccattgataaactaaatgacgaggcaagtggtcgcccaacacaatcagcttcacctagtaattctcaacaagacagtgcaaataccagcagagtggatgatatatcagcatcaagatttagaagcttcaatgttgatagttcagaaagcatatctctgaacgagttgaagagaaaagagcctgagctggagatggaaacaccaccatcgcgcaagctcccaaagacggccggccagagcgtggacggccagccgtcttcgcagagcaatggtcgtgggtctggcaagtcgaacaagcatgaaaagcttgacttcaatcttctcagaaaacggaaatcaaaatgaggtccgggttagcatcagccaaggctagctccgtgtactcttgtgtcgccatttctaccctgtacctgatcagcctttgtgcgttgttccctgaattatttatgccgtagcaggtagccaggtaaaaccggcagtggtatatctgttgttaacttagttggaaggtttactactgctttacatatcttattagttggggaggttctgtgttcttcaacacttttctctcttgtttcactgcattgctattacttcctgtaagatgtagtaagattctgcaacaccagcgagaatttcaaagtcataggaatgctttttgaccaaaaaaaaaaaaaaagaggatcgacgataccgtagcccgcgtaaggaagatgatgggaggatatgtgggaaaggggagngngngtngggnnggggnngagggggggggg

SEQ ID NO: 4690 - DNA, 1782 bp, Triticum aestivum
  Clone ID: TRIAE-23APR03-CLUSTER31197_1
aaaaatttatttttgttctccttgcttcatgctttatcgggggatggaggcctccgtggctgtccccatctggagcgattcgtttagccccccgcacacgcacatacattcatgagaaagagaaagagaaagaattcacgcaggggatggaggggagagagaagcaaacggggaagaggacggacgcggggggccggacctggcgcccaacgggggaagaggcctaggggggccagcaggaagtgcagctgcccgtggatctttccgagcctcttcccccgccgcctcaaccaattcaccctcagccaccgcttcgccatcgccggccccaacggcaaacggaggaactcggccgagcgaccgacggcgaccagccccgccgtggcaacgaaaacagttcagcaacaacagcggccggtcaataaggagggaggaaccctgccagagcatgcatgagtaccagagaggccaccacctgcggactagcaggcggccacagaggcatacgaatccacggctccacgcatacggtgctcgtcccgcccaccatcgagtccggcggcagcaaccccaacccgcaggagtggcgcgtgctgccctactcccggaagcacatgtccggcatcaaggagatcaccgtgcgcgagctgcccacggcggccgacgcgccccgctgcgccgtcacctcgcaggtccccgcgctcgtattcgccatgggcggcctcacgggcaactactggcacgacttcagcgacgtcatgatcccgctctacctccaggcgtcccgcttcgacggcgaggtgcagctcgtggtcaccaacatccagccatggtacgccggcaagtaccgccacatcatcgcccggctctcccggtacgacgtcgtggacatggacaaggacgaccaggtgcgctgcttccccagcgccgtcgtcggcatccgcatgcacaaggagttcagcatcgaccccaccaaggagcccacgggccactccatgcccgtccgcccacgcgtccgcccccgcgtccgcgcgctcccgcgcgccgcgcccatgcgggtcaccgccagacttataagcgacaagaagccgaggatgatgatcatctcgcggcgccacccgaggaagctggtgaacatcgcggaggtggtggcgctcgccaagcggatcgggttcgaggtggtgattggggacccgccgttcaacgtggacgtgggcgacttcgcgcgcgaggtgaacgccgccgacgtgctcatgggggtgcacggcgccggcctcaccaactcgctcttcctgccgactggggccgtgttcatccaggtgaaccccttcggcaagatggagcacatcggggaggtggacttcgggacgccggcggtggacatggggctcaagtacatggcctactcgtgcggcatggaggagagcacgctggtggacacgctggggcgcgaccacccggccgtcaaggacccggagtcgatccaccgcagcgggtggagcaaggtggcggagtactacctcggcaagcaggacgtgaagctcgacctccagcggttcgagcccgtgctcatcaaggccatggccatgctcagagagtagccgctccctccgatccagcttgcagcccacacacattggttgctgatacgcactagcatagagcagttccatttcttctaatttattcctattaatttacatatttttttgtggatgaactgatcaaaaggtttatacagcaagtatatatgtgttccactgatccaaaaaaaaaaaaaaa

SEQ ID NO: 4691 - DNA, 2156 bp, Triticum aestivum
  Clone ID: TRIAE-23APR03-CLUSTER31204_1
ccccacaggacctcctattctgccggcggcggtcggtcgctgcaggctgcatctagtttggtcctagcgtagccgcggaggacctccaggcggcggggcaccttcgtttcgtcgctctctcctctgcatcattccattcctggagctccaagtcctcatctgctcccgcccaccacggcaatggtcatgaatttggacgagccgcttgccgcggagaagggcgaggtggcgctgcagcagctgcggcgcgccgacccgtccgtctacctctccccgtccgcggacctcgccgccgccgcccgggcggctctgaagcacttccactcgtcgctcgccgttgtcgccgccgtgcagccgccgcccctccccaacctcctcgccggccccaacttcgacgccgagcagatttggtcccagagcgagctgctctcccgccccctcctcccccacctccaccgccagctccgccgcctcgagcaccaaccgcctgcgcagccgttggctactcctccgccgtccaagcccgctgaagccgtggagggcccgtcagacgaggaggaggatggagagggtgacgaatcggaggaggaggatgagggtggcctggaggacacggatgacgagttggaatcggaggagggggaggatgaagaaacggaggagctaggggcgaagaaagggaacggggtggaggacaggttcctgaagatgaaggacctggaaaagtttatggaggagggggaggagcaggagtacggtgggggttccaagggaggagagaagaagaaggcaagtgtgaacttgatggaggacgatagtgatgaggaggatgtggatgaagatgatgggggtgatgatgaagatgacgatttggatttggaagattttgagtctgatgatgaagagggtgtggggaaatctggcggagatataaggtatgaggatttttttgaggaaagcagtaagcaacaagtcaagaagagaaatggtttcacaaagaaagtccacttcaaggatgaattgcatgaaatggaagtggatgacattgagaaggatgatgtaaatgatggtccagcattagaggatgaacaaggtctttcaactcatgaaaaggggctcttgaagatgcgtaaccaaatagacctaatggagaaagctagtcttgaacccagtaaatggatcatgcagggagaggttgatgcttccaggaggcccaaaaatagtgccctggaagtggatcttgattttgagcataatgtaagacctgccccagtaatcacggaggaagtcacagcttctctcgaagagatgataaagaaaagaattgcggagggtcattttgatgatgttgaaaagccttcaaccttgccgtataaagttccaaagcagcaaaaggagatggatgaaaacaagagcaaaaagggtcttgctgaacagtatgaggatgagtttaaggaaaaaactggcattgcacctgccacacttgctatttcagatgaactgaagaatgaggcaaatgatttatttaagaggatatgcttgaagttggatgcgctctctcatttccactttgccccaaagccggtcattgaggatatgtccatacaagttaatatacctgctctagcaatggaagaggttgcacctgtagctgtttcagatgccgcaatgctcgctcccgaagaagtttttgaagggaaaggggatattaaagaagacgtggagcttacacaagctgagcgcaaaagaagaagagccaacaagaagaggagatatgcagaatcgcacaaggagaggccagccaagctgcggaaagagaactcatcaaatatataggaagctgctgcttacatgctatatgtattgcaaacctttggagttggttggagggaggaccgccaccaacagtgtaatgcctttcgtgatctgatgcctggcctgcaatttcaaggctctgatgtagccagttttcgagctttcatgcagtgtaaaagcatttccttttagaatttctcacagggagtgagtgtcttctcgagtagaatagaattgaactcttgcgagtataagagtgtcatgtacttcctccgttccgaaatatttgtctttctagtcatttcaaatggattaccacataaaaaaaaaaaaaaaaaagc

SEQ ID NO: 4692 - DNA, 1521 bp, Triticum aestivum
  Clone ID: TRIAE-23APR03-CLUSTER3136_1
ccaacaaacaactacgtctacctgggccgctaggcctcgtccccgaacacaacaaccgcggctcggcgcaaaactcttggcaggcgcacgctctggccgccgccgccgacgacgagcacgacatctcaggtgaggaagggaggcgggaatggcggatcagaaggtggctcagttggggcctggagctgcgtgctgcggctggaaccactgcggccggcgcctagccgccggcgccgtcgatgggtccgtttccgtctacgattctcagccgtctccctcctccaagtggcaggcccatgagcatgccatagtggctgtcgtctggcttcctccggactacggtgatgctatagcttgtgtctgtgctgacggtacactgtctttgtgggaggagattgctgaagatgatcaacttccaatctggagaaaatgtaaagtctttgagggtggcagttcccacatcctaaatgtacagtttggtttgctgctgtcaagtctgaaaatggttattgcatactcagatggtcaagtgaaagtctatgaacttttggattcgttggaattggacaagtggcagcttcaggcagagctacagaatattaccgatcctgtttccagaattgggaagccagcatgcatttctgcatcaattgcatggagtccaagaagaggtgaaggccagcaggctagttttgctattggtttcaattcggattctccaaactttaactcttgcaagatttgggagtttgaagaagctcaccagcgctggcttccacttattgaacttggttcaccggaggataagggggagagagtacatgctctagcatgggctcctaacattggcagaccatatgagatgatagcagttgcaacctgcaaaggcattgcagtgtggcatgtaggcttcaaccctgaatctgacggcagactgtcaacagagaatgttgctgtacttcccagccacaatggggaggtatggcaactggaatgggacatgggcggtatgacgctcgcatcgaccggagtggatggcatggttaggctatggcaagccaacttaaatggagtttggcatgagcaggctgtgcttgactgcaatgggtcacaccagtaagggctgttcacaacaaataggatcccaaattgcaggcacaaagcaaacttaaatgccttaatagctctacaacatgaagataggatcccaaattgtggttgctatctgttcacaattctgcaaggtttctttatgttgtcttgtgtggaaggtatagcgcatgcatggttggctttgccctgacaaaactaggctcctcaaccatgaatgcatgatgtacctgttatccttatctggttgatgatgtagctgttctttatggccatgtgatggaaaaaaaatggttcacagttgatgatgtatctgttctcttgtaaacaatttagcctgctgactaactttattttattcaactgtcaacaaatcagttcacagtttccttaaaaaaaaaaaaaaaaatt

SEQ ID NO: 4693 - DNA, 911 bp, Triticum aestivum
  Clone ID: TRIAE-23APR03-CLUSTER3146_1
ttttttaagaatcaggtgaggggatcctggaagactgtctcatagaagaaaggccgaggaaaggtgaggagaaaatcccaaggcaggaaagccgaggaacggtgaggtcaaaatcccgagcgaacagaaaggcgtgacaggagagatggcggcggccgcgctacgtccggcgatcctccgccacatccggctctcgcccgccacggcggtccctctcgccgccgccgccgccgccggccggcccctcgccctcgctccgtggctcgcgccgccaatgtcctcccacgacgcccacctcaccccgcgacgaggtcgtcgcccgcgctcctgcgacgtcctcaagtgccaccccaaggtcggacccctccaaggtgacccccgcaggctcacttgcgagaaggatctggggctggacagcctgggacacggtggagggtggtgatggcgatcgaggaaggagttcaagctcgagatccccgacttggaggctgacaagatcaactcgctgccgctcgccatcgagtacgtcgccaaccaccccatggccggctgagtgcccacccttccgattgccgaccgcgccggggtgaggccttttcttgtttctgtttcgggatgatgaataattgactggagttgttcagggaaactggtacctggtgctccgcattgtcggtcgctattggtcttggatgcaactgtaacattctgcggtgtcgctgatgaactagccttgttggccgcacgcttgctttttgttgtagtatatctgtttaatccatgtttaaactaaattggaatctacccatgtttttcgttcactcctcataaccattgtaccccctcctttcacaaatataacagttttgggatattctaaaaaaaaaaaaaaaaaaagtcgacgcggccgc

SEQ ID NO: 4694 - DNA, 756 bp, Triticum aestivum
  Clone ID: TRIAE-23APR03-CLUSTER3146_2
gacaaaaatcacgtgaggggatccttggagacgctctcatagcagagaggccgacgaacggtgaggtcaaaatcccgagcgaagagagaggcgggcaggaaagatggcggcggccgcactgcgtccggcgatcctccgccacatccgactctcgcccgccacggcggcccctctcgccgccgccgccgcggccggccggcccctcgccctcgcgccgtggctcgcgcggccaatgtcctcacacgacgcccacctcacccgcgacgaggtcgtcggccgcgtcctcgacgtcctcaagtgccaccccaaggtcgagccctccaaggtgacccccgaggcgcacttcgagaaggatctggggctggacagcctggacacggtggaggtggtgatggcgatcgaggaagagttcaagctcgagatccccgacttggaggctgacaagatcaactcgcttccgctcgccatcgagtatgtcgccaaccaccccatggccggctgagtgcccacccttccgattgccgaccgtgccagggtgaggcattttctcgtttctgtttggggatgatgaataattgcctggagttgttcaggaaaactggtccctggtgctccgcaatgtgtcggtcgctattggtcttggatgcaactgtaacattccgcagtgtcgctgatgaactggccttgttggtcgcacgcttgtttttgtagtatatctgtttaatccaaattggaatctacccatgttttttgttc

SEQ ID NO: 4695 - DNA, 1449 bp, Triticum aestivum
  Clone ID: TRIAE-23APR03-CLUSTER314704_1
acaaaggttccttttgggattgatctctttgaggcattgtgatgtactaataacagttcagtttccaggattcgtgtgattcagttgaacccctattctcatcgccaggataacgaaagaagatctgggaataatgaatcgccgttttgtgaatctgctggtcagtaaatcgggcgactgccgcccggccttcaacctgcatcgcatcaatccggcgagcttattctgccctactagatctctaaaaccagcagatccagcagcaacaaagaagaagactctgtctcggctgcctcctgcggccatatccttcgaattgccctgcccgtggaagaagttcgggtggatggatttcatggcccgcaagaacgacatcattgctgtcgaccatgagggccacaccctcctctacaacggcacggttggcgccctctgcgccatgaacaggatggtagacccctgtcacagctcaatctccgtcgttgttggggacgagctgtatgccatggccatcaaccgtggcctgctcccaaggtggactattttaaggctcttacctatggccgctcgttcggccactgccagccagaggactggcactggcgccctctccagccgcctccccttgaatacgaccacgagaaggatcaacgctacaaccccactgcggcgcctgtgacacacccctgtgctattggcgcatacacggttgttcgtgattcacagatctggatatctacaacgggcgctggcacgtactcctttgacacaactagcggcgtgtggagaaagattggcgagtgggctctgccgttcaaaggtcacgccaagtatgttcctgagcacggtctctggtttggcttctcagacagtgatggtcagctctgtgcttctgacctcgagcagatgccgccggtgcagcagaatgcgtgtgaagacctagtccttcctgtgctggaaggttggaatccaacggggtcgcacctcttgccgttgggatctggtaagttatgcatcgtgagcttcttccagagaattaagcgggtgaggccgcgtccgtcgacgtgctattggagcttcaaaattgagaacgctgctgttcttgctggtgtggaagttgttgccgcaggtccaggaatcctccgtatggtcaagctcaagtccaaatgttatcacttcggagatgataacgtgaagctgctgtgatattgcaggcatgccatccttagatttgaaggccctggtcttaaaaaaaagagaatcttccgggcgagtctctgtattgtgatcctactttgtctgtggatgtggtctgtttgttgcgagttacttactctttatttctatatatgtgtatatagctgtgtgcgcccgcagcagcgctggaatctgggttaaaccttgactgattgtaacattacctccgttcgcccttaacagcgctgtcgt

SEQ ID NO: 4696 - DNA, 1227 bp, Triticum aestivum
  unsure (1)..(1227): unsure at all n locations
  Clone ID: TRIAE-23APR03-CLUSTER3149_1
agaggagaagacctntggtacgcaagggaccagttcataccgatatggaggtcggtgcttagtgcgcggtatatcacgagaatcattccatcctatgtgccgaagaaagagtttgcagatcttcagcctcaaactcaaatccagcttggcttgttggagagaaggtatattttctagtatcccctctcacttattctctcgccccatttttccttctcctcccacaccccgcagccagtgtgaagcctccaaagtcgctggcgcccccacgttccaccggagcgaggcgccgccgccggatctcgtcccctccccctccccctttgtgtgtctctcgctcttattttctcatctcggtctaatctaattctattatatgcatgcaggccgatgtgaagccaagtcgctggagcagagatctggagcgcctcgccagatctctcctctgcacccctgccagccgcgtcaggctccgcctcgctactggcggtctctccccggcaagcccatcggccggtgagagtagctcactctcgatccccttgtgctcgcgcgccaccaggggaggatgaaccccttgcactcgcgccgacgacctctccgatcggcaccgtgcctcgtcccgagccatcggggccgagcggctgtagcgggccagaggcagcgcgtccggcagcgacgacctctccgatcgatcctcctgcatcacgcccgcgcaagcaactgccgatcaaccagaaggggatttgggcccgacgtgtcaactctcctgaagacgctggagcgagtcatgtgacgatcgagcactggccagactgtataatagttttacttgttagttgaagcttctggacacactctagatgggaatggaaggagttgaggcacccgatcatcccctggaagatttcagttatctactgtatttcggtgttgggggtcgttagcatgaactgaactaatgcttaataggttgtgcttcagccatgaatgcttgatcaattgccatgatcagtgatggaactgtgcttggatgtcttgactgtcactgtctatctaaaacagctgttagttgtttaagtggaaatatgagtatgtttctgaggctaaacatgacctgataagttgtgaaacatatgcccgttttagcttgaaccttgactatatgtactccctgtgtttgaacagtgaaatctttaaaaggctttcgaaaaaaaaaaaaaaaaa

SEQ ID NO: 4697 - DNA, 1846 bp, Triticum aestivum
  Clone ID: TRIAE-23APR03-CLUSTER3150_1
ctgtttcgatacggcctcgccatttcgtcgaaattggttgggcaaactctgtttcgacacagcctcgccatttcgtcgaacacgtggtagtgcgcctcaccggtccttccgcaacgggctacttcctggccgccgcccttccgcaatggcctccttccgcgccgcccgccctctccactcccctcccgcccctccccgccccctcccttccccttccccggctccccctggacccgctgctctctgatggctgttccccgtcgccccgcccccacccccccgtcccctcccccctccgaaggccgcagccgccccctccgacaaggccggcgcttccggggccgcccgttccggcgctggaggtgcctcgcgggctggccaggcaggtgccgcggggggtcggcgggctgggggcgcggggtacggggaggagcatcagaaggtcgtccgcgcgtcgctgctcgacgggccgcggccgggatggagggtgcgggccacgatggcaggtgcgagggatgcgtccgtgtctccccacagggaggaggctgtcgctaggttgagtttttcatggatgactcccctccacaacccctggatcgcattgatgctggtgaggagagcttctggtacctgctgctcactgggagactatctagtcttgtgcggatgaggcatgagatggagacaccttacatatcaaagtggcctcaagcgctgagcattcagtcccaaccagcaaatgtctcaacaagcttaaagcagagagcagtccttgttgatgagatttggcatgctgctggagatgctggatcagatattgattggtatgtgaaacgtactgtgcttggtggcatctactcagcctcagaggtgtacatgttaacagataattctccagagtttcacgacacatggacatttgtgaatcgccgcatcaaagatgctcttgatttgcagaaatcttataaggaggtcgcttatctaaccgaaaccctgggagcagggatcggtggctccatacagggcgtcctgaacaaggttttccagaaatgaaaaaacttgcctttgcaggctgccttctcggcatttccgccaccactttcttatgtcacgttaagattctatgacattgtatatagtactctcttttacaaacaaacgctgttagggtagccaagaagctatttagtcggtggtcagaggtcagaggtcagttgagttgttgattagtcgtcattgcgcaattctgctacaggttggcgaaaaatgtgtgaactctacagactctagtccatgtgtcatgtgcgagttgctgcaaacagaacaagacactcgtggctttgcatggacacgacttggcattccagggtagatcgacacaatttcctgaagcagtgccgcaattgtgccaaaagagtgccagagaagcggggccaggtcttgaaatatctctcgtttcttggatagctcgaggagggcgttctcgcgcagctcgcggtcgcagaggtcgagcaccagctgctccgccgacgccatcttcctgggctcctgcgccgccgaggcagcgccgccggcgcctccaccgattgaggagggagacggcggcgaggcccctgcgaaggaggagggctcggaggcggaagactgcaggttcgccattacgaacgaatcagttcgatcgactccgggaagaatccgctccaccagaccctagcgcgcggagagggaggaagagggggggaggcagcagcggcggccgcctcgccgcgccggtgacctgagggggaagggaggtgggggaaggaagagagaccacggcgaggggatctctctctctctatctctg

SEQ ID NO: 4698 - DNA, 1002 bp, Triticum aestivum
  Clone ID: TRIAE-23APR03-CLUSTER31570_1
gcacaagcaccgctacacctcgcaaaccccgcccaaaacctcgcaaaaccctccgccctacccgctccccgctccctcgctaaacctcgcaaaaccctccgccccccgctccccactccctcgccgtacaccaccgccgaagagagcgcggagagacccaccccacggcgatgtcgacggcggcggctacggtgttccgcgggtgccgggccctcatgtccccggcggcggcggcggcaaaggggggcaagaagaccgcatcggcggcggcggcggcggcgaaggggggcaagaagcccgcgccggcggcccgcgaagcccataggcggccaagaagccggtggatccgaacaatctccgcgggatcatgcggccggtgccggtctcggacgccctgcgcaagttcggcggcgccgctcacatctcccgctccggcgtactcaagatcgtctgggactacatcaaggccaatgacctccagaacccactgaacaagagggagatcatctgcgacgagaagctcaaaaccatctttccagggagggacacggttcatatgatggaggtcaccaagctcttgtcccctcatttcgtgaagagtatctaaggctgtcgagttgggggccaacgctggtgctttctgcccagggccagcgttggaatggaaggcttcttttgcgatccctgtccaagtcaaggttctactaggtagttaagttaatacggagttcagacttcagactttgtttgccatttaagggttgggggctcggtgatgcatgtaagaaggattcctcgtgttttgtggttctctcgtgccatcctgcgagggcacacccacatgcacatgcatgttgacgtggttcggtgtttttagtctgttaattccactttgcccttgtcatgtatatcatgcttctctcttggttgcagtggatggtgaatttgtgataagcaggttgtggcaaaaaaaaaaaaaaaagcattagttcaaaaaaaaaa

SEQ ID NO: 4699 - DNA, 1017 bp, Triticum aestivum
  Clone ID: TRIAE-23APR03-CLUSTER315_3
atatatcacaagaagccgatccactccaagcacagtcgagcagaagcctaaagcgagtgagatttcccccttcccgttgattccaggtcgtgttccaagaaaccaaaatggcctccaaccagaaccaggccagctaccacgccggcgagaccaaggcccgcaacgaggagaagaccgggcaggtgatgggcgcgaccaaggacaaggcggggcagaccacggaggccacgaagcagaaggccggcgagaccacggaggccacgaagcagaaggccgccgagaccacggaggcggccaagcagaaggccagcgagacggccgaggccaccaagcagaaggccgccgaggccaaggacaagacggcgcagacggcgcaggcggccaaggagaagacgtacgagacggcgcagtcggccaaggagcgcgccgcccagggcaaggaccagaccgccagcaccctcggcgagaagacggaggcggccaagcagaaggccgccgagaccacggaggcggccaggcagaaggccgccgaggcgaccgaggcggccaagcagaaggcgtcggagacggcgcagtacaccaaggagtccgccgtcgccggcaaggacaagaccggcagcgtcctccagcaggcaggggagacggtggtgaacgccgtggtgggcgccaaggacgccgtggccaacacgctgggcatgggcggggacaacaccatcaccaccaaggacaacaccaccggcgccaccaccaaggacaccaccaccaccaccaggaatcactagacgcatgtgttggcgcttaatttgctttgctttagtagtgtttggtcgttcgcgggccttctacatatttgtatgtttccactctttcgtgatttcagctcatttggtgtaaaagtttgccttcgatttgatgtactcctcgtgtccggttctgtattagtacgagttatggtccatatactttggtgtaaatggatatcgaggacactcgaaggcggcaataaagtgtaatttc

SEQ ID NO: 4700 - DNA, 1438 bp, Triticum aestivum
  Clone ID: TRIAE-23APR03-CLUSTER31601_1
aatgggagggcgctgcttcctgaacctcctcccctgctccacgaccccctgcaaagacagcgtcggcgtcggcgtcggcacgcccggttcgtcgtcatgccgccactccgtccaccaccaccgcgccagagtgcgcggcccgaggagaaacgcggccgccagggtgtcctgctccgccgccgccgcgcaggcgccgccgtcgcagagcacaatcaaggtggtcatcgtcggcgcgaccaaggagatggggagggcggcgatcgcggcggtgagcagggcgcgggggatggagctcgcgggcgccattgacacccagtgcatcgggatggatgcaggagagctaagcggcatggaagaagccctggagatcccggtgctcaatgacctcaccatggtcctcggctccatagcacagacaagagcaactgttgtggttgttgacttcagtgaaccttcatccgtctatgacaatgtcaagcaggcagcagcatttggcttaagcagtgtcgtatacgttccgaaaatcgagatggatacagtaactgaactgtcagcattctgcgacaaggcaagcatgggttgcctggtcgcgccaacgctgtcaatcggcttgctcatgatccggcaccctgcaaaccacaccgcgggccacagcacccaccaaaagccgcgcccactctggcctagcccatctcccccacgatcgccagccccgatccggggggcccccagcccatctgctcttggtcagatctaccccagacaagatatggattccgatgaatcccagcaagggggtcaggtacttggagaagatggggtgcgtgtgcacagcatggttcttccagggcttgcgtcgagcacgtcggtcgttttgtcgggccccggagaggtttacaccttgaagcatgatgttacagacatccagagcctaatgccaggactgattctggcaatacggaaggtgatacgcctgaagaacttgatttatggtctggagaagttcttgtaggaaatgatcaagtcacattcacatatcatgagaactagaggtcattttttcgaggaagagaactacagtttttgatcttccagctgttcaccataagagataaataggattaaatcaattccttggctcataatcagataagtgccaacgacaaagcggatccgagacctaagaacgcgatgcagagtttcgaaaagaatggctccatgcataagatgacacttctgatagaggtctagacaatgagcaagctgatgacaagctctcatgtttatacctggtggcttactatactgttagaggctttttcagaaccatactcatagagataaatgataccggtcacgctatgatgcgggtccttttccggtgcaccaactttttttgaaatgctagtgcaccctaaaaaaaaaaaaaaaaaaaaaa

SEQ ID NO: 4701 - DNA, 2293 bp, Triticum aestivum
  unsure (1)..(2293): unsure at all n locations
  Clone ID: TRIAE-23APR03-CLUSTER3163_1
ctggctagcatagcgtatcatagctgtgcgtgtgcgtgccgttttgtttttgtttttgctgcgctcgccgttgatatccgcgtcgttcgttcgaaaagttgtttcgtcacgggcttttctccccagcccagtcagtcctgcagcgccgcgagggagaggagagatcgccggagggacggaggggatggcggcgggggcggcggcgagcttcgggctgatggacaaggcctacttcggggggcggggcgagatcctcagctgggtcaatgccacgctgcagctttccctcaacaaggtcgaggaggcggcgtcgggggcggtgcagtgccgcttctggcaatatgtttcccctgggttggtccgatgcacaaggtggaatttcgatgccaagacggagtacgaattatccagaacttacaagattctccaggatgtgttcaacaagctgcggataggcaagaatattgaggtaaacaaacttgttaaaggattccccttggccagcttcgatttttctcaagtgttgaaatgctatacgagttctaaaatgggggaatccttgatggagaatcagattccatgttatacttgtacatgggctgcaaaaagcggcgcccccaagggtcccactaagtcatccaattcacttcaagccaacagatcatctagtgctaactcagcagatggaggttccctgaattctaatactgatcttgcttctccagttggaaaagtcgataatgctgttaaagatgagcattacatggagcagaattcaagaattaccgcaaaggttgccgtgtctaaaggttgtcgtggctagcctggataagtaagagatttctacttcgcaaagattcgtggaatcggggtattatgtcaaagaccttagtttgaagctcttccgatgaccaaagggataaggaagatactctatgcggctgatgcgaaggattcatcattacccgaggctaatgaaataatcaccaggtcaccaggcatgttctcaggctcagatgaagcagagtgacaagtgccacgggatgcaccgtaccctccaaaacctttagtggagaattttgtggttctcctactatcaatctgagtagctcgtaatgtgtaaattagtagaaaataacacttggcatggggaactgctcatggccagtcacctgcaactgtcttctgttgtggcacggcttatcgaaagacaaattttcctctatgaaataagaacacgtggctagttatgatgcaggtatgggtggtgattctcctggcttaggtctctacccgtggatttatccgtgattgtgtcttgcattttgtcatctgggaaagcaaatgtgatctgtctgtacagtagttcggtttatatatgcggtgtgtggggattcaatctagaacagttgtgtgtgattgatgtcagcatgtggtatagccacaaggtgatttgataactgactaaatttgttgtgcagtattgaagttatgctccgtgctgtgtacagtactaaacttgtacaattcttgtcttgtttccacacaacattaagattagagtcgtgctttctgaatgttgagccgatttttatggcctgtgtgctagcaaactgagctaagggtgcttcatctttgtccttcagcttctattcttatgacaattaaatagaggatctattttgctccctgctctgattggtttcaaccgatatttatctcatccagcactctgagtatcaatgtgttgttttaatcctgatgatgacgtggtagtatgaaagtggacaccatattcctgtttaaatgcacaaggaataatttgtttcatcatgtcctggtttatccatgccagatttgttgcttccggaactcttggtccttcatatctaaagtttacatgtactgtacaagctctactttatgctaatacctgcctgtgtaacattttgcatggcatacttntaaatggacaagtacatgcggcgtccatcatcaacgatgatgcggactagatgttcaactgcagaaccatccatcacatcaacacaaagtcagatgttttgcatcaggaagaagcagtacttgaggaagcagattacaatgttttcccgccgtgaagcactagataggcttgttctatttatttttcctgttctggagtattccagcacctgaatgcttgactacaacatgtcgtaggttgcttggatctgtataatatacgtatgtgatggaaatttgtagaatgtgcgttntgagatatttccgtaatattcagctaattcgtggc

SEQ ID NO: 4702 - DNA, 1407 bp, Triticum aestivum
  unsure (1)..(1407): unsure at all n locations
  Clone ID: TRIAE-23APR03-CLUSTER31658_1
cagtcaagacgtagaggcgagcgacacggaggcgccagagcaagaaccagccggcgggcgcgccgacgcgaccccgggagcgaggcgaaggaggcggcggtggggtgcgttgcgctccccaaggtggtgctccactcccacgtcaacggctccgtcctcaacccccccctcctagtacacgcaacagaactaggcgacaaacgcgtgatagtgtttgaagaccttaaggataaagtcatgaagaacgtcagatctctcccggattgttttaggctctttgatttatttcatatactctgtacgactgaccatgatacagtgacaaggcttgccaaggagcttgtgggagatttagctgctgagaatgttgtgtatttggaaattaggacggaacctgatgtttatgaagaaaacaggacgaccaagcgatcctacatgaatgctgttgttaaaagtattaagtctgtggaagatgttgatgttgttctattggatgctaactacagaaacgatgtactatttagttctacctctataactgattagggtggcgacagaatgtgaagaaggatatatgttaggctccttctgagtattgaccgccgtgagacaacttctgctgcattggacactgttaatttagccatggaaatgaaggaccagggtgtaattggcattgatctctctggcaatccagttgtaggggaatgggagacatacttgcctgctctagaatatgctaaagagctgggaatccccaccacaattcactgtggcgaggtaccaaacaggaaggagatccaagcaatgctggacttctgccctcaaaggctaggtcatgtctgctgcctcgacgagcctctcaaacgagtattacctcgtcgcgtctaccttcggtcttagcaaggccgagctgtttcggctggcccagggagctgtggagttcgtgttcgctggcgacgaggtgaagaagtcactgagggcggtgtttgagcgtgcggcggcagagaggatcgagagttaggccccctcggccttgctccccagtgtaatagtatgcgactatgtgtttcccgggtagatcaggaggagatgaatagagaatagaaatctcatgtgcggtgtgcgcccgtgccggatcaaatgacgcaccgtgattcagttacctggacaggacggcgattcagtattccattttccctgaaccanaacagttgttcggtttggttngtgtcaacggaagcanacggggtccacatcgatngcgtgcatttttttttttgaatgcacaattgcacagtacacagcagcggcatagggacgaacagtcggtggagtgccaatctggtatacagatgctctgaacacatttcatggaacccattgttatagacctggtagtagttg

SEQ ID NO: 4703 - DNA, 1612 bp, Triticum aestivum
  Clone ID: TRIAE-23APR03-CLUSTER3175_1
ggcaatcgtcgccccaaattcgaagcctgaaccccaacgcccacccgagcaccccacagtcgccacgagcccctttacctccaatcccacctgactcctattcctcccggccgtcatggcgtcggcggacgaagcgaatgcggcggccgaaggtacggaggggaagaattggcagcggaaggggaagcacaagaaggagaagccgtgggacgatgaccccaacatcgaccgctggacggtggagaagttcgacccctcctggaacgagggcggcctgctggaagtcagctccttctccaccctcttcccccagtaccgagagaagtacctgcaggagacatggccgatcgtcaagggcgcactgaaggagtttggagtctcatgcgagctcaatttggtggaaggatccatgacggtttccaccaccaggaagaccagggacccctacattattcttaaggccagggacctgataaagctcttgtcgcgaagtgtccctgcaccccaagcaattaaagtgctcaatgatgagatgaactgtgatattgtcaagattggtagcatcataagaaacaaggaaagatttgtcaaaaggagagaacgccttttgggccctaacctgtccacccttaaggctatagagattttgactggctgctacatcttagtacagggaaatactgtggctgccatgggttcctttaagggactgaaacaggtccggaagattgtagaggattgcataaagaacataaagcatccagtgtaccacattaaggaactccttattaaacgtgagctggctaaaaatcctgccctagccactgaaagttgggacaggtttctaccgaactttaagaaaaagaatgtcaagcaaaagaagcccaatactaaggagaagaaacaatacacaccctttccgccgcctcagcagcctagcaagattgatcttgaactggagagtggtgagtatttcatgagtgacaagaagaagtcagctaagaaatggcaagagaagctagataagcaatcagagaaatcagaagaaaagaaaagaaagagagaagctgcatttgttccaccaaaggagaacactgctggtctatctgaatctgccaaaagtactaatgacaacgagattgctgatatcacaaaatccttaaagaaaaaggcaaagaaattcagaaatagtgaagctgaggaaaatgtgaaaatcgagtcatatgttgcgagcaacgaagaatcacgctccaaaaagaagcgcagatcgtcatccaagtaaccgcaatatgtcagctactgggatgacaattttaattgtttcaagtagttgaacacctgccattgaagtaggttttcaagcttcaagctttagtggtgaaacagacaaaccttcaaccttaagtggtgaacattgtagtctgtttgttggctactgccgtctgattactccaggagtattgcagctttcctgcatagtccacggcttctaatttacaagatcagatccgtcagcagtctttttagaaacatatgaagagcagttaatgataagtccgttaattcttctttaaaaaaaaaaaaaaaaaaaagcttatcgataccgtcgacc

SEQ ID NO: 4704 - DNA, 1850 bp, Triticum aestivum
  Clone ID: TRIAE-23APR03-CLUSTER3179_1
gcgcgcccccttctttagaaacaaattccccactcccccacgcattcctattcccccacctccaactccgactaattgaggcgactccatatcgggatagtgtggttgtctttggggggattgtggtattgattaagtttgactaatttgggctggagtataacctggagtaaatcgtacggagcctccatggaggcttagctaatcagggtcctcacgagcccctaggagatcatagagagaatgagcgactcgactaccttggccacgatcaaccagaaagatcgacgcgcgacccttgccaggtagacctagggtaagttgaggccgtacaggggagtgcatggggtaagaagcgggaagcaagtgctggggattgggtgatgaaaatgagctgttcccaaaggtatcagaacctgaagatgaagatgaagggccagaagcacgattggaacccgaggtatgcgggacgggcttgcaggcaagttcgtgggcaaggtgagtggtacggcacgatcagtaccgggaggtgcagatgaagggctacaagaactatcagtgccccagttatgcccgggaggttgctctgggcaactaccaagcatgttgtttgtacagcacacactcaatctatgacacactggtcatcactaaaccagataagcactgagctaatcaatggtgatgattgcattataccaaaacagagagggcatggttcacaatctgtctcaatggtccagttcacaactatggctgtagataatgattttttggggtagttggtggtttccatggagagcttatatgcaagcgtctggaggatgatgggatagttttcagcacgagagttacagatgatgagaatgctataaccaactctttagagatataccaggatcccaatggatcaagacggttggtggttgctaataatgactgctctgtcagaatttttgataccaagtattttgacctacttaatcactatgttttcccatggtctgtgaatagtgtttcggttaaccctgatgcaacactttttgctgtccttggtgatcacgaggatggcttggtagtggatcccaagtgtggcaagccgattggtaaagttagaggccatttggattactcattctcatctgcgtggcacccagatggcaatatattggctaccgggagtcaagacacaacatgtcggctgtgggacattagaaacctatcacaatccttggctgtccttggtggaaggctaggctcaatacgttgtatcaaattctcttcagatggccgctttttggcaacagcagagcctatagatttcgttcacatctatgattgttttgccgattatggcaaatctcatgagattgacttttttggtgaaatagctggtttgtcattcagcccagacacagaggccttctatattggcgtagcagaccaaacatatggaggcctcatggagttcaagaggaggcaccagcatcattacttgaactgcctgtggtgatgccttttggttagcacagtttgcttttgcagttccttcatacgcgactgattgatcgtttgactgtgctgcaaaaactgcatggttttagtcaaggcaaccggtggaggaactcattggggcaacgtgattagtgatttgctgccgcaccttaagctcactccgataaatgagctggagctgtatacatttctcttctgtcttgttgctgtctaggaaccgacggggattgtgatagttaatgtgtagtcttgcattccattttatcaaatcaatgtacatagttggtgctttatctgtactatgcttttttctttgaacgagactagtaagcgtg

SEQ ID NO: 4705 - DNA, 1131 bp, Triticum aestivum
  Clone ID: TRIAE-23APR03-CLUSTER3187_4
ccgggccccccctcgaggtcgacggtatcgataagcttttttttttttttttttgctaatttgtttcgcgtatttattcaacaaatccggccagaataaaagcaaagaagatgctggctagtcagcaccagcgtgtacaacaatctctcaggaggtgcccatcgttttcgttttctctagtagtcgtcgtcgtcgtagccgccgccggccaggtcgtcctccaccttctccgccacgtcgtcctcgatcttgtcctccaggtagctcgccccttccgccagcgccagcccgcccagcacccccgccgccgcgcccaccgccagccccgcccccatccccatccccttcttcttcgcagcagggtcactcaccgacccgtacgcgggggcaggagcggcgccgtacgccggctgcgcgccgcctccgtaggcggcagggtacccggcgggctgcggtggcgcggcggcgccgtaggcggccgggtagccggacggcggcgcggcgtacggctgctgctggccatacccgtacccgcccgagccgtacggcgccggggccgcgtaggggtcgcgggactggggctggctctggccgtagggcggcgggtaggcggggtcgtagtagcgggcggcggcctcgcggacggcgacgcggacgtcgaggcggccctggggccggccggaggggcgcttgaggcggagcgtgcgggacgcgcggccgccgaggccggcgtcgtcgaggacgtcgcgcagagggaggcgcgcggaccccacgagcggcttggtgcccccgccggcgttggcgtggacgacgtcgatgcggaggacggcgtcctcgaggcgggcggtggacggcgggagcgggacggtgagcttctcgtcccagaccgggctctcgccgttgtccaggtcgacgcgggaggagcacttggggccgtcgtcgacccagagcacggcgtagggctgcaggtcgccgttgcgccagttgacgttcttgaggtcccgcgccgagcccaccgtcacctccacctcgtacctcgaacccatgctcgccgtgtccctgcccgcacgccgcgagtgctagctacagtggcgaatgctctgctctggttgagtgctgttgggtgatgat

SEQ ID NO: 4706 - DNA, 1674 bp, Triticum aestivum
  unsure (1)..(1674): unsure at all n locations
  Clone ID: TRIAE-23APR03-CLUSTER31992_1
agtcttcttcctccggagccttgttgctactaatcttgcttgcgcagttcgatccatcatccatggagcagagccagatggccagagtgaagcttggcacgcagggcctcgaggtgtccaagaatcgggttcggatgcatgggcctcaccggcgtgtacaacgatccggtgccggaggatgctggcgtcgccgtcatacggcgcgccttcgacgccggcgtcaccttcttcgacaccgccgatgcgtatgggccacacaccaacgaggtcctgctcggaaaggatggaacacacatcaaccaggaactgctcgaaatggcactgaggcatgtgcttcgtggatgggttcaagggggcaccaatggtgggagcgctccagaatatgtgcgtgcgagctgcgaagcaagccttgtgcgcctcggtgtggactacatcgatctatatttccagcatcgcattgaccagtcagtgcctatagagttccagctgcgcatcgtccagtcggtgcctatagaggagactatcgggtatgttaacatgtttgaggctagtgccgatgccattagacgggcacatgcagttcatccgatcaccgcagtgcagatggagtggtcactatggaccagggatatagaggaagatattatcccactatgcagggagcttggcatcggagttgttccatacagcccacttggtcgcggtttctttgctggcagggcagccgtagagagcttaccatcagggagtttactgtccaaacatcctcggtatactggagaaaacctggagaagaataaagttctgtatacacgactcgaaatattgtccaccaagtatggctgcacacctgctcaacttgctcttgcctgggttcttcatcaaggggatgatgtcgttccaatccctggaacaacaaaactgaagaacctcgatgataacatcgaggctgtaaaggtaaagctgagcaaggaagacctgaaagaaatctcagccgctgtccctgccggcgaggtggctgggtccaggatcattggaatcctggagccttattcttggagggttgcaaacactccacctcaaaagtagccattttgcatcttcactcggaaatcaaagaacatctcaccgcgttatgctgaatttgcttccaccttgctggatacgtacattcaaggggggaaatgtgaaagaatcgagctcgtccatactcaagaatagggaaacattgttcctgaaacaacagatgccattgattttctgttggatgtatcaattgctacacatgataaagataaaaggtgtcgaattcaagttaaaaaaggtaaagctgagcaaggaagacctgaaagaaatctcagccgctgtccctgccggcgaggtggctgggtccaggatcattggaatcctggagccttattcttggagggttgcaaacactccacctcaaaagtagccattttgcatcttcactcggaaatcaaagaacatctcaccgcgttatgctgaatttgcttccaccttgctggatacgtacattcaaggggggaaatgtgaaagaatcgagctcgtccatactcaagaatagggaaacattgttcctgaaacaacagatgccattgattttctgttggatgtatcaattgctacacanataaagnataaaaggtgtcg

SEQ ID NO: 4707 - DNA, 1939 bp, Triticum aestivum
  unsure (1)..(1939): unsure at all n locations
  Clone ID: TRIAE-23APR03-CLUSTER32041_1
ttttttttttttttttgtcacaagtgcaagctttattatttattatttttttgaacagaaactaggtcccgaaggacctagagagcttcattgattcctggtcattacagtacaaagctcagataaggactcaaaagaaagagaaattacacacaggtccctgactttaacaaggaggaccccagactctaagatagaactgcaattgggtccaagacagcttcccctcagatcgagcttcgccgtcaccggggacggaccacttggggcgacgaagccttcatggctgcagcagcacgccatgaactccgagacgaaggtgcaactgcctcccatacggcatcctggccaggaggaaatagtaggctgcccttcaaccagaaaggtcactggcgatgcgcgagaaccaggccatcgaccgctaaaagccggctccagaacaggccgacggccgccacagccaagcttagcaggcgccatcagtccgcaccatccaccagtgaggatttgctccaacccaaatcggcaagatcttgatgtccacctcatcccctcttccttcccaccaccacaatagcaagggaagaacagaacgaggctctggcgatcctccagatcagggacaacgactgcgagcttattggggaaggagctccggccagcctcaacctccgccgccgccctccacgaacgtcgacaggcaagcgaggtcttccacacctcagcaccgctcaccggcgccgaggacaagctccagagcggcatcacgccatacgccacatgggcaaacacgagaccatgccaagctctacatctaaacctacatctactgctgtacaaggggaaccggcatcctaatccagctctacatccaccaacgcgggcgccggcggcgagagggaccggatccgggcgattggtggcgactctcaacgggggcggtggagagacttcgggaaaagaggaggtaggggccccggcccaggtagtagcactcacggacctaaaggatcgatagctagttcgctacgctgctgcagcgctccatcgatctcctccggtcttgtctctagtttcctcgcctcctcggctcctcccccaaattctccaatcccagataacagtgccgccgctcccgtgcacttctaaattcgaggagccgctccgtgcatccattaatggagaccaatgatggtattcctttccgtaatcatctctctgcatcctcaacgttccccatcaagaagacgcttgaggcatcaccgcatcagagatgggatgagaaggggagacggggaatgagtgttgcagccttcagatctgggaagctacatcgacaattcgatatcaagccatatgcctatattcaggtgtttttgttccttgtattgactgttttactgcaattgtttggtgatatgtcttctaaaaaatgtttatcattgagaaaagagtgaaaaaaaacagtatattcttgctactttatgcattgagaaagaaaaattggatgaaataaatactgatgtggttattgacaacttttcttccagaagtgttaggagaaacaacaagatctgaatgtgtgtttttcacctcccttgtggttttagttcaaagaccatcaatctatgctagtatgtataataccttactaaattgctttggaaatatactatattctgaattttttttctgtacacaagggccccattttatcgtctcgccccagggccccgaatatgtatgtaccggccctggatccgggtggttggtggcgactctcaacgggggcggtggagagacttccggaaaggatacccaattggtgtcacatctcccagacggctctcttctcgttccatccctcttctctttgtaattgggttgtcgaacnaatcaaaccaccgagtagatagaatcgaaagatcctattaggatc

SEQ ID NO: 4708 - DNA, 1197 bp, Triticum aestivum
  Clone ID: TRIAE-23APR03-CLUSTER32065_1
tttgggtcgggcgtggccgggggatgcgccatcgatccccacaccgacccgagtgcgacgatcaagcaaagggttcccgtcaccgagccgtcgaactcgccccgtgtaggaatcttgtacagagttcgattctcggcggtggaattgccatggacgagcagttcatcctccgcgtgcccccatccgtggcggagcagatcgagcggcttatgaacgaatctgccgccggctcatcctccaaccccgacgacgcctcccaatttcgctaggacaaacaaacaagaggggaaggggtagctatgcttcgaactcgccgcgtgtaggaatcttgtacagaagttcgattcgcggtcggtgcaagttcccatggacgagacagttcatccttccgcgtgtccccatccgtggcgatggcagatcgagcgtcttatgaacgaatctgccgctggctcatcctccaaccccgacgacgcctcccttgacctctccttctcagaggatggaaggagtggcacatttatgattggtaaccagaggtttcctgcatctctcttggatctcccaaccgttgtggagtcatataagacatatgatgattcctttttagttaaaactgctgatattggtcagatggtaatggtaagagaagaagatgatcctgctccagaaggagctgaatacgagcatggacttactcctccaatgagggatgcacgcaggcgacgttttcgcagagagcctgacttgaatgcagagcttgttcaccgagttgagaaggatcttataagtattatgcaaggagtgcctgtcaaccagaatgctagtgtagctggaggcggtgaaggtggtgatcgcaagaaagctgcaccagctcctgcacccaagcctgacgttcaagagcctgctgcaaatggtgaagaagctgaggctgatcggagcgactctgacgagtcagacagctgaagtggaccagaatagacagtgctgcttcagtaggccgagcaaacccagtgtatgtattaggtaattcagatcaaagaacgcacacttttaccaagcaagcacgcttgttgtcttctactgtaccaattatcatctcatcagtaataataagagtgactttccattaaaaaataaaaaaaaaaaaaaaaccgctgagcgagaacagaaagggcgcctcccggcccatcccaagat

SEQ ID NO: 4709 - DNA, 1997 bp, Triticum aestivum
  Clone ID: TRIAE-23APR03-CLUSTER32125_1
gtacggtcttgcttagtctccgccccgtcccccggtttggtccgttcctatcatcaccgagcctcgcagccgtcgagctccgccgccgtaaacgatggccgacggcaacgcccccggctcgccggcttcttcgctccagagccaccgctacgccatcaaatcctcagtgcacaatacggcagctagccggaggcgtgaacaggctatagcaatagggaaggaaagaagggaagccttaatgcgtgcaaagcgtgtgtgccgtgccccactttctggcagtgatgaggctacaattgaagatggtgatatggttattgatgagaaagcagatcttgaaacaagaactgctcaagctgttgaagaattgaaatcagctttgtcaagccagggaaaaggggcccagaagaagaagatagaggcacttcgtgcagtgagacgcgtgttgtcacagtctgaagtacctcccattcaagtagcaattaaagctggggcagttcctcttttagtgcaatatatgtcctttggatcttcagatgaacagttgctagaggctgcttggtgccttacgaacatagcagctggggagccagaagaaacaaaatccgtgctgcccgcattaccattgcttgttgctcaccttggtgagaagagctccacacttgttgctgagcaatgtgcatgggccatcggtaatgttgctggtgaaggagcagacctgagaagcacattaattgcacagggtgctttgtggcctcttgcccgcctaatgctatcaagcaagggttctacagcaagaactgctgcttgggcattgtcaaatctcatcaaggggcctgatcccaaggctgcgtatgagcttattaacatcgatggtgtgctaaatgcgatcataaggaacttggaaaaggcggacgaagagttagcaactgaggtggcatgggtagtggtatatctttcagcactttcagaaaaagctatcagcttaatagtacgaagccatgtgcctcagttgctgattggacgcctgctggcatctgagaacctgcagttgctcattccggtgcttcgtggtttagggaatcttgtagccggggatgaatacatggttgattcaatcctaattgttggaaacagtatcacagatcaagctttatcaagtctcataaaatgtttgaagagtgacaatagggttctcagaaaggaggcttcatgggcattgtcaaatatagcagcaggcagctttgagcacaagaaattgatttttaccagtgaggcgacgccttcgctaatacacctcctgacgagtgcacagtttgacattcgcaaggaagcagcttacaccctgggcaatctgtgtgttgtcccagcaggaagtactgagcccccgaacataatcaccgaacatctagtctcgatcataaatggtggagcccttccaggattcataaatttggtcaggtctgctgatatagagagcgcaagacttggacttcagttcctggaactggtgatgagggggtatcccaatggacagggtccacagcttgtggagaggggggacggcatcgaggccatggagaggttccagttccacgagaacgaggcgatgaggaacatggccaatgggctggtcgacaaatacttcggcgaggattacggcctcgagtgagcggcgactgtggccgccaatcctgcatctgtttgtgaacccagcagcagctgctcgtgtactcaaactgtaaaatgcaacttttttgtaaccgtggaatgtatacaagactgtctgaggtagcgtagttgctgtgtaacttggccatcttcatggatgtgtgtggcgatggggctgttgtagctggaagcttgaagtgagctgggtagctaccgtagtacagtgtgacctgtgtaagaagagaagattttgtgtctttgagctatatattgtactagagaaatgctgttcaaactcttgctgaaaaccgttgcgactagctttgcat

SEQ ID NO: 4710 - DNA, 1585 bp, Triticum aestivum
  Clone ID: TRIAE-23APR03-CLUSTER32163_1
gcctcaccagcgagtcatcagatcagcgactcatcaccaacccccacaccaaagcaagcgcgaaggtcagagctccccgcccccgcgccatggcttccccgtccccatccccctcccctctccacccgcaccagctccagcagcacccgctccccccgcaccagcacccacacccgcagtaccaggccccgcccccttcgatgcccccgccgccgggggcgccccccaaggccatggatctggaggtcaccgtcgtctcgggcaagcacctgaagaacgtcaactggcgccgcggcgatctccgcgcctacgccgtcgcctacctcgatccctcccgccgcaccgccacccgccccgacgacgccggcggctgcaagcccgcgtggaacgagcgcatcaccctccagctcccgcctcacctctcgccgcacgacccctcgctcctcctctccctcgacgtgttccactccaagccgtccgactcgcccaagccgctcgtcggctccgcccgctcgcctaagggacgattactagcgcagtatcgtcgtagacgtatttgatcgggagttccaagtgtgtgcggctgccctgtgagtttgctctcctccaatacctgctcatgtcggaatacgttgcagcgttgatttccgtgggtttgctctttatacgtcaatattgccttgacgacacatgacttactatactgcttgtttttcatgccctccgcctcataacttctcggctcctctaccgtacggctcttgacatgtacttccgtcctagcgggtactactccgcgccaccgaccaccgcctccttctcagtacgagtacaacacagggccctctgcgcctgtggagtacggcaggcagtatgagcaaagaggaaggactgagggtgtgactgggcagtatgatccgagaaggactgaaggtgtgactgggcagtatgagccaaaaggaaggactgagggtgtgactgggcagtatgagccaaaaggaaggactgagggtgtgactgggcagtatgagcaaagaggaaggactgaaggggggactccgagcgaaaggtatggattaggcgctgggcttgctgtgggtgcagttgctgggggcgttggggcacttgcgattgatgaaggtgtgaagtataaggaggaaaaggcggcagagagggtgggagagaaggtggctcctgccgcaagggacgattacagcgagtatcgtcgagagtattgatgggagttcatgtgggtgaggatgcgctgtgagtcggttcttctcaactcctgttaatgtgggaataagttgcagtgtgattttgtggtttgctctgtatatgtatatatttgcttgagagacatgaattactatggtgcttgtgcttatggcctgcgcatatttacatatttggtctgtaccataaacgttttgtgattacctttgaagctgtacccgcaacttgatgtctgcataatttgtctctgatctgagttgtgtcttaagtctgttccattagtatctgtatatctggtttggtgcttggcattgcagtgaaattcaattttatgcttctttcagtcaaa

SEQ ID NO: 4711 - DNA, 1906 bp, Triticum aestivum
  unsure (1)..(1906): unsure at all n locations
  Clone ID: TRIAE-23APR03-CLUSTER3217_1
ctcacttaccagccgatctccaaaatttctccccctcctcctcctcgcttctccatccttctcctctgatctctcgccggagccacgaccccggccagcctccgagctcaccgagcccaaacccctatttataccccggggaggcagagcagcatccttcattcccaggggcagccagccgagacgtggggtggagcttcggagcgggccgcggagatgggcctcgtccactgcctcccgcctctgctcctcctcctgctgctctcggcctcggtcggcggggagaagggcctctcggcctctgcctacgaggcgcagttcgaggcgtggtgcgcggagcacggcaaggcgtacgcgacgcccggggagcgcgcggcgcggctcgcggccttcgcggacaacgcggccttcgtcgcggcgcacaacgccggcgcggctgccaacggagcgggatccccatcgtaccccatctcgcacagcgcggtagccgtcctcacccgtgacgagtggcgcgccactggagcctgggacggcttctcccacatattccctcccgggcacagatggttgttgtgtactcagcttgtgctccatgtgggagaaccgcccatagtgctatacagagatccgtgcatcagggtcaggagcactaatgaaccacgcagccggtactgtattgtagtacgtataattttatgatgattgtacatgtcagattagcctatgatgggttgagccagatattggttacacagggaactaatcgattgtgacagatcctacaatgctggttgtggcggtgggctcatgacctatgcttataagtttgtgattaaaaatggtgggattgacacggaggatgattacccgtttcgtgaagcagatggaacatgcaacaagaacaagctgaaaaagcatgtggtaacaatcgatggctacaaggaggtgcctcctagcaaggaagacttgttactccaagctgttgcccagcaacccattagcgtaggaatatgtggcagcgctagagcatttcagctatactcccagggtatcttcgatggtccatgcccaacatctcttgatcatgctgtcctaattgtgggatatggttctgaaggtggcaaggattattggattgtgaaaaattcctggggtgaaagatggggaatgaagggctatatgcatatgcaccgaaacactggctcatcgtcaggtatctgtggcataaacatgatggcatctttccccacaaaaacaagcccgaatcctcctcctttaccgggccctggcccaaccaaatgcagcgtggttacctcctgccctgaaggatccacatgctgtagctcatggcgtgccttgggattctcccatgactatcctatatgtgatacagctagggnacgttgctgaagggcaatggcaacttctccagcatagagggaatcaagaggaagcaagctttctccaaggttccctcttggaatggtttgttggaactgctggatcaatagacatacaaaaaattacggatcacagacagatacacatgtgcgcatgatcttatacaagcggcgggggttcgctgcgttcttgaagtgttctgccgcattgtatgctcccatagtctctatctgctggctgtcttgcagagctgtccaatgtcgttatgagagacaaaaaggagatgtccagaactccaaaattttagtgtgtattggtgagtcatcgcagctggtactgtattgtatatttccatgatagtacgtgtcaggtactcagtttagcctatgatgggttcagtcagatattggttacatggcacagatggtttatttgtactcagcttgtactagatgtgagagaaccgcccataatacaataaagagatacgtgcatcaggttcagt

SEQ ID NO: 4712 - DNA, 565 bp, Triticum aestivum
  unsure (1)..(565): unsure at all n locations
  Clone ID: TRIAE-23APR03-CLUSTER322150_1
gaaacggacaagggtgggaggaaatctcctgccggacggaagagggtgtgaaagtgtgatggcctcaccgtacaatccccaccggcggcagctgggcggggggcagtccgcctggccggatctcccaccggagctcctggagagcgtcctagggcggctcgccccgctcgaccgtgtcgccgtccgcctcgtctgctcctcctggcgctcgtgcgcgcgagcttcgatctcggctgacctccccttcgaggccccgtgcctcctgctccggcgccccggctcctgcggcggcctcgccttcttcagcctccaccgccgcgagatcctgcccttcgccctccccgaccgcctcagcttcggccggtgctgcggccagatcggcggctggctcgccatggccttcgacgaggagcgggcgatcgagctccgcaacctcttctccggccaatccgtgcccctggcgcggtcccccgtgttcccggtggccaagatccgtgctgtccgcgccgcccaccttgcttggctgggtggccgccgtgctgggccgcggtccccgggtgggnaa

SEQ ID NO: 4713 - DNA, 1533 bp, Triticum aestivum
  unsure (1)..(1533): unsure at all n locations
  Clone ID: TRIAE-23APR03-CLUSTER3223_1
ctgccgcccgtcagggggcgccaggggttggcgcgggccgcggcgtgctcccagtgatttgtgcatacaatagttaattccgatctggaacaaggagatacatttggctgcacggtaccactacagacgacatgtttccctcaaccgggaacaagtgaaaccttattcctagcacagatcaaatgacaatacaaatcatggcgcatcactaaccatgacttgctttatttacacaagcatcatacacaccgaggataacaagctgagttttaaggctgcgataatggtttcaagcgccttctcacttaacggctcaaattaatctcttaattgctcatcatcaataccaaaatctacccagcgtcttaaaacgtacggtcggtgatattaaataacacatacatcacagttactgaatttagtgaaaatgcgccagtgatttgtgcatacatagttaactccgatctggaacaaggagatacatttggctgcacattaccactacagtcagacacgtttccctcaacgggaacaagtgaaaccttattactagcacaaatcaaatgacaatacaaatcatagcgcatcactaaccatgacttgctttatttacacaagcatcatacacaccgaggataacaagctgagttttaagactgcgataatggtttcaagcaccttatcactggtttccatacttgggtccatccagacccctcttgtccttgtcatcccaccctctcacccaaggctggccaggcgctgaccgggtctctggggaagagtgcttgctcaggttatccgtgaccttcgacttaatggcagcaaatacaggattagagtttacagtctctggcggttgctcttgaccagtaagccatttccacaagtctgggttctcgaggtcgaggatctgaagcagggagcggatgttggcctcgtccatggagcggacgtgctgctccacccaggtcccgagcaccaggtccagctccaggaagcccctctgcttgctcctgtacatcagactgttgacgaggcggcggcggctctcgtcgttggagaggtcgatggcggtgccggcggtgttctgctgggtggaggcggtgacggagaggagacggctggaggccgcggggaggagggcgcgcgaggaagctggagaggggagggcgcggcggagctggagcgcccggcggaggagcgtagccgccatggcaaccgcgggggagggggaggaagggaggggatcgcgaagcggggagggagcggcgtcgctggctggtgcgccgtgtcgcctctccccgcccccccggcccccccccccccccgccccccccccccccccccccccccccccgccgccgcggcgggccgncncggccccngccccccgccccccgccccccccccccccccccccccccccgnggccnccccccncccccgcccccncccccccgccgcccgcccccgcggngcgcccccccgcccccnccncnnnncccnnnnnncnnnnnnnnnnnnnnnncn

SEQ ID NO: 4714 - DNA, 756 bp, Triticum aestivum
  unsure (1)..(756): unsure at all n locations
  Clone ID: TRIAE-23APR03-CLUSTER3223_2
ntttaggccccaaattcaaaatggccaattccaattcccttggggcttcccttaacccatgacgttgctttattttccccgagccttcattcccacccgaggattaccaagctgagttttaagacttcgaataatgttttcaagcacccttatcactggtttccatacctgggtccatccagaccccttttggttcttgtcatcccaccctctcacccaaggctggccaggcgctgaccgggtctctggggaagagtgcttgctcaggttatccgtgaccttcgacttaatggcagccaaatacaggattagagtttacagtctctggcggttgctcttgaccagtaagccatttccacaagtctgggttctcgaggtcgaggatctgaagcagggagcggatgttggcctcgtccatggagcggacgtgctgctccacccagttcccgagcaccaggtccagctccaggaagcccctctgcttgctcctgtacatcagactgttgacgaggcggcggcggctctcgtcgttggagaggtcgatggcggtgccggcggtgttctgctgggtggaggcggtgacggagaggagacggctggaggccgcggggaggagggcgcgcaaggaagctggagaggggagggcgcggcggagctggagcgcccggcggaggagcgtagccgccatggcaaccgcgggggagggggaggaagggaggggatcgcgaagcggggagggagcggcgtacgcgtggg

SEQ ID NO: 4715 - DNA, 2978 bp, Triticum aestivum
  unsure (1)..(2978): unsure at all n locations
  Clone ID: TRIAE-23APR03-CLUSTER32371_1
cacgagaccattacctagaacatcctaatcgaaaaaaaatttggtccagcgaacgcagagcggataccaaccaggtgagccatcaaagccgcttctcttcccctaaaacctagcccgcaaatcccaatccagcccacgcgcctcccccccaaaccctcgtccccaagctcgcgaacctcgccgccgccaccgcccgcaccaccaccggccgctccgcgcgaccgcccaccatggcgcgtaacgaggagaaggcgcagtccatgctgaaccgcttcatcacgatgaagcaggaggagaagcgcaagccccgcgagcgccggccgtacctcgcctccgagtgccgggacctcgctgacgccgaccgctggcgtggagagatcctgcgcgagatcggcgtcaaggtcgccgagatccagaacgagggcctcggggagcaccgcctccgagacctcaacgacgagatcaacaagctcctccgcgagcgcagccactgggagcgccgcatcctcgagctcggaggccgcgactactctcgcagctccaacgccgccctcatgaccgacctcgacggcaacatcgtcgccatccccaacccctccggccggggcccaggctaccgctactttggcgctgccaagaagctccccggcgtccgtgagctatttgacaagccacctgaggtccgcaagcgccgcacccgctatgagatccacaagcgcatcaatgccgggtactacggatactatgacgatgaggacggtgtgcttgagccccttgaggctgctgccgagaagcgcatgcgggacgaggttgtcacggagtggcaccgggtggagcgtgtgcggcgggaggccatgaagaagtttcgtttttctttttttttttttttgcaaggggaaaatttggtccatcgtaccgaagagcggttaccgactatgtgatcctttatctctttttctataaccacgaaggaaaccccgttatttatccagcgaagcgaggcgactcgcccccaaactatggacaatcaaggctacgcacctagtcgcggcgacccatcgcctagccacaggtctcgcggcgacctcgccaatccaggccccaaacgcctttgtaccatcatatcaatacaaacaaacaatcaacacggggacagccgagaaaactagtctcttctttcgttcgcagatagcaggaagcttccagcgagcaccaacaccagaccctcccgaatcctgcagcgaggaactgggacatctcgttcatacgagccgccattcgggatccgcggcccgtctcgccgcgccgccgggttgctccattacgacggcaccctattcgccaggatgcgaccaacgaaaaccagcagcacgaggaggaaatgcatcagccgaaccgaggtcgcagaggaattgatcttccccgtcctcgatcgttcgcgtctttgctgccttcctcggcttctgctgctagtagtcttggcgacctggctgacggtctggccgagccgaacctctggctgacccccccggcctggaagagcacctcctgcccgttggatgccccttacctcgacggtgatggactgcccgctgaggatagctgttggactggccagttcgcaccccgagtcccggggacatccggtgctccacccgggtgcgggcaccccgttgtatctggcaccggcccatgcaccgacccccggcccggcgccgacgttggtgatgagcaccagctcgaacgtagtctgttggccgttgctggtgaaccgcacgccgccgctctccggagcaggacacccgctgagacagggtgggcacgatgcggcgcggtagacgccgatgcgctcccacgcgggctgcgccatgtccaggtgcttgcggggcgggttgcaccaaccgccgttctcgttgggctgggagtagtccgtcgggcagaggttggtggcggtgatggtgaccgtcacccccggcttgcagttcggggagctgccctggtcgcactgcacctggtagcactccccgcacgccgccccgtcgttgaagagggacgtgctcagcgccgccgtgtccgtcccgtaccccgtcgagtacaggttgccgtacccgcaagcgccgcccatggtgccggcggcgttgctccctccgtagaacgtggccgagcccctcatccagtcggcagcaccgggcgtcgccgcggcgaggcagtaggccgcgacgacgacgacggccaagcgcgacaagactccgctcctgcgcgccatctccagtgcgtacggaatggcctcgggcacagggcactgtggtgggtgggtgcactcgatcggcgggcgacgcgggaggcgagtgaagtgaggagtagaggaggctggaggaagagaggatggaaagagagaagggggaagaggctgggagggagtttgtcgcacatgtgccgctccctgatgagaaggagattgagcggatggtgctagagaagaagaagaaggagctgctcagcaagtacacaagtgataccctgcaaggcgagcagaaggaggctaaggagatgctcaatgtgcaacgctaggagagatgttggccattgctgaatccttcacggtattgagacgagtgaagtgcgaggagcaatatgtgcagtgctggacaagcgttgacgcaaccctagaagatctgatgctgaaaacgctgaagggcttcgctgcaatcatgttgatcgatgtgatgtttattaccctagaatgattgatgccaaaagggtaaacctgagatagtggtggtgaaccgtcactgtgcatggatgtgctgtattcactggcactgtacaagtacatccattggctacgcatatatctaaaaaactactagaccataatgaaagcaattctgaacaaaaaaaaaaaaaaaaacaaaaaggggggggggggttgtttttcttctcattnacacccccccctcttttataggggaggggcg

SEQ ID NO: 4716 - DNA, 961 bp, Triticum aestivum
  unsure (1)..(961): unsure at all n locations
  Clone ID: TRIAE-23APR03-CLUSTER32442_1
atccccctccccccccgtccctccctccctcaccacagccccccgccccccacagcccggcggagattcccaggtcgggggcgatccccgcgccgggggcgttcgccctcgcggggtgcctgctgccgggcgcggcctgctgctccgcggaggccgtgtggccccacatgccgcagaccgcgacaaagtgcgggtcgggggagatcgcggccaagaggggtggcactcgcccactgtgctcttctgcgagtgcgcccccacttcgcactccccccccatctccgacacgatcacttcagtcaagtggacatccccttacaggtacgccttacatgaaaatttggatgtttcagatgctcaatctgcaaacataacctcggaatctggaaactttcttgcctgcttctggatagatagtgcggagaaaggatcaggcgtatctgtaaatcttgaatggaaaactagaattgggacaaaagattgggatgctattgctaagaaggaaaaaatagagggcgtagaactagagcttaggaagcttgaagtggctgtacagtcgatccatcacaacatggtatacctcaaagcaagggaagcggagatgaggggaggtgagcgagaaaacaaacggcagggttgcttggttcagcatcatgtcgctgggcgtctgcgtcgtggtgtcagttttgcagttgtggcaccttcaaggctacttcaggaaaaagaagctcatctagactaagcctgttcgatgttgcgcattagcccagattgttgttcactttgtggggggaaaggtagaagttgtttcttcatgtttggttcaaacatttcacgctagtggagagctcgcagcatgtactgtacgcaatgttacaatgatccattttagccgtgttgtattatgatcggtggagtgtccttctaaaaaaanaaanaaaaaaacccaaggggggccggt

SEQ ID NO: 4717 - DNA, 1336 bp, Triticum aestivum
  Clone ID: TRIAE-23APR03-CLUSTER3245_2
acagccggaggagacacagaggcgagatcccgtggcggatcagcgtctgcctgtctgaaccgcgccggaggaggaggatggggcggccgccgagcagcggggggcccgcgttccggttcacgcacgcggaggtggcggagatggaggagcacctccgccacctcaacaacgccatcgcgcagcgcaacgtcatccagggcctcgccgagaagttcaccgcctccgccgcccgcgccggcaagatccccgtccagtacaagcaggtctggaactggttccagaaccggaggtactcgcagcgggccaggacccccaggggcgcgccgccgccgcaggggaagatgctgcccacgggggccgaggaacaccacccggcctccttcagggctcaggggtcgtcctcttcgtaccccggatcccactcaggaaagagtgcttcggatggtggccaggccgagtttgaagcaaagtcagctagagatggcgcatggtatgatgttgctgcctttctgtcccacaggctctttgaaacaggggacccggaagtaaaagttcgattttctggatttgggcctgaggaggatgaatggattaatgttcgtaaatgtgtgaggctgcgttctcttccatgtgaatctgcagaatgtgttgctgtgcttcctggggatctcattctttgttttcaggaaggcaaagagcaggccctctattttgacgctcgtgttcttgatgctcaaaggcgcaggcatgatgtaagagggtgccgctgcaggtttcttgttcgttatgatcatgatcactctgaggagattgttcctctgaggaaggtatgccgtcgaccagaaactgatttcaggctccagatcttgcacgcatctagagcggcggcctctgcggatgctcagaatgttagcccagttgagcagaaaccccaaaaggcgcacaagatgatggatgtgaacactgccgaggtgaccgtggttcgcaacccagatcaaggagggccatctgacaagccggctgctcccttaccagctgcgcctgctggcacccacggtgattcagtttcagatgtgcagatggggaatgtggaggttattccaaaagttgaagctgcaaatgaagcacatgatgacaacatgaacgtgggagcgtagttgtttcgcttccctgtgcgcttcggtgtgtacttactaagtccaaaaaaatgtttgcttaggaacttccggtcgaggaaggatggtcgcccggtaactgtaatgtgccgatgtcgacttgtttgctgatgtgtgtacaaagtcttggattgtcggtatctatatagctatatcgtgag

SEQ ID NO: 4718 - DNA, 1252 bp, Triticum aestivum
  Clone ID: TRIAE-23APR03-CLUSTER3258_1
gattacaataataaacacacatgacacatctcctctctcgctctccctcccaggcagcatccaaagaagcggctagctttgctgctgctgctccaaccgaaaaggcgaggggagacggaggaggggcggccgtggggaggagcgtgaggccgcgagctccagctccagctcaaccctgaagaagaaggcctctccccttcccccgagctcaagcccagagcaaagctcacttatgtctgcctatggagtcatctacaactgatgccggtgataagcatttggagagctacctgacattgggtttgacagtatcgcagtcaaagaaagggaataccaagtttccaaaggtcctgtcgcttcttgccacatatctgggcagatcagttcagaagaatgaagaattactaggttcaaatggaataaaggaggcagccaccatctttcatggccagaaggtgccagatctcagtatacagctctatgcagaacgcatcttcaagtatgctgagtgcagtccatcctgctttgtgtctggcacttgtctacatggagagatatctacagcagccaaatgtgtacatgacgcccttcagcgttcatcgcttgctgattacaagtgtggtggttgctgccaaattcacagatgacgcgtttttcaacaatgcattctacgctagagtgggaggaatccgcacaatcgagatgaatcggcttgaactggatttgttatttaatctggacttcaggctgaaagtgaacctagagacgtttgggagctactgcttgcaactggagaaacatgcaccggtgtcaccagagagactgccggttcaggttcatcgtgtcaatggatctaaagatttgagctatagcaacagcagcgccgacgagttttgccagagcaagcttgtaagctacagcagccaggctctccaaggatgcagctgaccaatctatttatggcctaaagttttgcaaagcatgtgacctgattactgataattcttttagatctgacatttgtgcattcagattgcattaagttgttctgagggtgtttgattagtagggattcgattctgctttacttgtgtaacactgtaattcttgcaaaccactttgtttaaaatgttcacaatctagttgggaaacaccaggtctgaatattattcagtcctgtgattccaatgccgcggttttaccggatctgctgccaaaaaaaaaaaaaaaaaggctttccggctccgccaag

SEQ ID NO: 4719 - DNA, 1160 bp, Triticum aestivum
  unsure (1)..(1160): unsure at all n locations
  Clone ID: TRIAE-23APR03-CLUSTER326235_1
aaccatcaccaccgagctacctccagcctccagccatcactcagctcaaagacacaatcaggcaatcagcggcggcgagaacacacacagagtcacagatgaccttcagcgtctcgccggcgacgggggcgagccaggagtacatgatccggttcgacggccacttcgaggacccgagctccgcggccgcgagcgccgagccacccctgccgttcgccggcagggctttctcgccacagcaggagcagagcgccatggtcgccgcgctgctgcacgtcgtctccgggtacaccacgccggcgcctgacctcttcttcccggcgcgcaaggaggcgtgcacggcgtgcgggatggacgggtgcctcgggtgcgagttcttcggcgcggaggccgggcgcgcggtcgcggcatcggacgcgccgagagcgccggcggccggcgggccgcagaggaggcggaggaacaagaagaaccagtaccgcggcgtcaggcagcggccgtggggcaagtgggcggcggagatccgcgacccgcgccgcgccgtgcgggtgtggctcgggaccttcgacacggccgaggacggcgcccagggcctacgaccgcgccgccgtcgagttccgcggcccgcgcgccaagctcaacttctccttccccgagcagcagcagcagcagctaggcggcagcggcaatgccgcggccaagtcagacgcgtgctcgccctcgccttcgccccgcagcgcggacgaggacgaaacaggggacctgctctgggacggcttggtggacttgatgaagctggacgagagcgacctctgcttactgctcccggtcgacaacacggataaatttcacatagaggggaagagacgatcaggatcaggggtacccctctgctactagtgttagactattagcgagtaccagatagacaatcagcagtcctaatcctgctcactacgtggttagcacacgtcctagcttcggttgtaattctgcataaataggcacccgatcaatggaaaagttgtgttcaaccatactcatctgccatgttgtatgtagacaaatccaatttggggcttatttgttggaactataatggtttctattaatagaaaccaggggaaaccccttttgcacaaaaaaaaaaaaaaaaaagn

SEQ ID NO: 4720 - DNA, 964 bp, Triticum aestivum
  Clone ID: TRIAE-23APR03-CLUSTER327256_1
actgcgttacgccttctagaatctcttcggctccgtcctccaaaccccctcaccaagaaagcagaggtgaaccaaccagcgaaaccgtcatcaaattggtcgcgagtttgcgtgccgatctacctctaaccttctcctccgcattgcacctgcgaacggcgggcagatccatggcggcgctggcgtcaaggatggcgctgcagtccagggcggcgttggcctcgaggatggcgcagctgcagtccaaggcggccgaggcgacgaggttcgcggccaagcacgggggtgcgctgcagtccgaggcggcaagcttcgcggccaagcacggggccactctgcagtccaaggcgtccgaggcggcaagcttcgcggccaagcacgggggcgcgctgcagtccaaggcgtccgaggcggcaagcatcgcggccaagcacggggccacgctgcagtccaaggcgtccaaggcggcgagcttcgcggccaagcaagggagcgcgatgcagtccaaggcggccgaggcggcgagctccgcggccaagcaagggcgcgagtaccacaagacgctcatggagaggaacaggcagtacgtcgtcgacccgcccaccgtcgaaaagtgccaggagctctccaagcagctcttctacacccgcctcgccagcattcctggccgttacgaggctttctggaaagaggttgatgctgtaaagctcttgctgaaaaacagaaaggacctgaaggctgagcaagccggggttgccgcattgtttggcattgagttgtatgcatggcttcgtgccggtgagtttattggtagaggatttaccctcacaggttgatcgctgacgtctagcatgagcgcacattattagtctacatacatttgccgtctagctatgagcgtacattgttagtctacatttgccatcggatacagtgttcgttgatcaaaaaaaaaaaaaaaact

SEQ ID NO: 4721 - DNA, 1115 bp, Triticum aestivum
  Clone ID: TRIAE-23APR03-CLUSTER327274_1
cggcacgagtttttttttttttttttaactgcaaagtgcaaacattacacaatagctctgtaactgattatcagtacaaatactcaaataaggtatgcacctggcatgactaccacatcctagacctcaaaaacaacaacatatgatcggaagtgcagcaatcccacaagtgtatactaacgacgattcaccgatccatcccagcacaattcacatgccgaagagggctcactgcctagaagtccatctgcagccatttcttgtagtagacacaagtggttggcgagatgaccccatccggcgagcactcgtcgatcctgggacaaaccccacatggaatcccttctatcatgccgccctgcggcgcaccaccccgccggtagcacaccctcccggctctgaccgcgctaaactctccctccccggtgctcctgcactcctccagcaccctgtctagcgccatggtctgcaggatgtccctgatctgatcgatagcgtaccctgccctggggtcttccctctcgacgcccttgtggaccatgtccggggtggcagcgccgagcctgtcaatctggtcgaggcacctgcggcgcacggccgccacggcgtcggtatcgagctggccgttgtgataccaggttccgccggtgatctcgggggagggctcgatgcgggcgtccatgaagaccttcttcccgcggtggcggacatccgtgacctccttgaggatgccccgctggacgagggcgcgggtgagcttggtgagggtcggggcggcgagcttcatcgcgtagcggatgtcctggctccacattcccttgttgcccgcctcgtagatgcgcttgtagacctcccgctccggccccgggaggttgttgaggatggaggcaggcaggatctccggggcggaggcgggagcgggggcaggggcgggggcggaggtggatttggaggccggagaaatgacgggcttggcatccggttggactggcatgcccgaggacggttccagcgggcgcttccgcggcggcatggcggggcgacgaggagcaggcggcgcggcggcggcggcggttgggtttggaggagatgaaatcgtggggatttggctgggt

SEQ ID NO: 4722 - DNA, 992 bp, Triticum aestivum
  unsure (1)..(992): unsure at all n locations
  Clone ID: TRIAE-23APR03-CLUSTER329381_1
aaaaacaaaaaccaagtcggcaggatatggaaagaactaattgaattagataaagaaatattcaaattggaagggaaggtggtcgacgacgatttaatacgtactattaccaaatggatggaggccacaggccactccttggcactacagctttgttcttgataatgacagccaatccaatgcttaattcaacgccagcttaaagtcctcaattattgacactttaatccttgagagaagccggatgctgtggctacaagaagatccctgtcaggtaggtgttgtgttcctcatccttcgtttctcctgtcctttccctttcatgccgacttgtcaagttccttctcttggtgatgggcgatgcccaatcacaccgaatcgcctcgaagcaagatctgctatctgaaaatatctgtgtaaatcatttctctgattttttcacggatctggtagttaatttccagaggtgtgcataggctccccgttgttgcttgatttaatcgccgtgcgccatggccggagatgacgaagacgaaggcgaaatggcggcgttgcgggaggctctgcggcagcagagtcttgccgtcgagatgctcaaggccgagctggaggaggagaggcaggcggcgtcgtcgggggccgacgaggcgctggccatgatcctgcggctgcagggcgagaaggcggcggtgcggatggaggccgaccagttccggcgggtggcggaggagaggatcctgcacgacgaggactccctggccttcctcaaggccgtcgtcttcaaccaaggagatggacatcacctccctcaagaaccgcctgctggccgtctgccggagcaaatggtccctacccgccgcccccccgggccgggaacnggggtcatccaacctccccctggttaaggagggtgggccaaaaaaaactngccctccgggaaggaacnctccctccccgggggnccggtccaaagaactttttctcccgattcn

SEQ ID NO: 4723 - DNA, 1510 bp, Triticum aestivum
  Clone ID: TRIAE-23APR03-CLUSTER329_23
acaaaagacaagtatatcctggagaaaaggaaaagaagaagcaggtggtataccgtatagcgtacacacacagacgaagcgcagcgggaggcgtcaaaccctttctctcagcaccaatggcacggtatcttctcccttccaccaccaccgccgcctcctcgttcccgaggaatgccagggcctcgccggcgccgatcctcgccccccgcgcgctcgcctccaggtccaagcacgcgcgcgctatcatggcggtggcgtcggaccagcccgccgcacccagcaagtacccgaagatggccgctcccaccaccggcccggttcccgccgacgagctgctcggcgtcatccaggccgccgccaaggccggcgccgaggttgtaatggaagctgttaataagccgcgtaatatccaatacaaaggggttgcagacttggtgacagacacagataaactgagtgaatcagtcattcttgaagtcgtcaccaagaacttcaaagaccacctcatacttggggaggaaggtggccttattggagattctttgtcagagtatctctggtgcattgatcctttagatggaacaacaaactttgcacatggttaccccagcttttctgtatccattggcgttctattccgaggcaagcctgctgctgccactgtggtggaattttgtggtgggcctatgtgctggaacactcgtacgatttctgcatcttctggaaaaggtgcttattgtaatgggcaaaagattcatgtcagtccaacagaaaaggtggaacaatctcttctggttactgggtttggatatgaacatgatgatgcatggctgaccaatataaatttgttcaaggaatttactgatgttagcaggggagtacgaaggctaggctctgctgctgctgatatgtcccatgttggtctaggcattaccgaagcctactgggaatatcggcttaagccgtgggacatggctgctggtgttctgatagttgaagaagctggtggggtagtgacacgcatggatggtggagagtttacagtctttgatcgttctgttcttgtttccaatggcactgttcatgatcagcttttggagcggatccggcctgctactgaagcccttaagaagaaaggaattgatttctccaggtggttcaagcctgacaattaccctactgacttttgaatcacgcagcccttcagctacttggttctctgtcaagcgaccatgcacttacactgacaatacatttcaaggccctccgaccaaacggatcgaaaattaaagccaaactttactgaaggggtagagctcgaatgagatcctcactggattcctttttgctttgatgatagaatgtatcagaaagaaatgtttgcagagggtgttgtatcgtatgcatggtttctgccagttgtacttgggaaagatataacttccaattttgttaatcatggataatagcaaggcttccaacaagccaaaaaaaaaaaaaaaaaaaaaaa

SEQ ID NO: 4724 - DNA, 1392 bp, Triticum aestivum
  Clone ID: TRIAE-23APR03-CLUSTER329_37
ttttttttttttttttttattggtaattatgcaactttatttacaatagaagtttgtggctagcatttgcttacgatcaaaatctgtctgcgaaacaagaaatgacttcgcagcaacattaaaatcataaacttagtatggttagtaataagctgaaaagacctcaacgaaggtcatgtcaacctaaggccaaccagcatggaacagccacaaaaaataaagaaagggtgccagactaaaggattaagattaagatccaaatgccagcacggcacataatccagataacacaatctataactcaagcgacataaccaaaactcaaaggaacaggcccgttgggcagggtgccagacttcaacaaaaacgcacgttgcaatactacactggggtggacaagaacgctcttcactcgtcgtcctcctcgtcatcatcggcggcaccggcagagttgttgagggcgttgagcctttcgacgaggctggccttcctctgctcataggtcagcttcttggggttgtacctcttgtgagtcttgggaggcgccttggttgacttggccatggtgggatcagcacggatggcggcatgaaccttcttgtaaactgcttccatgtcatcagcggagattcccctcttgatgtactcactgaagtgagtttggaatttctctggttcctcatctgctagcgacctcatgtagtcagcaacatgccctccaaagatgtacttgcggtgaatctcagcatccagagacttctcgtcctttttgaaaccagcaaatctcttatcactgtggggaatgtcaaggccaccatccaaagctcccttaagggcaccaaacacacggtttccagtggtggtcctgataagaccaacatccaagagcgcacggaaaggcctcctctcatcagaaggctcaacagagaagtcctcaccagtggcctcaacattgccttcatactcctcatcaagatcacggttcttaagcacacgacgagccaaaagcagaccagtgcagtaagctgcagcatagttggtgaggccaacttcaagaccatagcgaggcaactcatgggagtaggcagcggccatcacaatatcaccagcaatggtagcataaacaatttgtgcagtgacatccttgttggtaaatcgcacaacaaaacggtacttaggagtgttgtacttgttcttgtcctggtttgtgagcctcagcctggccctgtagtcagtcttgccctggcgccttctcttgaacttgacttggaaacgcttggagtacgcccttgtcttctggttcttgatgtacaccatctcgcctgcgaggagggagctcctgcggaaggaggcggcggcggcggcgggggcgggcgggcgagcgaaagggct

SEQ ID NO: 4725 - DNA, 776 bp, Triticum aestivum
  unsure (1)..(776): unsure at all n locations
  Clone ID: TRIAE-23APR03-CLUSTER330290_1
aacacttttgtcctcttgtgtcctcttgtcgcgctcgctctctctctcggccgacgaccgaagtcgcacggcagagcaccgccgcgccgggccgaggagggggagggggaggagatgacggtggggatgatcaacgcgaacccggtggtgcacgagcggccggagcgcgccgcccaccccgcgcacgcggcgctcgacgcgctcgacgtcttcgatacggtgcgggacatcaaggacccggagcacccctactcgctggagcagctcagcgtgctctcccaggagtccgtctccgtcgacgacaagctcggccacatccagataaccttcaccccaactgtgcaacactgcactatggccacagtgattggcctgtgcctcaggcttaagttgatgcaaaactttcctccgcatttcaagattgacataaaagttgctccaggatctcttgctaatgaagaatcagtaaacaaacagctgaacgacaaggagagagtcgcggcggccttggagaaccccaacctccggcagttggtggacgattgcctctgctcagatcatccatcctcatattagctcgtccctgatgcctcacaacctgtctgttgtacagcaataataagcaggcattttttgtgttttgcccaatactgtacctgaaattcgagaaaaggcactatagctggtcatgtatgtgccattcttttgtgttaggtgtacgctgctactccctggaatatcagcaatgcttttttttcaaaanaaaaannanaaaa

SEQ ID NO: 4726 - DNA, 1497 bp, Triticum aestivum
  Clone ID: TRIAE-23APR03-CLUSTER3303_1
cacgggtccgctacggataaacggtcgctactcgctagtcgtccggtgaagccgcgcaagcagctgccgccgggataaaccgtttgttggccaggtccctctatccggtttcacccctcaaattatatcgcccaagcagccgcgccgccgggccaaaaatgctctcgctgcgggcgccgccccgtactctctcgccctcgccgtggcggagacggggccgcctcgacggtttcgccgcgccgcgttgtgtcagcgccgcgccacccgcgacaaccctagagacggctaccgcgcggccggcaggcgtctccttcccgattctggtgaatggctgcactggtaaaatgggggtatctgttgctgaggcagctacttcaaggggtcttcacctagttcctgtttcattcagtagtagagagaaccttgataaaacaatacaaattggtgatatagatgttgagatatatggcccttctgcaagagaagatgttctttcatctgtcatcgacgaattcccagatgtcattgtggtggactacacggcgcctaattctgtgaactctaatgccgagctctattgcaagcttggtgtgccatttgtaatgggcacaactggtggcgatcagcagttactgtacaaatcagtgcaagattcaaataactacgcactaatatctccacaaatgggcaaacaggttgttgcatttcttgctgcaatggaaacaattgcggagcagtttcctggggccttttcaggctatcgtttggaggtactggaatcccatcaagcaggaaagctggacacatctggtacagctaaagctgtaattgcttgtttcgagaagttaggcgcggtctttgacatggaccggatggttaagatcagggatcctgagcaacagctttatatggtgggtgtccccgaagaacacattgaagggcatgcattccatctgtaccatctaacttctcccgatgacagcgtttcatttgagttccagcacaatgtttgtggccgttcaatctacgccgaagggtcagttgatgctgccgtatttctgtataagaaggtacaatcaatggatcctaagagaatttacaacatgattgatgtcttgcaagaaggcgatatgcggtgaagttaattgattacctcttaatggatctgagtgaaattttgaaacaaatcttcccatatcttgcggaaacacaggggattgggagggggtagtatttagtgagtagtgtggactgtggagtactagagttgatatatgtactgaactgcgaatagtttagtccagaaccttaaactgtacgaacagaagtggggcaggacgtcaatattgttcatgtgggtggtagcctggttggtactctgctccgttccataatgtaagacgttttttgaaactagtgtcaaaaaacgtgactaatgtagtgtcaaaaacatcttacaataactgttaagcaagtttttctgggcatcccgctcat

SEQ ID NO: 4727 - DNA, 654 bp, Triticum aestivum
  Clone ID: TRIAE-23APR03-CLUSTER330442_1
cttcaaaatcgcgccctttgccaaacgtcggaggagcggagaaatatttagccctttgttgttgcctgctctagagcttgtttttgtttccaagagttggttggttgggctcgtgaatcatgtcagagatccgccgcgacgtgccggaagggacgggggcgggggcggaggggaagggcgccgattcccacgtcggcagccgggcggcgcggcgccggaggatggagatacggcggcatagactggtggccgagcatggtgcggaggaggtgtccaggaagaggcggaagttggatggagaatcctcgacggacgaggaggagattgagcccgccaagtacggcgtcacgtcggtgtgcggccgacggagggacatggaggacgcggtttccgtcaggcccgagttcctccccggccaccacttcttcggggtcttcgacggccatggctgctcgcatgttgctacgtcgtgcgcacgagcgggtgcacgagatcgtggccgaggcgcgcgccggcgctccgtccttggcggcaggcgacgcggacaggtggatgggtgtcatgtactaaagcagccaccgactctacgcccgagccgtgagctcaaggtctagggccagcggagcgcccacctgccgctgcgagttgcagctg

SEQ ID NO: 4728 - DNA, 1785 bp, Triticum aestivum
  Clone ID: TRIAE-23APR03-CLUSTER3304_1
ttttttttttttttttgctgtaagcaaagtactgcagaatatcattatcaatctgacataacagttttcaggtgaaagctgaaccaacctaaccatcaccataaccgcagcaaaatgagagaatcaacaaatctattttgttgcaatacaagatacaccaaccagtagaaaacgcaacaaataataatgcatctataccctaactcgagcagcagccagctctcttcagcgaagacacgtcgtctttcacatttatattctcccctttgcttggggcagatgagccgtcgtctcctgcatcaaccgtcttcctgctcgcaattcggtatatctgagtcaaaacttctgagaaagcgttgtctacatttgtcgcgtctaatgcagatgtttccatgaagtacagtgactccgcctcagcatattcctgcccatcttcagttgaaacagccaccaagtgacgaagatcagatttgttgccaactaacatgacaacaatgctagaatcagtgtgtttcctctgcataagttatacatgtgtcttgatgcatagaggccggcgtggccttatgataaaatcgagtcgtttagttgtatttgatttattctttgtttgtagcagcttgtgaatccttctcgtatctgggcagtgcttggtactgacggtctaacactattgttttactcgaagtttttttttttttttttgcaaacaaagtactcgcagaatatcattatcaatctgacataactgtttcaggtgaaagctgaaccaacctaaccatcaccataaccgcagcaaaatgagagaatcaacaaatctgttttgttgcaatacaagatacaccaactagtagaaaacgcagcaaataataatgcatctataccctaactcgagcagcagccagctttcttcagcgaagacacgtcgtctttcacatttatgttctcccctttgctcggggcagatgagccgtcgtctcctgcatcaaccgtcttcctgctcgcaattcggtatatctgagtcaaaacttccgagaaagcgttgtctacatttgtcgcgtctaatgcagatgtttccatgaagtacagtgactccgcctcagcatattcctgcccatcttcagttgaaacagccaccaagtggcgaagatcagatttgttgccaactaacatgacaacaatgctagaatcagtgtgatctctcagctcttttagccagcgcgccacattgtcgaatgtagcacggcgagtgacatcatacacaagcaacgcgcctactgctcctctataataggcacttgtgatagcacggtatctctcctggccggcggtgtcccaaatctgggccttgacgaccttgccgtcgacctggaggctgcgggtggcgaactcgaccccgatggtggacttggattcgaggcagaactcgttcttggtgaagcgcgagagcaggttggacttgccgacgccggagtcgccgatgatcaccgccttgaagaggtagtcgtagtcgtcctccgccctgtacgcgccgcctccgctgcccgccatcgcctccctgcctcgcgggtcctggaccttcttcctccccgacctgctagtgctaggctctggatctcgcggggtctgggtgcagcgttggcgtcgctgtgaacgacgacggagcagtaatgggcgacagcgacacagtgtgaactggctgctgctacgcagtcgtaataaatctgcaatgtttatttggtgcgctgttcttgtgcatgaaaacccctgtagtttcatgatttt

SEQ ID NO: 4729 - DNA, 864 bp, Triticum aestivum
  Clone ID: TRIAE-23APR03-CLUSTER333210_1
ctcggaataaagaagaatcagatactggaacttctgagaacccctttccaacccatgtttgcaaataaaaagcttgcggcttgggagcatctcagaatttttatctcgaccttgcagtaactgagtctctatcggcacaaaatgcaattgaatatctcaaagtaatggagcatttgatcagagagcctgctgtttactgggagttggagggcaacagcgtcgacatggcaatcgagtcactcctgaatgcggagaagcagtgttgcctggctggcgatgtggccagcactaggaaggacatcgtcgagctctccttcaaggatggcgcctggaagacgcttaactgccagatcgttgtcctctctaagaggaggagggccagctcaaagaatggcgtcaccggggaggacggcagcggcgtgcccgtgttcgcggagtacaacctcgacgagctccgcgcctccaccgacggcttcgcaacggaccacatcgtcttcgagcactgcgagaaggagcctaacaccatctaccacgggccctcttcagctctggcaccaccgtcgccatcaagctcttctaccgctccgcctggcctgacacacgccaattcatggaggaggctagggcagttgggctgctgcagagcgttcgcttgtccaacctcatcggatgatgctacaagggtggcgagcggctgctcgttgctgagttcatgacgcatgataccttggcagctgtgattcatagtgtggttagggtttgttaagtttactagctccttcattgatgatgggtcgctggtggtgcttttctgccgagaattaaaaaaaaaacttattccatgttacaaaaaaaaaaaaaaaa

SEQ ID NO: 4730 - DNA, 1768 bp, Triticum aestivum
  Clone ID: TRIAE-23APR03-CLUSTER333_22
tcgtctccgtttgaagacaaggagcaaagttggaaaccgccgccgattccctgtcctgcccctcctcgtagcataccgcttctagtataaccttgccctccggggggcacagcctctcctccttcccctgaccacctcctcagttttttctcaccctcctcaatggcgaatctgccgccgtccctcgccgccggcccctccttcggcgcgccctccccgcccccgctcccgcccccgtccggctcgtcggccgcggcgccgcccgccggggggagggaccggaagatggtgtccgcggagcagctcgtgctcgacctctgcgacccggagctgcgcgagaacgccctcctcgagctctccaagaagcgagagatttttcaagaccttgctccactgctgtggcactcctttggcaccgttgctgcactgctccaggagattgtgtcaatctacccttcactttcacctcctactttgtcgccagttgcatcaaaccgtgtctgcaatgcacttgcacttcttcagtgtgttgcttcacaccctgacaccaggatcccgttcttgaatgctcacatcccactttacctgtacccgttcctgaatactaccagcaagacaagaccttttgagtacttgaggcttaccagcttgggtgttattggtgctcttgtgaaggttgacgattctgaagtcattgggtttctgcttcaaactgaaataatccctctgtgtctgcgtactatggagatgggcagtgaactttccaaaacagtggccacctttattgttcaaaagattctgcttgatgacattgggctgcgttacatctgcgcgaccgctgagcgtttctttgctgtggccactgttttagcacagatggtccaggcgcttgctgaacagccgtctgcaagattgctgaagcacataatccgctgctacctcaggctgacagagaaccagagggcttgtgctgcgctcaacagttgcctccccaccgtgctgaaggacgggacattcaacaacttccttcttgatgacaacgttacaaggcggtggctccagcagctgctgagcaacatgtcgatcgccggcatgggcgggggaagctcccacactggtatgggcggaggaggctctctcagcggcatgggcgggggaggctctcttgggggcatgggcggcggaggctctcttggtggcatgggcggcggaggctctctcggtggtggcatgggaggcgggggctctctcggcggcatgggtggaggaggctctcttggtggcggcatgggaggcgggggctctctcggcggcatgggtgggggaggcccctcacgggggcctcgaccaccctgatggggctctgagcgagcgagcgaaagaagctgtgtctgcaggctgtggagagcctgaaccaacccccagcgatgcatgtgtctgtctgtcagtctgttgtagatgtagtagggggaaagaaactccgtgctgtttgtagttgtttgtgttgtcgaaactggaagaagagagtcgtctgtctgtctgtctgtgtgccctttgtgggaagaagataggagtgtgttatagtagtgtgtcagtctgtgtctagatgtttgggttgtgctttgtgtttgctggactgcatgtaaaaagacaaataaaccggcgcagaagctctccctgctctgctctttggcaaatgttcaagggtgaagagggatagcaagttcaaactgaaaatcagagttttactctaaaaaaaaaaaaaaaa

SEQ ID NO: 4731 - DNA, 555 bp, Triticum aestivum
  Clone ID: TRIAE-23APR03-CLUSTER334_36
aggagaagcttttgttcgtctcttgattgagatcgttcttgatggagcgcaagaactcgtttggctcgtcgtgggcggaccagtgggactacggcagcgacccggccccgcgggccggcggcaagaagcagggcggcgtggagaagaccaaggcggccgcggccacggggctgaagaaggtgaaggagggcaccgcgcacggcttccagtggatcaagggcaaggtgcagaagaagaagcagggcggcgccgccggcgacgacgcgactgccgggtattgattagccaggccccgttcccggtgggcggatggaaatggatgcatggatgtccggtcgattgactgggcgatctcttgtttcctgtcgtttaaatggttctgtacatacaggtttgccgtttgattcagggttgacaccaccacgtagatcatctagcgttcagatctctgcttattgattggttctttgttcttcctcttgtcctgttctcgattgatccgatgaaatttgccgctgattggttcgttcaaaaaaaaaaaaaaaaaaaaaaaac

SEQ ID NO: 4732 - DNA, 1174 bp, Triticum aestivum
  unsure (1)..(1174): unsure at all n locations
  Clone ID: TRIAE-23APR03-CLUSTER3352_4
atcttctctcctaatccaaaagtgcgcgtgcttccttgtcgcgtctgtacggagctgaggaggagatggacgccatggcagcgctcgccagaacggggccttccctcgccgccgccggccacaggagctccgcaacgttccggccgtcggcgtcactctcctccttcgcctccgcttcctcgaggaaccgcggccgcgtcgggctgagcacggcggggtgcaaccggtgggcaaccagggtagctcgcgccacccccaaccgcatcgtcgcctcctcggaggttgagcagacctacattatgatcaaacctgacggtgttcagcgtggtctggttggagagattatttctcgcttcgagaagaagggctttttgctgaaggggctgaagctttttcagtgcccaaaggacttggctcaggaacattacaaggatctgaaggagagacctttctttcccaatttaatcgactacataacttctggtcctgtagtctgcatggcctgggagggtgatggtgttgttgcgtcagctcgcaaactgatcggagctactaacccccttcaagctgagccagggaccataaggggtgatcttgcagttcaaacaggaaggaatgtcgtccacggaagtgacagccctgataacggcaagcgagaaatcggtaagttttgccaatggcggatctagcgggggtggcaccccctacaaaaatgcaaaataatatgtatactatatttaatattaattcggtaacaacttagagctatttcagactatttaggctaaattatactattttagcttaagttatttaaattttgtaccgacgtgtntgaagtttggcacccctagtacttagaatctcggtccttcagtgagttttgcagcaatttggtgcactgccggttgctattcagttgattcagcatttgtatggttacagntgtgaatgttagcttgaagggaagcttggttcgcagcaattgagtgcaccgctatttgcagcaattcttgacaataaaaaacttatngttcttgtcctatctgtaggattaatggntcaaagagggtgagcttgctcaatggnaatcagttcaaacaccctggctataagaagtgatctttgcatatcactgcaagaaccatgatccatacttatttggtcaacttga

SEQ ID NO: 4733 - DNA, 1233 bp, Triticum aestivum
  Clone ID: TRIAE-23APR03-CLUSTER3378_14
gcaaaccaacagctgctactccagcatccacccatccatccatctctcatcttcttcttcttgcaacgaaacgagagcatctagcttacagcgagctaaagattcgaacgatggccgttcttgtggcgaggcaggggcgcgagctgcagcggtacagcgcgagcacccgcgggcgcatcgtggtggggtgcatcccctaccgggtgcgcggcggcggcggcgagggcgagggcgagctggaggtgctggtgatcagctcgcagaaggggcacggcatgatgttccccaagggcgggtgggagctggacgagtccatggacgacgcccgcccggcgccgaggccctggaggaggccggcgtccgcggggagatgggcaaggtgctcggctgctgggcactaccagagcccgccgctaccagaccacctacgagggcatcatgtacccgctccgcgtcaccgacgagctccagcagtggcccgagatggcctcccgcaagcgcacctgggtgagtacagcttcttccccccttcatttcttgctgcgaagccgaattaggagccaagaacatgccttctaaacgtgtgatttccgattgatttgagcaggccacggtgcagcaggtcatggagggatgccagcactgctggatgcgggaggcgctcgaggagctcgtcgcccggcacgccaagccgcagtccgccctgtgaacgatcaagcaagcgggcgggtggggtgactggagctcgagcgcgcgcgactctcgcgagaagaggcctggagcgagcaccaacgtccgtccgtccgtcgtcctcgtcgtctctctctcctttcctcggtgcagcggcaggcctgccggcgtgtccggcgtcgtacgacgaccggaccggagcatatatttggccgcccttgccggagagacggactggggacgatggcacgcgcgcgtcaaccctttctcgaggcgtagagtcgtcgtcgtcgtcgccgcggcaaataatagggacgaacttagaaatgtgtagatcgaaagcgaacggggcacgaaaacttgacaaaacaccgcccttcctggtggtacgagcaagctcacgattctttctttaggctcttggagtaaaagatcaatcaaattgtaaattaatttaagtagccgcttttctgtggcacgctcgatcaatcaaacgattactacaatctgaaaaaaaaaaaaaaaaaagcttatcgataccgt

SEQ ID NO: 4734 - DNA, 1114 bp, Triticum aestivum
  Clone ID: TRIAE-23APR03-CLUSTER3378_16
aaaaaaaaccaacagctgctactccagcatccacccatccatctctcatcttcttcttcttgcgaccaaacgagcgtctagctagctaaagattcgaacgatggccgttcttgtggcgaggcaggggcgcgagctgcagcggtacagcacgagcaccggcgggcgcatcgtggtggggtgcatcccgtaccggatgcgcgacggcggcgacagcgacggcgagggcgagctggaggtgctggtcatcagctcgcagaaggggcacggcatgatgtttcccaagggcgggtgggagctggacgagtccatggacgacgcggcacggcgcgaggccctcgaggaggccggcgtccgcggggagatgggcaaggtgctcggctgctggcactaccagagccgccgctaccagaccacctacgagggcatcatgtacccgctccgcgtcaccgacgagctccagcagtggcccgagatggcctaccgcaagcgcacctgggccacggtgcagcaggtcatggagggatgccagcactgctggatgcgggaggcgctcgaggagctcgtcgcccggcacgccaagccgcagtccgccctgtgaacgatcaagcaagcgggcgggtggggtgactggagctcgagcgcgcgcgactctcgcgagaagaggcctggagcgagcaccaacgtccgtccgtccgtcgtcctcgtcgtctctctctcctttcctcggtgcagcggcaggcctgccggcgtgtccggcgtcgtacgacgaccggaccggagcatatatttggccgcccttgccggagagacggactggggacgatggcacgcgcgcgtcaaccctttctcgaggcgtagagtcgtcgtcgtcgtcgccgcggcaaataatagggacgaacttagaaatgtgtagatcgaaagcgaacggggcacgaaaacttgacaaaacaccgcccttcctggtggtacgagcaagctcacgattctttctttaggctcttggagtaaaagatcaatcaaattgtaaattaatttaagtagccgcttttctgtggcacgctcgatcaatcaaacgattactacaatctgaattaaaaaaaaaaaaaaaaaaaaa

SEQ ID NO: 4735 - DNA, 1427 bp, Triticum aestivum
  Clone ID: TRIAE-23APR03-CLUSTER33800_1
cttcatggaatattttttttttcttttttttgctcaacattgctctttattttacatagctaccaatagcatgctacccatgccacatgagaccgggtgcgaccaagcatatcttactgcagattcatcttcgtatatatacaacatgtcttcacacaagggagaacatggccctattttctacagaaataccatgaaccatcaaaaaggccgagccgctaaggttatctcttaatccgtttcgaaacggtcttggctagagcattgtacatgtcgcggctcctcttcgtgttttcatcgatcttgccacaggccactacgcctacattcgcctgttgttccaatgcttccctcacaaagaacttcagcctccagagggtcgtctcgctctgagcatccatgtcaaggtccacttcttctgctgtagtttggaagctaggattgtcttgcgcgaccaactctagcgccttgttaagatcttctggagacaattggcaaagacctgcgccgagttttctcttctcgtccgtggtcattttcctgcatctctgaaccaccattttctggagctcctccagctgcttgttaatctcattcagctcattaccagtatcttcagctaattttgcaatggcagcttccggagaaatgcttatggttggagcatcatttggttcctcccgttccctttcctcgttctcaactttagggagaaggtgaagccatttctcctcaaatctctcgagtaggaacttggccattatgttaacagggtgaccttcaacattgtacttcattgcattggtaaaaactaatctaacatcagaatatatttctcggacactgttatatgtggtactttccttcccttccattttgtttcggatggtcgagaaatccataggttttgttataatctggtgatagtcatcaagttgaagacctacgacgtctaccggttgcaaaaacggctgtgcccattcatgagatgtaatctggcgaatgataccggcaaactggcgcatgaggtcgggcatcccattgccgtggctgtccctggcaccgtttgccgcgtacctgccgccagccttgcgccctccactgctgtgcttcttggaattgtagaaccctaccacctcgttcaccctcttctcgagcacgtcggtcttggagaggaggtcgtcgacctggcgccggaacgagtccacctcagacacctgaggcccatcggcagcggcggccggcggctccatcagcgccggattagaccacgctccctccactgcggcccctcgcaccgcggtcatctctggtgccggcgcgtgatgacgaattcgcggcggaaggtggcgcggcgcgaggaggtaggcttcggcggcggcagttgagctttggaggatgcggagcgatgcaccacatacacccgc

SEQ ID NO: 4736 - DNA, 1821 bp, Triticum aestivum
  Clone ID: TRIAE-23APR03-CLUSTER33928_1
cccaggcgcccgctcgccgagctcgtgccgggcggagccggggcccgacggcgaggaggacgacatccaccaacacctgcacgccgagccgtgccgggcctaccgcaaaacgcccacggtctccccagccttcaactgaggccgaaagaaatcggactccgtgagcagacgccgcctcgaggagtggaacgtgttccgcctgggatccacctgcccgtggtacgcttcggtgacccttgtgtggatggggcctgccttgcgggcgcccgctgtgccgactcgggccgctccgcgccaagacgcgctgtgcaaccgcctcccaaagatgtttcctgcgcgtggcgcgatgccctttcccttcgtttctggtttcacggctccgaccaacgcacgcgtaggggcaccattcgcctcctgcataatgctcagtgtttttttttttttttttgtagttacacaataatttaatacaatgtgtgctgtagaagtgcatatgctgcacctccagctcaaccaagatgcagcagataatggtgctcaggggcagaatcatgcgagcaaaggttgcgatgacgcttaatagacatcacgaccaaagtaaaatagttaccaggttaccaacacctgaaactatgatagattgtttgcggcgacaagatacaacaacagaacacgccaagcttttttatccttctctagaacagtcgcgtcctctccagcatatacattattaccaaaataagaccacactgtaagcaaacgcctccttacaaattgaaacatgtaccatttggtatcctcctgtccaagaaaagcttctgagagcctcgtgttgaagagtcctgcatgttgcggaaagtctgggccgaccggaaccgctcgcctcgtcaacacaatttaggagaacctctcattgaagattcctgcaagttgggcaaaaccatttccctttgaatcttgtttctggtgtcagaccaacgcacgagtaatggaaccattcgcctccttcacaattctcattgtcacaagcaatcatatcaccatatgaaacctggtggcatatacaatatgttggttcatttggatcaatcatttgatccacatccatagatgcaacggccttcttgttgctgctacctggagggggcattaagtcgaagtccatacctctctccctatccctatcccattccttctctctgacaaacttccttgctgcttggggtgtactaaaactggacctccgtctttcatccctgccacccaccggcattggaggaaggatatgcggttcatctggaggtatttttccttcttgctttaaatcttctgcaaactggcctaggtcttcatcaagacgtttgatatggctctctatcaggtcataagcttggcgtgcgagcaacactttctccgtgcagagactaagcgcgttgtcctggctattttcaatatccctcgtcatcttctccgaggcattttcatcatgcaccacgtttggcctgtcgaacccatgggatggcacccccaggagatatttgatctgcccttttgtctgacccaaaatgccatgggccctctcgtcgagctcgtgcatggtggagaggatcctctgcaggtcgccggccagggtgctcgaatactccaagtagtcgtccacgtacacgccagtgcgagcaattgccatgccggtcgacggggggatgctctccgcggcgccgggctgggtccgattctccgatttggggattagggtttcggaggaagaagacgggtggggaaatctcgctaggaagaggtttttcccctgtgattattatt

SEQ ID NO: 4737 - DNA, 1110 bp, Triticum aestivum
  Clone ID: TRIAE-23APR03-CLUSTER340_18
ctctgcactgccaagctccagaacccaatctcccccgccccctgttagggttcgtgccgtctccatggcaggcgccggcatccacccgtttcaccagcagtggccgccccaagcggcggtgcccgcgcctcccgccgtcccaccgcctccccccgtaccaggcgcacccgatgccgccgcccgccccggctctgacgaggtctcaccatcttcatcatggggctccccgttccttataatccttatgctggctatcctgtgccggcggtaccaatggcttcaccttctcctttgccaggcccaacagcatatgctcctgtgcagaacatgaaagataaccctccctgtaatacccttttcattggaaatcttggtgaaactgttgttgaagaggaattgcggggcctcttcagtgtacaacctggtttcaaacaaatgaaagtgttgcgtcaagacaggaacaccgtctgttttattgagttcgatgatgtgagcgctgcttctgctgtgcaccatactttacagggtgctattgttcctagttctggccgcggtgggatgcgaatccagttttcaaaaaatcccttcgggcgaaggaaggacttagttggtggcatggtcggcactctgaatggtgctcctgtttgaggggatgtatcttgaactttagcatgacatcttgaattatcatctgcattgttttagccaaatctgttcctgtcatgtgcgacatcagcatcttcattgggtggagtttctggggcatgatcatcatcttcattaagtggagtttctgggatatcatcatcatctgatagacattgcattgtcactattttcattgttggcggtttcaacttctttaaattagctattgtggtttgacaaggccactatgaatgtctcctaacatgcatttggcatctgtcatgaatattttgtagtgttatgtagtttttccagtgtgcagttgcaacatttcatgtggtaatggcattgccacattatgatctggacatgctgtaatagtataaccgatttatttggcttgctgacaattcagtgtcgagggatcttgggatggttcaaaaaaaaaaaaaaaaaaaaaaa

SEQ ID NO: 4738 - DNA, 1756 bp, Triticum aestivum
  Clone ID: TRIAE-23APR03-CLUSTER340_31
acctcgcgcctcgcagcagcaccaaccaaccaacacagctccagtccccgcccgccccgccacgatggtcgccacggcgaagatcccgcagcggcagctcttcatcgacggcgactggcgcgcgcccgcgctcggccgccgcctccccgtcatcaaccccaccaccgaggcctccatcggcgagatcccggcgggcacctcggaggacgtggacgcggcggtggcggccgcgcgggcggccctcaggaggaaccgcggccgcgactgggcccgcgccccgggcgccgtccgggccaagtacctccgcgccatcgccgccaagatgattgagcggaaatctgatctggctaggctagaggcacttgattgcggcaagcctcttgatgaagcggcatgggacatggacgatgttgccggctgctttgagttcttcgcggggcatgctgaagccttagacaaaaggcaaaatgctgcagttgctctcccggagaattttaaatgccatcttaagaaggaacctattggtgtagttgctctaatcacaccttggaactatcctctcctgatggctgtatggaaggtagcccctgctctggcagctggttgtacagctgtactgaaaccatctgaattagcttccgtgacttgcttagagcttggtgatgtgtgtaaagagattggtcttccatcaggtgtcttaaatattgtgactggattaggtcatgaagctggcgctcctttgtcgtcacaccctgatgtcgacaaggttgcatttaccgggagctatgcaaccggtcaaaagattatggttgctgcagctcctacagtcaagcctgttacattggaacttggtggcaaaagtcctattgtagtatttgatgatgtcgacattgacaaagctgttgagtggactctatttgggtgcttttggaccaacggtcagatttgcagtgcgacatctcgtcttcttatccataaaaacatcgctaaagaattcgtcgacaggatggttgcatggtccaaaaatatcaaggtgtcagacccgctcgaggaaggttgcaggcttgggccagttgttagtgaaggacagtatgagaagatcaagaagtttgtagcgaatgctaaaagtgaaggtgccaccattctgactgggggtgtcaggcccaagcatctggagaaaggtttcttcattgaacccacaatcatcactgacatcaacacatcaatggagatttggagggaggaagtctttggtccagtcctgtgtgtgaaggaattttctaccgaagaggaagccatcgaactggccaatgatactcattatggtctggctggtgccgtgatttctggtgaccgtgaccgatgccagagattagctgaggagatcgacgcggggtgcatctgggtgaactgctcgcagccttgcttctgccaagctccgtggggcgggaacaagcgcagtggctttgggcgcgagctaggagaaggggggatcgataactacctgagcatcaagcaagtcaccgagtacacatctgatgcgccgtggggatggtacaaggctccggctaactaagatgtaattgagctggttcgaggacctgggtctgttccatcagaggataaatctgtgcgccggcctttgtagtggtgaataaatgtagtttgccatgtactcctgaacctttcttgcaaaataaatggcatgagttttgtggacatatgctgtgtgtgacatggatttaaaaaaaaaaaa

SEQ ID NO: 4739 - DNA, 1752 bp, Triticum aestivum
  Clone ID: TRIAE-23APR03-CLUSTER340_33
tccccacctccccacctcgcgcctcgcagtcgtacccaccagccccggccgacgcagatcccgcgatggtcgccacggcgaagatcccgcagcggcagctcttcatcgacggcgactggcgcgcgcccgcgctcggccgccgcctccccgtcatcaaccccaccaccgaggcctccatcggcgagatcccggcgggcacctcggaggacatggacgcggcggtggcggccgcgcgggccgccctcaagaggaaccgcggccgcgactggtcccgcgcccccggcgccgtccgggccaagtacctccgcgcgatcgccgccaagatgattgagcggaaatctgatctggctaggctcgaggcacttgattgcgggaagcctcttgatgaagcggcatgggacatggacgatgtcgccggctgctttgakttcttcgcaggtcatgctgaagccttggacaaaaggcaaaatgctgcagttgctctcccggagaattttaaatgccatcttaagaaggaacctattggtgtagttgctctaatcacaccttggaactatcctctcctgatggctgtatggaaggtagcccctgctctggcagctggctgtacagctgtactgaaaccatctgaattagcttccgtgacttgcttagagcttggtgatgtgtgtaaagagattggtcttccatcaggtgtcttaaacattgtgactggattaggtaatgaagctggcgctcctttgtcctcacaccctgacgtcgacaaggttgcatttaccgggagctatgcaaccggtcaaaagattatggttgctgcagctcctacagtcaagcctgttacattggaacttggtggcaaaagtcctattgtagtatttgatgatgtcgacattgacaaagctgttgagtggactctatttgggtgcttttggaccaacggtcagatttgcagtgcgacatctcgtcttcttatccataaaaatatcgctaaagaattcgtcgacaggatggttgcatggtccaaaaatatcaaggtgtcagaccctctcgaggagggatgcaggcttgggccagttgttagtgaaggacagtatgagaagatcaagaagttcgtagcgaatgctaaaagtgaaggtgccaccattctgactgggggtgtcaggcccaagcatctggagaaaggtttcttcattgaacccacaatcatcactgacatcaacacatcaatggagatttggagggaggaagtctttggtccagtcctgtgtgtgaaggaattttctactgaagaggaagccatcgaactggccaatgatactcattatggtctggctggtgccgtgatctccggtgaccgtgagcgatgccagagattagccgaggagatcgacgcgggatgcatctgggtgaactgctcgcagccttgcttctgccaagctccgtggggcgggaacaagcgcagcggctttgggcgtgagctcggagaaggggggatcgacaactacctgagcatcaagcaggtcacggagtacacatctgatgcgccgtggggatggtacaaagctccggcttgagagacttggatctgttccatcaggataaatctgtgcgccggcctttgtagtggtgaataaatgtagtttgccatgtactgctgaaccttctttgcaaaataaatggcatgagttttatggacataggctatgtgtggcatggatttacttttcaaaattaagatgattagagtatctc

SEQ ID NO: 4740 - DNA, 1482 bp, Triticum aestivum
  Clone ID: TRIAE-23APR03-CLUSTER340_35
ctccgtatgtcccatctcctcagcactgccaagccccagaacccaatctcccccgccccctgttagggttcgtgccgcctccatggcaggcgccggcatccacccgtttcaccagcagtggccgccccaagcggcggtgcccgcgcctcccgccgtcccaccgcctccccccgtaccaggcgcacccgatgccgccgcccgccccggctctgacgaggtccgcaccatcttcatcacggggctccccgtggacgtcaaggagcgggagctgcataacctgctgcgctggcttccgggattcgaggcttcccagatcaacttcaagggcgaccagcccatggggttcgcactcttctcctacgcgcaccacgccatcgccgcaaaggccgcgctgcaggatctggtcttcgatgccgagaccaagtcggcgctgcacatcgagatggccaagaagaacctattcatcaaaagaggtgtgggaactgatgcaaatgctatggaccaaagtaaacgcttgcgaactggtggagactatactcattctgcgtatgctcctcctccattccacccacccccaccagctgtttccatgtggggaactgcaggttatatggcagctcctcctccttataatccttatgctggctatcctgtgccgacggtaccaatgacttcaccttctcctgtgccaggcccaacagcatatgctcctgtgcagaacatgaaagataaccctccctgcaatacccttttcattggaaatcttggtgaaactgttgttgaagaggaattgcggggcctcttcagtgtacaacctggtttcaaacaaatgaaagtgttgcgtcaagacaggaacaccgtctggttttattgagttcgatgatgtgagcgctgcttctgctgtgcaccatactttacagggtgctattgttcctagttctggccgcggtgggatgcgaatccagttttcaaaaaatcccttcgggcgaaggaaggacttagttggtggcatggtcggcactctgaatggtgctcctgtttgaggggatgtatcttgaactttagcatgacatcttgaattatcatctgcattgttttagccaaatctgttcctgtcatgtgcgacatcagcatcttcattgggtggagtttctggggcatgatcatcatcttcattaagtggagtttctgggatatcatcatcatctgatagacattgcattgtcactattttcattgttggcggtttcaacttctttaaattagctattgtggtttgacaaggccactatgaatgtctcctaacatgcatttggcatctgtcatgaatattttgtagtgttatgtagtttttccagtgtgcagttgcaacatttcatgtggtaatggcattgccacattatgatctggacatgctgtaatagtataaccgatttatttggcttgctgacaattcagtgtcgagggatcttgggatggttc

SEQ ID NO: 4741 - DNA, 2761 bp, Triticum aestivum
  Clone ID: TRIAE-23APR03-CLUSTER3419_1
accacccacaccagccaaggggcacacggtctcccccccccgcctccgcgcgatccaatcgcctcgccgtcgccgccgcccgacgccgccgccgccatggcctggctctcgcgcgaaccacggcactcgaagccgtacctgccgtcgccgcggctccgcgtcctgccgctggatttgtccgactcccgcggcgggctcacctgagacggcgtggtcctagtgcccttcttgccggggttttcccctccagtggagcccgaacggggttgccggagtcgctgggcaacctaaccggatgcaggctccctggtggtgcgtgaaaggtctcgccttgcgaatccccttcgcgataacggtgctcctgccgacggggaatgccgcggatcccacccgcagatattcgatccaaaccaccttaacgattactggcattgccggctcttgccaaagcgggtgccttccttttggttggcacacagccaacgggtggaagctcccatggcgagcgcaaggattcagaggactgcacgagcagcgcgaacaacgcaggggagggagtcatggagttcttgtttgaaccatccccgctggattgcccaatctgcgatcagggtggggtgtgtgacccgcaggcagccgaccacctttttgggggatgatggcggtcgtatcgacgatatgaagaggtcggttgtggagaataatttgggcccattggtgaagacggtgatgacccgttgcatccagtgcacaaggtgtgtcaggtttgcatatgaggttgctggtgttcaggaccttggtatgttacgccgcggcagtggtgaaaacgtcggaacatatgtggggaaacttatgacaagtgaactatctggaaacgttgttgatatctgccccgttggcgctcttacatccaagccatttgcgtttaaagctagaaactgggagatgaagggcactgagactattgatgttactgatgcagtagggtccaacatacgcgtcgacagcagaggtcctgaagttatgcgcattgttcctcgtcaatgaggagatcaatgcagaatggagatatctgacaaaacacggttttgttatgatggtttgaagaggcaaagtctgaacgcccatgttactcgtggtccagagcgcaggttcaaggcagtgacatggcgtgatgctattgcggtttgttgtgaggttttgtatcgagtcacgagaagagaaatcagcggaggctctcgcacactttgaggcgcagaatccaagatggcggtgagagattttgttaataaaaggtgctcgtatagggctctctgaggggggaatgctccgactccacgcgcacatattcgataactacaccaaatgaacactagtattgctggttgagaaaactcttatctcctccttgttggggacacacacaagagggtagaagcggttttggtgaacgcaaggattcagaagactgttagagcaacacaagcaaaggtgggctacattggtcctccagcagacttcaactatgacacttggcatcttggcacagggccagatacccttgttgagatcgctgagggccgacatcctttctgttcaatactgaagtcttccaaaaaacccggaatcctcgcgcgagcaggtttgttttaacgagaagaccgacgtgctgtgttctgttctcaagaaaccgtaaaccgtaacttaaatgtgaaaatacggcagaggcccgacttgaaactcgcataactccatattgctccatgctgagctcttgatctgggccgagctgctaatcccaccgagagtgtcaagtctgcaaagttcctttacctgatgggacctgatgggagccgatgatgtgaacttgcacaacgatgcatttgttgtttaccatggggcaccatggtgacaaggccgtgtaacacgggccaatgttattctgccatcttcatcctttgagcgagaaagaaggcacctatgagaacaccgagggatgcacccagtggaccatcccagctgtgcctacagttggtgatgccagggatgactggaagatcgtccgtgctctttccgaggttgccggggctccactgccttacgacagcgtcgcagctgtgaggagccggatcagcatggtggccccaaatcttgtgcgcgtcgacgagagggagccatcggtgatctctgccgaggtgaagcctccagtaaagcagcaagtgagcccggcgccattcaaagctgccgtggagaacttctacatgaccgacgcgatcacacgggcttccaagatcatggctcagtgcagcgcaaccttgttgaagaagtgagaccctgctctatgtacgtccccttgaagaagttaaatcatcggcatacgagattttagttgcttttccatttcactcaccagttgttgttgcttggttggttgggagcataaaatttggactgcctctaccctagctagatccgaggagcagcgaaacttgaaagcagtgcatttttctgtaacgtgtgagaagcggagcatacttaataagcttgttttgtccttttgaattagacggcagccgcaagcaaataattttgttgtattttgggttttcgcctgctcgtttcccggttccaggatgcaggcaaatgtagctgtatgtgcaaattaaggtatacccccattttatcattcactggtgtgttgaatggcacatagctttggaccaaaaaaaaaaaaaataaaaaaaaaaaaaaaaaaaaaaaa

SEQ ID NO: 4742 - DNA, 1510 bp, Triticum aestivum
  Clone ID: TRIAE-23APR03-CLUSTER34246_1
tttttttttttccctttctctctatcatttgcattcattcatccgcacaccaatttgcccagccaggcacttaatccacccccttcagccaaccactgtctaacgatttgacccactacgatctgtcaggaccaacttagattgacaggggcgactgagcagagatactcacagttaaaccctgacaaacacgatcgagttctgccgaaggcctcccgccgatgttcaatgactggccatagctgccggcaaattagctatgcctggccaatcgcttggggcggaagagctcctccagctccggctcctggttgggtgcggcatctaaatctccgggtcggccgtcctcgaccactcaagcgtttccaccgatggcgccgtgtctgaaacactgtgtccagcaagtggggacgaaatcggcttcccagccgtgatctttcaaagacagatcgctggagctcgggacgggggtggagttgaagggttccaacaccctgcctaaggcaacggcgatcttggagcacgacgtggacgcggggcaccatgaagaggctgccgccctcaatgggggtctccagcacccgcttgccgtcggggccgacaacctgaacacggccgctgccacggacgatgtaggtcacctggtaggccgagtcacaggagaagcctggggagcacatggagtgggcgtcgatcctgacaaggtcggcaccaagaccaacctccttgaccagcggcaggttcgcggtgttgagcaccaccacgcggccaccgttggggatgtccacgtccagcttggcctcgaggcagttaagcgccatgtccttgcggtcagcatcgaccggcaccgggagcttctgcccagcagtgagcttcacaatgccagacgcaggctggctggagacgagcttggccgcatcgtcctccttgaggtcccaggcgcggccgacgaactctgtggaaaagccggtgaagatgccgctggcaccggtgagctggaagttggtgaactggccgggcctgtggcccttggaggtgtcgccgaggaagaggacgacgagctccgtggcagactcaggggtgttgtgccaccaggtgaccacgccgaaggggagcgccagagcgtcgccttccttcacggcgaccaccttctccttggtggcctcaggcaggacgatgccaacggttcccttgccttggaggacgtaggcgaccttggcggagtcggagtagctggggagcgacatgccgccggcggcgagcgagagcttggcggcgccgatggaggcgacgccgagcatgggcagctcggcggggctccactcgtagtaggcgccgccgtcgccgccgtaggccttggccggctgcctcggggtcagatccaccgccatcgaaaagagggagatggtagaagcggctacgatcgatcgagaggtaggtcgggcgctggggggaggaggggtaggatgccgggagctggagggcgtgatgaggcgatgtgggatcgtgg

SEQ ID NO: 4743 - DNA, 1450 bp, Triticum aestivum
  Clone ID: TRIAE-23APR03-CLUSTER3426_1
gcgcgcggataatcagcagaccattactctccacaccgttcagacacagattctcaagcggcgcagcttactctccaccccgctcagacagcccttaccccgccgggcagatcctctctgcgacaacagcccctgcaactatgcaggcggcgatttcccatctgaaagaggagctccgcggctgctggatccgatgctcccctgccccacgcctggtgaccaacgccaccaggaggtgcttgcgaaaatcgccaggcttccgacgcagaaggaccgcatcacagacttcctggctgagcgggatgcatcagcgtacaaaagccccaaagaagcaagaggagatgcttgctcttcacaccgttcggacatcccttccctcgccgcgcagatgcgccccgcgccgacatgcactgcaactaagcaagaggagattttccatctgtgattgcagttccgaagatgccggatccgacgatcccctgccgcacggcggtgaccagcgccagcaggaggtgcttgcgaaaatcgccatgcttcagacgcagaaggtccgcatcacaaacttcctggatgagcggtctgcttacctgaccaagttcaccaaggacgccgacaccgagttcgacatgattgggcagaacgccatgaaagagctcgatcaaattggggaccagataatggagcgactcgacagcaagatgcagtcctacgaggagacagctgaaatgcaaaggcaggagatagaaatgaacgagagggtgttagaagatttcgaagactggatcgaagaggagaaaaacgaaggcatgttcttcaaaagccttggcaaggtcaaaaaacctcaaaacaatgaggaaatcaaggtgaaggccaagattgaagcacagaaggtcagagagattgcagaggagagtgcggggtcaaaagctcggatgaatatttaccttgcactgacggcgatactcggtcttacaatcgcaaatgccgtctttgcaacgccagaggtggaatggaggaaggttgctgctctgggtctaattttcattggcctggttgctcaggtaatctatgagcaagatatatccccaccggtagctgacaaggatgaaaaaagagaagaatgaaagagctgtgcaccctgagtgaaacatcaaaaagcagcaagagcttcatcgatatagacgtagactgtataaattcaagatatagattgtgtaatcttagttatcatttaaggtgtagcttggcctataaaccacaggtttcttacacctgaggtctgataaactcaagctgtgttcaatcttgcatcaaagatatgtttcagcaatataactttcaaagccaaaaccatgtaacgaagttacaattttgatgcacacaacacgtcaagttatcaaattcaaataaaagacctcggccgcgaccacgataatcacttagtgaattc

SEQ ID NO: 4744 - DNA, 968 bp, Triticum aestivum
  unsure (1)..(968): unsure at all n locations
  Clone ID: TRIAE-23APR03-CLUSTER3447_2
ctcagaagcaggggagagagctcgctgccgccctgccctgccctgctctagagtctagaaggtcgaccggcatggggaggtcgccgtgctgcgagaaggagcacaccaacaagggggcgtggaccaaggaggaggaccagcggctgatcgcctacatcagggccaacggcgagggctgctggcgctcgctgcccaaggcggccggcctgctgcggtgcggcaagagctgccgcctccgctggatgaactacctccgccccgacctcaagcgcggcaacttcaccgacgacgaggacgagctcatcatccgcctccacagcctcctcggcaacaagtggtctctgatcgccgggcagctgccgggcaggacggacaacgagatcaagaactactggaacacgcacatcaagcgcaagctcctctcccgcggcatggacccccatacgcaccgcccgctcacgcccgtcgacggcgccgcggcgtcccgcccggcacacatagctgtgccagcgagggcagcgccacccacgatgttcgcccccctgacgacgaagcagcctcccatggagtcgtcgtccgacgacggcagcagcggcgcgacgagcacgggggagccgcggtgccccgacctgaacctcgacctgtcagtgggcccgccggctgccgacacgccgacctcgcacccggtctgcctctgccgccacctcggcctccgcggcggggcggtgtgcagctgccgtcaggccgacagcccgggctcccaggggggcgggttcagatatttcaggccgctggaggaaggccagtacatatgagacgagacaggacggctaggccctaggctccacagcaatttgtaagacggtgaatttttccacctccacagcaccaccgtctcacaaaacggtgaaagaatatctaatctgttcataatatttcaaccatgaaaaaaaaannnnanaannnan

SEQ ID NO: 4745 - DNA, 2734 bp, Triticum aestivum
  Clone ID: TRIAE-23APR03-CLUSTER345_1
taggggccttttttttttttttttttggacagatcatgcaattcagttatgaaaagttggatccaggaattgacttatttttacgagctgcaccacaacaaaacttgcaggttacaaaagtactcacaatgctcttccccgctgccaccactaaagccccacacacgcacacagaaagcagaccaaagtagccagacaaacgaaaactccaccaactcaacacgagagcagtcaatcatcgcatgtctcttcatcaatcatcaatgggggtgcatggcaatgaaggcacactgatgttctcctccatcgcgctgctgcggcaaaggttcagcgagctggagaggatcaaggagaaacaggaggtcaggctttaccacatactcgccctcgcagacccgacttcactcacattgtcagtaacaaaaccagaattgagtggagccgccggtcagatgattcttccactcagagctgctgcatccatacaggcctctgtgcggcactactaccttctgtccagtcgtgccagccaccaaaactgcttcggaatgcaaaaccatccagctcggcagcgattcactcaccgtggcccagcgaggcctacaagcacgcgtgcagcgaagttgatgcctgacacctcagtgcacctctagattactactaatgttactagaaatgttgtcctaagctgttagccttcgcagtctccttggtgttactgtcgctgttttccgtagcctattatgttttccctcttttctcttcttcggttgtatgttgagggaccggcaacgcggtcagcaccccggacaagggcagcaacccggacaagggcagccagggtactacccaacttctttgcagccgtcaggacaagagcaactgcccggacaatggcaacaaacagggcacggacgcccagcgtactacacaacctcttcgatgcagccagaacaagggcaacaagggtacgacacaaggacacaccagcaaccaggccaaggggcggcaacaggacgaaggaaacaaccaggacaagggcagcgagggtacgacccaactgctccgcagcagtcaggacaagggcaacagccaggacaatggctgcaaccaggacaatggctgcaatcagggtactacctaacttctccgcagcagttaggacaagggcaacagccaagacaatggttgcaaccaagacaagggcaacaaggatactacccaacttctgccaagaagtcaggacaagggcaacaataaggacctagggcaactactcctactgaaccaaggtcacggcaaacagcaagaacaagggcaaaaagcaagaacaacgacaccaacctaggacaaggcacaaccagggtactacctaagttctccgttgcagctaggacaagggcaacaagggtacgatccaacttctctgcaacaaccaggacaagggcagcaaccaggacaatggcaacaatcgggacaagggcaacatgggtactacccaacttctccgcagctgtcaggacaagggcaacggccaggacaatggctgcaaccaggacaagggcaacaagggtactacccaacttctccgcaacagccaggacaagggcaacaactaggacaatggctgcaaccaggacaagggcaacaagggtactacccaacttctctgcaacagacaggacaagggcagcaatcaggacaagggcaacaaggctactacagctcataccatgttagcgtggagcaccaggcggccagcctaaaggtggcaaaggcgcagcagctcgcggcacagctgccggcaatgtgccggctggagggcggcgacgcattgtcggccagccagtgatagaactctctgcagctcgcatggtgcttaggcatgcatgcactttagctatacaataaatgtgacgtgtgttcacagtttttccatgtaacatagtagtaaagccccagtaataatgagaaatacaataaacgtgacgtgtgttcacagcttttcgtgtaactagagtaaagcccaataataatgcaagatgaaaagtttctccgactaggacaagggcaacaagggtactatccaacttcttcacagcagtcaggacaagggcatcaatcaggacaagggcaacaagggtactacccaacttctctgtggcaaccaggacaagggcaacaaggctacgccagcccataccatgttagcgcggagtaccaggcggcccgcctaaaggtggcaaaggcgcagcagctcgcggcacagctgccggcaatgtgccggctggagggcagcgacgcattgtcgaccaggcagtgatagaactctctgcagcttgcatggtgcttgggcatgcatgcaccttagctatacaataaacgtgacgtgtgttcacagcttttcgtgtaactagagtaaagcccaataataatgcaagatgaaaagcttctccgactaaaaaaaaaaaaaaacatgcgcgctccccagctcctcatcttgcattatgggggggcgtcccgctacccccaataagatgtggtgcacagatgctgctcctcaggactcaaaagttggacaaacttggcatgcgaaagtgatacatgtgagcttgactttgagaattgctttgtgcctcagtgaaggaaatagctactgagagtactaacgataaggggcaagaacaatacaatccatgcattgccagaaaacctctatgcacaaaaaagagag

SEQ ID NO: 4746 - DNA, 1343 bp, Triticum aestivum
  Clone ID: TRIAE-23APR03-CLUSTER3465_2
gtcccgcacgctttcccctcctccaagctttcccccaccggcctcccccgtctcctgcccccacccattcgccgctgaccccccttccagaaccttccagaagcgaacgagagagcccgcaggggcggcgcaggggcatggcgatggcgacgcacacgggggtcgccgcctccaaggtcctcatcctcgtcggcgcaggcctgacgggatcgatcgtgctccggaatggccgcttgtcggatgtattggcggagctccaggagctcatgaagggcgtaaatcaaggagaaggctcgagcgcctatgacatggctcttatccaagctcagattcggcatttagcccaagaagtcagagatttaactttgtcaaagcccattaccatattgagtggcaaatcggactcgggaggcagtttatcgtcctacatactgccagcagctgcagttggagcattaggttattgctatatgtggtgtaagggatggtccttgtcagatgtcatgtttgtcacaaaacgcaatatggccagtgctgtcgacagcatgtcgaagcaattggagcaagtttcatcagcactagcagcaaccaaaagacatttaacaaaacgccttgagaatttggatggcaaaatggacgaacaagtggaagtctccaaacaaatccggaatgaggtcactgatgttaaaactgacctgtcccaaattggctttgatgttgaagcaattcaacagatggtagctggactggaagagaagattgagttgcttgacaataaacaggatgcggctaatgctggtatatggtatctctgccgaatggcaggaggtataaaagagggaataaatgccaagtttttccaagaagcggatgaaaaactcaagctcttagaccttgctcaaactgaaaagaagccagtgaagggtctcgaattgtttctggagagcaccaaggaggtaaaggcactcgactccaagccaaagaccatcatgcagaacgacgtcaagaaaccgacgaaaacgttcgacgtgcccataaaaagcgctgcggtgcacaggtcaaacaggttcttaattcgtaaagaaggcctcgcgctgtgattgacgcggatcgcctcgtggtgtacattgcgttcttggttgctttgtttgatagaaaaaatatagaagaagaataacctgcatcccatgtggtgattttccaggatagacaggttgatacgtctgaaggcaatttgtattcgtttctttgtatttttgcgtcatttcatgtttggtctgaagttgttcgcttgtaaacaagtgacataaaggaataaataattaaaacacgtttcgcattct

SEQ ID NO: 4747 - DNA, 1362 bp, Triticum aestivum
  unsure (1)..(1362): unsure at all n locations
  Clone ID: TRIAE-23APR03-CLUSTER34679_1
gatctatgggttcgatgcaaatgcgctttcgattttggtttacgtaaccggtttctcctctcgtcctcaccagtctccgtccccattcccccctcgaatttcacgcaccagctttggatttggtagccagacggacaagaggagaggaggatcagcgaggccgagttcatcagtctccgtccccatttccccttcttgttccttcgtcccgactcttcttcctctagcctgatcggaacgaggaagactttgaggggttttggccggccggcgatcaggctcatcgaccatgaccgatgtattccagggctacgagcgccagtactgcgagatctcggcctccctctcccgcaaatgcacggccgccgcctcccaggagggagagaaactgaagcagaaggcctcggagatcaaatccggaatcgatggcgccgaggcactgataaggaagatggatcttgaagcaaggaacctccagccgagcgtgagggccgggcaactggcgaaactgagagagttcaagtcggatcttaacaatctgaagggggcgttgaagagaatcactgctggatcttccgcgctcgaatttcacgcaccagctttggatttggtagccagacggacaagaggagaggaggatcagcgaggccgagttcatcagataaggaagatggatcttgaagcaaggaacctcccgccgacggtgagggccgggcaactggcgaaactgagagagtacaagtcggatcttaacaatctgaagggggtgttgaagagaatcactgctggtaatggccaacaaggggcgagagaggagttgctggagtcaggaatggcagatacgttggtggtatctgctgatcaaaggtcaagattgctcaggacaacggaaaggcaaaatcagacaactgataggatcagagatagccatagaactatgctggaaacagaagagcttggagtctccatcatgcatgacttgcatcagcagcgccagtctcttttgcatgctaatgatacgttgcatgacgtggatgacaacattggcaagagcagaaagatcatgggggccatggtgagaaggatggataggaacaagtggattatcggcttgctgatagcccttcttgttttagcgatcctagtagtcctgtatttcaagtttgtgcactgagggattccttgccattaccatatgactgcacttttctatgccaactacctttacatttttggtgtgtttcacactttccatgtcatttttttggtttggttttgcagaaccatttaatgtggccgtgtttattgtttttcctataaaaaaatgttagatgatcttccacgctaatcantagtgaattc

SEQ ID NO: 4748 - DNA, 704 bp, Triticum aestivum
  Clone ID: TRIAE-23APR03-CLUSTER347_13
gacagagcaacgcggccccaaaccaaacctccggacgcagggcaagagagagggagagagagagagagagagagagagagatctccatcaccgatggcgtcccggagctgcaccttcctggagatcctgctcgccgtcatcctgccgccgctcggcgtcttcctccgctacggctgctgcagcatggagttcttgatctgcctgctgctcaccatcctgggctacatccccggcatcatctacgccgtctacgtgctcgtcgcgcatggctccgcctcggaggagagcggcagggactacgacgcccttgcttgataccgtgtagcaactcatgccgtgcgaatccacgtcgtgtgtgtgtgtttgtgtttccatctgctgcaccgtgtggcgtgccttctttctagtatatcagtctgtaaatgctgcttaaaccgtgctccggtttccccggccgtcctgtgattctctcatactacaaccgaataaatttcagctctgaagatttttgccactggtttaccccagtcggtgagcaggtttgtgtgacaatcaaaatcgaagcctccttgccacgcctgagattttgtgcacggttaggagggaggggagtctttgtttatgtccgtcttgctgagctcttcttgatcgatccatctctgttatggttcgttccggtgcgcgtgcttcccagcgtgttctct

SEQ ID NO: 4749 - DNA, 1731 bp, Triticum aestivum
  Clone ID: TRIAE-23APR03-CLUSTER348_10
acgtcacttgaccagccagccgccccactccaccctccactgcggcacgcgctcccggcgatgtcgtggctcgcgcgctccattgcggccaccctctcctccgcccccgacgacgacgacgacgacgacgaccaccactccgaggcagccaccggcgacgaaaccccggatcacgccgccagcgccgacgccgaggaggacgagcagccggacacccccggccgcggggtcaagggcgacatctccgagctgaccgagtccctcacccgacgcttctggggcgtcgcctccttcctcgcgccgccgccgccgccggccggggccgaggccgagacgtcgacggcggctgctgaggcggaggcggaggcggagggagagtatgggccccagtccccgcgggtcgccgggatccggaacgacctggctgagatcgggggcagggtgaggagcggcatctcgatgctgtccaacgccaacgccgtggcggagatctccaagatcgcctcgtccttcctgcctttcgtgccggaggaagaggaggaggatgtggatgcggtgggcctgacggaggaggtggtggtgttcgtcagacacatctcgacctctcccgagacgtggctcgattcccccctcttcgtcaacgaccggcacgccgatgattttgaactgtcagatacacaatatgaacatgcattggctatagagcgtatagtaccaagcttatcatatctcagaaccgaactttgttcgaccaatatgagtgaagcatgcttttggaagatctattttgtgcttcttcactcaaagctcaacaaggaaaatgctgaagttctttcaacaacacaaattctggaagcaagagaagagttgttgcagagctccccaaggatgaaaaatgtagcgtctgagggtcctgggggctcatcagaaagcagcaatgttccgtctacccaagctgaagatatagagttctcaccctcgagcatccaagacaagagtggaattgctgaagcaacatctttccaagaaccaactcctgatcctctgccaggggctgaggctgacaagcatcccatttcaaccagcgagccggaaattattgacaagtctgtaattgaagaagagctggtggtgaaaactgaaatcaagaatccaggtgacaaacccaacctgtacaccccggaggatgacgacgacaaagaagtggaggattggctagaggacatggaccatgccgacaacaaaacaggcaatatcacctcggttgggcaggacgaagacgtgtcattcagtgacctggaggatgacgatgatgattaagggttgcctggtggtaaataccaagcccagtgcctgatacatatgctctgcggcttcaagacatacggtcgctgttaaaacgaaggatcgtgtctcagtagctactacaaagcgaacaacgcggaagcagaatcacgacaagttgataagcgtgtgtctccggggttttgctttcttgattcgagttgaacgtttacttgtgtgccgtcatggtctgtacatagaaacagtagccgcacgtcacttgtaagctgtgttgatgcaagattctgaatgtagatgctaaaaacatgtttatttttctagtgaacgcaaactacgatacggactaaagctgtcagatatcgtgtaactggtcaagttcaagtaaactcgttttgtttccgtattctaaaaaagggggggcccggt

SEQ ID NO: 4750 - DNA, 1280 bp, Triticum aestivum
  Clone ID: TRIAE-23APR03-CLUSTER349181_1
agcaacgccgacgttggtcggccgcacggatcacactcccactcgaacagcacacagttcgccgcgccggatccacgccaccgccgacgcgatgccgatctgcccggcgccgtcggagtcctcgggctccgggagccgcgtgtggatcttccacgggctggcgctcggcgcggcggcggccgccaccgcggccgcctacgtgtaccgccggccccgcgggttccgcagcctggcggtgggcatcatccccgcgcgctacgcctcctcccgcttcgacggcaagccgctcgccctcatcctcggcaagcccatgatacagagaacctgggaaagagttatgctagcttcttcattaaaccatgttgttgtggcaacggatgatgagaaaattgctgagtgctgtagaggatttggagccgataatggatctgaacgctgctgtgaggcacttcaaaagctcaggaaacattacgacattgttgtcctcaggcaacattatgacattgttgtcaatattcagggggttgaccctcttattgaaccagatatcatagacggtgtggttatggcattgcagcgagctcctgatgcagtcttcagcacagctgccacggcactaaaacctgaagatgcatttgacacaaaccgagtgaagtgtgtagtagacaaccagggttatgcaatatacttctcaagagggctgatcccatttaacaaatcagggaaagtcaatcctcactttccatatcttcttcatcttggaatttcgggctttgattcgaagtttctgaagatctatccacagcttgcaccaaccccactgcaactagaagaggacctggagcaacttaaagttcttgagaatggctacaagatgaaggttatcaaggtggaccatgatgcccatggtgtggatgcgcccgaagacgttgagaaaatagaagcattgatgcgggcaaggaacatccagtagtaaacagcacggaaacgtttggtttcgcatcacgcatggtctcctgttaggttggggttatggtatcctcgagtttgtaaaaagaatcgggagcaatgttcaggtgcatttcctttatgaaagagattcttagtgtgtaactgaaggaactgggtgggtgcaccgtctttgtgtgaaatgcacctggtgtgtagttcttgtaagtatgtaacattccaatcggtttctaagataaaactaaaaagaaaaaaatgaataaaaggtagagcattgcacacattactacaggcatcgatgggtcgatcga

SEQ ID NO: 4751 - DNA, 1165 bp, Triticum aestivum
  Clone ID: TRIAE-23APR03-CLUSTER349_24
aggtcaagcaaaagcacacaacatcctagtcctacctacgatctacagaattttccgagcgcacaagccgaagcaatcaacaccgacgatgtcgatcgtgcggtggagcaacgtgttcgaccccttcgccgacctctgggcggaccccttcgacaccttccgctccatcgtcccggcgatctctggcggcacgagcgagacggccgcgttcgccaatgctcgcgtggactggaaggagacccccgaggcgcacgtcttcaaggccgacctccccggcgtgaagaaggaggaggtcaaggtggaggtggaggacggcaacgtgctcgtcgtcagcggcgagcgcaccaaggagaaggaggacaagaacgacaagtggcaccgtgtggagcgcagcagcggcaagttcgtgaggcggttccgcctgccggaggacgccaaggtggaggaggtgaaggccgggctggagaacggcgtgctcaccgtcaccgtgcccaaggccgaggtcaagaagcccgaggtgaaagccatcgagatctccggctgagcattggagccagtttggttgatgtgtgtgcgaggtctgcaacctgaaagtatgctacagttcttgctgatcgagtctggcgaggcaactatgaacaatgtattgcgtttctttccccagtcgtttatatacttgtgtaatcacctacagatttggtgatgaataaaccggtcggcttttgctcgaatttgcaatggataatacaacaacattagagaccgtccatggcggcgtccaagcgcgcgcaacgcggccttatgcatctaagctcgaacttcaacaagagataaaaccgtacgtagtacaatatttaccgcccacccgcatcatcatcgccccctccccacgatcagttgtggcagatcttggcggtgggcatggtgatgcagacgggggcgtacttcttcttggcctcgggactccccttcttgacgtccgactcggcgaacgccaccccgccaatggccgacaagcgcagcggcggcagcaaacaccacggcacggcggccgtcggtggcgggctccacggctgccatcttgcgcgccggctcctgctggccctcgaccttggcggcccgggccaccacgaggcgcgcgcggggctgccgcggccgcgaattc

SEQ ID NO: 4752 - DNA, 1477 bp, Triticum aestivum
  unsure (1)..(1477): unsure at all n locations
  Clone ID: TRIAE-23APR03-CLUSTER349_32
ttttttttttttcttcttcaagaaaaaagaactcatttccctcttgcttgcgcgtgctagcggttcccaaatcccaccagcgccgccacaagccgccggtcgccgctcccccagatcccgccgtcgctgccccctcgcttactccgtagtgcacgcatcttccgccggaggccgccccacctcccccgtggtgcagagcatccaggcgggacgccgacgccctccctcttcctcgccaccgccctcctcgccaccgccctcctagacatcccctcctcggcaacgacccgaatctgcctcctctccaacgccggccgccgcggatctgcatctgcctcgtcgccggacagatgtttctcgatgtttctagccaaatccaaggaatcgatgcagtatcaggtcatggaggggaggaaggacatgcaagagtcagacactgcacctgttgttcaagtacccagagagcctgccatcgttatcaatggtgtcccagactttcctcctgatttcgcatctggttcacaacttgcagtaagagatgccccgcgatctcgagctgatcatcgctttggtgaatggctagtagagcggaaagtgaggaagtggtttggagacaagtactatgcagggatagttgtcaggtacgacagtggaaacaattggtacaccgttgtctatgaagatggtgaccaggaagatcttgagtggcacgaactggaggagatcctgctaccgttggacataaccattccgctcaacacacttgtgatggacaaattcaaacatcagaatgttgttcctgactacagaactaatgttgctagcaatcagatggtggtcagagcggtaaatggccaacagtcaaacaacctaccactaccagggtggcttcaggcgtcagcatcagcaggagaaaatgctttagtatgtytgaaacctagtgatcaacctaaraaaaggggcaggcctygaaaggatagaagtgcatcaggtgatattcaacctaaaaaraggggcaggcctygaaaggatataagcacatcaggtgatattcaacctaaaaaaagaggcagacctccaaaagaacctggagagaagagtattgataggagcaaattagagacagtcagggcagaaaaactgaagagagaaagcatgcttytgcgagggccaccacctggaagccagtcattctaataatcaatatcmccgttccaatatctagtagatatctctaaatattccagtctatgtatgcttgcgacgctagctttcaatgtacgttgtacaacccaacccagcgtacttttaaatctatatttactatgcgactgctgtcatatcaaattcttctcctagacaagtatatctgcatgctgtttaaaattcctctgggtacagtctttaggattctccttgtggaaagggaacctagtgtggttaatttcaanaaaananaaaaaaactcnaggggggg

SEQ ID NO: 4753 - DNA, 1377 bp, Triticum aestivum
  Clone ID: TRIAE-23APR03-CLUSTER349_36
tcgataagcttttttttttttttttttaagggaactaatatatatttttccttcctgtacaagatatgatcaggaagttttgatcaggaacaacaacatacgaacgttgattagcaggcaatgatacacaaccgtgcaagctggggctcctgatattcagatcgatgctatttttacacttcgggagtagagtacatatgaagaacacatatctactgttgttcagacgtagttgaaactgcagcataatcatatttgacgtctacagtgttgctatcttgggaaccacgttctctccaactgatcttccacatctggagtaagcttaccctatcaggttcaattgtcctctttgccaacatgagagtcaagaaaacaggtaccatcgcagcacatagatgtttaagagtgtgtccgctaacaatgtcatgtgtccacctatatataggtttgtccgcagcctcttccactttggcaagaaggtaaaatcctgctgcccacaaccagtagcttgaatgtgtatacattggtggaataactatagccatcacaggtattacaatgcatggaacgaactggattattgcatatggccgaagatcatcaaagaaactccagtacaggatgctcagtgcaccagcaataacaaggggtgcaagggactttgttcctgctctatcatcaaccctttcaatgatgaaaatggccacaatagacgtgaaagcaatcgtcataggcaatctgtcccaaactaaggtggcatcgtttgggtagagatggtagtaggatgaaccaacaccgacagtagtgacaccagcatagaagagtgtccaactccagagctccccctgtgagcatagcctgaagtagtttttgtagtggcacaggatgagcccagcgagaccgacaaagaggaaagggatatttgagagcacattcaatgtgttagggatccctaggaagaggacgcgctggtcggcgaagtcgtggtagtcctcgtcctgcgggatggcgggcgtgacgagcatgagcaccacgaagatggccgccgccgccgcccacgccacccacttcttcctccaccactcgccgtccatcgccgacgcgctccgccctccaagcttctctgctctccccttctcctgccccctcgaaatctttccctctccggatgcagtcgaaatctttccccaaggccgggcagcggcggggaaggaggcaggggcggcggcgctaggggcgagaggaagaggagaaggaggtcgggcggcgacggggaagtagggcggcggcgctaggggagagtggaagaggagagggaggcgcgggtgcgagaggaggagggagggcgcgggtgcgggaggaggaggaggctgc

SEQ ID NO: 4754 - DNA, 1187 bp, Triticum aestivum
  Clone ID: TRIAE-23APR03-CLUSTER3509_1
aagcaattagtagcagaagacgccacgcaaagcccagtccggcgtcgcctcctcctcctccggcgatagggtttcccccgatggagcagccctccacctcctcgccggcggcgccgcccccgcccccgcggcggccgccgacgaaggtccggctgcggcgccagaggctggaggcgctcctgcaggagctccggcagacgctcgacgggatgggcgacgccgatctcggcgcctcgctctccgacgcggacgccggctccgaggcgcccgagtacggggacggcgagggcggcggagacgacgacgacgacggtgactcggcggcttcgatggccagcgactccgaccgcgccacggaccaggtgtttgatctccttaaatctaggtttgagtcaccagaatttcttcaggagttccatgaaattcaaaagtctgtatgtcaaaatggtgcggttgaattggataaatcatgggatgtaataaaggcgggagatgtgtgggaagatgatgacgacaatggatatgttcttgttaagccagaggatgcagctgaagggatagctttctttgtagccacatacttatcgacacttacaaaaaccaaggaattatctcctgatcgacttcagaaagcccttaagaagacattttcagccgagaagagaaaaggcaaacttcggaaggcatgggatgggacaaaagtcatttataatgtagcttcatggggtgccacagctgttggcatctacaataaccaagcaattcttaaggcagcaggcacagccattcagatgtcctggcgtgtggtgtccaagttcctgtgagtgatgggtggtggtgattgttgttactggcgtgctacatttatttaggtaaaggataccacattggttggaaatgtccgagtagttgatatactgccgattgaagaattgtggtctagagtatgtctgttgggatgtttgaaggattgaggcttagcgtttaggtttgttgattgaaggcgcggaagcccatttaaataaattatgttggtgctagaatgtaaataggccatttatctggctgtgtgcggcaactgaagctcggcatatgtatccccaaaatgtaaatatgacattcatgtcaacaacattgcattgtgccagaataaactttgtgaatgaactgcaaaaaaaaaaaaaaaa

SEQ ID NO: 4755 - DNA, 940 bp, Triticum aestivum
  Clone ID: TRIAE-23APR03-CLUSTER3526_7
tccctctccctctccctctccaacgcatcgggcaacccacccccctccaaccctctcccactgattcgctcgccgcgcgcgcgcgagatccagccgcgccccccgccgagatctcccggcggatcactaggacggcgccgccgaggagctcggagccatggaggcgtcgtcctgggacgcccttcgcaagcaggcgaggaggttggaagctcagttagacgaccaaatgattgcataccgtaaattggtttctatgaaatcagatggttcagaaaatgatatcgagactgatatagaaagatcactaaagcaacttcagcaagtaaattctcaaatgcaaacctgggtatcatcaggaggctcagaagttctatctcatacattgacccgtcatatggagattttgcaagaccttacgcaggaattctatcggcttcgatctagtctcagagtgaagcaacagcatgcttctctccttgacttgagagactttgacagagcaaagtttgacgtggaagagtctggggactcagaacaagctcttcttagagaacaagctgcaatcagcaggaattctggacaggtggacactgtgatatcacaagctcaagcaacactgggcgctctcatgtcccagcgttcaacgtttggtggcatcactaccaaaataagcaacgtcagcagccggatccccacgattaaccacatcctcgcgtcgatcagaagaaagaaatcgatggacacgataattctctcgctcgtggcgtcggtctgcgcgtttcttatgttcatctactggttgtcaaagtagtaggatgtggttggccacagcgaaaaggcatcatagtgttgtaagtttggatcacagtgccggtacagataatgatatgatgattggtgtttgtacaatattgattcaatggtattacgttttcacacc

SEQ ID NO: 4756 - DNA, 2588 bp, Triticum aestivum
  unsure (1)..(2588): unsure at all n locations
  Clone ID: TRIAE-23APR03-CLUSTER3534_1
agattcgaactcccctctgacctctccccacaccgcgactcaaatctagggttgcttcgctcgctctcctccgctccgcccatggccgacccgccgcccccggacgcgcacccggagcaatcccccgccaccgagaagccccccgcggcgcctctgacgcccgaacccgggggtgcggcggagcaggaggtggtgtcggaggtggatgtggaggacgtgagcgaccccgactacgctctgccgcaggcgtgtcgccgggaggccagcgacaaccaggggcctgagtaaggtaggcggccgcccaggtcgcccatcgaccccgaccacgacgacgacggccaatgttgcctgaagagattactcagccgcagagcaagcagaggaggtactcagagatgaatttcagtcagtgaagctccctgaaaagtaagttgccgcggaataagctgcttacggccctgttgtaggccctttgtgatctctggttatgatctgagcactttgggtggcttggtgtcctaaattatattaggtcttatagatgcctgctcgtgctgtagttatctggatgggggtcgcttcccggccgcgcagggggtgcatttgttgcttgtgatgaccggtttgtgttgcttggtcgaaatgtctgatttgttggtggcatctgaagacatgagcgggtggcgaagggcggtctggcttgggtgcctgtctgatttgaggaggtaaagcaagaagggctgcgcgttcatgttgagcgtatgtcaagaggccgttttagaggtcgtggtagtggaggtaggactagaggcactgcccgtggattttcaagaggagggaggtaccacagttatcacgaagatagcgacaaccaaaatcacagtgaaaaccagaaccggccccaaaagattgtccgcgggagaggacccagacgttatgacacaattgcaaagaacaaccgagatgttgtcgggttccaacgtaaacaaccaacaagatctcgcgaaccggccgctcattctgcagcggccagagagcctggccaaatttcaaatgcacattcggaagcagttcctgctaaaaagaatgttgtcaattcaagcttaaattctgcgtcaccaccattttatccctctggtgcctcaaaccaagtgggagctcaaagaagggacatacaaccaggaggttcaaataaggttcatccatcttccatgaagatggatgacaacatgaagctacaatctggtccagtagttagagggaaaggaaccacggactatggtggacgagataggtttcatgccgagggtcctgttagaccatctcctgcaagaagtgtaggaggatcatcatactcatcagggtttgcatcatcatcaatcaattctggtcaatcccctaataacagggctcaagggggaaatgcaagcattggtgttccttcacataatcggcccacaccatcatttcagcaaacttccagggtttctacgcaacagcaaaatcatacctcaattatgcaccagaagtcaggccaagcacctagtcaagcttcaatgagaatcccaactcagcagttgagccatcggacaggcaatgcttcaccaagtgctcagcacctacctgctagatcaactgaaagtgacgagaatggttcatatcctagttcaaatcaatccaagacatctgaggtggaaaaaaccaacaaagaaactggacggggctccttcatgtatggtggagcccaggttattggggctgctggtcttgcccagggcgagcaaaattttcctggcactccagctctcctgccagtgatgcaatttggcggccagcatccaggtgggcttggagttcctactgttggtatggccctccctggctatgtggctcagcagcagctgggaatgggaaataacgaaatggcgtggttgccactattggctggtgcagctggggcttttggaggatcatatccaccttacattacccttgatccaagcttttactctaggtcttcaggacagacatcgtcgtcagttccatccagggaaggtaacgttaaccatggggctaaatctcctcctcaaaacgatattgtgactgaagagcttgatcagcgccagaacaagcataggagatactcagagatgaacttcagtcagtgaagcaccctgtaaggccctgttgtaggccctttgtgatctctggttatgatctgagcactttgggtggcttggtgtcctaaattatattaggtcttatagatgcctgctcgtgctgtagttatctgatgggggtcgcttcacagcagagcagggggtgcatttgttgcttgagttgtggtgttgcttggtcgaaatgtctaatttgttggtggcatctgaagacgtgagcggttgttgaggagaggtttgaataatgatctgtgttgattgataaagaaaagcaagaagggcttttagtacattttgttagtgacttgaatttatgtcagtataactctgatgtacctatctatctatcctccaatagtggtattggcaagagcaagggctttgttgctgcagtttgtatctttngagtat

SEQ ID NO: 4757 - DNA, 1434 bp, Triticum aestivum
  Clone ID: TRIAE-23APR03-CLUSTER3545_1
tcggttagtggggcccacactcgccttcaaaggacggcgtggggccggctgtcatcacctctccacttgctgcgctcggcgtagctccctctgtctttcattgattacaggatataactctatacagagatccttcctagcatctaggagagaacatgcccgtgcaaagccgcatgcatagaaaaactgccacttgccaaacacttaacgaaactgggaaaatctatgtttttcataaactagagtatttgttgcccatctattgaaatactgaggttttggaatactatggttttggaaaaacggtgttgccaaactaggcctaaaactttttggactaccaatgttgtaaaggttaaattattatattttaaggttgtaaaggctgtatgttgtgttggctaagactaaagattgtaaattcatcatcgtaccaatgtcattctctttgcagatgattctagaaactatattatcagttcattgctactttgtatgtgccttatgatatgtcctcgtatatgtctggactgaaatatgagtgtcttggtccttcttatattattttttatgatctcagtcagcctctttcacacccattgtgttgaggaccaaatgaaaatatgttcattttgatgtcattttatttgtgagtaaatagaagttaacctgattatgtggttgcatgatttgcctgattctgtgtttcttttggactttatgtttttctatgaacttgtcaaatctatatgcgttcttatataattattctctgcactttcactactaggaaatatcttatagctttagttgtgcattagggcttaaataagaatctctgggaaaaaatgttgcacattggcatctacatgtactgcattgttttcgtgccattcttctgaagaatctgaagtttctgaacctttgtttgtaatgctgcagggttctggtggcgatgatgacagtcgtcgagaggttcgtggacttgacggtgtcgtggctgacaggtttcagagtgcggggagcggggcacgtgtacgatggcttactccgtccgctggtggcaaggcacgaggacgacatcgaccgagccagctggagctgaaggccagagcgagggatgtgactgcgtcgcaactcaaggtggcggctgtgtgtcgtcgcagctgtaggccgtgagatcaggccgggcaggctccgcgcattgacgagtggtccaatttccggatcgagtcataacaacttacgtaggtagttgcttatgtaactgtgcgatagaatggaattatacatgagttggtgctacaatgtggaattggataacatataaaactgcgatagagtgtaattttacatgagtttctgctacaatgaggaactggagaagatacgacaactgtgtgatagaatgaatttggttgtttttttaaaaaa

SEQ ID NO: 4758 - DNA, 1403 bp, Triticum aestivum
  Clone ID: TRIAE-23APR03-CLUSTER35472_1
ccacgcggcatcaccaccttttcctttcccaaccctcgggcggcccccaaaagacaccactcgctttcttgtctgcttccgcacacttcttcctttcttgtcttgttgcggagcggccgccgcctcctatgcctcttcgcctcctcttcctccttttcttcctcgcttgctccctcctctcccccgagctcccctcggtcaccgacaaaccatgaggccatgatgacttggatccagctcaggtgaccaacccgacgacgcccatcacagtcccatccacgaacccagcaccaacaatcatcaccgtgccatccacgacccctaccatcacaatcccttcattaaaccctttgcccacacctatcacaaccccctcaaacgacccttcgaccacatttaccattggccaaccccttcgacatctgcaccaaacacgccagtccccatccctgttcccaccccttcgacatcccccccatcggcaccactgacaaacccagcgacgaacccaatggtgcctactgtcggcactacaccgcctactgctccgaccactactccagtcacagctccagttgtgtcagggcagcaagcctggtgcgtggccaaggccggctcatcagaaaccgcgctccaggacgcactggactatgcgtgcggtattggtggagccgattgctcaccgatacagccatcagggagctgctattatccaaataccttggaagcccatgcgtcatacgccttcaacagctattaccagaagaaccctgcaccctccagctgtgactttaggggtgccgcagtgcttgccaatgctaatccaagctcaggaacctgtatattggcatcatcaatgtcttctccaacgagctctactgctggatccactgctcctactacatcatccactagccctgttactagttcatctgattctgatccaggatcatcagtactgaactcgagtggctcaggcatttctggatcatcagactttgggtcggacttcccaggagaggccaacactggcaatggttggcactcaatcttgccctctggctggtcctgggcaggtttgttctcaacgcttgcattgccatacgttggagggatattttgaagaacgaagctgctccagaattttggaaactgtgagagttgaagtggtggcaaagatttagagttttgcctttagctgtagtggttgtatcctgtatgagtaggccagagttgtgtgctagtaggaagtaggcttattgcctgtattaaccagtggatgtagtttctaggtgtatcaaatcaaatgttgattatgtgcacttctgctcttgcaagttgttgtattttgctcagtttgaatgtgtgatttaaacttgaagcagctaaaaaaaaaaaaaaaa

SEQ ID NO: 4759 - DNA, 1112 bp, Triticum aestivum
  Clone ID: TRIAE-23APR03-CLUSTER35532_1
aaaatcgggatacaccaccaagctcggcaaacaatggaggcgtcgctgtcggccgctgagcagagggatacacgaccacacacggcaaaccatggaggcgtcgctgaccgcggccgccgccgctacctcgtaagtgccaccccaccacacacggcaaacaatcgaggcctccctgaccgcggtcgccgccgctacctcgatcgtttccgccgcaaatccgtcgccgaatcatcaaattcaacccgccctgtgcttcctaggcgaccccaattccgagactccaagatctggaccgccaacttccggggacacctggctgcggcctcggcatccacgccgccgccgccgggaggcggcctgtactcggcggtgacctacgaactgacgccaggtaacgtcgaccgcgtcctcgacgacgtgcgcccctacctcatctccgacggcggcgacgtcgccgtcgtgtccgtcgaggacggcgtcgtctcccttaggcttgaaggggcgtgcagcagttgtccaagctcgacgacgacgatgaacatgggcatcgagcgagtgctcaaggagaagttcggtgacgccatcaaggacatccgccaggtgttcgacggggaccagcagccggaggagacaacgcctgaggcggtgaaccggcacctggacatactgcggccggcgatcgcgaactacggcgggagtgtgaaggttcttgccgttgacggcgaggactgcctggttaagtatgacggcccagagtccatcggaagtggagtgaaggcagccatcaaggagaagttccccgacatcacgaatgtggtgttcacccagtgatctacaggtaggctggccggcttgatgccactccagtgcagtaaaatggcgacatgtacgacatgcagcaagattttgtttcgatgtatcgtctaggcaagagtttcgatgtttcgtttgggtagaaaaagttgcagcgcacgcaaacactaccatggaaaatgaaatggaataatttttgcctttaaaaaaaaaaaaaaaaaagcttatcgataggggggaaaggagtttcgtcccgtattaacgtgatggtgtaggaaactggaggggtgaaaggagtt

SEQ ID NO: 4760 - DNA, 2439 bp, Triticum aestivum
  Clone ID: TRIAE-23APR03-CLUSTER3553_1
ccaccataccggtacccttccgcttcctccccgcttccaagctccgatcccacccagtacgcctacacaatccccccctgcagtctccccgcgccggctcggcgcacagctagcttcgcgtcgcgcccgacgtcgccgccgtccgcctaccccgcgcgcgcgcccccgcgtccgttccgtctcccttcctccctcccgtctctcgatccgcgatctaggtccatttgtttctgagcatccagatccgcccctctcgggtcggtggtgcttgcactgatggataggatggaggcggggggtgggcgcttttcgtggggcggcccggctggcatggtgggggcgggctcggattgctctgattgcaggtaaaaggagggagagcgtgtgccgccctacgtgaacgaggtaggccggttcctcaatccaagcgagacatacaggtagtatgatctacccttttgtgcgtgcaccagaacacccaaaggacaaaagactggcgcgtggggaggttctaaatggtgatcggttggtgcatcctccatgttggacgttctggaaggtaggtacgcccaccatctctgtctgaaagcaaagaccatccaaccagcaagccgccccgcgccggcacgtggttcccagggctacttcccgccctatggggtgcacttgcctgcctgggggggccttccttggctggccaggaacaaggagcacggcggtggaaagtgccttctgtttaagcacatccactttgacatcatgtacaacaatgaccgtgtcatagaaatcaatgttcagacagatccgaatgtcgctgtggatatcacagaggacaaggaagtgccggtagagttctcttattcagtaacatggaaaaagacagacattccttttgagaaaagaatggagaagtactccaagtcttcctctatgccgcagcacctagagatccattggttttcaataattaactcatgtgtaacagtgcttcttttgactggctttttggcaacaatcctcatgcgtgtgctcaagaatgatttcatcaaatattctcatgaagacgagtcccttgaagaccaagaagagactggatggaagtatatacatggcgacgtcttccgtttcccgcagaaaaaatctctttttgcagcaatcattggatctggatctcagcttcttgcccttgcaattttcatcttcctcctcgcgattgttggggtcttctatccatacaacaggggagcccttttcactgcccttgtagtcatctatgctcttacgtctggtattgctggctacacatccacttccttctatcttcagctggagggaacaaactgggtgagaaatctgatattgactggctgcttgttctgtgggccacttttcttgacattctccttcttaaacactgttgcgatagcgtacagtgctacagcagctttgccttttggtactatcattgtcattattctcatctgggcacttgtaacctctcctctcctagtgctgggtggtgtagctgggaaaaatagcaatacagaattccaagctccttgccgcacaaccaaatatccaagggaaatccctcagctgccctggtaccgaagcaccattcctcagatggcaatggcagggtttctccctttcagtgctatttacatcgagctgtactacatatttgccagtatctgggggcataagatatacaccatctacagcatcctcttcattgtgttcattatcctaatcatcgtcacagcgtttgtcacagtggcgctcacgtacttccagcttgctgttgaggatcacaagtggtggtggagatctgtcctttgcggaggctccactggtattttcatcttcttctactgcatctactactaccatgcccggtcagacatgtcaggcttcatgcaaacatccttcttcttcggctacatgacctgcgtctgctacggttttttcctcatgctgggaactgttggtttccgtgcatcgctgctatttgtgcgacatatttaccgttccatcaagtgcgagtaatctacaccagagtggtgacatcagacatggcacccgggaagctcaagagaagcaaaccgacagagattgcttctgaattttgtgtccaagcaagttgcatgtcctcaatatgaacctcttctcaaattacattatcgtgcaagttctattacgaatgatgatgtaatgtgtagaacagattagagtcaacactatgatgttacacttgtatctactgtgttatttagtccaatgtgatacattagtttgttccaggatccaaagtttgcttggttgcttgttagaattgtgcttacctggtggagagcacagtttgtgaaaggtttttttttgcgagtgggggcaaattgggggccatatttttatggaaggcaaaaaaagtcattgtcc

SEQ ID NO: 4761 - DNA, 1347 bp, Triticum aestivum
  unsure (1)..(1347): unsure at all n locations
  Clone ID: TRIAE-23APR03-CLUSTER3561_1
atcacatagtgcgcgcgagcgagccccgagagcgacgcctcggagcgacggcacgagtgaggtagcccgcgcacgatcgaatacgcgaccagcagagctggctagtcccaatggcgccaacgggcggcccggacgaggagatgcgcttcggcttcttcccgctcgtccgcccgtccacgagcaggcgacgggcggggctacgaaagtctccgcgccacccgcaacggcgccaagctggcacggcccgagtccagagacgggtagcacggcagccgccgaacggcgccgcggcccgcgactgcgtccgacccgccggcgccggcccgttaggcgtcctcctcgacttccgcgcggccgcggccgccttcgactcagcgacgttccccgtgacccagtactgcatcaacggcctcgccaccgcggtcccggtgctcgcgctcgcgcgctcccgctccatcgctaggtcccccgtcatcgtctcgccgcacgacggcgcctacgtttatctcctgacgtacgacgccgaaacaaagctatactgggtcggccgcgacgccgcgctcaacgtcctcgcggagtcgtccgacttctgcctcgcgccggagcacccgctccccgcggtctacgacgactcctgggaggggctcaagtgggtggcgtcccacgccacggctggccgcgggcgcagcatacgggtgcacccgtacttcagcggcgcggcggagatcggcaaggaggcgaccacggggaaggcggagaaggccaaggccgacgccttctggcgcttcctctacccgggctcgccggggctggacgacccgctgtccaacccgttctcggaggcggccggcggcagcgcggcgcgcatcgccggcgagcgcgtgctcgtctgcgtcgcccagaaggacggcctccgggacaggggcgtctggtactacgagagcctcaaggcgagcgggtacggcggcgaggtggagctgctcgagtccatggacgaggaccacgtcttctactgcatgaagccgcggtccgagaaagcgatcgagttgcaggagcgcatcctcagcttcctccgcaagtgagcggccgcgcgcaccggctggtgaaggcaagggaagggaaggttcccttgatggaataatttttaccgccactgattttccgatgtttgagcttgagagatctcccttcaatttgtttgttcctcggttatgtcctcgccgatgcagtcgactgatgtttatgtcctcaataccatggcgaagagagctagtgggtttcttgacaatccgtgctgaaattgttgttcaatcatccttcccgttnaagccgaaaacaataaactct

SEQ ID NO: 4762 - DNA, 2027 bp, Triticum aestivum
  Clone ID: TRIAE-23APR03-CLUSTER3565_1
attgccttcgaaaatgctggcgctcacctcctgatccccgcgccgggggcggccttccccttttccggccccgccgcctcaccgccggccgccgccgccttgaggaattactttcgaaaatgctggcgctcacttccttatccccgcgcccggcgcgcccttccccgtctccggccacgcctcctcaccgccggccgccgccgcctcgcggccgtatccgccccacatacgccgtagccacggccgcgtccgacggcggcggcgcggccgacgactaccactccaccatccgctccctaaactcgcacggccgccgccacgtcccccgcaaatccctcggccagaactacatgctgaacgcgagggtgaacgaggagctggtggcggcggcgggggtggaggagggggacgtcgtgctcgagataggccccgggacgggctctctcaccgccgcgctgctcgccgccggcgccaccatcgtcgccgtcgagaaggataagcatatggctacccttgtgagagataggtttggatccacagagcaattgaaggtcattgaagaagatattacaaaatttcacgttcactcccattttctccctatcctggaggagaaatctcatggcaagaaaaaatacgccaaggttgtgtcaaacttaccattcaatgtcagcactgaagttgtcaaacaaattcttccaatgggagatgttttctctgtcatggtgctcatgcttcaggatgaagcggcactacgccttgcaaatgcttcaatacaaacaccagagtaccgacctatcaatgtgtttgtgaatttctactctgaacctgaatacaagttcaaagtagagagggccaactttttccctcaaccgacggttgatggtggcgttataaggtttaaaataaaggatgctggggagtatccgcttgttagttctaacaaaagtttcttttcaatggtgaactccgcgttcaatgggaagcgcaagatgcttcggaaatcacttcaacacctatattcttctgctgacattgaggctgctctgaccaatatcggtcttccgcctacggctagaccgtctgaactggggatggatgatttcgtgaggttgcacaatcacctgggaaaagtatgaccacccctgcgtttcaaaatgcgtatggaatcatcttattggtttgctcgctggactaagcatgccgctgaagtgatttggttcacagctagagcgcactgcagcttgcagattatgcttgctgacagtgaccgcctagtattctccagcagtcccacagccttcaccgcaacataatcggtggcacagcttcagcccacggcgctcttgcatggagatgatcatagtgattgtgatccctattcaaaaccaatgataatatgcaggacatgatttggtcacacaggaatcgcagtttttttccttatcgcagatagcatccctgcaagagtgaagatacgcaggcgttgcatgtgtataatttactggaattatctatcctcttgtactaatcttcgcaagttggaggcagaaatgtagagatcaaatgtctgtcagaacaatctgaagatcaggcaaagatgctagctgctcatagtaaattgccaagagtatttttatgtgttgacatagatggtagatagaggtacggccgttgctttttgagcttaagttttggctataaactacaacgaaacgtgcagatgctcgatgtttgattgtgcagcattctaatacctttttgcctggcagcgtgtcgctgtgatgcaacatacagttactgccagttattttcctgacaaaaaaaaaaaaaaaaggtgtgcccccccctgccgtacgacaaccctacacctctttctccgtgcccccccccccccttggcggggcgcgccctggaaaacaacttcccccctaccggcgggcgggttctccccccgcccccccgcgggggggtttttttataacacccgggggggaagagaaaacacccgtggttgtccccaaatt

SEQ ID NO: 4763 - DNA, 1712 bp, Triticum aestivum
  Clone ID: TRIAE-23APR03-CLUSTER35666_1
gaacagttcgtctctctccctccgcccgccagctcgtcgcccgccgcgcctcccctcctcctccccctcgtcgagccgccggaggccgagcccgatcgcggatcgggtccccgggtgcccctccagtccagaccagccgcgctcccgggttgacccctcgcaggaaccagaggcagatagataggaagaagtaaaatagaaggaggtcattatgcgtcggtggttttgttgcagccagtttcatgcttcatatcgtgaacatgaacatgaatttccttccagcccggatgagaaagaaggaaatggttttgattccaaaagtgatccaacaaaagcacctcctcccattgaaatacctgaattgtcacttgatgaactagaaagaaaatgacctgacaaactttaaggggtcaaaaagcttttgatgcggatgatggatcgttacgggatagaagtgtattattgctattctagacagcggaaaacatcttgctgttaaaaagcttgatacctcagcagaccctgagcctgataacgaatttctgacacagctctcgattgtgtcgagattaaagcatgaaaattttgtggaaatgcttggctactgtgtggagggaaatcaacgtctggtggcctatgaatttgctacgatgggttctctacatgatattttgcatggaagaaaaggtgtccctggtgcacagcctggcccagcacttgactggatgcagcgagtcaaaattgctatagatgctgctaaagggctagcatatcttcatgagaaggttcaaccttcgatagtccatcgggacatacggtctagcaatgtacttctatttgaggactacagagcgaaagttgcagattttaatctttcaaaccagtctcctgatatggctgctcgattgcattccacccgtgtccttggaaccttcggctatcatgctcctgagtatgccatgactggccagctaactcagaaaagtgatgtatatagctttggagttgttcttttagagcttctaacaggaaggaaaccagtagatcatacaatgcctagaggccagcagagtctggttacatgggcgacacctcgtttgactgaggatacagtgaaacaatgtatcgacccaaggttgaagggcgagtgtcccccgaaaggcgttgccaagcttgcagcggtggcagccctctgcgtgcagtacgagtcggagttcagacccagcatgagcatcgtcgtcaaggcgctctcgccccttcttcagcagaaacctcaagctccaccagccgctgctcctaacacaacgacttcagaagcctgacctacccagttcaacaaggatgtatgtaaaaaaaaaagtgctaagacgcatgtcctggcgtgtgcgttgttttgcttttaccgagagtaccgtgtcgctttgctgagttcaagaacggggctgtggttctgccgagtgatgtgctcttgctgcattcgttggcgatcaccttaataagctgtgttctgggtcgtatatatgctgtaacatgggaacttgggaaggttgtagttggtccgtggcttgatgtttctgggtttgccattgtgattttgagctgacgcccattgatttgtataatctcctgaactcgaagttggtgtgagaaatgaggaaattattgtctattgtccatttttgttacctgcttgcctgatcaaaaaaaaaaaa

SEQ ID NO: 4764 - DNA, 1808 bp, Triticum aestivum
  Clone ID: TRIAE-23APR03-CLUSTER356_1
aacaggtgtcggagactaacgttggactaatgggacctaaattttggatgagctgaccgggatcgatctgcaggtgcacgtgagctaaatctttgtctataaatatgcatgcgatgcaccactctcttgcacaatccactaagcaccaccactccaccaccaccaggtagctagtaagccggcgtagctttgcacaagccacactagggagctagctaaccatggccgcctctgcctcttgcatttctctggtggtgctcgtggccctggccacggcggcgtcggcgcagctgtccccgacgttctacgattcgtcgtgccccggggcgctggccgccatcaagagcgccgtgacggccgccgtgagcagcgacccccgcatgggcgcgtcgctgctccggctgcacttccacgactgctttgtccagggctgcgacgcctctgttctgctgtccggcaacgagcagaacgctgggcccaaacgcggcgtccgctgaggggcttcggtgtcatcgacggcatcaaggcccaggtcgaggccgtgtgcaagcaaaccgtctcctgcgctgacatcctcgaccgtcgccgcccgcgactccggtcgtcgccctcggaggttcgtcatggacagttcctcctggggagaagggactcctacacggtgcaaacgcggggctgggaggccgttcaaggccaggcccgcggggggaaaaagagattccctagatgcaaacgaggacggcggcaaagcagccgacctgccagaggcctacacgctctagccgggtcagatcttgagctggccaattcaggcaacaagggcctccttacgatccgacatggtggtccctctcgggcgcgcacaccatcggccaggcgcagtgtgggacctttaaggacaggatctacaacgagactaacatcgacacggccttcgccacatctctccgggccaactgcccccggtcaaacggcgacggcagcctggcgaacctcgacacgacgacggccaacacgttcgataacgcctactacaccaacctcgtgtcacagaaggggctcctgcactcggaccaggtgctgttcaacaacgacaccaccgacaacaccgtccggaactttgcgtccaacccggcggcgttcagcagcgccttcacgaccgccatgatcaagatgggcaacatcgcgccgaagacaggcacgcaggggcagatcaggctcagctgctccagggtgaactcgtgattgatagacgagttactgcatactagccagcacgacacgtacgtgaatgaataaggccacagaaccagtggccaatataaataccagctcttgaaaccgtgtattttatgtacgagtagcagcaaatcatgcatgcatctacacatatatatgtaacgatcgaattcccactatctcatgcaaaggcatggagaattactatcaatcttagttatacgtgtatacatatataatgagatacataaacttctctttttataaaaaaaaaaaaaaaaaatcgtgttacgggctccctcctattccctggtgggcagcgctcgccagcacagacacctgatgaatgaataaggccccagaaccaatggccaatataaataccagcccttgaaatgtgtattttatgtacgagcagcagcaaatcatgcatgcatccccatattatgtaacaatcgaattccccctttttcatgcaaaggcatggagaattactatcaatcctacttatagttgcatacataataatgagatataaattctgctttaaaaaaaaaaaaaaaaaaaaa

SEQ ID NO: 4765 - DNA, 1247 bp, Triticum aestivum
  Clone ID: TRIAE-23APR03-CLUSTER356_2
accaccacaccactccaccagtaagaagtgcagcaggtagctagtaagccggcgtagctttgctcttgcagctagctagctaaccatggccgcctctgcctcttgcctttctcttgtggtgctcgtggctctggccacggcggcgtcggcgcagctgtcaccgaccttctacgacacgtcctgccccagggccctggccatcatcaagagtggcgtcatggccgccgtgagcagcgaccctcggatgggcgcgtcgctgctccggctgcacttccacgactgcttcgtccaaggctgcgacgcgtctgttttgctgtctggcatggaacaaaatgctatcccgaacgcggggtcgctgaggggcttcggcgtcatcgacagcatcaagacgcagatcgaggccatctgcaatcagaccgtctcctgcgccgacatcctcaccgtcgccgcccgtgactccgttgtagccctcggagggccgtcatggacagtccctctggggagaagagattccacagatgcaaacgaggcggcggcaaacagcgacctgccaggctttacatctagccggtcagatcttgagctggcattcagaaacaagggcctccttacgatcgacatggtggccctctcgggcgcgcacaccatcggccaggcgcagtgtgggacctttaaggacaggatctacaatgagactaacatcgacacggccttcgccacatctctccgggccaactgccccaggtcaaacggcgacgggagcctggcgaacctggacacgacgacggccaacacgttcgataacgcctactacaccaacctcatgtcacagaaggggctcctgcactcggaccaggtgctgttcaacaacgacaccaccgacaacactgtccggaactttgcgtcgaacccagcggcgttcagcagcgccttcacgaccgccatgatcaagatgggcaacatcgcgccgaagacaggcacgcaggggcagatcaggctcagctgctccagggtgaactcgtgattgatagacgagttactgcatactagccagcacgacacgtacgtgaatgaataaggccacagaaccagtggccaatataaataccagctcttgaaaccgtgtattttatgtacgagtagcagcaaatcatgcatgcatctacacatatatatgtaacgatcgaattcccactttctcatgcaaaggcatggagaattactatcaatcttagttatacgtgtat

SEQ ID NO: 4766 - DNA, 892 bp, Triticum aestivum
  Clone ID: TRIAE-23APR03-CLUSTER35724_1
accctaccattttgccttcgctccccctgaaatctgaatctcggtcgactccgccgccgctccatgcctccctcgccgccgcagctgccgccgccggccatggaggaggtcgaggtggaggacgcctccgacgacgagatggtggggggagaggcgccgccacttgccccagcccctgcctcgcctgccggcgagggcgccgaggcgagccgtgccgcgtcggggtcgggggggacggagggcggagaaggggccgacgaggaggacgaggatgaggacgaagaagacgactcggacgacgaagaagacgaggattcggaggacgaaggggacgaagacgaagactccgacgaggagggggaggacgaaggccaagactctgacgacgacgacgaagacgaggacgaggactctgatgaggaggaggacgacgaagacgaggaggaggaggaggaggaggacgacgagtagcatgggatggaagtggagcctgtggcgttcgcatctgggtgaggatgaaatgaagatgcaagtagctgaagggtcggtttgcactgatgcttaagtgtatgtaagggatggcactcggtaaccgaatgttgcggatgaagaatattgactgcggcatgactaaatattgtcctcagggttgatggcttagtgacctctgaagcttctgttgctgattctctgttcccactatgtactgtattgttctgctcatctgagacctgtatctgctatttgaggaggaaactttgcgtgccacgattctatctttcatcgaaaacttacaagtcatatgtaaaactttgagtgtatcatcagtgttccccctttccccccggggggaaaaaaaaaaaaggcccccaccaaatccccccttcccaaa

SEQ ID NO: 4767 - DNA, 3235 bp, Triticum aestivum
  Clone ID: TRIAE-23APR03-CLUSTER357_1
aagctcggtccgattctcagacaaaaccagaaaacaagtgcaggtaaggacggatagctctggacttgtagcttaccatggccatgggttctgcttcttgcatttctctggtggtgctcgtggcgcgggccacgggcggcgtcggggcagctgtcatcgacggtctaccacccgtctgtgccgcacgggctctggcccccatcaacgagcggcctggcggccgccggtggagcacgcgacccccgcatgggtgcctccctgctcatggctgcacttcctacgactgctttagtcctaaggctgtgatgcatctgttcctgctgtcctggccagtgggaacaaaacgcgggtcccgaacgtggggttcgctgagggggcttcaggcgtcatcagacacgcatccaaggacccagcttggaagagtatattgcaagcacgaccgtctcctgcgccagacatcctcaccgctcgccgcccgtgcgacttgccgttgttgcccttggagggcccgtcaggggacctgttccccatcagggagagcggcacgcccaccaccgcaagcccctcgctggcgagcactgacctccctgagcccaagctctagcccgtcaacagctcgattgctacgttccacaaggtcgagccctcacacccgtccgacatggtcgaggctctcagggcgcgcacaccatctgggaaggcccacgtgctcaaacttcccgggaatcggatctagcggcggtgacaccaacatcaacactgccttcgcgacatctctcaaggcaacctgcccccagtccggtggcaccacgcaacctgcacgaacccctgacacacgcgacatcaaacgcgttgggacaacgcctactacaccaaacctcggatcacagggacggacgctcaacagcctgcacgctggcctcctcaggtagcacctccagccgatagcacgtatcgcggtccgtcagcgcgccacgctgcatgaataaggccacgaaaattcgtggccgagtaccacttaatcataccaagcacttggaatcgtgtaggttcaaagcatgtgcaagcagcaaatcatgcatgcatcaacgtatgtaacgacgattgaatcctcaatttctcatgcaaaagggcaaggagaattactaatcaatcctacctcattacactcattacacgacgtggactatggtgcatcttcatgtgagctaaagcgttacctataactatgaccgatatactgcaataattatccacagcaacggtcacagccaattacccagtacaattagtagcaaaaaacgaatagctctcgacagatagctagctagccccccgtgcccgtgggtgctacctcttgcagttctctggtggtgctcgtggctctggccacggcggcgtccgggcagctgtcgtcgacgttctacgacacgtcgtgccccagggctctggtcgccatcaagagcggcgtggcggccgccgtgagcagcgatccccgcatgggcgcgtccctgctcaggctgcacttccacgactgctttgtccaagcaagtttcacataatatatcagctctttttcccttgaccaactttcttgaactgcctggatttaacaaaatttatattccggactaatacgtttatgttggctacagggctgtgacgcatctgttcttctgactggcatggaacaaaacgcgggtccgaacgtggggtcgctgaggggcttcggcgtcatcgacaacatcaagacccagctggagagtgtatgcaagcagaccgtctcctgcgccgacatcctcaccgtcgccgcccgcgactccgttgtcgccgtaagaacatcttagtactacactcatttacatgatcgatgctacctgaaggatagaacatatatcccctccgattcatataaattgtcgctgatttagtacatacttaatttcctacttggtctgctatctttcacatacagcttggagggccatcgtggactgtcccgctggggagacgggattccaccaccgcaagtgcctcgctggcgaacagtgacctccctggcccgagctctagccggtcacagctcgaggccgcgttcctcaagaagaaccttaacacggtcgacatggtcgcgctctcaggcgcgcacaccatcgggaaggcccagtgctccaacttccggactcggatctacggcggtgacaccaacatcaacactgccttcgcgacgtctctcaaggccaactgcccccagtccggcggcaacaccaacctggcgaacctggacacgatgacgcccaatgcgttcgacaacgcctactacaccaacctcctgtcacagaaagggctcctgcactcggaccaggtgctcttcaacaacgacaccaccgacaacactgtccgcaactttgcgtccaacgcggcggccttcagcagcgccttcacgacggccatgatcaagatgggaaacatcgcgccgctcaccgggacgcagggccagatcaggctcagctgctccaaggtgaactcgtgattgacctacggctacacgtcggcagctcgccagaacgatacgtcgacgaataagccccagaagcagtggccagtaccgattatcataccagcacttgaaacatgtatttcaaattcaaagtatgtgcagcagcgaatcatgcatgcatctacaattctacatatgtgacgacggttgaatcctcaatttctaatgcaaaggcaaggtgaattactatcaaccctctacacttgtacacggaatgaagatgtacacttgtcttgtgacattttggcatgaagtgacccgtgctctataattttacgagaaaactctttttcaatgttaggagaaaaatggagcacacggaatgcaaaggcaaggatctttctcaaaaaaaaaaaaaactgtcgatcctacttaattacacttgtacacggagtgaagatgtacactcttgggaaatttggcatgaagtaggtacttcacgcaaaatttcacaagaagagtgtacatgctcgattattttatgtgaaaactttttttactcgatgttaagaaaaaattgaagcacacgaacaactatgtattacacgttccccgattcctatacgataatcctagacgtgcagggttgttacggtagagtggtgccccttcgttaataaccccacccggcatgaatttaagagtggtgctcatcccctaagtaatcttaagctt

SEQ ID NO: 4768 - DNA, 2007 bp, Triticum aestivum
  Clone ID: TRIAE-23APR03-CLUSTER35827_1
gtccggagaggttaattctggaaaagaggcactaaaaagcgcacatgaccggggaaaaagacctcctgctcgtgccaccctcccccgagctcgacccaacccccccccccgtcaaccccattcccccgcctcaccctcccgcgaccaccgaccacaccagctggcgcgccacgacctgaccctggcgccgaaccgggtggcggcgcgccgggcaagggcgggggtgccaggggcgcgggcccgaggccgggggacgcggaggcgatccacgtggcgacgttgcccgtggacgtcctcaacatccgcgtcgacaacctccgcggcggcgtacacatgaaccgcctataccggaacgatgtcgggtggaaaaaagagttgattcattcaggatgcagattatgcaaacaaaagtgcttggtacatacgaggttcgacaattattaggctgtgccttccgttatgtttacattgtgatcgttgttatcatcatcgctgttgtctgcaatgcttatgtttcttgtgctttcaagttggttgtggaggcagtggcccttttcaagtcctactttggtggtgctatcaggaataactttgtgttaatatatgaacttcttgatgagattatggacttcggttatcctcagaatctctcccctgaaattttgaagttatatataacccaggaaggcgtgcggtcgccattttcttccaagccttcggataagcctgttccaaatgcgaccctgcaagttaccggcgctgttggttggagaagagagggtctggtgtacaagaagaatgaggttttcttggacattgttgagagcgtaaaccttcttatgtcttctaaagggagtgttctacgatgtgacgtgacagggaagattcttatgaagtgcttcctttctggaatgcctgatctgaagttgggactaaatgacaaaattggacttgaaaaggaagcccaactgaagtccaggccttcaaagagtgggaagaccatagaactcgatgatgtcacgttccaccagtgcgtcaacctaacaagatttaactcagaaaaaacagtcagctttgtgccaccagatggtgaattcgaattgatgaaatatcgaatcacggagggtgtaaatcttccattccgggttctgcccacaattaaggagttgggccgaacacgcatggagattaatgtgaaagttaagagtgtttttggtgctaagatgtttgcacttggtgttgtggttaaagttccggttccaaagcagacagcaaagacgagtttccaaacaacatctggcaaagccaaatataatgcttcgattgattccctggtgtggaagatcaggaaatttcctggacagaccgaggcaacgatgagtgcagaagttgaactgatctctacaatgggggaaaagaagttagcgaacaggccaccgattcagatggagttccaggttccgatgttcactgcttctggcttacgtgttcggttcctcaaggtgtgggagaagagtggctacaacaccgttgagtgggttcgctacatcacaagggctggatcatatgaaatcaggtgttagtgaccaagaaaaatggcgtgggctcattatttcgtggatttgcagagctctttttgtactcatcatgattgatcagatggcacgtaaattatgacccaattcgttgcaagtttgaacttcagcagagggcagatcagagcaggcagttttcctatgttccttattttcatgttgacatgggatatgtattctcccccgtgtcctgtttgtcatagggcatatttttattgtatatttggcagtagcattcgttctcgttgatcaatacacccccttgccagttcgtgctgttttctccttgaatgggtgtcaaatcgcttgcaaaacggtgtataaatatatgatgataatgttgttggcttgctgtgcctgtgtttgaaaaaaaaaaaactgtgcctgtgtttatgtaaagggctatgccatt

SEQ ID NO: 4769 - DNA, 641 bp, Triticum aestivum
  Clone ID: TRIAE-23APR03-CLUSTER35851_1
aagagagacacaaccgacccgaccaaagcgcccggggaaaccctaggacgaggagaaggcgcgcgcgctcccaccccgcgcgagagcgacaggcagaaagagacacaaccgagccgaccaaagcgcccggggaaaccctaggacgaggagaagggctcgcgcgcagccatggccaagggccgcaacaagaacaaggccaagaatggcgccggcgccgccgccatggacgcctccgagggcgcgcccgctgcatccaccgcagcagaagccccacaaccgatggatacggccgaggggaagcagccgtcctcttcatcggctgccctcagttcgatcaacaggaaaataaaaaagggcgtgcaacctaaaaggacaaaaaatgtgaggaaaatgaaagcagttgccagggccatttctaaaactgagaagtccgaggagaaggtcctgaaagcaaaaagcaagaagtcaaggattcagtctgccaagtctttgtatgattaaagtttcagtggttagcataattttgtgtactagtatgtttccacctgtagatcaaccaaatctatgtgtttcaagaaaacctgctttgcctctaaagataactactacctgcttctttaaaaaaaaaaaaaaaaaaaaac

SEQ ID NO: 4770 - DNA, 689 bp, Triticum aestivum
  Clone ID: TRIAE-23APR03-CLUSTER35880_3
gcgcacatctcagccagctagagaagggccgggatgtctggttccggctcgggctccggcgtgtgggtgttcaagaacggcgtgatgcagctgcagccggagcagccggcggcgggccggaaggcgctgctctacgtgcccaccggcgagaggatgacctcgctggagctgctggagcgccgcctcggcgcgcacggctgggagcgctactacgagaaccgcgacatcgtgcagctccaccgccgcgacggcggcatcgacctcatctccctcccgcgggacttcaccaagttccgctccacccacatgtacgacgtcgtcctcaagaaccgcgacagcttcaaggtcgtcgacgtcccaagttaactgacccactccactccatcatcaacgtcgccttcgatctcttatgcgactatatgtgtgtgtgctatacatactccactcctaagtacttttgtatttgcttaaggcgtgaaatcagggcggaacgcatcaaggcatgcatgcattacgtctgtgccgtagtaaattgcaattgtacgcgtgtgcatggtttgtagaagggtagagagggagatggtggaattgttgatgcattgtttgagcatcgtgggcatatattatattgtagtacaatgaccaacttaaagtataagacaaaatagaataaaatcctacattatcct

SEQ ID NO: 4771 - DNA, 2271 bp, Triticum aestivum
  unsure (1)..(2271): unsure at all n locations
  Clone ID: TRIAE-23APR03-CLUSTER35924_1
tttttttttctataaattntccgcagcatccaaagaataacatgtcagcggtatttgtacgcttttttttttttttttttgattcttgaaatttgtatctcctatgttctgctttggtgatgatacataatccgaatttaacataagggtgccaaaacccgtacagtggcgaaagaaagaatgataaatcgttgggaggggagcaaagaatgatgttacaactcgggctgaagaacttgggttcttatttgctgaagacctctaccttctgtcaaaactgaatcagcaaaactggagcctgctgcaacccatgggctcatcgctgactccagcagtccttggcctacctcatctgtctctggaaagacaaccgagctaacatcggtgcttccgcagaaactgtgtagctacgtctatgaaaatgtgtcagtttgtgcatgatgcctcagtctcacctttgctcgcttgttcatcgacaaggtcatttgacatggctgatggaatcctgtgccgcttgaggatccgagacgtggcaagcctcgcgttctgaaatttcaggacgatcacccgctcatcgtccaaatcaattctcaagttttcttcagtgcagttctccacgatactgcacaaatgcttcaaattctcaacctcaacaccattcaccttctttacctggagttcagccagcctttcataaccaacattaatatcatccattaggacctgagataatattactaactgttggccagccttcttcggaagttctctcagtgcccgttcacacaatcgacgtggcgaagtgttgtaccagtcctccccaaattcatggagataaggctgggtcagcgggataaaaacaaaaccagcaaagatgtagtagctgggcagtttatcaaattgatgtacaggaaccaaaggttgcaaaggtctaagtgtcacattcaattcatgctctttgccatctcttagtactttgataacggctgtttcttcaggcttcttcatggacacaagatgatcaaaggtgattctctctctatttcgaaatggaactgtcccatcattcgcaataggcacgccatcaaactcgagaaggatatcgtctttcctcaaaatttcgtaagcaccagacagaggatttattctactgactaacactccagtcatttcaggccgcataccaaagcactctcttatttggatgttctcagtggcctggcaagatatcccaagagaacaaaacccagaatatttgccactctcttccacaccagaaataaaacgcttaattacaggcacaggtataatatacccaatgttttctgctcctgacagattttggaaagcaactccagccactttatcacccatgattgcaggccctccactattgcctggattaatagctgcatctatttgtatagccatgagctgagtcgcaccatgggcatactgtgttggttccactctagaaacaacccccttggtgacagagatattgtctccaccctgagggtagccaaccacggcgacagcttcctgcaaaaatggaatgtctccaagatccaagctgttcatcccctcccaaaactcctcactctcaactgtaagaagagccaaatcacactcatggccaatagcctgaacttccgccttgtactttgcaggtgatccatgcttcctcacaagaacaaaagtatgatcagctaccacatgagcatttgtgacgatcctttttccagaaattacaaagccggagcccatgctctcgcgctgggccttgttctgccacggcaggaagtagttagggccacttgacaccgtgaacaccttcaccaccgagtccagcgcgagctccaccgccgcgaacgcgtcggtgtcatgccgcgccgccacagactccacctcctcctcttcctcggatacctccgccgacggtatcgccggggttcccagagcgccgcattcacctaggcggagagagggtgtggatgcgcaagagatggtggagaagcggggagcagcgaggtggggaaggagggcgcgggtcacggttcgaaggggcggcagacgagatggatgtggaggcggcgagggtgatgggtggagagggaggcggcggagcgagcgggcggagtaggaagaggagaggcggcggagcaagcgggcggaggcgtgcatggcggccaccccgggtgttgccggtgaggagggttcggagattttaggtccgggggggtttgggttgtttcgaattagatgtccata

SEQ ID NO: 4772 - DNA, 1518 bp, Triticum aestivum
  Clone ID: TRIAE-23APR03-CLUSTER35925_1
ctttttttttttttttttgggttttttttttttttttttttttttttttttttttttttttttcaaagtaaccgcaattcaggttacaacttctatgacctatttaataataccaataacaatcgcagcaaaccgtctcaagggtaacaaatatccagatcacgattctatgttctgtagctatcatttgtttcatgtcgagcagagagaaaaataggcgaagaggcgcacggtatgcagctagagggcgagaatcactccggcaatttgccgcctagcctgctgacatactggcaaagcacgtccctctgtgcaaccgcaccgtcgtcggccacattgctgaactgctgatagtaaccgtcatcatggtcgtgcgacgccggtgcccgttctctgtgtgtgtccccgaggtcgatcatgatgttggtgagcaggcagcaggcgtagatgatcctcggtagccggtgcttgtcaggcctccacagctcccccttgagtacctgccacctttccttcagcctggccatagcaccctgcaccaccattctcgccgtggcgtgctgcttgttgaatgctgcttttgctggagacagatcgcgctcttggtatggagtcatcagccagggaaggagagggtagcccgtgtccccgatgatgtactctctgaccactgaccctgctggctccccaggaagctccatttgtccgtccagcctcccgcctttctcgcacagcttgtagaagcccgaggtgcgcaggatgcaggagtcatccatgctcccaggccagccactgacaacgtctctgaaccgcatgtcggggtcgacaacggcctgcaggaccatgctgttcctgttctcacagtcaagccagacattgctgttaggctgagctgaagagcacatgaggatgtgtgttgtgtctatggcgccgcagcagttggggaggccctggagcttttcgaactttgctttgatggtcgccatctcctcagggtcaggccacttcagatgactgattgcgtgatcctccaaggactcaatgaacttccaagtgatgtttgagattgctgagtggttcattccaaagcgattccctatgctcagaagtgactcaccagtcgtcagtctcaacagagcaacagctacttgatcctccaacgcaagaatcatcttgtctccaaacctgaaatttctgaaaccctgtgtctttcttgagaagtccccggtaatcagagtgcaaatgtagtcgaatgtcttcctcgacatcttgaagactgactcaaagttctggcagtctttggagtagtgtcctgctgcaagcctgcgggagaaggagtcccaccaatcggcggcgtcgggcgggggcaagggcgccatcacccccgccggcagggccttctcggggtgccgcttccggcgcttggcccccctcagtggtgccatgacgacgaggaggagtcgaggagaaggatagctaatttccggaggagagatcaagaaaagaaaagaaaggcag

SEQ ID NO: 4773 - DNA, 941 bp, Triticum aestivum
  Clone ID: TRIAE-23APR03-CLUSTER359_5
acatctagtagtggaggaagaggagaaaggggtagcaggcagcaatggcgacggccaagcccatcctgtacggcgcctggatcagctcttgctctcaccgtgtccggatcgctctcaatctcaaaggtgtggactatgagtacaaggcagtcaatcctcggacagatccagactatgaaaaaataaacccgatcaaatacataccagcattggtagatggggacttgttctatctgattctctcgctatcatgttatcctcagcatcctctcgtacctaaagatatcaaaacgaaaggtcttgatcttcagattgcgaacatagtttgctcaagcatccaacctctccaaggctacggcgtaattggtttacatgagggtaggttgagccccgatgagagccttgaggtggttcaacgttatattgacaagggcttcagagcaatagaaaagctcttggatggatgtgacagcaaatattgcgttggagatgaaatccatttgggagatgtgtttctagccccacagatccatgccgccatcaatcgcttccagattgatatgacgaagtacccaatcttgtcgcgacttcacgacgcgtacatggaaatcccggcatttcaagccgcactgccccagaatcagccagatgcaccttcagcaaaataatcaagaaatcaagccagttacaactatatgcgtgtaatttccacaataatgaggaatgtagtctgcaatgcatggaagaacctctcataagtcataacttatcaggttgtctgagtgtatacactttggcgtccatctcgccgaggcgcgcgtacatgccatggcgagctgccggccgggccccggcgccatgtaaattaatattgatcgattcaccaccagtgagatttggcaagaaaaaagaaaggtgatttgacgaattgacctgtattt

SEQ ID NO: 4774 - DNA, 2048 bp, Triticum aestivum
  Clone ID: TRIAE-23APR03-CLUSTER3611_1
attctctctctccccctcccttccctccctgttgtgccacaccaaatctccgagtggagccacccaatactggcctccggcgccggcgtggcctttgaaaaaccttagaaatttatatttataaagatatgatacaagcagcaaaaataattggaacaggtttagcaacaacaggtttaatcggtgcaggtgtaggaattggagtagtttttggtgcacttatattgggtgtagctagaaacccttctttaagaggacaactattctcttatgctatattagggtttgctttcgcagaagcaactggactatttgcacttatgatggcctttttactattatacgttgcataattttaaaccttattgctttaagtattaataaagtaattaacaaaagaaaaacaacgcgctactaccttacattaggaagaggtcaaaaattattgagatagttgcagcacgtgatatagtttttgctttatcacaagtctggagtatgtgctgcttttagtagagtgaagaataagagaatatgctttctaaatgggagtgcagatgaagttgttcgtagtttattctacaacaagaacaatgattccctcattactgtgtcagtatatggttctgataattatagtgcctagcgatgcatgactgctcgaatagagtactatctgtagtgaacctcagagggcaggttgctggcttttataaaacaatcacgtaacatactgacagggagatgcttttgatgattaaagggtggcaatttcaacgagcaaaagaagacatggaagttccagaatacaatcactgaggctcttgaggacatcacagctctgtactacgacgaagagcgtgatgagatctacaccggcaaccgtcatggccttgttcatgtgtgggcgaactgagagctgagaaagcaaatttcagggacaaacaaggtgttgttcgtttgcaggcggatcaatttaacaaccaagcctcaggtggtgctggccgccaagaggtcttgggtctccagccgttagcaatttgttgatgtggagtattgtggtgtcgagctgctctttaccgacagaagatttgttgtagagttagtgcttgtcatgtgctttaccatagcctgtagtagccttggagatgtctcgatgttgactttccggcagtaccttgtagcaggttcgaatttccgaggtgaactagtaacatcatttgaggatcacctgctgtggcaccctgactgcaataccaataacatatacataaccattgatcaagatcttattatttcttactgcaaggctgattccactgattcatcttcagaagaaaatgctggctctataaacatcagcaacatactgacagggaaatgcttggctaaaataaaggctggcaatttcaacgagcaaaagaagacatggaagttccagaatacaatcactgaggctcttgaggacatcacagctctgtactacgatgaagagcgtgatgagatctacactggcaaccgccatggccttgttcatgtgtgggcgaactgagagcagagaaagcaaatttcagggacaaacaaggtgttcgtttgcaggcggaccaatttaacaaccaagcctcaggtggtgctggccgcgaagaggtcttgggtctccagccgttagcaatttgttggtgtggattattgcggtgtcgagctgctctttaccgacagaagatttgttgtagagttagtgcttgtcatgtgctttaccatagcctgtagtagccttggagatgtcttgaggcgagctcttaaactgtacctcatgtaatgtgccttcctggtagttaactctgctacctgaaatagtgatacctcattctgtctgtcatgtgtctggttgttgttgagtttgggatcttgtaaacataaacaattggaatatgtggcatagaaaacgccttctactctgaagagagatggttgacggcaaaaacaacatttcttttgaggaacacatggttactttattgctcaatgataagggatacaattgtagc

SEQ ID NO: 4775 - DNA, 955 bp, Triticum aestivum
  Clone ID: TRIAE-23APR03-CLUSTER361533_1
gcattggtcgaatccacggtcatatttatcttcctccttgcctacacttttgttttaccacacgctctttttctgcacgagttctcctccgctgatcctcccaagtcccaaacccgcgccccgaatctgctgccgccgctgcgtccgtgtcggctttgccccgccggtgaagatgctgtcgaggatctcccgccttggcgtccacgccctgaaccgggcgaggctaggtcaaaagtcagtaacttcaaggaatcaggaagaacccatcagagcctgtatgaactatgtgggtaatcattctctatgttccgccacggaagctaaagtcagtgacaggagcgaacagccgaaagctaagatatctgtgacatttgttgataaggatggcgatgaaacggttatcaatgttcctattgggatgtcaatgctggaagctgctcatgagaatgacatagaacttgaaggagcatgtgagggctctcttgcatgttctacctgtcatgtgattgtaacggacgtagactactataacaaattggaagatcctgaagatgaggaaaacgatatgctggaccttgcttttggccttacagaaacatctcgccttggttgccaagtaattgcaagccctgaacttgatggcataagattagcactgccagcagctaccagaaattttgctgttgatgggcatgtcccaaaaccacactgactaagcactgggtatgttgcatacctgctcagttttgcagaatatgagatgtagttacttttatttttcatcttgttgtatctgtatcctcaacatttaaattctgtagtccttggcaagatagcgattaatgtcaacttgcttcgtcaaataacacttgtaaaatccattggaaaatgcattgtcattgcaatgctagcaaccttgcacttgcaaaatctacaaaaaaaaaaaaaaaaaaaa

SEQ ID NO: 4776 - DNA, 1011 bp, Triticum aestivum
  unsure (1)..(1011): unsure at all n locations
  Clone ID: TRIAE-23APR03-CLUSTER3641_2
ctcttcctcctaccaacccaacccaacccaacccaagccagccccaggccccagctcgtcgcggctctgactgaatccccccttcaccaccggacagctaccgccgacgccccgatcccacccctctccccctccccctcccctgccgccgccgccgcctctcacgccccctccccgccgcgacgtaggtcgcgccccgtccgtcgccgcctcgtccgcgatctcaggccgcttggagatacgctcgtcgattcagccccgcggccgtcgtccagcgaggaggggagatgcaggcatctagagctaggctcttcaaggagtacaaggaggtgcagcgagaaaagtcagccgacccagatatccaattaatctgtgatgattcaaatatattcaaatggactgctgtaatcaagggcccatcggagacaccttttgaaggtggcgtatttcaacttgtattctcaattcccgagcagtatcctctactgcctccgcaagtccgnttcatcaccaaaattttccacccaaatgttcacttcaagactggtgaaatatgcctggatatattgaaaaatgcatggagccctgcatggaccctacaatctgtttgcagagccattattgcgttgatggcccatccagaagcagacagcccacttaactgtgactcaggcaatcttcttcgctccggtgacatcagaggctaccagtccatggcgcggatgtacaccaggctagctgccatgccaaagaaagagtaatttgcaggtttgcaaaggtacaccagagcagtagcgctggcgctggctgattgattcatgcatgtatcaactccgtaagttgtcaggtgtaactcgttgctatccccgtatgaacttgtgtggtctgattttcttacccgacttgtcgttgtgggtgtaatgttgattctgttgggctaaaaaggatttaagcgtaaacgcttgattcatgatgatgtgtaataaaataatcctcatagggaattggtcc

SEQ ID NO: 4777 - DNA, 1506 bp, Triticum aestivum
  Clone ID: TRIAE-23APR03-CLUSTER3645_1
gcgccgatttctccccccgaccattcccccccccttcccctcagcgccgcccgtcaccgccgccaccctccccgcccgcgacatgcccgcccgccccgaatgcccccatctccatcctcgttccccgccctcctcccccccccgcccgcccgcctccccttctcccctcgcctccacgcttctccagccggccgctcaccaaaacccccaaacgccatcacgacaccgccggcatgccgcccccgccgcgcaaggccgcacagcagcccgagccctcccagcgacatggaggaggaaggaggaggagcgccccagcgagcgacgccgacggaggcagctctcgggaagcgagcggcgacggcgacagcgacagctctccggagtgctcgagcagcgacgacgacgacgcgtcccaggagatggagacggtgcaggccgacttcgccttcttcgaccccaagcccgccgacttccacggcgtcaggctgctgctcaagacctaccttgactccaagccctgggacctcaccggcttcgtcgacctcgtcctcgaacagaccaccgtcggcaccgttgtcaagatggccgaggacgaggatgaggatggggaagcaaatgggggcgacaagagcgacgacgatggggacctcttcggtctcattaccgtgctcaatttgggaagatacggggagaaccgttgcatcaaggatcttaaggagtatctgcttgccgtttgcggtgacaaggacaccaaggagaagctaaagtcgctgctggaagacaaggcatccactgtcggcctgctcgtgtgccggcgctttgtgaatttcccgtacgaaatggtgcctaagatgtacgattcgctgtttgacgaggtttcctgggcgacagaagatgagccaacacaagaactccaggactccttccgattcaagcagtacctgttgcttgtcagaatcttggagagaaaaactcctccgaagcagaaagcaaagaacaacaaagatgaggatgaacctgttatctacccgaaattggaggacgaaattttccgtgagcttagttcgtggtcttttacttttccaattcgcgctgaacagtcagctcagcaagagctgaagaactacaaggagatgggcctggtgatgtgcgtcaaagctgacgtgatcccgaagttccgcaagaagctggaggctttggtgtcagaataggcgggtctatctttgctcgtaggagaagaaatcccaggtgggattttgctgctgcccatcggcaagacgcaatggcattgtgcatctgtggaggctggttctgtaggaaggggtggtttttgaattattccatcttttcatgtattcagtttttgccacaagatagatgatattcatggagggtttctttggttgcctgaaaacatgcatggggtgacaaaaaaaaaaaaaaaaatgcccctccttaaaatgctaggcgagggccggataggtgccaattgtgcaatcatcactg

SEQ ID NO: 4778 - DNA, 1379 bp, Triticum aestivum
  Clone ID: TRIAE-23APR03-CLUSTER36510_1
gtgtggaggctcccctgctcttttttttttttttttgcacatagaacaattgtgttgattccacaggaataatacaatcttattttgctccttttcagattattgtgccccaatgcctattgatggatcacacatggcagtcttggtggcgccaccatgcatgcgtgggatcgacaggagcgaattagcggtcccagccgacgagtgagaggaggaaggttcggtagttccccgacgtctcggagtggatagcttcagccagcgaccccttgtacttgttgtggtactctgccttgatgtacttcatgtcaacctcggtcctcgtcaccgccacccgtgtgagcgccgcgttgctggtgcccaggcctttcatcgccttgtgcaggaccttggcaaagtactttgccggagtgtcggcgcacctgaggatggtcagcagcccgaactggaagttccctgtcgtctcactcttcacggccttctccagggaccgggcgtacatgtgctggtaagcgttggccacggacaccatgtgcgcccagttgcgttcgctgaaaatgcggatgaaggcccgctcatcggtgcccaccctcttctcgccggcttgatacagctccctcgcgtcgtctgtcaccgccgaaggatcaacttccgggccttcgttgcgccggactcccaggtacgcaagcaaaagcttctgatgatcaccgtaggtgcgttcggtgatgtcatgctcgaggtagcaaccgaacctcgcgcggtaggtttgcttcatgatctgcagctgcgacggcgtcctggagcagattacctccgtggcggctctcaggtcggtgatgtcgctgttgagagcctggttcagtatggtcgcgtcacgccccacggggtcgaggacccaaagcagcatagcattcttgtggtttccactcagttcagttgctaggcgatggtagagatcctgatggtatatggctttgtactcgtgcaggatgagcgcgcgctgcgccgagtcgcggtgagcaagtatgttagtcaccgtcgtgctgtcgcagccgaaccctttgaaggccttgtggagagcgacggcgtcatcacgcggaggcgtgagcaccggaggcacgctcaggctcgccatcgctcgcctgcgtggctggacgatggtttcttttctgtgagtgagactctgtctgtgtctgtgctgatgctgcgtacgggggggagctttttaaagagggagacgcgaagcttttccctcagatgctagattcgggttctctttggaaattactacatcttacagccttacagggatgagaagcacagcccactcatttactctgaattttttgagacggcattgtaatatgggtcaaactgtg

SEQ ID NO: 4779 - DNA, 803 bp, Triticum aestivum
  Clone ID: TRIAE-23APR03-CLUSTER365_8
cacccagagcacaccgacccaccatccatctatccatccatccaggctagaagcagcggccaacaagtgcacccctagctgcgagcacaaggagctggcagcaatggcgaggcatcgcctccttgccgtgctcatgctcctcgtcggggtagtggcagcctccactttccaccaagcggccgccgctggccggggccttgctgtcctcgagaagtttgcggacctggagccaaagccaaaacccaaaccagagccaatgcccaaacaaatgccgaagcctgaaccagaatcaaaaccaaagcccaagccgatgccaaaacccgaacccaagcccaagccgatgcccaaacctgaaccaaagccagagcccaagcataaaccaatgcctaagccagagcccaagcgtaaaccaatgcctaagccagaacccaagcctgaacctatgcctaagccggaaccgaagcctaaacccgaaccaaaaccaaagccaccaccaaagcacaagccgccaacagcttacaattgatgggattctatatatgcaaactgaaggatcgaggagatcatggccagagccacaatcgcgacatttatagaataagtggtgtagtaacaatgtcattctatccggctagctccatagtgatgcatcattctgtattctatgtatttcgttacatttacagagtttctgtttcatgtacccatgatgagcatcacagctttgtaattgttagctgcttgttggtgtatgttcaattttgtacgtgactcataaaaaagaaaaaaaaaggggcgtgccg

SEQ ID NO: 4780 - DNA, 1681 bp, Triticum aestivum
  Clone ID: TRIAE-23APR03-CLUSTER36799_1
gttcacaggcaaaatttgcatgtcccatttagtgcgagaaacagggtacagactgaaagtgacatcttgcttcgtaagaccctgcatcgcatagaggatggtctggccgccaacatgttatgtttgacagtgatttttcaatgcacccaccgagtgcagcggtgagtggattttcgtgcccctgaacatggtcttgttcatagaaccttacttcttgtttaaactgactattcatagtcgttgagttttagtcagtggctccaagggttcagatttgccctccctccttttcttcccatgtgcagattttggagcggagcactcgtcggcactgccggtgtcgacgagtccgaattcgtcgtcgggggcccgcgaggcgtcgtcgtcgggcgcctgcagcgaggcgctctggacgaggcctcgccggccgcgggagtgggcgccgacaaggcttcggggttggggccgacgccgcaaggcgcagtggttcttgacgacgcgggctgcgggatcccggttcgggacgggggcggccggccactaccgcggcggcgggggagtcgcgcacggcgcggccccccgcggccctggtcggcacggggccgccggcctccgcgccgacggtatcgatgaagcttttttttttttttttttcttgagttggaacttccaacataaaacaaactcattctcatattgtagtcatcagaagttacattgttcacaggcaaaatttgcatgtcccatttagtgggagaaacaggatacagactgaaagtgaaatctagattcatacgaccctacatcggatagaggatggtcttgccaccaacatgatatctttcacagagctttttcaatgtacccactgagtgctgcattgagttcagtttggtatccatgaacatggccttgtagttgtcaccatacttctctattaatctgccaatacatagtcgttgaattttagtcagtggctccaaaggtgcagatttgccatccctccttttcttcccaagtgcagattttagatcgtcgcactcgaggtcactgccggtgtcgacggggccgaactcgtcgacgggggcccgcaaggcgtcgacgtcgggcgcctgcagcgaggcgctctggacgaggcctcgcgtgccgcgggagtgggcgccgagcaggttggggttggccacgaccccgaaagcggagtagttcttcacgacgctgccttccgcatcccagctcggcacgtggccgccggcctctgcggcggcggcggcggcgagcgcctcgggcaggtcgaaggccggcttgaactcgcgcggcttcttgcgcggcaacccgacacgcaccttggtgcgggttcgcttgaacttgcgccgcgatcctcccatcggcgctgctactacggaggagggggttagctagggtttttgcgagagggcagcggggagagaggggcgaccgggcgaggaagaaggtttgtttttcgggcctaaatcctccccccccggggggatctcctaacccgcaaaagggcttgcccccccccgggggtaccccccggctttgggcccccttgcaggggtgcgggacgcccccccccttggccctctccctgccgcacacgcccgctctccccggcgggcactcacattctctcgccccctacaaaaacgggaaacacccc

SEQ ID NO: 4781 - DNA, 2901 bp, Triticum aestivum
  unsure (1)..(2901): unsure at all n locations
  Clone ID: TRIAE-23APR03-CLUSTER3685_1
tcagaaaggaaagataaacagcaacgtgctgcgtgaagcaaaagccgtacccaaccagagacgtccaagcaaccgcttccctctctcctcttgctctgctcgtcgtccctccagtccaccctgctcgcatcgcaccgaccgatccgatggaccgcgccgantcccgcgcggggccgcctcgccgtgctctcctcccacctcctcgccgccggcgcggaccccgcggccgcgctggagaggtcgccggcgtcggccgcggccccggggacccgcgccggcgtgctcgccgtggtggactcgaggaccgggaagcggtacgaggtcaaggtctcggaggacggcaccgtccgcgccactgacttcaagaagattaccgctggaaaagatgacaagggtcttaagacttatgatcctggttatctcaacactgcccctgtgcgttcttccatctgctacattgatggggatgagggaattcttcgctacaggggttatccaattgaggaggttgctgaaagcagttcgtttgttgaggtcgcctacctcttaatgtatgggaatttgccttctcagagtcaactggcagcctgggagtttgcaatttcacagcactctgctgttcctcaaggactcttggatatcatacaatcaatgcctcatgatgcccaccccatgggtgtccttgccagtgcaatgagcacactttctgtcttccacccagatgcaaaccctgcccttagagggcaagatctggataccaagccagacgaccaggcgagcgcttcgcgctctgcataaccgcggcagtgcgaagaggactgtctagaagcgctgcctccgagggtctggtcttttgcctacggcggtgcagatctgagtatctgaggaccgcccgccgccggcgatgggctgctggtgggagcgcctcgtgctgccggtgcgcagggcgtggctcggcgtcgcctcccgcttcggcgtgcgccagtccgggctgtggaggctccggcaggaggtgagcacgtgcgagtacgaggacgtgcgcgtgatgtgggagatgctgagccgcaccgcgtccgggcgccgccgccgccggcgaccaggcgccacagcaggttccggcagccggccggccgttgggccgacaggctccgcctctgccgggacatctagactgggaccgtcgaccgggggctcgccgcgtgcttgcttgcttgcggcttactgcttggtcttgtttccctggttaatctagcttcttgatctgtattgaccttcccttcccttccatgggttctcgatctttttcctctgctaccgccgctgtatgtacgctgcttggggctctgaggtgtactccattcctccccgtgtatccggtcgatccgcatgtagatgggtgatacctctggggtatgtgaatgaacagagctgtttcgttcgaataaaaatcaaaacacgaaaggaataaaagaaataagcaaattcttcgaaaggctggcaaaatctctagagatggcagcaggagactaccagggactattagtaagctcttttgtaattaccttcaattactattgcatttttggtgaattttgtgtatatgctagacgatatgatatgacataaattatcaacttaatcgccttcttgaaagccttctagatctccttgttgaacacgaagctaaccgcgaaacgacctgtgcaagggctcttgttaggcatcttgtttcaggtggctgtggatgtcttcactgctctttagcttgctgttggcgccttatttggtgcgctgcagaggggctcaattgaatgtttaatgagattggagctgtggatagtattccagatgtcattgcgagagtggaggtacggaaacggtaaaaggaaagtgtaggtgtccgggtttatacaaattatgttcatggagtgaaagtcaggcgacagaaaatgtcggatgttggccatcgtgtttgtcgggattctcttaccggcgctactgttatccggaagttagcagaagaggtagtctcgattgtcagacgggatcctcttaacgaggatgctgtttcttagtagggggtagtactctgagccgagtaattcagcaaggaggttgccgtatccatatttgcatttcttctctggccttctttgcatagccatgtgggtagctacacgatttgaccccctgtgacacccaaattatgacatctcgaggtggcaaacacggtgcatgggggctgaggcactacaccacagtgaagtgatgggactggtcatctaacatacgggcgtggggctgaggcagtacgccgctgtgaagcgccacgaggcgtcgccgtgctgggtgatgcccttggacaacatcgccaccatcaaatcgcgggcggcacctcgccgcgcacggaatattcccctcgtatgtaagaagcacctcacatcgcagccgcggtgcagcatcgggcgctacactactaacgtagctgctgtccttgcccactcatcacgccacaaaggtcttagagaatgggggcggttgcccttctggtgtcaccaagatacttatttcctgccatgtaataaagtagtagtagaaggcacgctgtggacactatctatccacgcacttccagtttccagcttcatctctgcatgcatgcaatgtgagctcatgattggaaaaaataaatcatactcccttcgtctcaaaataaaaaaaaaaaaatctgacgaaaaaaaaaaaaaaaaaaaaaaaaaaaaaaaaaaaaaaaaaaaaanaaannaaaaaaanaaaaaaaaanaaaaaaaaaaaaaangggggggccccgcttaaaaaacccaaattatactccccgggattggaaagaaaaaatttttttttaggggccccctaaattaa

SEQ ID NO: 4782 - DNA, 1805 bp, Triticum aestivum
  Clone ID: TRIAE-23APR03-CLUSTER3685_2
gaagcaaaagccgtaccaaactagacgtccaagcaaccgcttccctctcttctcttgctctgctcgtctccagtccaccctgctcgcatcgcaccgaccgatccgatggaccgcgccgatcccgcgcggggccgcctcgccgtgctctcctcccacctcctcgccggcgtgctcgccgtggtggactcgaggaccgggaagcggtacgaggtcaaggtttcggaggacggcaccgtccgcgccacagacttcaagaagattaccactgggaaagatgacaagggtcttaagacttacgatcctggttatctcaacactgcccctgtgcgttcttccatctgctacattgatggggatgagggaattcttcgctacaggggttatccaattgaggaggtggccgaaagcagttcgtttgttgaggtcgcctacctcttaatgtacgggaacttgcccactcagagtcaactggcaggctgggaatctgcaatttcacagcactctgctgttcctcaggactcttggatatcatacaatcaatgcctacgatgcccaccccagggtgtccttgccagtgcaatgagcacactttctgtcttccacccagatgcaaaccctgctcttagagggcaagatctgtacaagtcaaagcaggttagggataagcaaattgtacgagttcttgggaaggcaccggcaatagcagctgcagcctacctgagactagcaggaaggcctgccgtccttccttcaaataatctttcttattcggaaaatttcttgtatatgctagactctttgggtgacaaagaatataagccaaatccccgacttgcacgggttctagatatcctttttattctccatgctgaacacgaaatgaactgctcaacagctgctgttaggcaccttgcttcaagtggtgtcgatgtcttcactgctctttctggtgctgttggagctctatatggtccactgcatggtggcgcaaatgaggcggtacttaaaatgttgaatgagattggagctgtggagaatattccagatttcattgagggagtgaagaacaggaaacggaaaatgtcaggttttgggcaccgtgtgtataagaattatgatcctcgtgctaaagtcatccgaaagttagcagaggaggttttctctattgttggacgggatcctcttatcgaggttgctgttgctttggagaaggcagcactgtcagacgattattttatcaagaggaagctgtatccaaatgtggatttttactcaggcctgatttacagagcgatgggattccctacagaatttttccctgtgttatttgcaattcctcgcatggctggttggctagcacattggaaggagtcacttgatgaccctgacaataaaattatgaggcctcaacaggtatacacgggcgtttggctgaggcattacacccctgtgagggaacgagtggcatctaaccagggcgaggaacttggtcagatcgctacatcaaacgcgacgaggcgtcgccgtgccggttcttccctgtagaacaacagcacgcatggatgcatggtgcagcatccagcccacacaataaaccaagctgctgtccttgccactcataacgccgcagcggcttgagactgggggcggttacccttctggtgtcaccaagacacttagcggttgccatgtaataaagtagtagtagaaggcacgctgtggacactatctatccacgcacttccagtttccagcttcatctctgcatgcatgcaatgtgagctcatgattggaaaaaataaata

SEQ ID NO: 4783 - DNA, 976 bp, Triticum aestivum
  unsure (1)..(976): unsure at all n locations
  Clone ID: TRIAE-23APR03-CLUSTER36888_1
nnnnnnnnnnnnnnnnnnnnnnnnnnnnnnnnnnnnnnnnnnnnnnnnttttttttttttttctgatctagttatctcagtaagcaagaccaaggttgcggaaacataatccagaagcaccagcagtgatacttgtttactcgataaaaacacttaaattaggtcatacctcgaaattaaacgctcatgatgcataaataaggtacctaaaggcctaaactggatgcaatcgcagaaatgtacttccacaagggaacagttcatagaaacatttctgtgcatcacaagcgcgagacgaagggattgctagcgagttagtccagctgcgaccctaatcgctctcctccccgtcgccgctctcctccccgggagccatgtcgacgtctgcgtcctcatcgtcctcgtcatcctccgctgcctcctctggtggcaccaggtacgccccaggctgtgctggggcgcagcggcgggtccgagagggcaggatgttgttgaggtcgacctcggagaggggatcctcgcataagccgtcactctcgtcgccatctccctcgacctcctcgtcatcctcctcctcgtcgctttcctcgtcgccttcttcctcctcatcgaccaccatcttgcccttccccttgtccgcgacccgggccttggcctcggcggcggcctcctcgtcggcgccggggcgggcggccttggcgggtgggtcgaggggagagatctcggagtcggtgtccgtcttacgcttggccggggatggggagggttcggtggccgcaggctgggactggccgtcggcggtcgccatcgtggaggcgggacgggagagggagagggagagctagggtttaaggatccgcaggctgggactggccgtcggcggtcgccatcgtggaggcgggacgggagagggagagggagagctagggtttaaggatgggggaagggtgcnagagaaatggagaggagagagcgt

SEQ ID NO: 4784 - DNA, 1743 bp, Triticum aestivum
  Clone ID: TRIAE-23APR03-CLUSTER36890_1
ttttttttttttatttgctcatctctatttaatatttattgatgaaaattcagaattttgtagacaagttcatatatggcacagagccacagacaacctgcatatgcattaacttaacccctaggatatcggatacgcacacctcaattttacataaagcataagaaaaagaaaggaggaaagaaaagatcccatattttgcggcggctgcgagtctgtgattcaggacttccgatgaactcgtattgtgggttagttcttgtgattggtttcgtcacttccatcacttctatcattcatatcattggattcactggattgatgcgacgtatcgatgccttggacttggcaggcttggccaggctgatcaggttcgtcctgtgcacggaatgtacgccgctgatagccatggatgccacgatgctatttgccgcgtcggtgaagtcgatgaaatcccccccgacccagttgacgcactggtcgcccagctcccaccggtccttgctgtcgcccatgcagctcctcttggggtcgtagttgtaaggggggcctccgtggccgcagcatgtcatcaatggcttctcaatcccatgtttggtgtggttggcgacgagatcatacttgatcgcgaacatgtccacgaagatgatggacgatttcttcagcagcaaccgcaggtcgtcgcaggcctcgctcagcaacgtgttgaacctcttggcggcgtttgttgaacttggcgatgcacccgtgctcgtcgaggtcgccgtcgctggccctcggcatcgcgagcttcgccggcaggcatcccagcgcgcctgtcccgtgtatccagaacttccttgccccgttcttatgcagaatctcgatggctttcctgatttcggcaacgaagtggggaagctttgcgagcacttcgtcgtagggcaagtagagaatggaagtgatgtcgttctgcccaatgtccatggtgtacaaagctcgttcgaaatccagcatgttgagcggggcgggctcatctcttgtgatggagtcgttgcacctgtccctgtagaagatgaactgatcgatctgcacgtccagtgagaacggcgtgtcccctggcgtcgcggtggctccggcgatggcgaagttaacgccgttgctgtagtcggaacccagcggcttcatgtaggggctcaggtggtgcgtgttcaaggtctcaccctcgtcgtcgtcgcattacactccgccgaaaacgtgcagtagtactactgcatactgtgcgcgcccctccggcgccgcgatgcggatccccattatcgccgccaccccgcccgtgtccgagttggagtcgccgaagttgaacaccaccacctccttgggcttcgtcaccaccttggccgccgccttcgcgggcgccggcgccgtccccttgatcttccggtgctcgcccgccccggacccggccccggcgggcgccgcggcggtggcgagcgcggaggtggtggagagggccgcgccgctgctggcggccggcatgtagcggagcgtcgcgaacaggacggccccggccaccgcgcccagcacgcagtagtactgcagccgcagcaggctcatgttcttcatcagcccgccgccggcgccccctccattgcctcccccgttcggcccgctcgccatggctggccttgtctacctagccactgccgctggctgtcggtcttctccctccgtgctctctgatgtgcgactcttgtctgtctc

SEQ ID NO: 4785 - DNA, 2016 bp, Triticum aestivum
  unsure (1)..(2016): unsure at all n locations
  Clone ID: TRIAE-23APR03-CLUSTER36953_1
aactcctttcacccctccagttcccattacttagaaggtaaacagggccccccctcttgcccgacggtatcgataagcttttttttttttttttttaccttgaaatgaaaatatgacattacggatgttggaaatctgaaaaagacatgacgaagatcttacaagggtgtcccaaaactaggaacctcgatcaatcctatgctaggaagcaagtgaaccgaccgctcattattaactaactaggagtagtactagctaggcagcacaagcacaagacgcacacaccaacataagccaccgcgcgttcgcgtgcgtatacgcacggacacggttagctgaggaacgctacgttgcatggaacatgtcttacatgtcggccgtgaacccctggtcggcggcggtggcggcctcgatgcgggggggcttccctgcgacggtgcagtcggcccggacctcgccctgcagcttgctggtgatcacacccatctcggtcatcttggtcatcgacttgccgaactcgatgaagaaggctgtctggttcttggagaaggcgagggcgaggttcttggtgagcgggtggtcgatgagcgactggtcggacaggaacatccccttcttctgggtcaggcccacgtagtacttgttgtcgaagacgtgcggcgtgaggacgtcgaggtcttgcgtggttgttgccgtgggtttggtgcatttctcctgtagctgcttggcgagctggggatccatggaatgggtgccccggggtgggatgaccccgcagtgggccacaccgaaggtgtgcgcgccggagagggaaaccaggtcatcggcgctgagtttgcgggccttgaaggcctcgatgtgcctgtccgcgccgtcgaagggcgagggcaggtccttaaccctatctggcgccggggcgaacgagtcaagccggcccaggtcgacgttgaaacggggaccgccggccttgaacagcgcgtcgcgggtagcgagcacggtaacgtcggcgcatgagaccacccgaccgcaggcagcttgggcctcgcggtggatgcgatcgatgaggtccagagccacgcggcggagagtcccgttggctccgccggggatctgctcggtgccgcggcctttgatgagcaccgacgcgtcgcagccctgcgtaaagcagtcgtggaagaggacgcgcaggagggcgggagcgacaccttggtctttgttgaaggtcgccgtcacttgggcgttcacgatttgctccagccctgggcaggtcgtcttgtagaagccaggggacagacccgggacggctgcccctgagagggacgactgcactgcgcagaccaaggccacgacggccacggccgcagctgctctgggcgccattgctgtagctcagcttcttcttgtacctagtagtacaagaggggatgggaggggcgtgtgggttgcacggcagcgtgggcctcgcggtggatgcgatcgatgaggtccagagccacgcggcggagagtcccgttgggtccgccggggatctgctcgctgccgcggcctttgatgagcaccgacgcgtcgcagccctgcgtaaagcagtcgtggaagaggatgcgcaggagggcgggagcgacaccttggtcattgttgaaggtcgccgtcacttgggcgttcacgatttgctccagccgtgggcaggtcgtcttgtagaagccaggggacaggcccgggacggctgcccctgagagggacgactgcactgcgcagaccaaggccacgacggccacggccgcagctgctctgccgccattactgtagcttcttctggtagctcgtagtacaagacctccaaagccgaaccacgaagggggcccggggccgagacgggaacccccggaccttccattccgcccaaacgcccgcgcgccgtggcgcccgccaaagacttgagcccgcccagcggacccaacgacagacacagcggaaccattcccgcacctctactctcgcgggccnaaattcatcccc

SEQ ID NO: 4786 - DNA, 1649 bp, Triticum aestivum
  Clone ID: TRIAE-23APR03-CLUSTER37013_1
tttccagccactttagggcgaaatgggtaccgggccccccctcgagtttttttttttttttttttttttttttttttttttttaagtgatattcaaaactgtctccaattgtagagaaaattcggatacaactttgtcggtcgtatgcgcatgcaagatgctgccccgcatataactacatgtataaatgtattaatattgggatccaacaaatcttacaggacgagaaagagaaatatggccgagggcaattcacaactccagtgctccacctccacaaggatatgcctggccaaatgggcactagctctacaatttcacataagttagcatgttttacttccaggctccatgccagtttcaccgggcataagaatatatagaacccaactagtcaccagtttgttcagacaaatagactagtggctgggaattcaagcatttgaccttattcatgctatacaaaagaagcgattgatttgtagccaccctcgttgatgtggctggctagagagctgtcacctgtcttcactatcttgccactttccatgatgtgaacatagcttggcttaataagatccaaaagacgttggtaatgtgtaatcatcagaacggagttttggggagtcaagagcccattcactgcatgagctacatcttcaagtgcatcaacatctaatccagaatcgatttcatcgaggagggctaaatcagccccaaggacagaaagttgcagtatctcattgcgctttctttctccaccactaaatccttcgtttacattacgatcaaggatctttggctccatcttttaggaccgaggagggctaaatcagccccaaggacaggaagttgcagtatctcattgcgctttctttctcccaccactaaatccttcgtttacattacgatcaaggatctttggctccatctttaaggcctcgactttttgtgatacaacagaatagaactcaagaggtcccaaaagctgggagaccgtccttctctctgcgagcatttattgccatgagcagaaaatcataattgctcactccaggaatttcaataggcgcttggaagctcataaagaggcctgcaagagatctttcctctggctccatgtcaattaagttctcacccttgaagagaatggtaccaccagttacctcgtagtgtggatggccaacaagaacctttgtgagggtgctcttgccggagccgttcttccccatgatcgcatgaacctcgccctcgcggatggtgaggtcgacgccttttaggatctgctgcccagtctccttgacggaggcggtaagcccgtgtacctcgagaaggagctttccagcggactcggtcgccgcggcggaggccacagccgagcggtgccgtggccgcacggagatataacccagcgacgggtggccgcggaggatggggcgggatgaggaggaggagaagagaggggatgaggaggaggagaagagaggggatgaggaggaaactgcggcgacggcgaaacggcggcgccatgggaaggtcagggacgaggcagcaggtgcgcgcctcaagatgcttcgttcgcggcggcttcggatgacgacggggtcagtagtgggccagcggcgtcgtattgcagttgcgtatttttt

SEQ ID NO: 4787 - DNA, 1512 bp, Triticum aestivum
  Clone ID: TRIAE-23APR03-CLUSTER3716_1
agagctgtgcatcgcttagcccgacgcccccgtacccttcgtcctcgtccgctgcgcccgacggcgccgcccccgccgtcctccttgcttttgcttccaaagccccaaacccgccgcctccccacccccccccaccaataaaccccttcctcctcccccgcgccgccccccctgccggctcaccccttctccccctcctccgcctccccccgccccctcatagccgcccccacggccgccgccaccgccgccgcggtctcctcccccgcggtccccgccgcctcgtctcccgcggcccggtgcgccgtccgctgcggctgcgtcgccgccagccgggccgccgcccgtccgtccgcgctccgatccgcccccccccgggccgcctccgccggcttctcctccggtgtgcgcacccacgtagctggctgtgtgaacaagcaggttgatgcaaagatgctacatgaggtggaaagcgctactttgttgattgtttaggaaagtgcttgcattggcggattgggaagatgcctggcagtggctagtgaattaggtgcctgcaaggtcctagtgaaatacgcacgatcctcggaagaagctgacggagtctccgaagagtttgaagcagctggtggtcaggctattacctttggaggagatgtttctaaagaagctgatgtagaatctatgatgaaagcagctcttgataaatggggaacaattgacatcctggtaaataatgcagggattacgagggatacattgttgatgaggatgaagaaatctcagtggcaagatgtaattgatctaaatcttactggtgttttcctctgtacacaggctgccacaaaagtaatgatgaagaagaaaaagggaagagtcatcaacatagcatcagttgttggtcttactggcaatgctggccaagctaattacagtgctgccaaggctggagtcattggtttcactaaaacagttgctagggaatatgcaagcaggaatatcaatgtgaatgcaatcgcacctggattcatagcatcagacatgaccgcggaacttggagaggaggttgagaagagaatcttgtcgactattcccttggggaggtatggccagccagaggaagttgctgggttggttgagttcttggccctgaatcccgcggccagctacatcactggacaggtgcttaccatcgatggtgggatggtaatgtgaaacctttgagcaagtttgatggaaggttgacatttgccctgtgtagcggacgttttagtaatttgcatcgaacaattttgagctgtagatttaggtttcctttttcgaactttgtaatcccatgtagaataaatcaggtgtgaccatgtggggaagttcagatgtgttatgtcttcagcatcctttttactatttctccgttggttttcagaccaattttcgaagatctgtaggttgctggatggttattttctgtttttataaaggtgaggtatgcagcgaaaaaaaaaaaaaaaa

SEQ ID NO: 4788 - DNA, 964 bp, Triticum aestivum
  unsure (1)..(964): unsure at all n locations
  Clone ID: TRIAE-23APR03-CLUSTER371_20
actcctccccgcccttcgtactgtaggcgccgccgtttcccccatccgctcctcccggcgccgcccctccgccgcgccttctctgtccgcgagcggcagcgcccccgatcggcgaatctcgcgatggctggcggcggcggcgggttcctcaacctggagcggcacttcgccttctacgngggcgcgtaccacagcaacccggtcaacgtcttcatccacgcgctcttcgtctggcccatcttcctcaccgccctcctgctcctccacctcaccgccccgttcccgcgcgccgccgcggtcttcaccgccgtctacggggccttctacgtctccctcgaccgccgctcgggcgccctcgccgccgtcctctgcctcctctgctgggccgccagctccgccctcgccgcccgactcggcttctccctcggatggaaggtggtattggtagctcagctgttctgttggactatgcaattcattggccatggagtttttgaraagcaggcmcctgctytagttgacaaccttgtccaggctttgatgatggccccatatttcgtgcttytagagattcttcacaagtttgttgcgtacgaaccatatcctggcttccatgccaatgtgcaraagctgattgacgctaaacgcaaggagtgggcggmcaagaaagcaaagaagatgtcatgaggtgtgaccaagaactcctgatggctgatgctacgtttgctgtgtaacggcgtaagatgagagtgctctaccctggttgccgtttccatgttactgaagataaactgaactgtagactgatatcatcctgagatgtgatacgcttgttgcatgacatcggtgtaagatgagatacgccatgtttggtgttgtgttcgtgttagtggagattttttatataatgaacagtaaagtaataatacattttcaataaagaatctggtgctgtgcctgtggt

SEQ ID NO: 4789 - DNA, 2140 bp, Triticum aestivum
  unsure (1)..(2140): unsure at all n locations
  Clone ID: TRIAE-23APR03-CLUSTER371_35
ccacgcgtccggatcgacaccagtggaagttccttccggttccagagagatcgcggtggaggatgacgggaggagggcgcgcggtgctcctgctgccggtgctgctgatctcggcgctgttcgcgcagatccgcgcgtcggatccgttgttccacgagtccttcaacgagagcttcgacgggagctggatcgtgtccggcaaggaggagtacaaaggtgtatggaagcacgcgaagagtgatggccatgaagactatggtctccttgttagcgagccagccaggaaatatgccataatcaaagaacttgattacccagttactatgaaggatgagacagttgtcctgcagtttgaagtgaggcttcagaatggccttgagtgtggaggtgcttatatcaagtacatccgtcctcaggctaccggatggaacgccaaggactttgacaatgatactccatacacaattatgtttggtcccgacaagtgtggttcaacgaacaaggttcacttcatcctgaagcacaagaaccctaagactggcaaatacgttgaacatcacctcaagtccccaccctctgtcccatatgacaagctctctcatgtctacacggctatcttgaagccggataatgaggtcagaattttggttgatggggtggagaagagtaaagcaaacttcctgtctgctgctgattttgagccggcacttattccatcaaagactattcctgaccctgacgacaagaagccagaggactgggacgagagagctaagatccctgatccagttgcggtgaagcccgatgactgggatgaggatgccccaatggaaattgtggatgaggaggccaccaagccagaaggatggttggatgatgagcctgaggaaattgatgatccagaagctgctaagcctgaggactgggatgatgaggaggatggcgaatgggaggcacccaagatggacaaccccaagtgcgaagtggcacctggatgtggtgaatggaagaagccgatgaaggataaccctgcctacaagggcaagtggcatgcccccctgattgacaaccccaactacaagggaatctggaagccccaagaaatctccaaccctgagtactttgagcttgacaagcctgactttgacccaattgccgctattggaattgagatctggacaatgcaggatggcatcctgtttgacaacattcttattgccgacaatgagaaggtagccacctctatcctggagaagacatggaagcccaagtttgatgttgagaaggaaaagcagaaggctgaggaggctgcagcaggtgcatcagaaggcctttctgaattccagaagaagatctttgacattttgtacaaagttgcagacatcccgttcttggaaccatacaagaccaagatcattgatgtgattgagaagggagagacacagccaaacattacaatttcgattttggcgtctgtcatcgtcgtcattgtgactgtactcttcagagccctgtttggtggcaagaagccagtggcacctgtgaagcccgctgctgagaccaagaagcccagtgctgtcgtacctgatgccgccgctggaagcagcggcgacatggaggatgacaaggatgcgccgcgccgaaggtcgcgaagagacgcataaactaactcttggtgccttcacattttgaaggactcggttatagcctttttgagaacgcctcgagtgtataatcgaaccctctgctgctagtagcaacctctagttttaagtcgcttaacattacgagccggtgaagctcgtgttcggttgtttgtgtcctgtcctgaatcagctagaagagatgtttttttttcctttccttttgttttttatttcttctgttctatatcagatgaaacatgaagcttgtgttcggttgtttgtgtgctgtgctaaatcaggtactccctccgttcccatattaattgtcgctgatttantanaaaaaaaaaaaaaaaggaaaggaaaaaaaaacatctcttctagcctgattcaggacaggacacaaacaaccgaacacgagcttcaccgggctcgtaatgttaancgacttaaaactanaggttgctactaacagcagagggttcnattataca

SEQ ID NO: 4790 - DNA, 1972 bp, Triticum aestivum
  Clone ID: TRIAE-23APR03-CLUSTER371_36
gctcctcccccagtcccggtcgcttcgaagatcgacgacaccagtggagaagttccttccggttccagagagatcgcgggggaggaggatgatgggagggcgcgcggtgctcctgctgctggtgatctcggcgctgttcgcgcagatccacgcgtcggatccgctgttccacgagtccttcaacgagagcttcgacgggagctggatcgtgtccggcaaggaggagtacaaaggtgtatggaagcacgcgaagagtgatggccatgaagattatggtctccttgttagcgagccagccaggaaatatgccataatcaaagaacttgattacctggttactttgaagggtgagacagttgtcctgcagtttgaagtgaggcttcagaatggccttgagtgtggaggtgcttatatcaagtacatccgtcctcaggctactggatggaacgccaaggactttgacaatgatactccgtacacaattatgtttggtcctgacaagtgtggttcaacgaacaaggttcacttcatcctgaagcacaagaaccctaagactggcaaatatgttgaacatcacattaagtccccaccctctgtcccatatgacaaactctctcatgtctacacggctatcttgaagccggataatgaagtcagaattttggttgatggggtggagaagagcaaagcaaacttcctgtctgctgatgattttgagccggcacttgttccatcaaagactattcctgaccctgacgacaagaagccagaggactgggacgagagagctaagatccctgatccagttgcggtgaagcccgatgactgggatgaggatgccccaatggaaattgtggatgaggaggccaccaagccagaaggatggttggatgatgaccctgaggaaattgatgatccagaggctgctaagcctgaggactgggatgatgaggaggatggtgaatgggaggcaccgaagatggacaaccccaagtgcgaagtggcacctggatgtggtgaatggaagaagccgatgaaggataaccctgcctacaagggaaagtggcatgcccccctgattgacaaccccaactacaagggaatctggaagccccaagaaatccccaacccggagtactttgagcttgacaagcctgactttgacccaattgccgctattggaattgagatctggacaatgcaggatggcatcctatttgacaacattcttattgccgataatgagaaggtagccacctctgtccgggagaagacatggaagcccaagtttgatgccgagaaggaaaagcagaaggctgaggaggctgcagcaggtgcatcagagggcctttctgaaatccagaagaagatctttgacattctgtacaaagtcgcagacatcccattcttggaaccatacaagaccaagatcattgatgtgattgagaagggagagacgcagccaaacattacaatttcgattttggcctctgtcattgtcgtcattgtgactgtactcttcaaagccctgtttggtggcaagaagccagtggcacctgtgaagcccactgctgagaccaagaagcccagtgccgtcgtacctgatgccgccgccggaagcagcggcgacaaggaggatgacaaggatgcgccacgccgaaggtcgcgaagagacgcataaactaactcttggtgccttcacgttttgaaggactcggttatagcctttttgagaacgcgtcgagtgtataatcgaaccctctgctgctagtagcaacctctagttttaagtcgcttgacattacgagccggcgaagctcgtgttgttcggttgtttgtgtgctgtcctgaatcagctagaagagatgtttttttttttcctttccttttgttttttctttcttttgttttatatcaggtgaaacatgaagcttgtgttcggttgtttgtgtgctgtgctaaatcaggtact

SEQ ID NO: 4791 - DNA, 1972 bp, Triticum aestivum
  Clone ID: TRIAE-23APR03-CLUSTER371_41
ataccctccttcgatccctcgcttcggcactactccagttgttccggttgcgctcgcagagagatcgggtcggggaggaggaggatgacgggcgggcgcgcggtgcttctgctggtggtctcggcgctgttcgcgcagatctacgcgtcggatccgctgtttcacgagtccttcgacgagggcttccaggggagctggatcgtctccggcaaggaagagtactcaggtgtatggaagcacgagaagagtgatggccatgaagactatggtctccttgttagcgagccagccaggaaatatgccatagtcaaagagcttgatagccctgttactttgaaggatggaacagttgtcctgcagttcgaagtgaggcttcagaatggccttgagtgtggaggtgcttatcttaagtacattcgccctcaggaggctggatgggatgccaaggaatttgacaatgacactccttacacaattatgtttggtcctgacaagtgtggttcaacgaacaaggttcacttcatcctgaagcacaagaaccccaagactggcaaatatgttgaacatcaccttaagtccccaccctctgtcccatatgacaagctctctcatgtctatacggctatcttgaagccagataacgaggtcagaattctggttgacggggaggagaagagcaaagcaaacttcctgtccgctgatgattttgagccagcacttattccatcaaagactattcctgaccctgacgacaagaagccagaggactgggacgagagagctaaaatccctgacccagctgcagtgaagcccgatgactgggatgaggatgccccaacagaaattctggatgaggaggccaccaagccagaaggatggttggatgatgagcctgaggaagttgatgacccagaggctgctaagcccgaagactgggatgatgaggaggatggtgaatgggaggcaccgaagattgacaaccccaagtgtgaagaggcacctggatgtggtgaatggaagaggccaatgaagcagaaccctgcgtacaagggcaagtggcatgcacccatgattgacaaccctgcctacaagggaatctggaagccccaagaaatccccaaccctgaatactttgagcttgacaagcctgactttgatccgattgccgctattggaattgagatctggacaatgcaggatggcatcctttttgacaacattcttatcgccgatgatgagaaggtagccaccgccatcttggagaagacatggaagcccaagtttgatgttgagaaggaaaagcagaaggctgaggaggctgcagcagccgattcagaggacctttctgagttccagaagaagatcttcagcgttttgtacaagatcgccgacattccattcttggaaccttacaagatcaagatcattgatgttattgagaagggagagaagcagcccaacattacaatttcgatcttggcctcagccgctgtcatccttgtgactgtactcttcagaacccttttcggtggcaagaagccagtggcacctgtgaagcccattgccgaggtcaagaagcccagtgccacggaagccgatgccgctggaagcagcggcgacaaggaggagaaggaggatgacacaaccgcaccacgcagaaggtcgcgaagggagacataggatcttcacatttcggacggtctcggtcctcgcctttttgtgaactcctcgagtgtataatcgaacagtcttgctgccctctgctgctacccctagtttttaagtcgctagaatctacgagccggtgaagctttgtgttgtttgtgtgctgtacggaatcagctagaagtgatctccttttccttttgtatcaaacgaaacttgaaaggatcttttgatatgtagatgctgttcatttactggttaaatcaggtttgagcttggggcggctcggttcttgctttaaaaaaaa

SEQ ID NO: 4792 - DNA, 2033 bp, Triticum aestivum
  Clone ID: TRIAE-23APR03-CLUSTER371_43
cttagagtagagcgacactcctccccgcccttcgtaagtactgtaggcgccgccgtttcccccatccgttccccccggcgctccgcctccgccgcgcctcctccgtctgcgagcggcagcgcccgatcgacgaatcccgcgatggccggcggcggcggcgggttcctcgacctggagcggcacttcgccttctacggcgcgtaccacagcaacccggtcaacgtcttcatccacgcgctcttcgtctggcccatcttcctcaccgccctcctgctcctccacatcgccgccccgttcccgcgcgccgccgcggtcttcaccgccgtctacggggccttctacgtctccctcgaccgccgctcgggcgcgctcgccgccctcctctgcctcctctgctggggcgccagctccgccctcgccgcccgcctcggcttctccctcggatggaaggtggtattggtagctcagctgttctgttggactatgcaattcattggccatggagtttttgagaagcgggcacctgctctagttgacaatcttgtccaggctttgttgatggccccatatttcgtgcttctagagattctccacaagtttgccgcttatgaaccgtatcctggcttccatgccaatgtgcaaaagctgattgacgccaaacgcaaggagtgggcggacaagaaagcaaagaagatgtcatgaactgtgcccaaagaactcctgatgcctgatgctacgtttgttgtgtaacagggtaagacgagagtgatctaccctgtttgccgtctctgtgctattgaaagatgaactgaactgtagactgatatcatcttgagatgtgatacgcttgttgtatgacatcggtgtaagatgagatacgccatgtttggtgttgtgttcgtgttggggaagattttttatagaatgaacaataaagtaataatatatttttgaaaaaaaaaaaaaagaagtacaaacagcagcatactagattttgattccccctgtgacaagctcagctcagcgcacgcaagatggagtaccagggacagcagcagcgcggccgcgtcgacgagtacggcaacccggtggccggacatggcgtcggcaccggcatggagacgcacggcggcgtcggcaccggcgcggccgccggtgggcatttccagcccatgagggacgagcaccagaccggccgtgggatcctgcaccgctccggcagctccagctccagctcgtctgaggatgatggcatgggcgggaggaggaagaagggcatcaaggagaagatcaaggagaagctccccggtggccacggtgaccagcagcacaccggtggcacctacagacagcagggtactggcatggtcggcaccggcggcacctacgggcagaagggtcacactgggatgaccggcaccggcggcacctacgggcagcagggtcacactgggatgaccggcaccggcggcacctacgggcagcagggccacactgggatgaccggcaccggcggcacctacggacagcaaggccacaccgggatggccggcaccggggcgcatggcaccacggccactggtggcacctacgggcagccgggccacaccgggatgacaggcacgggggcgcacggcaccggaggcacctacgggcagcacggcactgacaccggcgagaagaagggcatcatggacaagatcaaggagaagctcccaggccagcactgagcgctgaggagagcccgcggccgccacttctgagagtggaggtgccggtcgaccaccgttgcagaatcaataataagatcgcgatacgatacaataaaattccaccatacaacgtgagcctagttcacctagctcacttgcgtgttggaggagccactgtatctaggctcaagtttacgtgaacaaacagtgttttgagtttttcgtctgtttattacactgtataatcttgtaagtttcctgtggttaaaccctgtagtacgctttacggtatggtcctcgcgtaaaaaaaaaaaaaaaaaa

SEQ ID NO: 4793 - DNA, 2792 bp, Triticum aestivum
  Clone ID: TRIAE-23APR03-CLUSTER371_45
ccatcaagctagcagcacggcattaaactaatttgacagcgatcccgatccgtcatcacatctcacacgagacagtcgttcgatccgtccgtggagcagccatggcgcagctgatggacaaggccaaggggttcgtggccgagaagatatcgggggtgcagaagccggaggcggacctgtcggacatgtcggtgcagcacgttggccgcgacggcgccaccctgtccggccgcctcgacgtgcgcaacccctactcgcacaccatccccatctgcgagatcagctactccctcaagagcgccggccgcgacgtggcctccgggaccatgccggacccgcgggtcgctggtggccagcgacaccaccagcctcgacataccggtgaaggtgccgtacgacttcctgatgagcctggtgaaggacgccggcaaggactgggacctcgactacgagatgcgcgtcggcctcaccgtcgacctccccatcgtcggcaacttcacgctgccgctcaccaaggccggcgagctcaagctccccacgctctccgacctgttctaaacttaccgccgcacccagctaagtaggttcgaccgtgccgtactagctgctgcgctctccatcgcctgtacgggtgatgggtagtactgggctgggcgagcgggacgatcgatcgctgcctagctctgtttttacttcggatcgcggtgtgggtgtgcacgacgtaataatgatgtattgcgtgttgtatttctagacttttatacgtgaataaaataaacagacgggtttactgtaaaagagagatcgggtctgggaggatgacgacgggagggcgcgcggtgctcctactgccgcttctggtggcctcggcgctgttcgcgcagatccgcgcgtcggatccgctgttccacgagtccttcgacgagggcttcgaggggagctgggtcgtctccggcaaggaagagtactcaggtgtatggaagcacgagaagagtgatggccatgaagactatggtctccttgtcagtgagccagccaggaaatatgccatagtcaaagagcttgatagccctgttactttgaaggatgggacagttgtcctgcagttcgaagtgaggcttcagaatggcctcgagtgtggaggtgcttatcttaagtacattcgccctcaggaggctggatgggatgccaaggaatttgacaatgacactccttacacaattatgtttggtcctgacaagtgtggttcaacgaacaaggttcacttcatcctgaagcacaagaaccccaagactggcaaatatgttgaacatcacctcaagtccccaccctctgtcccatatgacaagctctctcatgtctacacggctatcttgaagccggataacgaggtcagaattttggttgatggggaggagaagagcaaagcaaacttcctgtccgctgacgattttgagccagcacttattccatcaaagaccattcctgaccctgatgacaagaagccagaggactgggacgagagagctaaaatccctgacccagctgcagtgaagcccgatgactgggatgaggatgccccaacagaaattctggatgaggaggccaccgagccagaaggatggttggatgatgagcctgaggaagttgatgacccagaggctgctaagcccgaagactgggatgatgaggaggatggcgaatgggaggcaccgaagatcgacaaccccaagtgtgaagaggcacctggatgtggtgaatggaagaggccaatgaagcagaaccctgcctacaagggcaagtggcatgcacccctgattgacaaccctgcctacaagggaatctggaagccccaagaaatccccaacccagagtactttgaggcttgacaagcctgactttgatccgattgccgctattggaattgagatctggacaatgcaggatggcatcctttttgacaacattcttatcgccgatgatgagaaggtagccacagccatcttggagaagacctggaagcccaagtttgatgttgagaaggaaaagcagaaggctgaggaggctgcagcagcccgattcagaggacctttctgagttccagaagaagatattcagcgttttgtacaaaatcgctgacattccattcttggaaccttacaagatcaagatcattgatattattgagaagggagagaagcagcccaacattacaatttcgatcttggcctcagttgctgtcatccttgttactgtgctcttcagaaccattttcggtggcaagaagccagtggcacctgtgaagcccgttgccgaggtcaagaagcccaatgccacggaagctgatgccgctggaagcagcggcgacaaggaggagaaagaggacgacaccaccgcaccacgcagaaggtcgagaagggagacataggctaggtcttaggaccttcacatttcggacgtctcggtccttgcctttttgtgaactcctgagtgtataatcgaacagtcttgctgccctctgctgctacccttagttttaagtcgctagaatctacgagccggtgaagctttgtgttgtttgtgtgctgtcctgaatcagctagaagtgatcttcttttccttttgtatcaaacgaaacttgaaaggatcttttgatatttagatgctgttcatttactggttaaatcaggtttgagcctggggcggcatctggttatccacgtcctgcctcgtccaacctcgtccatgaaccaaacatgtggtagagaaaattccttatgtaatactgtttt

SEQ ID NO: 4794 - DNA, 1588 bp, Triticum aestivum
  unsure (1)..(1588): unsure at all n locations
  Clone ID: TRIAE-23APR03-CLUSTER3738_3
ccgttggtggggaagaaagcgcgcccagaggagaggggttttttcttgttggcgagaattgtcgccgcgcttttgccctttccccacccaagggcggaaccactttcaaaattttcataaggtgtggggttggcggccccagggtcggagtaagaaggcccctcggaggaaagaatgcgggtcccgccggggttccagcaagaaggtgcggggaagtctccccgccaggccaaggaagccccaaagggggagagaaagcggagttaccggcttcccaagagtccggccaagggaggggcggccgtcaaaaaagggcccgcaatgaaagtttcaagaaagagggttggggaccttacaagatttacattcttcaaggtgctcaagcgggtgcactcggacatcggcatctcctccaaggccatgtccatcatgacgtcttgcatcagcgacattttggagaagctcgccggcgaggcggccaagctggccagggtacaacaagaagcccaccatcacgtccagggaaatccaggcctccgtccgcctcgtcctccccggcgagctcgccaagcaggccgtctccgagggcaccaaggccgtcaccaagttcaccagcaactagggttccgtcgcggtgtgcaccaaagaaaagtctccctcgcaacaactcgcccatttccctccacagcaagcccgacacctcaagcccaatcccgatcgatggcgccacaccaaagaaaagatctccgtcgcaacgaagccggcccacttccctccggcaacaggcccgacgaccccagacggtgcgatgccgatcgagggcgcccaaggcccaggaagaagcccgcggcagaaaggagccggacgaccgaggctcgcagagaaggccgaggagagacccgccccagacaagaagcccatggcggtagaagaggcctgtgcggcctccaagtcgggccaacgagcgacggccgtacccagaatggcctgcaagaagaacaaggcaagcgtctcgagaacctacaagatgagacatccccaaggggcctcaagcaggtacaaccccgcacatcggcatctcctccaaggcagtgcgccatcactgaactccttcaccaacctgccattcttcgactaagctcgcctggccggacggcggcccaagacgtcggcacgaagttgcgaacaaagaatgccctaccaatcacgcttcctagggcaaacttccagctccttcctttctcgccttcgtccgtccccggcgagctcgccaatccacgccgtctccagagggcaccaagtccgtcaccaagttcaccatgcaactagggttccgtcgcggtgtctctagggttccgtccccgtgttctcttctagtagcttttgtgtcgccgtcggtcgtgcccatgtgtatcgttataggtaggtagcgcgcctgctttgtaaatcgtgtcaggttgtgatggacggctttgatttcaattaatggaagaggttgtgtgtgacttctcaaaaaaaaaaaaaaaaaaaacttacccaaacgggagaccaaagaacccaggagcttaatgnttggtactccttgtac

SEQ ID NO: 4795 - DNA, 2040 bp, Triticum aestivum
  Clone ID: TRIAE-23APR03-CLUSTER373_4
ctccctcaccgttctgcctcatcgactccctcctcctcccctgcctccaccttatcctcacctcagctcagctcaccagctcgccccccacctccaatggcgtcggccaacgccatctccaccgcctccctcctccgctccttctcctcccaggggaggctgaggaggtccaagaacggccgctcgtcgcggctggtggtgcgcgcggacgccaaggaaatcgccttcgaccagaagtcccgcgccgcgctccaggccggcgtcgagaagctcgccaacgccgtcggcgtcaccctcggcccgcgagggaggaacgtagtgctggatgagtatggcaaccccaaagtggtgaacgatggtgttaccattgcccgtgctattgagctagctaacccaatggaaaatgcgggtgcagctctgattcgtgaggttgctagcaagaccaatgattctgctggtgatgggactacgactgcttgtgtccttgctcgagaaatcatcaagctgggcattttgagtgtaacttctggtgcaaaccctgtatcactaaagaaaggaatagacaaaactgtccagggtctgattgaagagcttgaaagaaagcctagaccagtcaagggcagtggtgatatcaaagctgttgcctctatctctgctggtaacgatgaacttattggagccatgattgctgatgccattgacaaagtgggcccgggggcgatggtgtcctttcgatcgagtcgtcttcatcttttgagactactgttgatgttgaggaagggatggagattgaccgaggctacatttcccctcaatttgtgacaaaccttgagaaatctattgtggagtttgagaacgctagagttcttataactgatcagaagatcacaagcataaaggaaatcattccacttctggagcagactacacagttgagatgccctctgtttattgtagctgaggacattaccggtgaagctttggcaactcttgttgttaacaagctcagaggtattattaatgttgcggcgatcaaagccccaagtttcggtgagcggcggaaggctgtccttcaggatattgccattgtgacaggtgctgaatacctggcgaaggatcttggtctgttggttgagaatgcaacagtagaccaacttgggacagcaaggaaaatcacaatccatcagactacaacaaccctcatagcagatgcggctagcaaagacgagatccaggccagggttgcacagctaaagaaggagctttctgaaactgattccatctatgactcagagaaattggctgagaggattgccaagctttctggcggtgtggccgtcatcaaggttggagcaacaaccgagacagagctcgaagaccgtcagcttcggatcgaggacgcgaagaatgccactttcgcagccatcgaggagggcattgttcccggtggtggcgcggcgtatgtgcacctgtctacctatgtccctgcgatcaaagaaacaatcgaagaccacgacgagcgccttggtgctgacatcattcagaaggcattgcaagcaccggcatcgctgatcgccaacaacgccggagtggaaggggaggttgtgatcgagaagatcaaggagagcgagtgggagatgggttacaacgcaatgaccgacaagtacgagaacctgatcgagtcgggcgtcatcgaccccgccaaggtgacgagatgcgcgctccagaacgccgcctcggtgtccggaatggtcctcaccacgcaagcgatcgtcgtcgagaagcccaagcccaagcccaaggtcgccgagccagcggaggggcagctctccgtctgatcgagctgtatgtaaagctctcttcaggcctcctccgtttttttagatgcctcagttcaggccaagcagtagaatttcggttgagatcaactgaaagtgaaaggtctagagtaagagtaggattgccatttttgcgaatcgaacggtaaccttcctcgcctgatctgaatgaacttttgtgaatcaaaaaaaacccgaattc

SEQ ID NO: 4796 - DNA, 832 bp, Triticum aestivum
  Clone ID: TRIAE-23APR03-CLUSTER373_5
cccaacacatccaacttcgttatttcatgacacgggaacaatgcaactcatgtaacacactaacatgtcgatcacaacaactcgcaaacaaagctaagcagtgacggtggtcttcgaagaagaaccggagatcgctccagcctctgtcagcagagcaaccagcttccctcccttgttcagtgcaatagtatctgccacagaagacattgacatggaagtaactatcagaaagtaatccaattgcaagaaagcaaagcctcgcacaatggaatttgctgcttgttcatagaaccataactacaatcaacagtttaacatggttgtagggagcaaatcagctcaccgtcacagccaccgatgtgttttccattgatgaagacattgggaacagtcctctgcccagtccattcagcaagagctgactgaatctcagttccatcgccttcataaaagataacatgggttagttgaataaggtttctcccaagtcctgtgccgatcatcccaatgcagagccaatacatgatgcaattagaacttagaacatgcttgattgtttatcacgagcgtagatgagtagtagcgtagtacgactgggagcagaatctaaaagaaacgtgttttgctcatagcatgtaaacactaaaaagaagactaactaatctgacgttctgatgatagcacttagattacatagtgatttatagttgggttcttgcgacctcaattgctttttctttgttgccagaaaactcaattgcttctttattgtctaaccaatcatcaaagctcccaagagattcgagatcacactcacatcattacttagtga

SEQ ID NO: 4797 - DNA, 871 bp, Triticum aestivum
  Clone ID: TRIAE-23APR03-CLUSTER3757_9
actcgagccacccaagcacgccttagcttgcagtctcgcttgtcctcgagcacacactagcagaggtttcagccatgagtagccgccgtgttggactcctcttcatctcccttctggccatcgccctctcgtgcagcgcggatccgccgccggtgcacgacacggacggcaacgaactgcgcgccgacgcgaactactacgtcctcccggccaaccgcgcccatggcggggggctcacgatggcgcccggccacgggcgccgctgcccgctcttcgtctcgcaggaggccgacgggcagcgcgacggcttgcccgtgcgcatcgccccgcacggcggcggcgcgccgtccgacaagataattcggctgtcgaccgacgtccgcatctccttccgcgcctacacgacgtgcgtgcagtccaccgagtggcacatcgacagcgagctggtgtccggccgccggcacgtgatcaccggcccggtcagggacccgagcccgagcggcagggagaacgccttccgcatcgagaagtacagcggcgcggaggtgcacgagtacaagctcatggcatgcggggactcgtgccaggacctcggcgtgttcagggacctcaagggcggcgcgtggttcctgggcgccactgagccgtaccatgtcgtcgtgttcaagaaggcgccgcccgcctgatcgaggtccatgcggcgtgatggcgcgctcccgtagcgtgcatgtgtgcatctgaataaggcgggccgaaacagtgtgctgtttttgtctctcttagacaataagtgtggtgctgtgctgtccttactgcttaggcggttttgtgaaacgtgagaaacttttttcaagatgccccaaaaaaaaaa

SEQ ID NO: 4798 - DNA, 760 bp, Triticum aestivum
  Clone ID: TRIAE-23APR03-CLUSTER375916_1
ctgaggtttactctgaagttgataaatgcatagaaggattaactgaaagttcacataaatcactacatacactatttcttattttgaacaccgacttccccaaattggaggtatctcttacaaatgctagtgaggggcaaactctaccattcactcatgacgaaaactcatctcaacttatcttcgaaagattgccagaggttgatgttgagagtccacaatggagtgaggccttagcaacagatgctattagtctgatctatgaaaacctccagaagctagatagttttgtttcctctcagctttcaagtcataaaaagccaagaaatatgaccatatactggttaccctacacgtgtggagcaattggcctctctgcatgttccctatggcttttgcgccatagtagcttgatgggaagttctgacatggacaactggattcaagatgctaaggagtcagttgctggattctgggatgaacatgttgagagaccaatcatttccattagagatgagctattcgagacattcaagcgaacagataaacgtgtaatggaaagggaagaggtccaactaaccgaagaatcattgcacaggatgttaattaccttttgtgagcaaacttcaaaggaaaaaccagcacaagatgcatcattgcaggagttgctggagattgtcatgaaaaggtgcgaaaaggaatcgatgcattcaattcagaatctggtcagtggagaattagcacgggccatgcttattca

SEQ ID NO: 4799 - DNA, 1795 bp, Triticum aestivum
  unsure (1)..(1795): unsure at all n locations
  Clone ID: TRIAE-23APR03-CLUSTER3770_1
gcacgacgccaccctcgatccacactcctcctaatgctggaccgaccggcagccgcgtcccgtgtgcggtgtctcgttgacctgcgcccctgtccatccggagagccccatgcagcagtgagcatgccccttccatcgcattctgggctgcttccattgctgatctgaaattttgactcccttgcggatctcccgtctgcctttccaaagcccttcgcgccagcgcgttgttatctgcctcgccgcagccgccgcccgcgagtaacgcagccacgaagcggcacctcgcgatggcggccgttagcgacgcccgcgaccgccgtcgcgcgcgaccgggtctgggctgcactcgagacgatttacaggcaacatggtttcatttcagtatggaactggatgccgtaacgactgggaaggccgtagtacagaaagcgaaatactccggggaagaagtctactcgagcaacaagaccaaacgcacctggatgatggggtgatctacaaaaaattgaaagctgtcacttgttatgattttttatggcttgaagtaatagaagaatctctttgaaattacactgagattgaaatttcctttatattcaaaattgcttaaattcctcatggttcaatgctcaaaatacataaaaaatcaaagacctcttgaattagacccatatgtagtatgtgctgttgtaagaggaagaactattgattaagtcagatacaacagcaaccttgatctacaagataaacgccacataaagatttttgaagttggtgatgtagtgtcattggatacttcacgtgatgttggtgcctctaataatcgccggcttgcagctttgtactgtaataataattctggatttgaggaaatgatggggttggtggataggagcgtgaatgcattgatggagttctacagatcgtgacatgaagttgaagaagtttttgcatataatcgagaactctccagtttacccagttatatatgatagcaacagaactgtattatgttggctacttatcatttgtccatgctcatttgctaagcaaatttggcattccggacccctgcaccttcgttgagattgacattgaggctcttttgtagatgccatgtatatgaatcaggggattcgcctattggttctgttcaattgagtttgaagcagtttggcaggcgtgtggtatctcaacacgaagcacagccaattatagtttgcactcatgttatacaatggaagttccgctctctgatattgctggccccattgggatctccctagatgagacacaggttatctcccttaggaacaacatgcaattgcaagcgtgactttgttcatcaaattgggagccttgtatttcggtgtctgtccctcctacaagaagtgatgttctgcatgcccgtgatctaacagaggatgttgctatagcttatgggtacaacaatgtgccaaaatcaaaaccaaagtctatgacaattggtggaaggcaaccactaaaccgtttctctgataaaattcgtgccgaggttgcaagagctggttatatggaggtgctcacatttgttttgacttcacatgaagagaactttgacatgctaaacaggacagacgatggaataaacatcattattgcaaaccccgtactctgaattgaggtgtagaatagctgatgcatgttgttgaaacctgagcatatttgacatcaagaccataaagttttgacttggggtgtatgcatggatcccactggttgggcctcaacaccgcgctcctgcttaaanatt

SEQ ID NO: 4800 - DNA, 2665 bp, Triticum aestivum
  Clone ID: TRIAE-23APR03-CLUSTER3793_1
ttcgctttttttccctagatgctgctgtgtttcctaatgggaccacaggtcatgctcttgacattctggcaagaacccccactgtggaaaagtggtcttgactctcggcatggcacagcccacgggggcgacgatgattcgaatatacataagacatgggcgccggtgagctatacactgatttttcgcaatttcgctctacaagagggcatacttgtgccgcaggtgccccgttagtatgcggctggctcggttggttcaaggtgatgcatcattctcggcgaccacgaggctgagactaaattttattctggggaaaccggttatttgtcatttgaacatataacatcgacgccgtaccagactagacgtataaacactcccttgttgatccgtacgtggatggaacgcttcttcttgcacgcctccgagcccccacgaccaaacacacacccgaccacgtgacggagaagttgaggataatgacgtcgtcgtcggcggcgaggaaccagcacctggatgagctccgcgcgctcatggcgtcgcactcgccgccgatccacgcgctcctcatcccctccgaggatgctcaccagagcgagtacgtgtcggagcgggacaagcggcggcaattcatctccgggttcactgggagcgctgggttggcccttatcactacaaaggaggcattattatggacggatggacgatacttcttgcaggccacaaatcaacttagcgatcggtggagactcatgcgcatgggagaagacccaccagtcgaagtctggatagctgataatctctcggatgaagcggttattggaattgattcatggtgcatctctgtggattctgctcagagatatgagcaaccattttggaaagagtagacgacgttgccggtgagggtgatgctgtcgcgcgcggcgaaggcgaggatgtcggcgcaggagacggtgcggggacagctccgttcgagcgcggccttggccgcgtcgatcacctcgaagccgcggaggctggggttgttcggaggagccacccgttctgtcctgcccccgccggggttggtggccagcagaactgaggcgtcgcagcccctgacgaagcagtcgtggaaatggagccggatgaggccggcggcgatgccagcgtccttggcgaaggcggccgccacggcctgccggacaagcgcctccgcgttggggcagctcctctggtagaaccccacccggagctgcgccgtggccagacccggcagcaagcacacggcgcagagcgccgcgatgagggctacaccggttctgccttgcatagccatggagtcttgctagtccaatctagatagtccttttctggattgattcaaaatcgtgttgccttgcactctactcaaagcttagacctgatcaagctttgatgctgcaatagaccattcttctaccaaaggctgttaagaatcccatggagctgactgggttgaggaaggcacacattcaagatggtgcagctgttgtgcaatacctggactggctgaataatcacatgcaagagaacgatggggcctctggttacttcagttaccacaatgagtgacagaaaaaattggagttgtacctaaatgttcatgagaaggaatggctgaggaaggccaccgaacctataactgcgagcagttaagccagccacttcatggttactgctgttgtgcgccaaacgtagatagatggctacccgaatatttaatcaactttaataagtgtgaatagcatcaagtctgatcccgtattctttatgtatttcgtgtcgcctaacctggaggccaatataagaatacagagatacgtacattttggtaaaccctcagagcatcagaaatcgtgctacacagctgtcttgaaaggccacattgccctagatgctgctgtgtttcctaatgggaccacaggtcatgctcttgacatactggcaagaaccccactgtggaaaagtggtcttgactatcggcatggcacaggccatggaatcggatcttatttgaatgtccatgaaggccctcatctaattagcttcagaccttctgctcgcaatgtaccactgcaagcatcaatgactgtaacagatgagcctggttactacgaagatggaaactttggtataaggttggagaatgttcttatagtcaaagaggctgatactaaatttaattttggggagaagggttatttgtcatttgaacatataacatgggctccataccagactaaacttataaatactgccttgttgacccctgcggagatcgaatgggtaaacttgtaccactccgactgccagaaaatcttggagtcttacctaaatgttcaggagaaggaatggctgaggaaggccaccgaacctataactgcgagcagttaagccagccacttcatggttactgctgttgtgagccaaacgtagatagatggctgcccgaatatttaatcaactttaataagtgtgaattgcgccaagtgagcacccgtattctttatgtatttcgtgccgcctagcgtgaggccggaaataagaatacagatactgaatgaatactgaattgttacttcgcttgaaaaaaagttggccggcgcggccgaaaaaaaaaaaaaaaaaaactcgagac

SEQ ID NO: 4801 - DNA, 605 bp, Triticum aestivum
  Clone ID: TRIAE-23APR03-CLUSTER380395_2
aacacaaacactttttttctccctcttacaagattcaactcgagctcatcattcgcagtggagcaaagctgatggaagcaaattagcaagtggagtggagtgccaggagctcccgcgccacacgtaccggaggagtggtagctagctagcgtcggccggggaccggcttagtgtgtggagggaggcgcgcacgatgtcggcggcgtcgggcgccgcgtgccgcgtgtgtggcgggggcgctgaggactgctcctgcttgctgcagcgggggagaggtgctgcaggggtgcggtgcggggtggccgacctgaaccggggcttccccgggatgttcggccaggcggcggaggagccggccgtcgacgtcgttgccggaggcggcggcgctgcggcggtggggctgcaggagttccagttcttcgggcaggaggaccacgagagcgtgggctggcatgttcaacgaccacgtatcttttccgagggaggaccgcagaattagccgcccattttaaaaaaaaaaaatgcagcgccgtatggatatcgacgcgtacgccgagtaccagcccggacatggcctcacgttcgacgtgccggtgccactgagc

SEQ ID NO: 4802 - DNA, 1581 bp, Triticum aestivum
  Clone ID: TRIAE-23APR03-CLUSTER38144_1
ttcccccccttttcctcgaaatcggatgcagagggcacacatcccactgcatatatattatcatcatgctaaaccactgtaatcagctcaacatatctggagagccacggcaattttgattctttcgctataattctatttcatgacatcacttgaactaaggagaatggactagagtttaattacaaataaacacatgttcagaagaaaaaaggatgaaaattgaatactactttcctgttcgctcctgttattgcgttattgactggctaacacaacacagcgccaattacatgatatatttatctaagaggatgctactagataacatcacatctgaagggtgagccagggtttaggaccaacagcaagatgttgaaaacccctgcccttcattgaaacattttgatctatagctatacaagaaactcatgtatcgacaaaagctttgcggcacaacacaagcattgtctcatacaaacttctgctgactgaagccaaatgcacggcacggctagtagagaagatcagcaagctcgaagaatcgcagaggcagcatttttgttttgcacagtcaacatgacggcatcgagaaaagcctttgcagcttcagcctcagcttctgcagcttctgcagcccttgctgcttcttcggcctccgcattggcaacttctgcctcagcaactgccttggcagcaaatgctgctgcctcttccttattcatgtgtgtcatcatatcgagttcagcatccacttgaggcttagttagttgtctaatacaaatattttgtttgtcgtcttcggttgagtgcaccttggtgctccttccacctagcgagactgaactcggtgcaattctgtatttttggttggacttcatcaattttccagtaacaaccagtgccttcaattttgttgatagtaagcgttgaaaatcagcaggtggccagtattgctcctcaatgtatgaagcgatggccgttttatttgatccggaagactccttaagcttctttatagcttccaatatgagctcacgagtgctagcaacacacttctctgaacgccgttcacgctgcccgggggcggcacccactgccagtggttttgcgccaatgaccgtttcttggacggtgtcctcatcttctgcctctacatccgttcggtctctgttaaaaaaggttaactggatagatgccattgcaattttcacgtattcaaaaaatgtcactaaatttccatcttttgaaaaatgccaccggaccttccaaatactccctccgaggctccgattcttttttctctgtgcataagaaccagcccgcataccaaggaggcaatagctgggctttttttagactgttttgcccctgctttgatggcaaggaaactgacatgcaataaattcactagcgaatggattggcccttctctgcatgcgcccctggcccgctttgcatgccgctggattgcccactagtttctctctaaacatgcaacggattggctcatgcatgcagcggattagacggggaaaagcggaatagaggggcagcatgggaagagagggctaaaagaag

SEQ ID NO: 4803 - DNA, 1901 bp, Triticum aestivum
  Clone ID: TRIAE-23APR03-CLUSTER38307_1
attgcacccctcgtacatctcccgtctaactcgccactcccccaaaacccccccgcccaccccagcctccccagcgtcccgaggagccaccacccggccgcggcgaccaccgacatcccgcctctccatcggccaccacacccgcttcccccctccgcctcgcctccgccatctcctcgccccgccacgccaacggatccgccggcaaccgccgccttccccccgctctcgccccacgtcgcgcccagcctggtcgcggcgggggccggcggcgcccacccgcgaccgaggtcgccgccgcgcttggggccgcggaggaagaggaggtccgagggcctccacgcgctcgcccgagcaggtggttcaggtcgggctacgccgacgcgtcgggcgccggcggcccgcgcgtcgccttcgccaatcggcgtcttcgtcgacgcgtcgctcaagctcaagccttccttccaaggatctcactggtgggcaagtacaaggccgagacacagtccgtggacttccaaactaaggctgctgaagttgctgggtcaagtgaactcctgggtagagaaaatcacaacaggtctcatcaaagagatcctccctgcaggatctgttgataacaccactagactggttcttggtaatgccctttatttcaaaggagcttggactgagaagtttgatgcatctaagacaaaagacgagaagttccacctccttgatgggagctcagttcaaacaccgttcatgtccagtacaaagaagcaatacatttcgtcttctgacagcttgaaggtactgaagcttccttaccagcaaggcgaggacaagaggcagttctccatgtacattcttcttccagaagcacaggatggtctctggaacttggccaacaagttgagcaccgaaccagagttcttggaaaaccatatcccaatgcagaaggttcctgtcgggcagttcaagcttccgaagttcaagatatcatttggatttgaagcgtctgatatgctcaaaggtttgggtctccagctgccgttcagcgcagaggcagatctttcggagatggtggattcaccggcgggcttatacgtctcatccgttttccacaagtcgtttgtcgaggtgaacgaagaaggcaccgaggctgccgctgcaactgcttcagtggtcacacttaggtcactgccagtggagcccgtgaaggtggatttcgtcgcggatcaccctttcctcttccttatccgagaagacctcacaggggtggtgctattcgtcggccatgtgttcaatcccttggtgtctgcatgatgtgtttgctctggatcgctgccttggcagtgacctcaactgtcacatgtaagtgaagggtttcgactttagatcatgctgcctgtgcaataaatccggtgcatgtttttgttttcgaataacggcttgcttgatgtatggaggttatggtgagttggtgacaataatccagggttgccgtggagttttgtgctttcagttgaatgatactcctacatgagatggccaaatgcttcttggtcaaaaaaaaaaaaaaaaaagcttatccctaccccccgccccctccccggggccccgcccctacccgtctttccccgtctccgggggctcgcgatccccgcccctcgggcgcccctctcttgactcccagggccggggcgtatcccgcgggtacccctctgcattacggctcccgggcaaccccccccgtctgtccccgggcggctggaacgattgcgctgcccccccattggcccgccccccccgtcttcggggcccccctccccgcagggtttctggcgaaccgccctggttgcttcttggtgttccccccgcctattttttaagaagtatggccgaatcctccattt

SEQ ID NO: 4804 - DNA, 2145 bp, Triticum aestivum
  Clone ID: TRIAE-23APR03-CLUSTER38311_1
ccccccctccggggtgacgctcccgccactcccacccccctgtttgttcggcaatcatagtccagcgccagcgagtaaagagggagagaaaccctccccgcctcctcctcctcctcgttccctttatcccccattactcccagcccccctgacaagacccaccacgggcggagctgagagagggaggagaagagtggaggcttcgcgggggagagatgcagcggcggcgggcgcagacgtgggcgggggtggggaagacggcgcaggcggcggcggcgcacgccgcgctcttctgcttcacgctcctcctcgccctcagggtcgacggccgcaccgactcctcctggtggattatattcatcccgctgtggctatttcatggagtggccgcccgtggaaggttttcaatgccagccccttcattgcctcatgggcgtcattgggctccttgtcattctgttgttgcagcaccattgctaatcgccttcgagctgctactttgcatatatcttgaaagcttaagagttaagaatcatccagctgttgatatgaagatcgtgttccttcctctgctgacttttgaagtgattattcttgttgacaattttagaatgtgtaaagctttaatgccaggggatgaagaaagcatgagcgacgaagctatttgggagacactttctcatttctgggtcgcaatctctatggtgtttcttatagctgcgacaaccttcacacttctcaagttatctggtgatgttggtgctttgggatggtgggatttatttataaattatgggattgcagagtgttttgcttttcttgtttgtacaagatggtttaatcccatgattcataggcctcctactcatggggaggctagctcatcatcatcagctattagatatcgtgattgggagagtggtcttgtcctcccatcactagaagaccatgaacaagagaggatttgtggtcttccagacataggaggtcatctcatgaaaataccgctggtggttttccaagttttgctttgtatgcggttggagggtacaccacctagcgctcgctacattccaatatttgctcttttctccccactatttattctacaaggagctggtgtccttttctcgataggaagattggtggagaaagttgttttgctattgcgtaatggaccagttagtccgaattaccttacagtatcatcaaaagtccgtgactgtttcgcttttcttcatcacgggtcaaggcttcttggttggtggtctattgatgaagggagcaaggaagagcaagctcggctgttttatactgaatctaacgggtacaatacattctctggttacccacctgaggtagtaaagaaaatgcccaagaaggatttagcagaagaggtttggagactccaggcagcgttgggagagcaatctgaaatcaccaagtctacccagcaggaatatgaaaggcttcaaaatgagaaggtactttgtaggatttgctacgagggagaaatatgcatggtcatacttccctgccggcacagaacgttatgcaagtcatgtgctgagaagtgcaaaagatgtccaatctgccgtaaccccatcgaggagcgcatggctgtatatgatgtttaaacctcgctaactaagctgaacattgcaaatctgtacatgtggcctgtgtgatgtgcatatgtgctccgatcacaactttaagctgattgaggtctgcacaactccagaaaagttcagcaatatggagaaaatatatcttgtctaaccaaaaggaaggaaaagatagctgctgagcattttcgggttccagttatgtattatcagtctgtaagtatgtcaccttggctcctttttgtgcctcatagatgttcccgtttgacttaggttgtgttcactgtaaataaaaatgtctcgttgtttgttttttgtgctccttgaccttgagaaaaaagagagtaaatgttaaggcctgtggaatggcatctcatggaacaaagtatctatttggtctattgtttgacccgctgaagtgtggcccctcatgtcgtaaagggcttacgcatttgtctggttgagaaaggaattgtttgcgattggactcaaaaaaaaaaaaaaaaaaaaactcgag

SEQ ID NO: 4805 - DNA, 980 bp, Triticum aestivum
  Clone ID: TRIAE-23APR03-CLUSTER383186_2
gagaaatgaggttcggtttctgataaatcatacaaagatacgacaaaggaagtttaacaaatatacaaacaatctctttcgctgctgctcactcgcatgataataacctttaattcattcactttccagggacgaagttggtggcaaaggcccatgcgttgttgttgactggatcagccaaatggtcagcaagattctccaacggtccctttccggttacaatagcctgaacaaagaatccaaacatagagaacatagccaaccttccgttcttgatctccttcaccttcaactccgcgaaagcctctgggtcggtagcgagacccagcgggtcgaagctgcctcctgggtaaagcaagtcctctgcttctcccaatggtccctctccggctactctgtaaccctcaacagctcccatgaggatcacctgagtcgcccaaatggctaagatgctttgagcgtgaaccaagctcgggttgcccaagtagtcaagccctccttcgctgaagatctgtgaaccagccttgaaccaaacagcttctccgaacttcactccgttcctagccaagagctcagggaaaacgcagcctagggctccgagcatggcccacctgcagtggataacttctagctcacggttccttgcaaaggtctcggggtcagcggatagaccggcggtgtcccatccgtagtcaccagggaactctcctgtgaggtagctcgggggctctccggagaatggacccaagtacttgaccctgtcggatccgtaccatgggctgccagatggaccggtgggtttgacggtttttctcatggtgacacggccggttccaaagacctcggaggctcccggtgagagcttcacggcctttccggcaaaggcaggggaggacagagccatggttgaggcagccattagaacttttcttgatcttttttagtttttgtgtttttttttttttgcgactggtgagagt

SEQ ID NO: 4806 - DNA, 937 bp, Triticum aestivum
  Clone ID: TRIAE-23APR03-CLUSTER383186_3
catcaaatttataataaacattttaagcttttacatcacattcaagatttaacaaaccggatacacacaacacgatcaccaattaaaatcactttccagggacgaagttggtagcaaaggcccatgcgttgttgttgactggatcagccaaatggtcagcaagattctccaaaggtccctttccagtgacgatggcctgtacaaagaatccaaacatggagaacatagccaaccttccgttcttgatctccttcaccttcaactctgcgaaagcctctgggtcagcagcgaggcccaatgggtcgaagctaccacccgggtataacaagtcctctgcttctcccaatggtccgtctccagcgactctgtaaccctcaacagctcccatgagaatcacctgcgttgcccaaatggctaagatgctctgagcgtggaccaagctcgggttgcccaagtagtcaagccctccttcgctgaagatctgcgaaccggccttgaaccaaaccgcttctccgaacttcactccattacgagccaagagctcagggaaaacacagcctagggctccgagcatggcccatctgctgtggataacttctagctcacggttccttgcgaaggtctcggggtcagcggatagaccagcggtgtcccatccgtagtcaccggggaactcaccggtaaggtagctcgggggctcgccggagaatggacccaagtacttgactcggtcagatccgtaccatgggctgcctgatggaccctttggcttggcgacagtcttcctcatggtcacacggccgcttccgaggacatctgatgcggcaggcttcacagcctttccggcgaaggcaggggaggacaaagccatggttgaggaagccattataactttttgtgtttttttctctttttttcccacgcgtcagcgtacgcg

SEQ ID NO: 4807 - DNA, 1501 bp, Triticum aestivum
  Clone ID: TRIAE-23APR03-CLUSTER383887_1
ttttttttttttttttaatcaaatttggcacaatcatctttacaaagactcttccatagttccattacatctatgattttgtttctaagcataacatcatccctgtacatcgtagcatctggtactactaccttgttgcactagtgtaacagtgctgtactggtgaagatcagtagttccaaaagatttggtttctcctgtgctgcttcctcaggtagacgccgagcaagtcgtggtacgtccatcgccgcttcccgccggccgcctctagcagcccctcggaggtggtgtggaagccccccttgccgaacgcctcgaacacgacgccgtccgtggccaccacgggctcgcctgagccgtccagccggcggaacgcgaaggagaggttgcgcgcgagccggcgctccatgtaggcgtccacgaagcagccgtgcgtgacgaggtccggcgcgacgccgtcgcggcgcatgtgctcggcggtgaggtggaggtcccagaacatgcacatcttggagaaggcggcggcgcggatgttgaaggtggtgaggtccggccggcacccggcggcggtcatctccaggaaggcgcgctgcagcgacttcatcttgaagttggccgcgaaggagaggaggtagaggttccagagcaggttgccggcgtcccggcggccgaggccgacgcccctgacgaactcgccgagcttgtagtacttccggttggcgatgtacgctgaagcgacggcgcggatggcgtcgacggagatgaggaggccggacttcttgagccggccgaccgccgcctccatctccggtacggtgccggaggccgcgtagtgccgcacgaaggcgttgccggtggcggagtcgacgcggaggccggcgcgggccatctcctgcacggcgtcctccatgagggcgagctcgccggcggcgccgaggcaggagacggcgagcgggtagaggtcccgcgccgcggcggggtcgcgcgcggagagctcccgcgcggcgaggaggacctcgtcgtagcgaccgagacgcgcgtacgccgggaggaggctgggcgctgcggcggccaggcacggcgcggcggagctgagcaggagctgcgcccagatggactgagcccgcgcgaagtcgccggcctccgcgcggacgaccatgagggccgccgcggcatcggcttccggggcagttcttggacggagcacggcacgcctcgacgccggcgtgtgcgcccgggctaggtcagtttgggtgagacggagctcactgcgcgaagaagagggaggagggagacggacgtgatgagacgaggaggacggaacggcgaggggcgcgtggtggtgctcccggggtcggcgacgagcggccgggagaggacgaacggtggaaggcagcggccatggagggaagagggaacccatatcacctcatcccttcatggagccatcgtaagaaaaaagagcaacgccgtcgtaagaaaaaatgttacgcgtggggat

SEQ ID NO: 4808 - DNA, 1008 bp, Triticum aestivum
  Clone ID: TRIAE-23APR03-CLUSTER3843_1
acagcctcggcagacgctcgaactgcgacggaacaaagctgacgcaatggcggccttgctctgcatcagcaccccggccgccgtcgcccttccccgcctcccgcgccgacgcgcacccctgtgcgatgtcgcgctcaccgctccggtgcctgccggtctctccctccgccgccgcggcctcccaactactgggctacgctgctccggcacggaggtgggggttacgggggcaataaggatggctgcgggcgcgccgttcgggcacaacttggtggcggtggacatcgccggagacgaggtggctgccaaccaagttgggcttgaaggagatggccacatatgtcatatatggcaccggtgctttctttgccggatgggttttgtccgctgttgtttcagcaattgactccatccccttgctcccaagaatactggagatggtgggcctcgggatacacggtttggttcagctcacggtatcttcttttcaaggacaacagagaggaattgtttgccaaagcttatgatctcaaaatgagaattgttggatccggtgatgcatgatgtgttctcatatggttggacggctgagtgtaataacttctctcttgtattgggagaaatactaagttgtgtgtttcaaacatatgttactgagtttgtgatgtagtgtctgttatggttgaacttttcggagaaaaatgtatgtcgtgctttttagagaaacaataaagaaaaaagagggaaacggcttggtctgtttaaaccatccatgcctcagtttgtgatgtagtgttcgttatgtttcaactatttggcgaaaaatgtatgccgtgctttctagaaaaaaatgtggggctatgtgataactggaataagcaagtaagacccatgtaggacatggaggctaggccaaataatcccaacattggccccttttttgcagagcaaacatgaaacttatgggaggttggtgtgtattgattttaaaaaaaaaaaaaaaaaaaa

SEQ ID NO: 4809 - DNA, 1595 bp, Triticum aestivum
  unsure (1)..(1595): unsure at all n locations
  Clone ID: TRIAE-23APR03-CLUSTER384564_1
ctttttttttttttttttgcccaaatcaaaacaagctgcaaatcaacagatcacacatcattcggaacatacttgctggagcatatccgctaaattgacccaggaatgcatctaaagatcaacatttcacagctacacatacatgaccaacatgacattaatagtttctcgcaaaaagctaaagagttaccagggactgcttagatgatttttcaaagcacaggatctagatacgcacaataaattttggtggaactgctttcatcataccagtcattctgctgacagaagcactcataatctagcattgtagcttttggatctgctctaaagaaagctttggcgagcacggctcctcttctcccacacatctgctaatggagaaggagaacctcttttcagaagctggtacccttggcttgccaccacagcatcgactctgttggaaggggccataaaattgacacaagcttctttaagcttctggcaattgtacttatcagctagccatagtgcactagccacattctccacattaaggttcataaccaaggtgcctgcacacataagcttcaacctctctaaaccatattgatccgcagctgcaagtagatgctggaaaacagcattgctttcagctctagtgaaatcatccatcacaggcaaggaatcggtgtaaatgaaatggaggagagccttgaaaaccgctggttccacagagttgatggttatgcggctcatcttctccttcatgggttcgctgaactgcttccggaagacaggtgaccgcgcagcaagcaccgccctgtgggcagcaaatgtttcttgttgaacgtcgaaggtcacatctgctgcggacgtatcctctaacatcttgcgaaaatgctgtagtgcgttagggggtggcacatcaatttcacacaatggtttagtttcagacacccttaattggcctaaaacagtgatgacacattcgatcacaaggcagtcatctcggacatacactgaatcctccaacgcctcccttcttatacacctctccttaccccaggtagcctctgcgaagctgtcagatttgaatcgaaatggctcctcatcctcttcaaagaatacacttgacaataacgatttgggctttccagtgacttgatcaatcagtcttatgtcgacgaccgctggcgccttcccatacttgctcatgaactcaacaaaaactgatatgaatccctcactgtcgtcgccataaccctctgggtagtacaagatagcccagtcgaatcccccaaccctgaaggtgctggagcggatgaaaccatcagcattgacgtccatgccaacaataccgtgactaaactgacagatcttcaatcggtgggcgccttgcactgcctgatatgcgcaggacgatatggttgttgacgccattactctctgctttgtgtgctgtggtgccccttcaatgttgccggcggcggacctacagcgtgttggcggcagggggggtggtgcgtggcggcggccgtgcctttcgctcttcgcgctatggagcagaggtgcccaaacccagcacacgcgtaaacggacctggnnttaga

SEQ ID NO: 4810 - DNA, 914 bp, Triticum aestivum
  Clone ID: TRIAE-23APR03-CLUSTER384_2
aaagtatacaaagagagataaggagaagaccctagaaaaatcccccacttctcctctttccccatctcgtctgctccatggccgccgccttcctccgcagccgcattcctccgacttcctcgccacagccgccgccgtcatcgacagggaactcgttccagcgctgctagccatcagctcctccaatctccacacccgctcatcgcccagctcctccaccgctgcccgagtcaaccttcgtccgccatccccgatctccttccatcccgaaccaccaccgtcgctctgcctccacctccctctgccgccgcatcccactaaccttggaccaccccaacagggctgccctgtacgcgtggtccaaggcagtggttgaggggcaagacagaggaggagaaatccgagggaaagaagcaggcgttcgcggcggtggaggtcctggaaggggccctgagggagtgcttcaagggagggggcttctttggcggggacggcgtcgggctcgtcgatgttgcgctgggaggcgtgctgtcgtggatgaaggtgaccgaggcgctgtccggtgacaagatcttcgacgctgccaagactccgctcctggccgcatgggtggagcgcttcatcgagctcgacgcggccaaggccgccctgccggacgtgggcaggctgcttgagttcgccaaggcacgagaggctgcagcgtctaagtgagccagcacacatccagaataattaaaaaatgttattttcaaatgttgtttgttcggctagttgatgtaataatgtactcccttcgtttctaaatatttgcagtaactcatgtcgtccctttattcggtggattgattatgtccctgagttttaaaaattttgattttgtgtggagttcccaaattattaatgtgtgcatgttt

SEQ ID NO: 4811 - DNA, 2364 bp, Triticum aestivum
  unsure (1)..(2364): unsure at all n locations
  Clone ID: TRIAE-23APR03-CLUSTER38536_1
aaaaggaaaaggttagcgggaagggctggcgacgcaccaccgcggcgcggcgcgagaaaggctggcgacttcagtggtgtagtggtacgctagcagccagccgcagtatctctagcatcgtagtgccgcggattgctcttgccgttcgcacttcaccaccatcacaatccccgcagcctttttcctcaacagatttcgtccgggctcctgcaaaggggcgctgaggctcttgagtgctgtgcgcggcggaagcaagcccccgtccggttgtcttcttcccccgccagaggacaaggagcggtcacaagggatcaccgccagggccgccgtgcgctgccttcataagcgagggagggaggcaatcctgtggagtgcggtacagagcagcggcgttccttcttcctttcttcggcctcgcggcgaggccgccaggccggcatggcgggggggcggccggggggccggagccgcccggccacgcagccgcggcgcgggttcgggtactgcatcgcctccaaccctccatggggcgaggccagcatactgggcttccagcactacatcctggcgctgggcacggccgtcatgatcccggcggtgctggtgcccatgatgggcgggagcgacggagacagggtgagggtggggcggtcgcgccgacgcggctccgcctcccccgcgccgccgcgctcccgctgccgctcgcggctgccgacggtcataggcggctcatacgccttcgtcatcccggtgatggccatcgtgcaggactcctcgctcgcagccatatctgacgaccacgagaggttcctccagagcatgcgggccatacagggggcactgatagtgtcgtccagcattcagatcatccttggttacagccagctctggggtattttctccagattcttcagtccgctgggaatggcgccggtggttgcgctgctcggttttggtctcttcgaaagaggattccctgtggctggggagatgcgttgaggttggcctgccaatgttaatcctctttgttgtgctttcccagtatctgaagaatgtacagataagagagatccccatactggaacggttctccctgttcatctgtatcgcattggtctgggcgtatgctcaaattctcactcccggtggcgcgtataatcatagcaccgaggtcactcagatcaactgccgcactgaccgtgccaatctgatctcttccgccccatggattaagatcccataccccctgcagtggggggcaccaaccttcagtgccgggcaatcgttcggtatggtgtctgcggttttggtgtcgctaatagagtccacagcttcttacagcgctgcagctcggcttgcaagtgcaactccacccccagctcacatcctgagcagaggcatcgggtggcaggggattggcatcctcctttgtgggctctttggaacagggaccggctccactgtctcagtggagaacgtggggttactaggatcaacgaggatcgggagccgccgcgtcatacaaatctgtgctggcttcatgatcttcttctccatgctggggaaatttggagcgctgttcgcttccatcccgttcaccatctttgccgccgtgtactgcgtcctgttcggactagttgctgcggtggggctctccttcttgcagttcaccaacatgaactccatgcgcaacctgttcatcgtcggcgtgtccatcttccttggcctgtccgtgccggagtacttcttccgctacagcatggctgcccagcgtggtcctgcgcacactaaagctggatggttcaacgactacatcaacaccatcttctcgtcgccgccgacggtggggctgatggtggccgtgttcctggacaacacgctggaggtgaaggacgcgggcagggaccgcgggatgccgtggtgggtgcccttccgctccttcaagggggacagcaggaacgaggagttctacagcctgccattcaacctcaaccgcttcttccctccctcgtaaacgctcgagggataaaaggaagaaaggacatggtttctttcttggctgatgcgatcatgtgcgcggctgttcggatccgagtgttgttgagcagtggaaatagtagatgtgtattacctctagctggtcattgtttcattcgttcattttctttgttattatatctatatgcttgtagatcggggtggggaggtgccggctcggtgaaccaaccctgcctgattttagcagttcctgttttagaccattccgcaaacaagatcatgtatgtggcctaccgtggtgtgatatagttgtactccctcccgaaatgctcaatggagagctcggcctccgngaggccaaattta

SEQ ID NO: 4812 - DNA, 1417 bp, Triticum aestivum
  Clone ID: TRIAE-23APR03-CLUSTER3854_3
atcatccacgccgagagtccaagctccaaaaccaaaccagaaccggttgatccgtcagtagccgcggccgccggcgatggagaagggcaagggcctcgcccgccgctgggcagtggagctccacgacgcatcttcctcctcatcctcgcctgccttccccgatcctcccggcttcaccagatctgccccggaagcggaggacgccgccagcgcacggcagcgcaaggagaccgaagccgcctggaaggggcagaaggcctgggaggtggcgcaggcgcccttcaagaacctgatgatgatgggttttatgatgtggatggccgggagcacagtccacctgttcagcattggcatcgtcttctctgctctctggcagcccttcaacgcactccgatctgtcgggaaagtttttgaaccatttaaggacccaagggtggatacacttgcacctaagttgctcttcactgctctcaacttggccgctatgggtttgggtgtttggaagctcaatacattgggtcttcttccaacaaatgcatcagactgggtatcttcactgtctcctgctcgggaggttgaatatgctggtggagggatccccttgatgtaatgccccttatgatcttcaattggtaaaactctttcgttttactacttggaggatggtatctgtactaaagcgaaatttatcctgctgaagggagaaattttatgcgggtttgttgtattttttgtttcacatgtaccaaattcggattgatatctatagacaaatcacaggcttagctaaagatagcttgctcgtttttttatctcttctgcttaccatgtctgattaaatagagaagttgtcgctaactctcccattcaatgtagtggacgaactgcttttgttttgttcgacaaatagctgtgagatttgttgttgggtttagctggttgaaattgacatttgaacttaatggtttattctgcacgcaaaaaaaaaaaaaaaaaaaaaaaaaaaaaaaaaggcggtctagataaaaaaaatataaagttacacgtacatgcgaatgcaaaaaaaatactatatatatagcgtaaatctaaattaatgtcacgtggccgtacatctacaacgactgggaaagccaaaaccctgccgaaaccaaacttaattggactagaagcacattctccctatctgcagctgtagtaaagaggaagaggccgataccgattgccattactaacagatgctcaatgtgaaaggggaatggcacgtgccctgtagcattaacatcaagcgcggtgggtgttacgctcacgcgcaccgttacagttacacattgccatagccctagcgcccgttcctttctttcttttctttttcttcacggccacgttcgttcgcctttccaggtcaaaatctaaa

SEQ ID NO: 4813 - DNA, 1382 bp, Triticum aestivum
  unsure (1)..(1382): unsure at all n locations
  Clone ID: TRIAE-23APR03-CLUSTER385_1
aagaactacccagcccacggcagcccacagggcagcagcacacaaggagagaggagatggctcgtgctcctctgctagcagcacttgtggtggcggtggtagtggccagctcgcttgggcatggggcttctgcagcggagcctccggtggcgcgcggcctgtcgttcgacttctaccggcggacctgcccgcgggcggagtccatcgtgcgcgccttcgtccaggacgccgtgcgcaaggacatcggcctcgccgcaggcctcctccgcctccacgtccacgactgcttcgtgcagggcggcgacgcctccgtgctcctcgacggctcggccacggggccaggggagcagcaggcgccgcccaacctcaccctccgcccctcggccttcaaggccgtcaacgacatccgcgaccggctggcagcgcgagtgccgcggcgccgtcgtctcctgcgccgacgtcctcgcgctcgccgcccgcgactccctggtcgccgcccccgggccccactaccccgtgcctctcggccgccgtgactgccgccggtccgccacgcggcaggaggtgctgtccgacctgccggcgccctcctcgaacgtgccgtccctgcccgccctgctccggcccctcgggctccccgccaccgacctccgcacaatctctggcggccacaccatcgggcaggcgcactggtcctccttcgaggaccccctcttccctcgtccggaactcaccctcaacccccccttcctcgctaggctgaagcggacgcgccctgccaagggcaccgaccgacgcaccgtgctggacgtgcgcacgcccaacgtgttcggacaaccagtactatgtaagacctggatgaaccggggagggggtcttcatctccaaccgagccctcttcacccaaacgacatcacccggcccatccgttcgagcgttttgcacggaaccaacgcgggaacttcttcgagcagttcggcgtgtccattgggcaagatgggccagatgaggggtgcgcaccagcgacctgggaaaggtccgccggaactgctccgcccgcaaccccggcccagccgccgccgacgagctccagtggccgtccgttgtgcagaccatcgtcgatgcagctgcagaaaggcttggctagcttgtaagcatctagacaagtggactagtagctgttaatcatgtcgaaataataaaagtgaacaaacttgatatcgttagccatgaatgaggtaataaaaactgagcagggcaacccatggtcgacgaggctgtgtacgtacctgtgtaatgtaccttgtcgtgactcaaacgtgtgnctaggctgctagctagcagacctacggtgaccagttagtttaaaaaaaaaaaaaaaa

SEQ ID NO: 4814 - DNA, 1626 bp, Triticum aestivum
  unsure (1)..(1626): unsure at all n locations
  Clone ID: TRIAE-23APR03-CLUSTER3871_1
ttccttatcatgtttctctcattgattttcatttcgtcctcccccctccgctgccagccacctcccccgaagccgaaggaagcgcccccccgtcgatcccctccccagccccgctggcgggcgagctcccacggcgcgacggctgaccagtctcgatttcaccgctccggccgctgattgatcggtcgaccgttgtggcgatgggaggagggtcatggcggcgccgttaggggcttcttggttgactccctgttgcgatggtgataagggcctttgtggagatggtcgatcaccagcaattgagcaacaacgttaacgcgtccactaagtcagcgacgtcctcggagttaggcggaggagcaaagcggtgaagcggggagcaagggcaccgggtcacccatagccgtgagcaatcccgcagggtgtaggtaccacaagtggtaagggcactataaaacctgcacatgctcggtatgatatatgggaatctcaagccagagaatgttcttgtgagagaagatggccacatcatgctgtcagatttcgatttgtcccttcgttgtgatgtgaccactaaacttcttaaatgttcgcacccgggcctagatccgaggcaaaagcgcaatcaaccttattgtgtacaacccgtgtgcattgagccagcctgtatccagcctgcgtgcgttacgacaaccacatgcttctctcctcgctttttctcctccaagtccaagagggagaagaaggaaaagaaggcaaaggcagacatggcaacccaggtcagaccgctccctgagcttgttgcagagcccacagatgcaaggtctatgtcattcgtaggcacccatgaatacttggcacctgagatcataaagggtgaggggcatgggagtgctgtggactggtggacttttggcatattcttgtatgaacttcttttcggcaagactccattcaaaggttcagggaacagggcaacgctattcaatgttgttggccagcccctcaggttcccagaatcacctgttgtgggttttgctgcaagggatctcataagggggttgctgatcaaggagccgcagcatcgattggcgtacaaacgtggagccacagaaataaagcagcacccattctttgaaggtgttaactgggcattgataaggtgcgctactcctccagatatccccaagccagttgaaatccctcggccaggagcctcgacaagtcagaaggcaacaccgtcagccgagaaaggtccagacaattatcttgaatttgatttcttttagtggattcttccaagaccatttcatgtgcaagctgtaaagttcttttttcctagacattttctgcattctaataacttgatatgtagatggcatatgttcctagcgttgttggtaagctccgtttgcagttcatttcacctccattgatcacattggatgggagcctctaccaggtgtaagctgtaatccctcatcaattattgagaagtagggtctctttaataacaaataaatgtttccgttctgtccgcaactgctgttttgaaagctatatttggtggtgtaccggaagcanatcacaccttcgatgangtaaataaatgtcagctggagcagc

SEQ ID NO: 4815 - DNA, 1120 bp, Triticum aestivum
  Clone ID: TRIAE-23APR03-CLUSTER388860_1
cttttctttttccccctctctttttcccgcttccacccgcttttttttttttttttttggattatcacagtcagttttcattatttccccggccaaaatcccctttttcagggctcaaaattacaactccaattacaacagcttcaattgaatcatgctgcagagagtccccaactcatctcattcagacaatcaaatctatctatgcctcaatcccacgcactcgagatccaaatcgtaaagcaaaaaaaaagcaaatcttacgagtttgctttggctccatccaccgcaaccgccgcgttctcctcagcggcggcggcagccgcatccgcctcgatctgcttcttgttgcgctcgatcgcctcgccgacctccttgggcatgtacttctcgtcgtgcttggcgagcacctccgtgccacgcaagaagcactggccctccagcgccttatcggagacctttctccccgcccagtcgcggcggagatcgtccgtcagtggcttgaggaacccctcgacgacgacggagtggccctcgcggaagaggtcggggagggcgccctcgtagcggacgaggacgtcggtgacgaggtcggtgacgacgaactcgatctcggaggaggaggaagagggatgggcgacggagccctcgaggacgagcccgccgagccggcagcgggtcttggaggggtcggtggcgaagcgcgcgagcgcgtcggtgggggtgaggtagaagacgagctggtcctggaacgtggcgagcacggtgaccacgaacccggccgcgcagccgaaggtgagcgcgtaggtccagaggcgccggctctgcagctgccgcgcccgcgcgccgatgtccgccgcacgctgccgcggggcgcccggcccgagccgcctcgtcgcggagaagaagcgcgcgggatggagggtgtgggcggacagggtggcggtggcggcggcggcgccggtgacgcgcgcggcggggatcggggtcggggtgtggaggagggcggagaggaggcggcgggaggggagaaggcgcgagaaggccatggggacggaaggggtgggatctggaaggcgcggggccgagggaatggggaaaaggcgtgtgtgcgcggtgc

SEQ ID NO: 4816 - DNA, 887 bp, Triticum aestivum
  Clone ID: TRIAE-23APR03-CLUSTER3888_1
ttccttctaccgtagaagctcggaagttcctttcttccgtagaagctcggaagccaaggctgcctccctcaaagccctccagtcctcgtcctccacggcttcaccaccgagaagcaggattctcatgggctgcgcaggatccacccccaagggcgctgcggccgccggaggcgaagctacgaagaaagtcaggaagcctaagccctggaagcacccccagccgatcacaattgcccagctcaggcagatgcgtgatgagttttgggacacagctcctcactatggtggtcggaaagaaatttgggatgcccttcgtgctgcgtcagaggctgatgtagcccttgcacaggcaattgtggaaagtgcgggcgtaattgtttcaaatgctgacctgactctatgctatgatgaaagaggtgctaaatatgaactgcccaagtatgttttgagtgagccaaccaacctggtccaagacagttgaagggcagctgcactatgatccattcatgtaaaaaactgtaaatcgcttcagatgctaaaaacaatgccttgctcaagtgtcctggtgacaggagcatggttgattaatgatttcaagcatgcttctggtaactgtcagcttacagtttcccccctatcgttagcatacaatgttctcttctatctcagactgtcttccgacgatttagataaagttgttcatagcatcccctaaattggtgctgttagaaatcttcggtatgggttagaaacttcagactggtgcgttgatgttttgttacaatgatataagttgaagtatggcaatacatttcagaaagaaagaaagagaatgcaacatctgtaagttacaagcttatattttaagttaaaaaaaaaaaaaaaaa

SEQ ID NO: 4817 - DNA, 1701 bp, Triticum aestivum
  unsure (1)..(1701): unsure at all n locations
  Clone ID: TRIAE-23APR03-CLUSTER38958_1
ttatgtttcccacctgcgcggcgcaacctccggccgatccgacccacccccgctgcaaaaccgtcggtggcgtcgcccttccaccgcgccgccacttcactacccctccgccgccggcctcgtcctcctttccgtcacacaccacaagcgtttaaagagaggggagcgagcgagcgagtgcccgcacacgcgtcacttctccgatctggtccggctgttccgccagagagcaagcccgggatcccgcctttgttctagctgccgctgcgtgctgccaattccgaagatcgactcacaggactgaagaggcgcctccttccttctcggttctcgatttatcaggctcccgacagcgcgcccgtgccacgatgtcagaggacaagggccgcagtcgcggcggtgcacgggtgaaagtccgggaggcggtctgcaacgccgtcgccggcggttcggctggggtcatctcggcgacggtgctgtgcccgctggacgtgctcaagacgcgtctgcaggtgtacggccccccttccagccgttcccccggccctgcgccccctgcccgggcacttccgccgcctgggcagcacattcccttaacggatggcctccccgggctgcatcgtggccaggcccttcctggggtgtctcttggcccttctccggctgttgcagctccagttcctacttgcgcgggggcattttcagtttataattacgtgaggggtcttcttcgatctcaagatactaaaaatggcgaactgtccatacaggaaaatattttagctgcttcctgtgcagggattgcaacagctgttgcaactaatccattatgggttgtgaagactagactacaaacacaagggatgaggcctggcgtggtgccttacacgagcgtcttatctgcgttacgtaggattgcagcagaagaaggtctccgtggattgtacagtggtcttcttccttctttagctggggttactcatgtagccatccagttcccagtatacgagaaggcgaagctgtacattgccaaaagagacaatactacagttgacaagcttggccctggtcaagtagcaatttgttcttcaggatccaaaatagcagcctcgctcataacataccctcatgaggttgtacgatctaagttgcaagaacaaggccgtgttccccatggtgctatacggtatataggtgtaacggactgtataaagcaagtgttacagaaggaggggattgctggattctaccgaggttgtgctacaaatttgttgcgaacaacgccgaacgctgtcattacttttactagttatgagatgatcaatcgactcatgcaccagctcctatcctcctaattgaaagatggaaaccaacaaatcttcaatgtgcttgcaatgctgaaccgtaagttctggctgtaatggttcgttatcgtggttgcattgccatttgtccattattggagaaaagatagctgttgacgacagattttggtaaaagtagacagatccagaggtttgtgttttgccgtgagggagaaaccctattgttttaaattcattctgcatagttgttaggagcaaatcgttgtctacagaacgttggcatgcttttctttttttgtgcagcacgaggcagaaaatgaccatccacgttgatttaantttttaagaagatattgggcaactatgnactgatcat

SEQ ID NO: 4818 - DNA, 1145 bp, Triticum aestivum
  unsure (1)..(1145): unsure at all n locations
  Clone ID: TRIAE-23APR03-CLUSTER38979_1
gaatcccacctagctcatccgcgcttctctctctctctctctctacatctgtctcggaccctccacttcccacctcctcccttggttccgccacgcgctgccgcagcagcggctgcggggcggcggagtcggagcaggagccgcagggcgggggggcgccggggggagtggacgaggaccttacgctgatcatccgccgcggggactggacggaggacggggaccacgcgctggcgcgcgccgccgcgcagagccgcgcgggccgctggagcccgctgccgcgggccgccggcctgaggcgcacggggaagagctgccgcctccgcggcctgaactacctccgccccgacgtcctccgcggcaactgcaccgcccacgagctgctccgcatcctcgattactattctcgctggggtctaccggtggtcgaagatcgcagcagcacctcccgggtcggacggacaacgagatcaagaactactggaggaccagggtgcagaagcacgcgaagcagctcaactgcgacgtcggcagcgccaccttcaaggatgccatgaggtacctctggatgcctcgcctcgtcgagcgcatccacgccgccgccggcgatcccacaatcggcgacacctcgtgcgcgtcaggagtcaggtcgatggctaccacgccaccgccaccacatatcccgacaacaactctcccgccagcgcggtcaccaccagcaggtcggcatcgtcgggttcgttcacgtcggagctctgcggcgaggagaagaacctgcaagtccatggcagcggcgagaagacaacgagcggcggggactggatgcaggacgcggaccaagagttctgggccatgcatatgcagatccagcctgatgacggtggtcttttccacgtcgaccacgagcttagcggatgggtgcagggcttctccgacgtcggcgtttcggcggacaatctctggagcctcgaggacatatggaagatgcaatgagttttccagttattgaggagcgatttttatacttatacatgtgtatcatacaactaatagatcacatacatcggagtaaggatggcgacaaacttaactagctaattaattactaatatattttagagctaactttataaaaagnntaaggc

SEQ ID NO: 4819 - DNA, 1935 bp, Triticum aestivum
  Clone ID: TRIAE-23APR03-CLUSTER39020_1
agcaccgcaccatctctcgccgtattcgactcctccaccgcccgccccctggattgggagccaagaaaagcagaccatagatcctccgaaaccagcgcctccgatccattccgcccctaccgcttgctcccccgccgcagccctgcacctggaggctgcctgcttctcctgcccagcgctcccgcaagtcgcagccaagaaatggctcgacccgaggaaaacgcgaaattccctagctgtgatgcctactttgacactatccagtccaagaagaagctcccgctagctttgcaagagtcactgaccgccgcctttgctcagatcccagtcgcgtcgtttcctgatgttcctagtggccgggtgactgaaattcctggagaaacttctgtgcttgatgctgttagaattttatctgagcacaacataagggcggcgccagtgcttaaccctgaacctggggttccggccgattggcaagggaggtatcttggcatcatcgagtactcagccatcatcctttgggtactagataatgcctgatctcgcggccgtagctctgtcagctggatcggcaactgctgcaggagttggaatgggcgctgttggtgcagtgggcgtggcagcattaggtgcaaccggcccggcagctgtcgctggattgactgctgctgcagtaggggctgctgttgctggcgggttaactgctgaaaagggtgttgcgaaggatggagtaactgctgctgatcatttaggggaagatttctacaaagttctgcttcagcaagaacctttcaaatcgactacagttcggtcaattgttgagtcctacccatggtctccttttgtgcctgttacgcttgacagttcaatgcttgcggtactactgttgctctccaagtacaggttgaggaatgtccctgtgatcgaacctgataagccagttattaagaacttcattactcagactggtgttgttaaaggacttcagcagtgtaaaggaagggattggttcgactatatttcggcacttcctctttcagacttggggcttccattcatgtctcttgatgaggttattacggttaacagtgatgatctaatcttagaagctttcaagtgcatgaaggataacaaaattggcggcgtacctgtagtagaaggtcccaaaaggaaactggtcggtagtgtgagcataagggacattcgcttcctgttgcttaggcctgacttattttctgatttcaggcatcttaccgtcttggagttcatgaatgctctaggttccactcttcctgattcagggggcaacggctggtgaagccgccactcacctgtgcacctgatgcttccatgggcagcgtgatcgacagcatcgggtcgaggataacccaccggatatacgtggtggatggcgactttgaggtggtcggtgttgtgacactgcgagatgtgatctcttgtttcatccacgagccccctgggttttgcgacagttatcttgcttcagcgatggagaagctcgaggacaagggcgatgccgattcctccgttgagaacagctgagccctccgttgagaacagctgagctatcgggagcgcaagacggtggaaataacagacagggttagtgagcaagtgttgtagttgggctgattcgttcatgttgtggtgttgatacagtaaattttgtgtggggtgacaacacatttccatttcagtgctggtgtaaactgtgcgttgctgagttggctgctgtgctgagttcccgagttcgctgatccgcacctgtttcctggtgcaaacactgcagtggcgattctgtgatctgtaaaaacgttgacgtaccaaaggttgcctaatctgtcatgtgtacctctgttatcctcctcgatcaatcaatagtctaatgtatggcagttgtttaaaaaaaaaaaa

SEQ ID NO: 4820 - DNA, 1183 bp, Triticum aestivum
  unsure (1)..(1183): unsure at all n locations
  Clone ID: TRIAE-23APR03-CLUSTER39030_1
ccacccgcccccaccagccacaccaaccaaccaaccacggccgccccgcagcaacaaccaccgcgcacgcgccgagcacgagtcgaacagcttgccatggctcccaagaacgcgctccccgtcgccgtcgccgccgccgcggacgccggcatggagcccaggttccggggcgtgcgcaagcggccgtggggcaggtacgcggcggagatccgcgacccggccaggaaggcccgcgtctggctcggcaccttcgacaccgccgaggccgcggcccgcgcctacgacgccgccgcgctccactaccgcgggcccaaggccaagaccaacttccccgtcggcaccgtcgccgccttcgcccacgtcccgctcccgccgcccaaggcgctggccgtcagccccagcagcagcaccgtcgagtcttcgtcccgggacacgccggccgcggcgcccgccgctcctgctgctgctgcccccgcgcccccgccggcgctcgacctgagcctggcgatgccggtcatggtggcgccgcacccgccagccagaccatccaaccaacgccgcaccgcaacaacagccgccgcgcacgcgccggccccctgccggtcagcggcgatcagcggcatgaacaaggtggcgtcccgcgaggaagagcagagcgacaccgggtcgtcgtcatccgtggtggacgcctcgccggccgtgggcgtggggttcgacctgaacctgccgccgccggtggagatggcgtaggagatggaccgatctcggtcgcccgatgacgacgcggcccggaagtaaagcaaagcgctctcgtggtagaatttaaagtttagaagaatggcgtgtacttactagtaagaggttaatcggccgtttaattgccaggatcgatccatcgatgggtaagggtaagtaggtgtacatagatcgcgtgcgtgcgttttttgcatggggaggcaggtaggatgaaacacatccatctatctgctcccaatgttacttacaatttccttaaaagcaagggaaaaaaagacaaaaaggaagaagccagtagtagagcattttgttcttcagtgtacaatatttgatctctgtctctcggattaatgtgaaatttatgatttccattccaaaaaaaaaaaaaaaaaagcttagcgataccgnantannnaaaaaaaaaaaa

SEQ ID NO: 4821 - DNA, 931 bp, Triticum aestivum
  Clone ID: TRIAE-23APR03-CLUSTER390460_1
ttttttttttttttttgccagattttgcatgagcaacgttatatatttgccagattttgtgcagaatgcgacagtcccacaaattagagaataaatactagtactcgacatattatgtgatcgtcacgcccaccggccggacacaatttcaccgcaagcgcacgcacaccctgagaaccccgacacggtagcatatataatccgcatattcacatcacacgcacgcacacgcaaacgaataatccttgccaagatgatgctgcaccttcaaatagaccacactccatcgacgaccggcctgcgtcgaccgatcatcagacccgtgctctgactcccatgggcgtctgcacgatggccgcgttcgccccggcgtgcagcgacccgacgcagagcagctgcgttccggccaggatgatcgtgaacgtctccagcgcgcgcaggctggggggcctcaggccgatgctgatctccttgcacgcgagtcccatggcgaggagggtgagggtccaggtgacgagggcggaggcggcggcggacatcatgctggcggggtagccctcggtgacgtcgcgcaggccggtgagcgaggtggagatgccgaccgcgccggccaggagcgcgaagatgacgaagaaccccgtcgccaggttgcccatcgggaagtagaccgggaacagccgcaccggcggcgacgcgcccctcagtgagtgggcactgtcctcgatgctgtagttgacggcccagccggcgatgacggcgacgacgacgtacatgatgaggttcaggaagaggaggcccgaggccatcgtcttgatgcccccgctcgccatgctagctgctagctgagctgccgaacacgagatcgatgcgccgtgcgtgctcgtgtgctcagctcgctcccttttctatgctcctccgatcgtggtgtgct

SEQ ID NO: 4822 - DNA, 1323 bp, Triticum aestivum
  Clone ID: TRIAE-23APR03-CLUSTER390554_1
cacgagaccattacctagaacatcctaatcgaaaagtccgtgtccaaaaccgagcaaaacctcaaagcgcagacaagagaaggtcgctcgccaccgaggggaatggcggcgccgccggacagcaagtctgataaatccccagaggagctcctgtgcgcggcggcggaggccggtaacgacgatgctatcgccgagatcatttcctctggcgccgaccccacctacttcgacgcctccggcatgacgccactcatgcgcgcggcctccggcggccacgccgctgccgcgcggctcctgctcgatgccggcgcgccctggaacgcgctctcccccgaaggtctctccgcgggtgaccttacctccgaccccgccacatacgacctgctcctcgaccacgccctgcgctccgagctcatcctcggcaccgtcgcccgccgccaggcggcctccgcgaactcctccgacggcgtccccgccgagacctacctcgactcgagggtttcgttcagcgaggaccgggtgatggatgcggagagcaaggcggtgatgatggagtgggagcgtccgctgatggaggcgcacgcgcgggcggtgtgcgccgccggcggcggcaaggtgctcaacgtggggttcgggatggggctcgtggaccaggcgatacagaggtacgagcccgaggagcacaccatcatcgaggcccacccggaggtttacgcccggatgctcaagcttgggtggggtgagaagaagaacgtcaggatcctcttcgggcgatggcaggatgtgatcccgcagctcggctcgtatgatggtatattcttcgacacctacggggagtactacgaggacatgagggagttccacgagcacctcccgaagctgctgaatccgggaggggtctactcctacttcaatgggctgtgcggcgacaatgccttcttccacgtggtgtactgccagctggtggcgatggagctggcgagcctcgggtactcgacgcagttcgtccctctccccgtcagggactgcctcaaggcggaggtgtgggagggggtgaagcagaagtactggcagctcgacacctaccacctcccggtctgccaggccgaatctgaatcagagtagaatttctaccgtgttgctactgatcgagttttcgctagctcttcgctgctgctgtaagtttgttcaggtcttcaggatcaggtcaagcttgcctgcgtgcgtgtttgtggattgcagtcgatgatagaactcccgtggaaaatttggttccaaaaaaaaaaaaaaaagtggggcgggagtgaataatgaaagagaaaa

SEQ ID NO: 4823 - DNA, 1650 bp, Triticum aestivum
  Clone ID: TRIAE-23APR03-CLUSTER390674_1
cggtatcgataagcttttttttttttttttttacaaagaaagatgatttttataacctgaacgaacgggcaatgatgcaggtcaaaggcaagataaacagaggggcaataatccatacgctgacgagtggactttgcactgtcagttcctaacgccacaccaggttcacatggccaagatagatataggcgtaataataattgtacaggtccaggcaaggttgcctacaaatcacattcagtgaacgaaatcatgcagtacaacatacgtcttcctgacttcaggtgcattagaccagttcttcaaggcaaacagccccaaagtacggaagccgaccggtgcatccatttcatcaccatccaccaagtgctcccaaaaaacagcagcaaacatcctactggtccatgctgcaatcaccagcatcaggctcatcctcgtcttcctccttcttcagttgcccacaggcattgcactcaaatacatgggacagctcaccgttcggtaagggtggcagcggcgcaagcatgccatagcagtcctcacgatcacacagatacctcacaaagaagaaggcatgcgggaaatcgtcgtcatcgtcgtcactcccttcctcctgctccatcccctcatcaccgccatcttcagcgacctccttgccatgctcctcttccatggtgtcatccccatcagcaccatcattatcatcatcaaacttccacttgctctcaatctgacaccgatcacactcacaccggaacccataatcctccagcagcctgcgttgcctgtcagcatacctccaattggccgcgaaatagctgatgcaaacctccttcccctctgttataccatggagagagcgcacgacgatgtccgtgttccctggccccggcctgtcggcataatcgaagtggcaagcattgggcaggcagtcgtggttgagcagtgacgcgcgagggtacaccgcgcagcaccgcgccttgcggacctccagcggcacgtcggggcggtatggctccaggatcgagaagctgttggtccggtccttggagaggagagccaccgtgaggtccagcgagaagcccgcgggcagcgtgtgcggcggcgccaccgacgccaccgcggcgtggaggcccgcggcgtcttgctgctgggtcggagagggtgccgaggagagagagaggatggcgctgagagagggctcctggagcgagtaggccgagaggaggaagaggaggggctcctgttgcgcctcgggggcggcggcgaggccgctggagagcgcggcgcagaggaggcgcgggtgggaggcggcggcgcaggcaggggagcagaaggcggcggcgcggcaggaagggcagggggtgtggggcggcggtgggagcgagcggaagcaggcggagcagtaggaggagagggaggcgagcgaggacgggtagaggaggatgggcgactccgacaggagcacctcgccctcgaggatgtcgcgggcggcgaggagcgcgcggccgcggcccgggaggtcgactaccctgagggcgtcgccggccatgtttggcagtgccattccagcggcggcggaggaggaagagcaacaaactgctggcaagcacacttttcgattaggatgttctaggtaatggtctcgtg

SEQ ID NO: 4824 - DNA, 1492 bp, Triticum aestivum
  Clone ID: TRIAE-23APR03-CLUSTER390860_1
atatcaaatcaaattgagccgagagatcgtcgtcatcgcgtgatgcgtgatgctgtagtgaccaagtcgccggcggtggtcctcggcccgtcggggcccgggacgccacccggcatctcccgcctctcctccttcgacaaggttcactttcctatccccatggcgcccctcctcatctgcgacgagtcgatcccccaccccgccgagacaaatcacgatggcccggtcgcgggcgctggtgcccgatggccggccggctcgtcgccgcggcggacgacgacgtgtacctcaacatctcctgcaccggcgagggcgtgcctttcgtggccgcgtcggctagctgtgccctggagcaagccatgacggcgccgtggcggtggcgcctcagggagttcagcgtccgtcaccctggtgcgctgtcgagctctagcgacgccttggctgctgatgcaggtcacggaggacggcgtcggcctgcgccgggtcggggtgacgtggaaccacgtcatggccgacggcgccgggatcgcgcagttcctgcagtccgtgggcggcctggcccgcgggatgggggcgccgtccgtcgcccccgtcaggtcgggcgccaccatcccgcccatcccgacgcccgtggtcgccgcgctgaggtcccagatgcaggtcctgacagaggagctggcgagcctggacgtcatgatcccctccagcctgatcagccgcgtcaaggccgagtgcagtggcggcagcacgacgttcgaggtcgtggccgcggcgctctggcggagccgcacccgcgcgatcttctccggctccggcaacggtgaccccgacgctcccgcgatgctctgcttcccaaagaacgtgcgcgagaaagtcggcgccgagcacggctactacggcaactgcttgagcagccagctggtcctggcgacgaacggcacggtggcgagcagcgagatcaaggacctggtgaagctcataaagggccatgcggacatactggatctgctaaagaatggtggcgccgcctcgggggtggatttgggcaggctcatgtcgtccccgaggtaccacacgatcgccgtctcaagctggcggaaccttgggatggaagcgacggacttcgggggtgggaagccggcgagggcgatgtggcagccggagaactcggcggggttcttgtgcgtggtgtgcccgccatgcaaggggaaggacggcgtcaacgtcctgtcccgctgcgtcacgccggagcacgccgaggcattcctacgggagctggccgcgctcgacatgtaacatgctctatcgtttctcttgtactccattttcttccctcgcttccgatcgtctaccgatcaatcttcctccctctacgcaacaacagctttgccgacacaatgtggccacgattcaaacaaatagactcataacgtgatgcgtgacgtgatgtcatgtgttaatttcaaaaaaaaaaaaaaaaaagcttatcgat

SEQ ID NO: 4825 - DNA, 965 bp, Triticum aestivum
  Clone ID: TRIAE-23APR03-CLUSTER390_1
gggacaagcgagtaggttgggggaggccaccttagcccctcaaccaggagccattccgtcagcaagtcagaaacaccacatcactgagagagcaaggagcagagagagaagggaaaacaatggcgggagaaggagacatcaagctgctcggcatggtggtgagcccattcgtggtccgtgtgcgaatggcactgcacatgaagggcgtgagctatgagtacatcgagcaggacctcttcaacaagagcgagctcctcctcaggtccaacccggtgaacaagaaggtgccggtgctcatccacggcggcaagcccatctacgagtcgctcgtcatcatgcagtacgccgacgaggtgtggagcggcaagggcgcctccatcctccccgccgacccgcacgagcgcgcagtcgctcgcttttgggccgcctatgtcgacgacaagatgttccctgcttacatcgacatcatgaaagcggcgacggaggaagcaagagcggagaaggccaaggaggcgcttgtggggttagcgaacctggaagaggccttcgcccaatgctcaaaagggaagcctttcttcgccggcgactccgtcgggtacctcgacctcgccgtcggatgcaacctgttctggctcgaggcgatacgcaagatgtttggggtgacgttctttgacgtgggcaagaccccgctcctggccgcgtgggcggagcggttcgcgggaaccgagatggcgagggaggtggtgccggacgccgacagcgccgtggtgtttgccaagaagcttcaggctcggtttggctctaacacgtctgccaagtagagtagcagtgtacgttttctttttccggatagtagtgtacggtttcattatcgaattatctcggaaactctttgtaataaatgaggcagatcatggacaatggcataatttttttttaaaaaaaaaaaaaaaaaaaaaaaaaaa

SEQ ID NO: 4826 - DNA, 1248 bp, Triticum aestivum
  Clone ID: TRIAE-23APR03-CLUSTER391301_1
tcatttttcctcctcgggggcaaagaaaaagtccacgccacctcactgcagggcacgccgtcgcgcggagccagccagggcggtcgccgccggccgcgaccatggccgacggcaagcgcagcgtcgcggagaccttctccagactccgggagcgcggcaagacggcattcatcccattcatcaccgccggtgaccctgatttggcgaccacatcaaaggcgcttaggatcctagactcctgcggctcaaacgtgatcgagctcggcgtgccctactcggatccgttagctgatggtccagtcattcaggctgcagcatcccgtgcgcttaagaaaggcactaagctcggttctgtcttggcgatgctcacggaggttataccagagctctcttgtccaatagttctcttcacatactacaacccgattctaaaaaatggggtgcgaaacttcatggctaagattaagcaagctggtgtacatggtcttgtcgtacctgatcttcctttggaggagacaacattgttgaggagcgaggccactatgcataacatagagctggtgctacttacaacaccaaccacaccaacagagaggatgaaggaaatcacaaaagcttcagaaggattcgtttatcttgtgagtgctgtcggagttacaggtgcacgctcaaatgtaaacttacgcgttgagcatcttcttaaggagatcaagcaggttacagacaaacctgtggctgttggctttggcatatcaactccagagcatgcgaagcagattgcgggctggggagcggatggtgtgattattggcagtgcgattgttagacagttgggcgaagccgcttctccggaagaaggactgagaagaatagaagagtacgccaagagcatcaaggcggctattccatgagatgggcagttccatcatgaacaagccaattagtagatcgtaagcatgtcgtttatcatctggtagtctgcttgatggacctggaatctgtagttcgtctggcatatttgattccagtgctcaaaacaattatatctttgtgtgttagaatcacaacatgaattaacaaggtaatctggaaatggtacgaagctcgatttctgttgtgaggaaacattgtgagatgtagtgttcttatgtggaaatatggaatgttagaatttggaaggacttgtcctgagaggagcaacaggataagtccatggtgcaaaaaaaaaaaaaaaaaagcttatcgata

SEQ ID NO: 4827 - DNA, 1691 bp, Triticum aestivum
  Clone ID: TRIAE-23APR03-CLUSTER391506_1
aggacgctttgcctcagtggctcattgctcagtcacgagaccattacctagaacatcctaatcgaaaaaattgccttcccgcaaaaataaggaaaattacaccttcccgccgccgccaacgaacgacgctttgcctcattgctcagttccctatgaccagcacgcccaccgttaccaagtcgccgccggcgctcatcccgccggcgggacctaccccctgcggcacccttccgttctcctccattgacaagaccgtcgccggctccggctttgtgaaccttatgcaggtctttcccccgccctcgatctccgccgcccgcaaggaccagggcgccgtcgcggccgtggccgcaatgcgcaacgggttcgcgagggcgcttgtgccgtactatccggtggccggccgcatcgcctcgagcggcctcgcggtggactgcaccggggagggcatctggtttgtggaagccgccgcgagctgcacgctcgccgacgtggacggcctcgacagctgcccactgctgatcccaggagagctcctcctccctcgccctccccccggcgagaagctcagcgacctcatcctcatagcccaggcgacgaggttcacctgcggtggtttcgccgtcgggatccgcttcagccacgcggtgttcgacgggcatggggctgcgcagttccttacggcggtgggggagctagcgcgggggctcaaggcgccgtcagtggctccggtgtgggaccgcgacgcgatcccagaagctccaagcccgctgccggggcagctcacggagttcaggctggtgacccaggtggtcgacatctcggcggagagcatcgcgcgcgtgaaggacgagttcaagcaggctgccgcgacatcgacgggggaagtgtgctccacctttgacgcggtgacggccgtggtgttcaagtgccgcgcgctggcgctggcatcggcgctcccggacgagaccgaggtccggatggccttcgccgccagcacgcggcaccttctccgcggtgtgctgccgacggtggagggctactacggcaactgcgtattcctggcgtgcgccactaggacaggcaaggccgtccgggaggccacgctggcggaggtggtcggcgcggtacgggaggcgaaggaggcggttcccgctcggttcgcgggctggatgcgcggcgtcgagcagtacgacgtgccgccgctggactacagcacagtgacgttgtcggactggagccgtctcggcttcgacgaggtggactacggcttcggtgcgcccgggtacgttttcccgctcaacgaccacgtcaacttcgtcgcggcgctcaactacgtcaggccgccggcgcccaggcgtgggggcatccgggtggtgctccgctgcgtcgaggagcctcatgcggctgcgttcgccgtcgagctcgccaagttcgcctagatgcaacgcacgcgtgcttcccatttcttggccatgtccgtccattaatgtgagaccgcgcagttcagggaacacattttcacattttttttctctcggcagccaacacgttgtatctccattgtatggtcgtataataagagtaatactttatcttttcctatcggggtaaaaaaaaaaaaaaaaaaaaaaaaaaaaaaaaaaaaaaaaaaaaaaaaaaaaaaaaaaaaagaaaaaaaaaaaaaaaaa

SEQ ID NO: 4828 - DNA, 1031 bp, Triticum aestivum
  Clone ID: TRIAE-23APR03-CLUSTER391_3
acacacccgatctctcactctctcgcgtgtactccgcgagtagcaaccaagggagaaaatggcgccggtgaaggtgttcgggccggccatgtcgaccaacgtggcccgggtgctggtgtgcctggaggaggtcggcgccgagtacgaggtcgtcgacatcgatttcaaggccatggagcacaagagccctgagcatctcgtcagaaacccgttcggccaaatccctgccttccaggatggggatctgcttctcttcgagtcacgcgcaattgcaaagtacgtgctccgcaagtacaagacgaacggagtcgacctgctgagggaaggcgacctgaaggaggcggcaatggtggacgtatggacggaggtggacgcgcacacctacaacccggccatctcgccgatcgtgtacgagtgcctcatcaacccgctcatgcgcggcctgccgaccaaccagacggtggtggacgagagcctggagaagctcaaaaaggtactggaggtctacgaggcacgcctctcccggcacgagtacctggccggggacttcgtcagcttcgcggacctcaaccacttcccctacaccttctacttcatggccacgccgcacgcggccctcttcgactcgtacccgcacgtcaaggcatggtgggagaggctcatggcgaggccggccgtcaagaagctcgccgcgcaaatggttcccaagaagccgtgatttgctaggcgggatttcgcatcgtgggatcagattgctgatctgtatgacgttttcttgttggtgtcgcgaataaggcaaatgagctcgtgtgtgtgtgtgtgtgcggctggaattgcaccagcgtgcagtttttgtgctttgcgtgtgtgtggtcctggaaactcttgagatatgttcaaaaaaaaaaattgagatggaacaatgtcttcgtaatgctttcagatttgttgcttgtcaagccttaaataagatgtttgtgtcattgtgtgtgtttctagtcgatgatgtttgcatggtttctaattcccgt

SEQ ID NO: 4829 - DNA, 1813 bp, Triticum aestivum
  Clone ID: TRIAE-23APR03-CLUSTER392577_1
atcaagtacacagttcactatcatctagcctttcttccctcattctctctcgacaaacaaagcaatggttctgtgcttgctggtcagttccccagccacgctacggtgctgcctcctgggcctggcgcttcgctggcaggtcaggcggctggtttactagacgtggcggcggcgacggcgcctccagccggcgcggcgtgcggagcgccgcggcgcgacgccgcgccgtcccgcccgccggtcgacctcggcgactacgggcggcagggcaaagaggcgtcgtccagggcgctgccgctgcggtgccaatgacgcacgcgccgcgacgtcgcgctcgtacccctgccacaggcgtccggggacgacggcaagacgtgcgtctcctggttcggccccgtcccccaaggtgaccatcgccgacccgcggcgtcacccgggaggtgatgtccaacaagttcggccacttcgagaagctccagttcccgacgctgaccaggctcctcgctggcggcgtcgcggtctatgagggtgagaagtgggtcaagcacaggaggatccttaacccggcgttccatatcgagaagctcaagttcatgatgccagcattctctgcatgctgtgaagagcttgtgagcagatggactcagtcccttggttctgacggttggtgtgaggtggatgtctgcccagagtttcaaaccctcaccggagatgtcatctcacgaaccgcgttcggcagcagctacctcgaaggtagacggattttcgagctgcaatctgtgcaagccgaccgcattgtggctgaagttaagaagatcttcattcctggttatatgtccttgcctaccaagaagaacagactgatgcgtcagactaataacgagattgaacccattctacgaggtctaattgaaaaaagaatgcaatccatgcaacaaggagaaagcaccaaggatgatttactcggcttaatgcttgagtcaaacatgaggggaacagatgacaagggtcaacccatcctaggaatgacaattgaagaagtgatagaggaatgcaaattgttctattttgcagggtccgagacaacatctgtattgctcacctggacaatgatcgtactggccatgcaccccgagtggcaagaccgtgcaagggaggaggtccttggcctatttgagaagaagaagcccgagtatgacggctttagcaaactcaaaaccgtgaccatgattctttacgaggttctccgtctttatccgccggccgttgcattcatgcgaaaaacatacaaggagatagagattgaaagcatcacctaccctgccggtgtgatcatcgagcttcctgtgctgcttatccaccatgacccagacatatggggaagcgatgtgcatgagttcaagccagaaaggtttgctgatgggatcgccaaggcatccaaggatcctggtgccttcctcccatttggttggggtccacggatctgcatcggtcagaattttgctctgcttgaggccaagatggctttgtgcatgatccttcaacatttcgaattcgaccttggcccgacgtattctcatatgctgcataaccagaaaatgttgcgccccatgcatggtgcacaaattaagctcagggcaatatgacggtcagtattatagcagtgtgcatgatgtcattttattacatagtgtttagtggttggccatgtaataagctttcatacctacaaatgtttgaaaaaaaaaaaaaaaagtgctcgtccgtcgacccttccaggggggggaccggtacccaatcgccttatagtgag

SEQ ID NO: 4830 - DNA, 1787 bp, Triticum aestivum
  Clone ID: TRIAE-23APR03-CLUSTER393780_1
tgggtgcggggggccccccccctcgggggggggccgggggaaaaaaaaaacccttttttttttttggttcgttgggctgttttttttttttttttggcaagtttcagactcagtaaaatatcaaataaattccggtaactaactagataaattacatggtgaaataagttggtcctgagagttgcagtaaaattatcctgatgcctttgttgagcttagggcttccttctctgcatctccagccttcttttcttctctcatacgagcccttgacaaaacgtcggtcatatctaagttcataggcatagcagcttgcagcagttgaatgaaagtttcaacatccttgagatcaccttcgtctccaagatacttgagtatcatctcaatcatcgcaggcctcgggatccagccgctcctcggagcgtaaacacaaagggcattttttgtcaactcataggctttcgcagcatcacctttctcagcatagccgattgccacgatggcccaactgctcgaaggaggcatctttcccttcttcaagaagtcatccagcagcgcttcggccttgtccagcatgtccttctgtcggtatccagtgatcaagacattcggaacatggaagtcgaatgtgttttcgctcgactcccactctttcaacaaggcctcagcttcttcaatttcatcaagtctcacaagcattgcaagcattgtagtgtagtccttattaatatgcctcttgcagtttgacatttggagtgcccacagcctcttcacctctgacttgtcccccagctggccgtagagggacatcaggtggttgtaggtatctgaatcttttatgtcaatttttgcttctgctttctttaaggcagagattgccttctcccttaggttgcccttaatgtagttgctcgccgcaacggcataggtattccaatcgactacaatttgaggctcacactccatatcttccagggtgttctccatcccgaaaaaatctgcccgtgtgccataagagtttatgcaaattctgtagctgaagttgtcaggcatgataccactccttttcatctctgctatcactgaagggaccttctcatgctgccctatgttagtatagaggcccatgaggttgttgtaggggagactgcagaacacaaaacccagctctttcatcttctgaaaatgagccaaggattcatcaaccatgagttctcgtgtgtagcagttcaggagtgcaccgtagggtttctccgtcttatctttatcaggcagttgattgaaataggcttctgctgctccgattccacgaacttgaccgatcaaatccaggtgaacagcatgatcctttggcaaaaatctgacatgacccttagcactcatccattcggagacctcgagggcctggcggtggcggcggcgcttgcggagctctttgacgatgcgctcgagctccacggggcggaggcggttgcggggcttctccgcccagcgctcgatctccggcaccagaagcgtgtccgggtggcccagcggccacagcgtggactgcaggcccgggggtcgccgcggcggcctctcggcgctgttggagggaggagaggatgcggcgcgcacagggaggagcagaggagtgggattgtggggacggactcggccttggagaagcctgccgcgccccaagtggagaaggcggcgcccggcggcgaagagggaagaggaggccatggcttggggttttttctttccctttggctacttgggtttaaggaaagtttgtttgcttt

SEQ ID NO: 4831 - DNA, 1666 bp, Triticum aestivum
  Clone ID: TRIAE-23APR03-CLUSTER39466_1
aatcccaaatccgatcccaatcccggccccagccccaactagatgcaccaccaccacctccccgtcgccgccgccgccgcgccggacgcggccgcggggccggagccgccgccatccgatcccaaccacccgcgctccctcctcgcacccttgtccaccgtcgcagcatttacctgagcgctggttctgatgctgtgcctctcccttgccagcaccccgttcccgctccccttccacctcccgctccgccggcctcgccgatccccgatcctctggtccatcggctcctctccatccgcgtccgcgtcagcccccaccaccggccatttcgtccaggtgtacagcaacggcgatgtctacgagggccagttcaaccgtgggcgctgcaccggcaggggcgtctactactactacatgagcggcaggtacgagggggactggatcgacggcatgtacggcggcttcgccgtccagacctgggccaggcggtgccgatgtacaccctcggttgtcagagaccaatttctcccccgctttaagcatgtatactagaatggtgatgtacgatctgggggatggtccctggggcagttggagggatacggtgtgcacacctgcgaggatggcagccggtacatcggggagttcaagagaggtgtcaaacacgggctaggccactaccatttcaggaatggtgacacgtatgctggggagtacttcgctgatagaatgcacggtttcggagtctacagctttgccaatgggcatagatacgagggtgcatggcatgagggcagaaggcagggcttaggcatgtatacattcaggaatggagagacacaagcaggccactggcaaaatggagttcttgacaccttaagcacccaaaatattgtcccagggtcagcaattgccgtgaaccattccaaggtcctcaatgcagtgcaggaggcaagaagagctacagagaaggcctacgatgttccaagagtagatgataaggttaacagggcggttgccgcagctaataaagcagccaatgcagctagagtggctgctgtgaaggctgcacaaaaacgcattccaaataataacgatgatctaccgttgtcaatagtgtgaggatttagccaacataaggttggcacgaagctgctccgcgatgccatcacaatacaaatcgtctggcagaagctttgatttcctcgataggggtgttgttgctctgccaccggtccatgacgacacctgagcgacgcccattgcatcagagcttcggaagcagagttttctgccatccctccaatacatctttgcggtgtcttttgcgatgcagcagaacttctgcgccgagagctttccgttgtcgaaggcaatggattgtggtcaggtagctttccctctgcttttcttcagtgtaatatccatcctacgttagagatgcgatgatgatgtacaccctcggttgtcagagacaaatttctcccctgctttaagcatgtatagaagtatagaaccctacgtttttcgtggtgccggctgttgaggttggagttgcgcccgctgttgtctgtatctctgtagcagaaacgcataaagatatcatgcacgaccatgattcatctgggcctaagtgccggaaatgtggccacgtaaaaaaaaaaaa

SEQ ID NO: 4832 - DNA, 1518 bp, Triticum aestivum
  Clone ID: TRIAE-23APR03-CLUSTER3950_1
atcgagcagcggcggcggttttactcagagcccaacccacggacgcgagctgctcgagcacgcgaaaactaaccacccgcggcaacggaaccggccagagcaaccaaacccgcgccccacagcaaacaagccacccccgccaccccgccccactgcagacggctcctcgcgccagaccttacctctccccgcccccaccacccgccagccttcttgctgatccccgccgtcgggccgcgcctgaggcccgtcgggtctcgccggtgctttggtctctcgcgccgccgcgccctggacggggggaggggggggcggaggatgttgcccttgcggggcgatctcggatatggcggcgggagccggaggtgcgcgagtgcgggtccttcggcggacgtctcgaccaaggagaccaaggccctggagatggcgcggctgctatcgggagctacaattgtggcatcggagttgtgaaccataacctctcgcctgaagattacatctacatccctgttaatgaacagcaacttatggtgaatgaggtgacaagtacagctcctactgcagatttggaacaacctactgaggccaacgcaagccccactagcgtttatgccagcaaggctccatgatgtcatgacaactgtgatcggcaaggggttcagcaattcgacaagatgctgtgaacaaagctaaatcatttgacgagaggcatcagttgagggctaatgcgtcagctaggatcagttccttcgataggcgtgttggcctttcagagaagttaaatactgggatatcggccgtaaatgaaaaggtgaaaactgtggaccaaaggttacatgtttctgacaaaacaatggctgctttgctggttgcagagcgcaagctaaacaatacaggctctgctgtgaaaaccaacaggtatgtgtctgctggaacaagctggctaaatggtgcgttcagcaaggttgccaaggctggtcatgttgctggctcaagaacaagagaaaagttccagatagctgtgtcaaatatatcagccaaagggcctgctgtcgttgcttgagctttgttctgggactgggagctcttcttcctggggaaaatctgttggaaatcttgagcaagcaccttccattggttgtgtcatcaagctgtggcttgtaactgtgtatttctctattgattttttcttcttcttcgaggagaactttttcagggagtcttgtcagatttggtacataggggatctaaattttctttagaattttagaaccactattctttttagtgcttgtgttcaattgattataggtggtagtgacactttgcaccatgttcctggctcggtgtggtttcatgattgccattgatgtcaaatgtgtcgtgcctctactttctgcagaaattgttactcaaattgagtaatttggaacgtatgaaactgcaatgcttctttgtgtaaaaaaaaaaaaaaaaacatcacattcatcttatgcagttagtatgcatttaagtttc

SEQ ID NO: 4833 - DNA, 1495 bp, Triticum aestivum
  unsure (1)..(1495): unsure at all n locations
  Clone ID: TRIAE-23APR03-CLUSTER395_217
accgagccacccgccccgccccgcgcccgacccgaaaccccagccgatcggcggcggccggccggcggagatgtcgctgacggaggtcaggatcggcgaggagccctccagcaggggcggctccacggcggtcatatggggcgcgtcgccgcagatgaggtgcgagcggaagaaggaccgcgtcgaggtcaaccccgagctgctcgccgccgcgtcggcgcaggccgaggtaatgacgaccaccatcgggaagacgacccgggtgatcggctggtaccactcgcacccgcatatcactgtcctgccttcccacgtagatgtgcgtacccaggctatgtttcagttgctagatccaggctttgttgggctgatattttcctgttttagtgaagatgctcaaaaggttgggaaaatccaagtgattgccttccagtcacttgatgggacacagaacacacagcgtgctattgttcctgttattaccaatccagtcattaaccctgaaccatcttggggttcatccgataactcattagcattgattgagggcattgaacaggacactggagattctagagcttcaaacggaagcaaggtctggggaaggtctcaggatatggatctgtattctcctttggacacaaatcattcggcaagactaccaatagaaaacgctattgttcctttcgaacctgataacagtgctggaccctctgttgatcaagatggttcagatctgtccccaagcatacaggaggctttgcaccggtcaaccatggacataagtggtgcagagtataaaaggaaggaggtgccacttaaagtattccctacaaggcatctgctaaagctggacactacgttgagttcttactgtgatatgcaacgtgtcctgtttgaagaggaacaatcagcatataaccaagctatgcttcagaatatttgtgatgggaagatgcacccacttacatctatgcaccacacctccacatacaatgcttctctatgcaaactgatggagtactgcttgaccccagctataactgtgcttcaaggaccgttttgaaagaaaacgaacttccggttgggctatgctagtggaggagcataaacaactggaggccgagcagagcacgaaaactggtctcctcaccgtccgatgcccggagggactaccaatgggcatcacttcgccaaaggggccaaggacaattaccttcaagcaagacaagggggcctataaccctaacacaacaccngaggaagtccctgactcngccttgctccccattcttcatgggggatatccgattcttggcctgcctgatcttctggaacgcaaactgtcctcancgtangggtgaatccaatcaaattcataccatctccttcaacgctgcccgctgtcctcgtggaataacatcanatggtcctttgcttgtgttgcctccaaanctttgccgttcccaacttnaatttncccnggcnaaatttc

SEQ ID NO: 4834 - DNA, 1611 bp, Triticum aestivum
  Clone ID: TRIAE-23APR03-CLUSTER395_237
gtgattagcagttcccctattcctcccatccccctattcctcccatccccatcctccctgatgatccccccgctccactagtcgtatctccctctcctcgcctccgctctcctcccctctctccggtcctcggccggcggyccctcaaaccctagccccgagcgcgagcgcggcggagatggagcagcacgtgctggtggcgctcgccctctccttcgtcggcggcctcagcacctccctcggtgcgctgcttgtgatcgtcaacccttcccctgaccttaagaggctcggcctcctccagggttttgctgctggacttatgttgagcatctcgtttctagacttggcacacaacgcactcaactccattggcttcttgaaggccaatctatggttttttgcaggagttcttttctttgggttcgttgtcaagtttattccagagccaacctttgtgccaacaactgatgcaagcaagaaaaagactgatgatgacgggtcgggcaaagatatgatgaaaaaacatcgccggcaagtcttattcagtggcatcattacctgctgttggaattagcttgcacaattttcctgagggaatggcggtatttcttggatccgtgaagggtcttcgcgtgggagttaacttggctttcgctattgctttacataacatacctgagggggttgctgtagctctgccactctattttgctaccaaaagtgtttccttctttcttgcatataaaagcaaatggcaagcatttaaatatgcaacactctctggtttggctgagccactaggaagtattttttgtagctgtcttgtttccgagcaacttaaatcctgaaattcttgaaggcctacttgcatcagttggtggtgttatggctttcctcactttgcatgagttgttacctctagcatttgactatgctggccagaagcaagctgtcaaagcagtctttgttggcatggccgtcatgtctgcgagcttgtatttcctggagatcagcctayykaaggagatcagcttgwracatawgactgcaccamtgcaactataccagctgttcatagtgtyttatgaagcccgagaactttgccacacgtcaacctttctttgtgctctraaggcaaggaccaagaaacaagatgggattgcgtttgccatgtgtagcatacactattactcctcgtcattgtgtytgaccgttgtttactactccctccgttmgaaattacttgtcttgaaaatggatgtatctagaaytaaaatmcatctagatacatccattttcgcgacaagtaattccgaacggagggagtaggaaatacagcagtgtggcgacccatatgcggtggctggacatccctcattttgttgtttaagagaatcatatggggtgacagacacaaccgctgggtttgctgtccagtaagaagatgcaactagaactgatttgtggcattccgattcgacacttttaaatacctgctcacaatcatggctccagactgcagttggtcctgttaaccctttccattctgttgaaagtttatacatcatcaatttcttttctcttgccaaaaaacccacgcgtccgcggacg

SEQ ID NO: 4835 - DNA, 1175 bp, Triticum aestivum
  unsure (1)..(1175): unsure at all n locations
  Clone ID: TRIAE-23APR03-CLUSTER395_254
ccaaactcaaatccaaatccccgaacccaccggcgatggcgcgcggcgggccgctccgagaagagcggcggcgggtgcgggcggtgctgcctggggttcctgctcaagctcctcgccttcctgcaggccttcgccgccctctccgccgtcctctacgccgcctccatcctctcccggtgggcgcgccaccatgagctccacatccaccacctcctcccagacctatggttcgcgtgcgccgtcatggccgccggcctcctctactgcgccatcctcctcgcgggctacgtcgccgccgaggtcagcagcgggtgctgcctctgcttctacaccggcttggcaatggtgatgatgctgctcgaggccgccgtggccggacgcatcctcctcaacgagcactggatccaggatctgccgcatgaccgcaccggagagcttgagaacctcgtctcctttgtcaatgccaacctcgacctctgcaaatgggctgctctcgctaccgttgccactcaggcactctcgcttttcttggcgatggttctacgagccatggtttcacccacgagtggtgactatgacagtgatgaagattttgtggtcataaggaggccgctgcttattgcccgaggagctccatcctatctccctaccaccgccgaccccaggggtggtcatccgaacttatggagctcatcaatgaggcagaagtatggactgaactcctcgggggactacacctacaacacactgggtcaaaatgcagtgccaccgcagtgagaagcttatgtgcgacaggtgatgaaggaagagcatgcatggctttgttggaagcacctgtgcagcatatttgtagtatctggttatattccatggtgtaatgcgcactatataatttgtgcatccagccaatctcgaactcattgtacatagttccatcattagtgaagatcatgtatgtgtgaccctggctggctagttggaaaggacttgttgtcaacatttcgttggatgtttgttaagctagctggtgatagcagtttatgatgtgaaaaaagatcttgtaaagtaatgttactagcacagtttcacttgtgtggtgagatagtattgatatgccgccaagtattacatgctatgtatctgttcttaaacctccncncttgggtgcagcggca

SEQ ID NO: 4836 - DNA, 1139 bp, Triticum aestivum
  Clone ID: TRIAE-23APR03-CLUSTER395_255
aaaccaaccaaccaaccaaaagcagatctgatctacataagagagagaagcaaggtctccctctccctctcccacccacacaagcaggagatgagcaagctcttccactccgcctgcaaggccgccaggtccttgatcgcatcctcctccgctccggccccgcgcgccgcctcctccctcctcgcagacgggaggaacgccgcgctcgccaccctcgccaacctcggcaggaactccaccctccccgccgcatacgcccaccacctccacaccaacgcctcctcccacggctacgcatggatcgccgccatccccgccgcagcctacatgctccaggatcaggacgtgcatgccgccgagatggagcgcaccttcatcgccatcaagcccgacggcgtccagagaggcctcatttctgagatagtgtcccgattcgagagaaaaggatacaagcttgttgccatcaagctggtggttccatccaagcagtttgccgagaagcactaccatgatctcaaggaaagacctttcttcagtggactgtgcgacttcctcagctccggtcccgtgcttgccatggtatgggaaggagagggcgttatcaagtacgggaggaagctgatcggtgccacggacccatcgaaatctgagccaggaaccatcaggggtgaccttgctgttgttgttggaagaaacatcatccatgggagcgatggcccggagacagccaaggacgagatcgcactctggttccagcccaaggagctggtctcttacaccagcaacgaggagaagtggatctacggtgtgaactaaccgctgcatcgtcttcagaagagccaaagaagctccagtccctttccgtaatcgcgtctagaccatggcagagtgcaataacaccgcgacccgggcgacctttcagtcggtgtcgcccttgcccttgtctcgttctgatgcaatagggcccgaagaaatttaaagagcttgtacctttgaatattatagagcgtgcaccgagcaatcgtgatgttcaaatcaaaccgtcgccttcaggcacttgattttgatggatgctgtttgttttcatgtgttgtccaaattcaggcctatattctctgcaaaaaaaaaaaaaaaaaaaa

SEQ ID NO: 4837 - DNA, 1016 bp, Triticum aestivum
  Clone ID: TRIAE-23APR03-CLUSTER395_261
accaaaactagggctttgcacagggtttagcggcgatctctccccctcttcctctcgtcgacgcgcatccatggcggccgccacctcctcctccctcctcggccgccgcttcctcctctcccgccgcttcgtctcttctcctttccgccccttgtcctccaccgcgcccccgtcctcacactcggccgcggtatccgatgccgagccggaccctgagccacccgccgatcagggtaatcagtaccggagccagccgaggcctcccaacacgacccgcaccctcgagaatggcctcgaccacggcatctacaaggctataatggtgggaaaggtgggtcaagagcctatgcagaagcggctgcggagtgggaagaccgtcgtgttgttatcgctgggcaccggcggcatccgcaacaaccgccgcccgttggacaacgaggagccgcatcagtacgcggaacgcagctccgtgcagtggcaccgcgtatgcatctacccggacaggcttgggtagcctcgcgctgaagcatgtcaagaccggatctcttctctatttggaaggaaatattgagacaaaggtgttctccgatcctataactgggctcgttagacgcataagagaaatagctgttcgaggaaatggtcggcttctgtttcttggtaacgatggcaatggccccaagataggtgaagtgaagggcgttgggtacttctgaaagtgaggtccaacaaaatccatctgagaactgagactgaggtactgcacgtgtgctacactttggagtattgtcaacatcttagcattggacaaataatggtatgttgttgccgcagtttgttagtttccccttgcctagtcacattcctgtcttcattaagctttcgacgccattgtagatgccatgtaattgacaagtgtccgacttgtacgctttaactctggttggagtacaatgcatgctcttatggagagaatttaatctcactatgtactttttacaaaaaaaaaaaaaaaa

SEQ ID NO: 4838 - DNA, 988 bp, Triticum aestivum
  Clone ID: TRIAE-23APR03-CLUSTER395_266
ccacgcgtccgcgaggagccactccacacaggcaagcaagggtagtgagactcagaggttcaggcatggcagctccaagagcactcgccctcgccgtcctgctggcgatcgctgtcaccaacgccgaggccgcttccgtggtcgtcggcctggccaagtgcgccgactgcaccaggaggaacatcaaggccgaggaagctttcaagggtcttcaggtggcgatcaagtgcaagaacgtccacggcgactacgagagcaaggcagtgggtaccctcgaccgcaccggcgctttcagcgtgcccctggccgccgacctccacggcgccgactgcgtcgcgcagctccacagcgccgcctccagcgccccgtgccctggccaggagccgtctaagatcgtgccggtgtcggagggcaccaccttcggcgtcgtcgccggcgacaacattaccacaccttctgcagcagcgtcgccggagtgcgcgtccatgaccctgtgcgggccgatcaagaagcacatcatcgagcacttccatcacaagaagcccgtgccgcccaagccggagcccaagccccagccccaccctgactacggccccgtgcccaagcccgagcccaagccgcagccccacccggactaccaccccgtccctcccacgcccacctacggcggcggcggtggataccacggacaccactgagtccgatctaccaccgtcctgcccagcgctgaaatctcatcaccgggttcatgggcatgaactcatgatcggcgttgctatttatgatcggtttgcatgtgtgggtatcgttaggtcttctgccattcgctgcagagttgagagttcagaataacagatgtatgtgtgtcactgtgtcaaccgagtgtgaaggtgtgttgctttatcaagattttgtaatttcggtgcgtttaccgaagttattatgaatcaagtaatgtatttaaacaagtcgatttgtcaacccaagt

SEQ ID NO: 4839 - DNA, 1407 bp, Triticum aestivum
  Clone ID: TRIAE-23APR03-CLUSTER395_299
aaaggaaagcacagcgttggtcaccgcgaatccccaccgtctcgcagttggacgccccgtaccgcatccccccgattcctctcctcttcctcgccgaggccaaaacccaactccccgatctagccaactacccagatctcggaaccctcgccgtcgccgcggccatggcgaaggagccccccttctcccttcccccggtggtcctcaacccctccacaccggcccaccgccgccaccctacccctgggcccggcgcctccccgccacccgccttcgcgcctccccgcccctccacctcctccgccgccaaccccctgcccttcatgtccttcgacatacccgctcagtccaactccacgccgcccatcttcaccgggcccatcggcggctccagcgcctccttcgaagacgagccgccgctcctcgaggagctcggcatcaacacgcgtcagatctggcggaagacgctctccatcctccacccgctccgctccgccgacccgtccctccacgccgacgccgatctctccggccccttcctgttcctcctatccttcggcctcttccagctcctggctgggaagttccacttcgggatcgtcctcgggtgggtcaccgtcgcctccctcttcctctacttcgtcttttccatgctctcgggcggacgccgtggcgaccttgacctctacaggtgcgtcagcctggtcggatactgcatgctccccatggtcatcttctctgccgtttccctcttcctgccacggggcggtgggctcatcttcgggatgggcatgggattcgtgctgtggtctaccagggtctgcaccaggttactagcagagcttgcttccagcggcgatgagcataggggactcattgcctacgcgtgctggctcgtctacatgctcttctctctgctcgtcatcttttgatgctgttcttgagatggaagatcacactcagtattcttttgccctgtggagcgttgaactgcttttgatcagcgactggagtggtttattgatgctacagaactatcgatgatctagtcagtttggaaaatattctgtaacagtctactgcttttcatcctttagtttctgtggcatggtagggggctggtatagatcttggtaaagaaatgtaaggcaagatcaggacagtgaaaatattataactaattagcttttgccgaagtttgatgggattagctagcaattttcgaaagagtacacgtgtggtccgtttgaacttgttcatcgtgcttgcttaccacgcccgtggtgcctaatttcctttatgtgttacctttttttttctgcatttcagtttgataatagaattgtcctatcgttagagacgctggcaactactgattcataaattggatgtggtttttagtagtcc

SEQ ID NO: 4840 - DNA, 1386 bp, Triticum aestivum
  Clone ID: TRIAE-23APR03-CLUSTER395_315
acactgtcatcaccaaacaccaacacaaacacagacacaaaccaaaagcattccttccctctcgccctccctcctccatctccgtttcgtctcgcagtctcaagatcagtgccgctcccaagagttaagaagagagagagagagagagagagagagagaggaaggagatggggatgcaatcagtgtgcggaggagcagggcggtggcggcgagcagtggcgtggtggggggccgtcctggtcctcgcccatttactcagctgcggcagcgcggggctcctggacaccaacccgggcttggcctataacttctacgcgacgacgtgccccagcgccgaggccaccgtccggagcatcacctgggcgcaggtcgccgccaaccaggccctccccggccagctcctcaggctgcacttccacgactgcttcgtcaagggctgcgacgcgtccatcctgctggacaacgcgcagagcgagaagacggcgccgcccaacggctccctcggcggttacccggtgatcgacgctatcaaggcgcagctcgagaaggcctgcccgggcgtcgtctcctgcgccgacatcgtcgcgctcgccgcccgcgacgccgtctcctaccagttcaaggcttcgctctggcaggtggagaccggccgccgggacggccccgtctcgctcgccagcaacaccggcgcgctgccctcgccctctgccggcttcaacggcctgctgcagagcttcgccgccaaggggctcgacgtcaacgacctcgtcgcgctctccggcgcgcacaccatcggcaaggccagctgctccagcgtcacgcccaggctgtaccaaggcaacgccaccagcatcgaccccctgctcgactccacctacgccaagacgctcatgaacgcctgcccgaacactccagcttcgacgtccacggtggacctggacggcgccacgccgttcaagttcgacggcaactactacaccaacctgcagaacaagcggggagtgctcgcctccgacgccgcgctcacgcagaacgccgccgccgcgacgattgtcaacgacctgaccaacccgatcaagttctatgccgccttctccatgtccatgaagaagatgggccgcgtcgacgtgctcaccctcaagaacggacaagggaagatcaggaccaagtgcaatgtgccgtgagggttcatccaggagcgccacacattttcttggatttttttactctctccctctccctcttatttcatcggcgcgggtcaaatatattgtgcccgccatgattaagctcccagatctatattgatttgttaagtgctgtgcctgagtatgtaagattatagtcacgacaggcgtgcattcctctgcaatcaatcaaagaagg

SEQ ID NO: 4841 - DNA, 951 bp, Triticum aestivum
  Clone ID: TRIAE-23APR03-CLUSTER395_316
attcatccatcagccacttcacacaggctgcgactcagaggttcaggcatggcagctccaagagcactcgtcctcggcttcctgctggtgatcgccatcgccaacgccgaggcggcgtccatcgtcgtcggcctggccaagtgcgccgactgcaccaggaagaacatcaaggcagaggaagcctttaagggtcttcaggtggcgatcaagtgcaagaacgtcaacggcgagtacgagagcaaggcagtaggtacccttgacggcaccggcgctttcagcgtgcccgtggccgccgacctccacagcgccgactgcgtcgcgcagctccacagcgccgcctccaacgcaccgtgctccggccaggagccatcaaagatcgtgccggtgtctgagggcaccaccttcggggtcgttgccggcgccaagacgaacgtgctggcatcgccagagtgtgcgtcggcgaccctgtgcgggccgatcaagaagcacatcatcgagcacttccatcacaagaagcccgtgccgcccaagccggagcccaagccccagccccacccggactacggccccgtgcccaagcccgagcccaagccgcagccccacccggactaccaccccgtccctcccacgcccacctacggcggcggcagcggcggcggtggataccatggacaccactgactccgatctgccaccgtccggcctagcagtgaaatttcatggcttgttgctgtcagtgagtgagcgacgttgctatttatgtcacgggttagcttgatcttctatcattcagaataacagttgtgagggataagtatgtgtgtcaggcaaatgtacgggtaatgggtcagtttttttttacaaggtttgtaatatcggtgtgaatttttgtaatgagaagttcctatatcagtatatcatgatcaatcaagtaaaaaaaaaaaaaaaaaa

SEQ ID NO: 4842 - DNA, 2227 bp, Triticum aestivum
  Clone ID: TRIAE-23APR03-CLUSTER395_322
atatatttcagcttaggaatgcagtgtataaatcagactagatagataacactaccgaagatagaatctgtcatgcatacaaaatacagatgtgcattcgacaatatttgcacctatgcattatagttgctataaaaaagacacctgtaaacctatcttcgttgtaaattactgtgatgtaagatgccgccaaaaaatgcagctccatgtggtaattaagatctttgttgacactatacataggtcagagaaaacactaacattcaagcaaaaaaacatacagaaatgtccgaaggggcaggagcggtgcattcctgccaagagatctagctgaccatgtcaatttcaaggttttcttttccacattttgagccaatcatatgatttgtatgttgtttgcaacatgtatataaagagtctgttcgagtcctctgtcaagccattactagcatcgactatacatgcgagaaccatgaccgcccaaaaccgtgcagcggtgcgtccactctcaacaccagccccgagctcgtcgcgccgccattcagcttcgatctcccaagctgcacacacgaacaaaaaaggcaaactaattacgatctactccctccgttcggaattatttgtatcgaaaatggatgtatctagaattaaaatacgtctagatacatccatttatgcgacaagtaattccgaacgaaggaagtactacttttaatcatagtactgcatatttacaagtgctcccatacagccaacatacaacatttctcattcctactgtacttcaatctacaactacgtacgtaactgatctccgaggtttgaaggtttcaaatcttcacatgacgccacaaagttcacctatggattgttacacaaaaactgctgacacaatcacataagctagagcacacctatggaggaactgtctgattgaggaatgtcaggtattttctccctggttgattggcgtctgagctttgcgcggttcttctgcagttccatgttggacactctctcagcctcgagcgctctctcaagctttgctgctcgagtgctccattcaccaaggatagctcttagtctctcgttttcttcgacgtattgattgtttttcccacggatgagctggatctctgagtccttctcagcaatcaaaccacgagcaacacgaagctccgaatgcacttgattcatctcagcagacagtgcacgaagttcttgatcacgagatgccaaaagatgagtaagatcaacctgaggagtgctggcagcaacacttctatggtacttacttaagctttcttgcaacctaagcacctcttcactcagataatgaatattctccctctggtactggagcaatgccatttgttggtcagacagacgagaatcatagtaccttatctcttccagcgaactagatggttgcagtgcagaataaagtggccgtagaatgtcaggctgctcattcaaagagttgtatttatggatgtgccctatgtataagctcatgaaacatccggcggatatcacttcaacaactagtgcaatcctgagcaaaactgaaattgataatacctctactcgaggctgccaaactagaattaagagcaatagggcagtaccgcaagcaatagcggcaaatggaactcgagcaatgcgcttcaatttttggcttaaatcatagtagccctgtagtcgcacttttgtgacctgatggacccaatattgttggaatatacctgtaataattagaagcagaccattgcagctacatagcaacggaaggatcatttctggtataagaacaaatatccatggagctgctatgacaataccagcataacctgccaataagatacagtacagagtgccgccaactatgcttcgaggctgccgccgaccagatagaggggcttcatgtactacgtcaacaaatagcgcttcccctgcagcgtcgtgtgcagccgcggacgacgccgccgcgccgcgccgctcgtgcgccatctcctccgccgcctgcgcccgccgacgccgcggctggagccgtcagcgtggcgccccctcccagcactccggagtcggatcgggtagacgatcggccgacgagcagccgcctagaccacgctagactagtgcggactctagtgggggtagcggcgcagcggcgccgaggaagacaacccaaaacggcgagaggcgtggtggccctctccaccgcgga

SEQ ID NO: 4843 - DNA, 1373 bp, Triticum aestivum
  Clone ID: TRIAE-23APR03-CLUSTER395_324
atctatttccatccgcatttgcatcgctcgccttccgcattgcagcctctcaaaacagccaaaccgaaccccgaaagctcgccaagaaacgcagaaacgagcgaagcaaaccaagcagcagcagcagcagcagaggaagaaggagaagcgaggagctgagccggctagcaatggcggcggacctgggcttcgaggcgaccgagctccggctcggcctgcccggcggcggcggcgagggggaggccaggagctcctccggcaagaggggcttcgccgagaccatcgacctgaagctgaagctggagccggccggcgaggaggcgccggccgaggaggatcgggccgacgtggccgtggtcgcggccgcggcggcggagaaccaggaggagacggcgacggacgccggcgcggggaagatgaagaggtcgccgagccagagcagcgtcgtcacctccgccgcgctgcccgaccccgccgagaagccccgcgcgcccaaggcgcaggtggtggggtggcctccggtccggtcgttccggaagaacatcctggcggagaagtcgtcgccggcggcggcagctgcgttcgtcaaggtgagcatggacggcgcgccctacctgcgcaaggtggacctcaacatgtacaagacctaccaggacctctccaaggccctcgagaagatgttcagctccttcaccatcggaaactgtggaactccagggatgaacggcatgaacgagagcaagctgatggatctgctcaatggatccgagtatgttccgacgtacgaggacaaggacggcgactggatgctcgttggcgacgtcccgtgggagatgttcgtcgagtcgtgcaagcgccttcggataatgaagggatcagaagctattggccttgcaccaagggcaatggagaaatgcaagaacaggagctgaggagaggatgcactaaatgttatgcaagaatcaaaatacctataaccttgcttgctcatccctgtatcatattctctgtcctaagtctaagtctgtatctcctgatcagtgaagtcattttggtttgtgatcttctcttttccagtcagtcagtcccaagtctcatcttgttatatacataagaaagaagaagccaagaacatgtgagatgtatctgtacctgtctgccacataattgtgtcttctcttttttgctctgcttgttcttccttttttttccctctcttcttatgtctcttcttggcacaaaatgcaaaggcgccctatttttcctcttgcggtttgtccatcaaaagttgtttaattatcagcatggtgtatcaacaaaacaaatatttattgcaaggtgttaaatgttaattgtattgtgttaaaaaaaaa

SEQ ID NO: 4844 - DNA, 2412 bp, Triticum aestivum
  Clone ID: TRIAE-23APR03-CLUSTER395_331
gacacccaatcggcctcgagcctcaaggggaaggaagctaggctaccaccttccccttctccgctagctatcactcactccagcgctccgctccgatggccgcagcctccttcctccccctccacctcccggcctcccccaggccggccaccgtggccgcgagggcagcctcgggcgtcgcgtcgacggtgcccgccgccacgcagacgtcgcagctggaggagacgttcggccggaagggcctccggttcgggacggacgccacgggcgcgcccacggcggagctgagcgtgcgcaacggcagctcgctgcagctgcggctcaacgacgggctggtcacgtcgtaccggcccaaggtgtcctgggagggcggggacggctgccgggagctgctccacaccgtggccgccgccggcgcggtcaagggcggcgtcgggctggtgctcaacgaggcctcctcgtcgtcatcgctgctcggcgcgtcggagtggtcggtggcggacgtggactcggactcgtacgacgcggtgcaggtggagctcgggtgcggcgtcggcggggccaagctggaggtgtcgtacgtggtgacgctgtacccgctgagcatggcgacggcggtgatcgtcaagaacaacggggccaagccggtggagctgacgggcgccgtgctgagccacatcaagttcgacaagcggcggggcacggccgtggagggcctccgggggtgcccctactgctcccacccgccgccggcggccgggttcgcgctgctcacccccgccgaggccatgaagcgggaggagtccgggtggttcggcggcggcggcggggaggagccccggcagggcgcctggaccgtggaggagaacctctacaccatcctcaagaagaaggtgagcagggtgtacgcggcgccgccggaggagaggaagaagcgcatctacagcaccgcgccctccaagttcaccaccatcgaccagtctagcgggctggggttcaggctggtgaggatggggttcgaggacctgtacctgagcagcccgggaggactgtacgagaagttcggcaacgactacttcctctgcaccgggccggcgtccatcctcgtgcccgtcgtcgtcggccccggcgaggagtggaggggggcacaggtcatcgagcacgacaacttgtaactgcttttttcttgcgtgccaacagagttacacaagaaatcatgtacattctcacatggggatgaatcttgtaactacccattgcgatcaatatgtacacatgggtagtagtacaagtataacatacaaatgaattttcaaacgaaattacatgggcgtgtgtgaagaagacttgaaaacctcaaacgaacgagcataaaaatggacacactctctcatagaattcatcgcatcagctcagcataatccactccagacacaagcatctggtgcaaaggaaagaacccaagtgctggtgacaagataatcaaataagcgcgcatttgccgccacctatttctgccaggaaacgtttactcgagtaaacccgcatccttaagagcagtctcaaaattgtcctcgcttttccagttggggacctcaggcactttgtgctggaagtagtcctcgatctttgtcatcacagcttcatcagtttgaccacatagcaggttgaacacagctccttttcggccaaagcgcccagctctgccaattctgtgcaggtacacctcataatcaggctcatctctcgtattatacttgattggcatgtcgtagttgatgaccaggttaacctgtgcttggtcaaacccacgagcaagaacatcagttgatataagaaccttggtgtacccatctttgaattcctgaattactttttccctctctgcttggtcaagggatccttgaattgaggagcacacatagtcctcttttgtcaaagcattatgtacattcttagtactatttcttgttctcacaaagatgataacctgtccaaccttttgcccaaactcaaagatcttgtcccttataaccttctattttggccgcctcatcagggactcggactttatattgctttactttttccaaagtaagatcttccttcttcacaaatatttggtttccgtccttaatggcctttgtaacaaactccttcactttctcattgaaggtcgcagagaagagaagcacctggcatccgcgagcaatattttgtatatcattcataatcatccatttcaatgacgagtatttccgaacggagggagtattaatgaattcaggttctaccctcgtgatctgaagtctctgtggagacattgtagtatagtactctgtttacatttttctcgtaatgagtgtgtttaccttgtgatgtttcaaactgattatttcccggacgcgtggg

SEQ ID NO: 4845 - DNA, 1179 bp, Triticum aestivum
  Clone ID: TRIAE-23APR03-CLUSTER395_332
tctctctcttccaccaccaccatctcctaatcacaagccatcttgcatacacggagagagaaagagaggacgagagatcagcagctgctcgagtagctcgcgtggaggtgtccaaggtgggagacccaagcacggggctagctagccgaccagctgctgctccaccggagccgatggctggcgccgacgtcgacgtcgggacggagctcaggctccgggctgcccgggggcggcgccgaggcggccaaggccgggaagaggggctatgaggacaccattgacttgaagctcacgctgcccaccggcggcggcatgcaggaagactccgccggcaagccggagccggcagccgacaaggccaagaggcccgcggaggccgcggccgccgaccccgagaagccacctgctcccaaggcacaggctgtgggttggccaccagtccggtcgtaccgcaggaacgccatgaccgtccagtcagtcaagatcaagaaggaggaggagaccgagaagcagcagcctgctgctggcgccgctgctggcgccaacggctccaactttgtcaaggtgagcatggacggcgcgccctacctgcgcaaggtggatctcaagatgtacaacacctacaaggacctctccattgctctgcagaagatgttcagcaccttcaccgcaactgggaatgaggggaagatggttgaggcagtgaacggttcagatgttgttactacttacgaagacaaggatggagactggatgcttgttggagacgtcccatgggagatgtttgctgcttcatgcaaacgcttgaggatcatgaaggggtccgaagccatcggtcttgcaccaagggccaaggacaagtacaagaacaagagctaaacatggggcagtaagaggaagactatgatgccataaggatggtgttcttgcagtgtgctatggtttcttagatatataatgttttcaattattagctggattaaaagaagggagagttgccatgtttaatttgttggtggaccagaagcaataatctatctgtgtgtagctggattggtgttatgtgatgttccctaccatgtgtcccagaatctacttggtgattttattctactgttgtcaattaagtatgtgtgattgttaagtaaagggcatcaatgagactattattattatggt

SEQ ID NO: 4846 - DNA, 1048 bp, Triticum aestivum
  Clone ID: TRIAE-23APR03-CLUSTER395_337
aactaatccatccatcgatcgagcagccacttcacaccagctagtggaagtagtgcgatccagaggttcaggcatggcagctccgagagcactcgtcctctgcgtcctgctggcgatcgccgtcgcccacgccgaggcggcgtcagtcgtcgtcggtctggccaagtgcgccgactgcaccaggaagaacatgaaggccggggaagccttcaaggctgtgcaggtggtgatcaagtgcaagaacagcgccggcgagtacgagagcaaggcggtgggcggcctcgatggcaccggcgccttcagcgtgcccctcgtcgccgacctccatggcgcckmctgcgtcgcgcagctccacagcgycgcctccaacgcgccctgccycggccaggagccgtccamwgatcgtgccgctgtccgmgggcaccaccttcggcttcgtcgctggcgagaacaccgccaggccgtccgcggcatcgcctggagtgcgcgtccatgaccctgtgcgggccgatcaagaagcacatcatcgagcacttccaccacaagaagcccgtgccgcccaagccggagctcaagccccagccccacccggactacggccccatgcctaagccggagccgaagccgcagccccacccagactaccaccccgtccctcccacgcccacctacggtagcggtggcggcggtggtggataccacgggcacccactgagtcagttctacccccgtcctgcccagcgatgaaatctcatcatcagcgggttggtgatcagtgagtggtggacggtgctaattatgattggtttgcatgcgtgggtatcgttaggtcttctgccattcccgcgaagccccgtttattatctgcactgcagagttgggagttcagaataacagatgtgcgtgtgtgtgtcgctgtgtcaggcgagtgtgagggtgtgttggtgtgttgctttatcaagattttgtaatttcagtgtgtgttttgtataagaagttattatgaatcaagtaatttaaccaaaaaaaaaaaaaaaaaaaactcgag

SEQ ID NO: 4847 - DNA, 1274 bp, Triticum aestivum
  Clone ID: TRIAE-23APR03-CLUSTER395_351
ctaccagtataggagtaccataacttgttcgaatcctccaaaagacttgtctggtcagcaaagcagtactaataacaacaccgaagtgccagtattatacagccggtaacagagctaggggcaaaacagctctagcaaccgtttcgatacagctgggacgatacatcttttcaaaaaaaagctgggacgatacatacgctgagccctgaagcactgcagcgccatcatgcgatgaggaaagggagcacggtcagcatgaacgcctcgtagccgaaagtcgcaaaccccgagtacgccgggtccttctccttgaacttctcggtcaggcccttcactgtaaggcagcattcaatgaagttgtcatattcaaccgctttgttcttgcccccagtcttgtcaaatttagacacaagcaagtctagcacagtaggagaaacggaatatccaagatctagaagagcatcacgcagttctggggcatcaattctaccactttggtcacggtcaaacctctcaaatatgcccctccaattctgaagactgtaaaacacagaagtgaactcctttggcccgatcttgcggacgttggtgttggtgaagaggtacatgaggaggtggacggtgcggaggctgaagctctggctgctgaacccagagagcgcggactgcagctccttgtcgtcgatcatcccgctgccgtcgcggtccgccgcctggaagcacgccaccacgttggggtccgtccccggcaggaacgtggacggcaccagcgccgcgaacgggctcccgtacccaccggcgccgcctcctgcgtagggctgcgcggcgggcggccccccgtacggcgcggcggacgaaggcggctgggcgccgtagggctgctgcccgtagccgcctccgccgcccccgccgtaaggctgctgcgggggtggagcgccgtggtaggggtcggagccggaggagtaggaggtcttgccttccttgggaggcttctggccgtaggacggtggggctccgtagccgccgccgcctccgccgtaaggctgctgcgggggcggagcaccgtggtaggggtcggggccggaggaggaagaggtcttgccttctttggggggcttctggccggagggcggtggggctccgtagccgccagcggcgccgtaggggtagccggagccggggggtggggggtagccggccatggggttaagcttggggaattggagttgtgtgctcgatcacggggacggggatggaattggaatggaacaggt

SEQ ID NO: 4848 - DNA, 1186 bp, Triticum aestivum
  Clone ID: TRIAE-23APR03-CLUSTER395_356
ctcccacatctctccccctctccctctcctctcctctcctctcccacacaagcaagcaaggaaggttctcaggccgccgccgcgatgagctcctcctcgaagctcttccagtccgcctgcaaggccgccaggtccttcctcgcctcctcctccgcccccgccgccgccccgcgcgccgcctcctccgtcctcgcagacgggaggaacgccgcgctcgccaccctcgccaacctcggcaggaactccaccctcccagccgcatacgcccaccacctccacaccaacgccgcatcctcccagggctacgcatggatcgccgccattcccgccgcagtctacatgctccaggatcaggaggtgcacgccgccgagatggaacgcaccttcatcgccatcaagcctgagcgggcgtccagagaggacctcatttctgagatagtgtcccgatttgagagaaaaggatacaagcttgttgccatcaagctggtggttccatccaagcagttcgccgagaagcactaccatgatctcaaggaaaggcctttcttcaatggactgtgcgacttcctcagctccggtcccgtgcttgccatggtatgggaaggagagggcgttatcaagtacgggaggaagctgatcggtgccacggacccatcgaaatctgagccaggaaccatcaggggtgaccttgctgttgttgttggaaggaacatcatccacgggagcgatggcccggagacagccaaggacgagatcgcgctctggttccagcccaaggagctggtctcttacaccagcaacgaggagaagtggatctacggtgtgaactaaccgccgcatcgtcttcagaagagccaaagaagctccagtccctttccgtaatcgcctctagaccatggcagagtgcaataacaccgcgacccgggcgacctttcagtcggtgtcgcccttgcccttgtctcatcgtgatgcaataaggcccgaagaaatttaaagagtttgtttgtacctttgaatattatagagcgtgcacggagcaatcgtgatgttcaaatcaaaccgtcgccttcaggcgcttgattttgatggatgctgtttgttttcatgtgttgcccaaattcaggcctacattctctgcacttttcactgtcactgtagctgaagtccattttaattatgttttcgt

SEQ ID NO: 4849 - DNA, 1808 bp, Triticum aestivum
  Clone ID: TRIAE-23APR03-CLUSTER395_358
aacgtcactccccatcttgttcgtcttggtcacccccacccccactttcccttcactggtcaaaggctccaccacccacatcacagtacaagccaagccaagccaagccagagaaaaggaccaggcgtaggtggatgcaagtgtgagcccaccgtgtccgccccattcacaccctagccacatggagcatccggcgccggcgccggagccgatgctgctcgacgagcagccccccaccgcagtcgcctgcgagaagaagcagcaggatggcgaggcgccgtatgcggaggggaacgacgccatgaccggtcacatcatctccaccaccatcggcggcaagaacggcgagcccaagcagacgattagctacatggcggagcgcgttgtgggcactggttcgtttggcatcgtctttcaggctaaatgcctggaaaccggggagatggtggccattaagaaggtactgcagccaggaccgacggtccaagaaccgtgagctgcagcttatgcgttcgatgatccattccaatgttgtctccctcaagcactgcttcttctcaaccacaagtagagatgagctgtttctgaaccttgtcatggagtatgtcccggagacgctctaccgcgtgcttaagcactacagtaatgccaaacaggggatgccacttatctacgtcaagctttacacctatcagctattcagggggcttggcgtacattcatactgttccaggagtctgtcacagggatgtgaagccacaaaatgttttggttgatcctttaacacatcaagttaagatctgcgactttggaagcgcgaaagttctggtggcggggtgagcccaatatatcatacatatgctcacgctactaccgtgctccggagcttatatttggtgcgactgaatatacaatatcgatagatatatggtcagctggttgtgttcttgcagaactgctccttggtcagccattatttccaggcgagagtgcagtcgatcaactcgtagagataatcaaggttcttggaacgccaactcgggaggaaatacgttgtatgaacccgaattatacggagtttaggtttccgcagataaaagctcatccttggcacaaggttttccacaagaaaatgcctcctgaagccatagatcttgcttcacgtcttcttcaatattcaccaagcctccgttgcactgctcttgacgcatgtgcgcatcctttctttgatgagctacgggagcctaatgcgcgcctgccaaacggacgcccgttcccacctctgttcaacttcaagcatgaactggccaatgcttcacaagacctcatcaacaggcttgtgcctgaacatgttcgccgacaagctggtcttgctttcgtgcatgcggggagctaaatatgcgcaccggtgccctcaaccttgcaccttattgttttgccatgggcagaagggtggtggtttaagatggaggcaggtcagatgatccctgggagcgatatatgccagattccatcatcaggagtaccggtaggagcaccggaggaataacaactgtctagatcatctgccagggaaggagccttgcccagggaaacagcatagccttacgccggtggacccgagttttctttcagtttttgccctattgtaagagttattaatagcttcttaatgtactgtggctcgtaagttgtcaactattttgttctccattcactgacggaaattgttgctgtaaacttcgctgttcaataagttggtcatggccgaaaaaaaaaaaaaaaaaaaaaaaaaaaaaaaaaaaaaa

SEQ ID NO: 4850 - DNA, 1191 bp, Triticum aestivum
  Clone ID: TRIAE-23APR03-CLUSTER395_359
actccactctgtcctcgttgtcattattgatcttcgtcttggtcgccctcccttcgcctgcgctcgcgcagcagcaacccgccgctccctccggctggccgtcgtccgtcccgctcccggcgcccgcaaattcttcctcccccctcgacatggcgtcctgcccttcggtcaagaacatcctcgtgctggacgcggaggggaagcgcgtggccgtcaagtactatgccgatgactggccctccgcgtcctccaagctggctttcgagaagtcgctcttcgtgaagacccagaagaccagcgccagagcagaggctgatgtggtaatgttcgatggctacatcattgtgtacaagttcatccaagatctccatttttttgtaactggaggagatgaggagaatgagctcattttagcgtcagttcttcagggattttctgatgctgttggcattcttctcagaaacaatgtagacaaaaggaccgcacttgaaaatctggatctcatctttttgtgccttgacgaagttgttgatggagggattgttctggaaacagatggaaatgtgatagccgagaaggtgtcaggccatggattggaaggagctgggtcgttcactgagcagacgataagccaagccctagcgacagcaagagagcacttcgcgaggtctcttctgaagtagtgtgtgtaggcatctttcgggttggcgatgcgcccagcattgaactcgtgtgtttcctcttgtagcacagtgcacctagtttgcaagaaagaaagaaagagcgagaaaatgacttgaatctttgcacgtgagttcgttcgttcgtctattgttgtggtgctcgtcgacattttgtcgcagagatgtactccctccgttcgaaattacttgtcttgaaaatggatgtatctagaactaaaatacatctagatacatccatttccaatgacaagtattttcggacggagggagtacccatgaagagcggggcccctttttcgaaaccccgaagaagcggagtgattaacgttcagatttgtcctatgcttcggagaaagcagaataattgggtatatgatttagtagtagttagcttcatcgcctgttttttactctgactgtgttgaacaatggttacgatgatttagcaaaaaaaaaaaaaaaaaagcttatcgataccgtcgacctc

SEQ ID NO: 4851 - DNA, 1674 bp, Triticum aestivum
  Clone ID: TRIAE-23APR03-CLUSTER395_360
tgggggggggatacatgtgtgccgcagaggaccgtgtagatgtcatatattacgcacagcggtccgaattggcggtcacatgggtggcccaaaagctggagctgcccccgcgggggggggccgatctaggagttaggggatccccccgggcgtccaaaaatttccccggagggcccttgccgtggaccatctgttatgggaaagatcctagcccaggtccaaatccaaatcccccaacccaccggcggcgatggcgcgcggcggccgctccgagaagggcggcggcgggtgcgggcggtgctgcctggggttcctgctcaagctcctcgccttcctgcaggccttcgccgccctctccgccgtcctctacgccgcctccatcctctcccggtgggcgcgccaccatgagctccacatccaccacctcctcccagacctctggttcgcgtgcgccgtcatggccgccggcctcctctactgcgccatcctcctcgcgggctacgtcgccgccgagatcagcagcggctgctgcctctgcttctacaccggcttggcaatggtgatgatgctgctcgaggccgccgtggccggacgcatcctcctcaacgagcactggatccaggatctgccgtatgaccgcaccggagagctccagaacctcgtctccttcgtccatgacaacctcgacctctgcaaatgggctgctctcgctaccgttgccacccaggcactctcgcttttgttggcgatggttctacgagccatggtttcacccacgagtagcgactacgacagcgatgaagattttgtggtcataaggaggccgctgcttattgcccaaggtgctccatcctatctccctaccacggctgaccccagaggtgtccatccgaacctatggagctcatcaatgaggcagaagtatggactgaactcctcaggggactacacctacaacacactgggtcaaaatgcagcgccaccgcagtgagaagcttctgtgtgacaggtgatgaggaaggaagggcatgcatggccttgttggaagcacctgtgcagcatatttgtagtatattgtgatattccatggtgtaatgcacactacatacatttgtgcacccattcaccctgtcaatctcgactcattgtacatagttccatcattagtgaagattatatatgtgtggccctggttggctagttggaaaggacttgttgtcaacatttcgttggatgtttgttaagctagctagatagcagtttatcaagtgaaaaaagatcttgctgaacgtcaaaacccatccttcacgagagaaagacataacctacactgtgaaaagaagaccagaaatcttatcccatccccgtgaacctccaggggggggccccggtccccaattacgccataataaggggtccgtattaccctcacgctaactggccccactttctttcaaccccccgttattcccaaaaatccttgggggggcccctaccttaacctggccctgcatacccaatccccctttccccaccacctggtggaaaaaccgagaaaagtccctccccccccgcgcctctttcccaaaagagaggcaccgtccttgcctggcgcccaggggaacttgcgcatcccccgcataatttctgcgcgccatatatcgaggtatagtt

SEQ ID NO: 4852 - DNA, 1785 bp, Triticum aestivum
  Clone ID: TRIAE-23APR03-CLUSTER395_363
atcttccagatctcattattgcgcggcaccttccttcctgcgcccggtccgcaagtcagacagagaggccgaacgaatcgaggaggaggaggaccaaatccctcattctctctcggccagccagccaagccgccctttcttctcccgcacgacagccctcccgacgccgccgccgccggcgaaatggcgtcccgcatcgcctcccgcctcctccgacgctccagccccacattaggcctcctgaggagctacacacatgtcagaaactacagcagtcaactttcaggtcttattccagttggtccccaaagctcaaagctgacaagaaggaacaattacttcccaaatgcctctccttaccaactctggagtaggtcattcgcatcagacaatggagacaagtttgaagctgttgtacctttcatgggtgaatctgtaactgatggaactcttgctaacttcttaaagaaacccggcgatagagttgaggctgacgaggccatagcccagattgaaacagataaggtcaccatagatgtttctagtcctgaagctggtgttattgaaaagtttattgctagtgaaggtgatactgttactccaggcaccatagttgctatcgtatcaaagtctgcagcacctgctgaaacacatgttgccccatctgaggaggcgccccaaaaagaatcacctccagtaaaagctgaagagaaatcaccaaaagcagaagagaaacccacaaaagtagaacctcccaagaagcaggcaccaaagccaactccttcaaaaacctcccctacagaaccacagctccctccaaaagagcgagagcgacgggtgccaatgcccaggcttaggaaacgcattgccaaccgtttgaaggattcccagaacacatttgcaatgctgaccacattcaatgaagttgacatgaccaatttgatgaagctgcggtctgactacaaggatgaatttgtcaagaagcatggtgtcaaactaggtctgatgtcttgctttgtcaaggctgctgtttctggactgcagaaccagccaattgtgaatgctgtcattgacggcgatgacatcatatacagagactatgtcgacgttagtgttgctgttggcacttccaagggtcttgtggtgccggttatccgagatgctgatacaatgaactttgctgacatcgagaaagggataaacaaccttgcaaagaaggctactgagggggcgctgtcaattgacgagatggcgggaggaacattcaccatctccaacggtggtgtctacggaagccttattagcacgcccatcatcaaccccccacagtcagcgattcttgggatgcactccatcgtgcaacgccccgtggtcgtggacggcagcatcctcgccaggcccatgatgtacctcgcgctgacatacgaccacaggctgatcgacggcagagaagccgtctacttcctgcgccgcatcaaggacgtcgtcgaggacccccggaggctgctccttgacatataagccccatgcgcccgatctcctttgctgccaagtgcctcgtgcttgtctggaaaataataccgtgcaatttttgactgatacaaagagttgcgtcctgagaaggacggagatttgagttgaggatatgataacgcgtttgtcccgttttcgttcagagcttcggggtgtagttcccctacacaaaaaatttgctttaattttcaacgcaagagcaatagatatatggtgcccttttggtcattatttttcttcaaaaaaaaaaaa

SEQ ID NO: 4853 - DNA, 1739 bp, Triticum aestivum
  Clone ID: TRIAE-23APR03-CLUSTER395_364
gttttcgaatcatcagtcagtcatcgtcctagccagcggcccacccaaggccccggacgcaacccaccaaaactagggctttgcacagggtttagcggtgatctctccccctcttcctctcgtcgacgcgcatccatggcggccgccacctcctccctcctcggccgccgcctcctcctcctctcccgtcgcttcgtctcttctcctctccgccccttgtcaaccaccgggcccccgtcctcacactcggccgcgggatccgatgtcgagcccgaccctgagccacccgccgatcagggtaatcagtaccggagccagccgaggcctcccatcaccacccgccccctcgagaatggcctcgaccacggcatctacaaggctataatggtgggaaaggtgggtcaagagcctgtgcagaagcggctgcggagtgggaagaccgtcgtgctgttctctctgggcaccggcggtatccgcaacaaccgccgcccgttggacaacgaggagccgcaccagtacgcggaacgcagctccgtgcagtggcaccgcgtatgcatctacccggacaggctgggtagcctcgcgctgaagcatgtcaagaccggatctgttctctatttggaaggaaatattgagacaaaggtgttctccgatcctataactgggctcgttagacgcataagagaaatagctgttcgaggaaatggtcggttcctgtttcttggtaacgatggcaatggccccaagataggtgaagtgaagggcgttgggtacttctgaaagtgaggtccaacaaaatccatttgagaagtgagactgaggtactgcacgtgtgctacactttggagtattgtcaacatcttagcattggacaaataatggcatgtttttgccgcagtttgttagtttccccttgcctagtcacattcctgtcttcattaagctttcgacgccattgtagatgccatgtactccctccgttccaaattactcgtcgtagaaatggatgtatctagaactaaaatacatctagatacatccatacgtgcgacaagtaattcggaacggagggagtacctccatatgtggaacttgaaaatataacgagtctgctcaccattatgcgttcattaagatgcaatgcaaagtccaaagctggatcactacaacacatagagttccgaaggtagggtttcttaacccactagttaaataagggtttcttataaccaactaatagagatgatactacagtgacataaaaagcagaacagtgctaggcaccagcacgatcaaagcaacattgcatgctttctcaatattgtttagcttcttacggaacttctcatagtcctccgcactccgcctctcaatttcatccatagcatccaaattcttgcggatctccagcatgctcgcatcaaactcagcagtcatgcgctttatttcctcacgctgtttggccagcgtttcatcatcatcagaataagccacttgtccccccgtcgttgagaggaggcgcgccgccggcgaaagcccctgcaccaccggcgacatgcggccgagggccggcgacccgcggccgagggacggcgccgccttgcggaggagggaccggatcgccgccgccatcagcacgagcggaggagcggtggttgggggaggagcgtcgacgatgttttctctttgttttccggggccgaccagcgctcaagcgactgagtccatgggccagcgct

SEQ ID NO: 4854 - DNA, 2048 bp, Triticum aestivum
  Clone ID: TRIAE-23APR03-CLUSTER395_369
aatgatattcttttataacatataactttcattatctcggtcaaattgtcgatctagggatacgcgcaagccttacaaacaaaccggaaaggaggtactactctccaagtacacaggtagaagcagccacaacaagaggagcaaacaacaaggctctatctatatacaactaatgggattggttctagggtatgacaacaggtccatattagacaccactacacccacggaacagggtcacacaacagatccgcggagccgcgctttcgtctccaggcaaggaaccattgcgctacggcatacggcgagccgctacctacgatgagattacatgagaggcagagtccgcagagtccttgagaggatgatgcgagtgcgtgcagactctcggaggctgtcctttcatccacaggttcctgagctcgccccgctttttaccgagtgatatgaaagttccgagcgtgaagggcacaatgtaaagaagagccggttgcccgtgcccatccatgagattcaaggcaacatacgtgatcagaagaccagaaccatacgcaaccattgaccacagaaagtaaccagattgtaatgtcttcctggcagcccaatcgtaccttagcgcaaaagcaaccagcagtcctggaagaaggatatcaccaaagcctatgatgctgtatccaccccatgggtcaaacatgcgtgggatctttaacagcatgggtacaccatcttcgtcagtgttatcaccacgtgcaaccacaatcatcacgctctcatgaaacaacatcttggatatgaaaacccagaagatgtcatacaggaaggagcagcccagaagaacagaccccaccttaagattaggtatcctcacaatctggatcacagtaacaatcagtgcgataccaagaacatcttgcccaatccatgcatagggcatccggcgataaacagcccataaaacagcaaagacaatgcaaaatggacaaactgccaatgtaaggtatgaaacagctccaaaaaatggcacttttacaaatgatcttgcggcaggtttgaaccatcttgacaataaagccaccaagcacgtttgcaaaccctctacaccaccaatgcaaaatataaccttagctagcgcttcatgtcaagtggatgcattaagtcaccattggttcatattttacaaatcaccaagtcccagcagctctcctatgtgatcagacctgcattaatcaacaaaggatctttgcgataccctctcatccatcactcgtcatacaaaaccaaagcacgttcgtacactgacgcgcgttcgtccattttgcagctgagctgacagaaattgctcgaccaccgaccacttaagaggagccgaaggtgtcgaagatggtggtgtgcagcgggtcgctgaggtgggtggcccagttgttgagtggccccttgccggtggcggcggcctgcacggcgaagccgaggaaggcgaccatggcgaggcgggcgtgcttgatctccgccagctgcagagtctccttcttcaccgggtccgccgcgagtcccagcgggtcgaagtaggagccaccggggtagagcctcctctccgggtccagctccgcgttgcgctggaactcgatgtacccgatcaccagcacctcgatccagatcaacgtggtgagcgtgaacggcagcggctgccccaggtacgacgacccgtccaccagctccaccttgccggcgtcctgccaggtgacgccggtgagccactcgacggtgagggcgccgagggtggcgagcatggcccagcggccgtggatgagctcgcactcgcggaacctctggaggccgaacacctcggcgtaggcgctggaacggggtggacttgaattggggtccctaaaccgggggccaatattttcccccgcagttttggggcaagttttgtcccgggaaccccgctattatgggggaatcccggggttccccaggggaagggggtaaacctaatccccccaaagggccccaaagaaatccggggcgcgggcgggaaaaaaaagggg

SEQ ID NO: 4855 - DNA, 1198 bp, Triticum aestivum
  Clone ID: TRIAE-23APR03-CLUSTER395_373
gcttttttttttttttttttcataagaacacaccaatactgaagatgctatccactgttttatctcagcttcaagcttaatctcagttacatcatagaccaaccatctaatgatacgtacagcagtcaacttaatcaattgttcatctgagcacctgctacaggttcctcagcaaccataatctatgtgatgatactctttggcgattgatccgatgctgaccttaaccatccgagttcggaaggtaaatacgatggaagttgttcttcctcagggccttgcggcaagtagggcatttcttctgaaactggatggcttgcttgatgcactctgcgcagaagatatggccacattttgttgtcgaaggctccaccagcttgttaaggcacaccgggcaagtgaaattcggttcctttggaaccaccaccttagcaggctcttggctaatttgcaccgcattgttcgactgcaggctggacccttcttccctttctggggagagacatatcaaaggcgcaaccctttggcgtttgttccacgtgttatgagaaggcatagctgcattatcttccagggcagcatcttcatccagataaagtggtgtcaaaaattgacttctagttctccgattctcttccatggcagcatcttcatcaagataaaatggtgtcgcacattgccttataattctccaattctcttccaggacagcatcttcatccagagaaaattgtgtcacaggttgccctctagttctccggttcacccccgggggaggcacttgtgaaggcgatagggcctgcacttcatcatcgagagcttccacatcaataggcgatgtgcgtgcaccagggaagaccgagagcccatgatggttccccgccaccggcgagcttgcatccaagtccacaacaactttatcagcagatccatccagcgattgcctccttgcggcacgccgtgcgccgctggtattactcatgctatgtactccctctgatgcttatactcaccttacccttctccagttctacaatcaacccagagggagaagatctgtccaaccgagcagcccgcgcggctacaacttggggcagaatcgagcgacgccgatccaaggatcggcgcggcggccgaatcaagaactcctcgcccggtcgcggtcagattccgatcgaatcgaacacgagcgctcgag

SEQ ID NO: 4856 - DNA, 1502 bp, Triticum aestivum
  Clone ID: TRIAE-23APR03-CLUSTER395_380
caattggatgccgtgccgcccctcgatgtcgatttctcaataagcttttttttttttttttttgctaaatatgcttgatctactaaactgactgaatgattgtacaatctgctgaaataacatatagtttcttttgcaggatgatccaataatatttctaatttgatataaggatacccatgccttgtacattgggagagatatatgaagtaccacaatacatgatgtttggacaaaatgtaaaagcatcgatcattatttcgttggacacagggacttcatatcaacctggtccctttattctggaatccttatttgcgaagcatgtgatcacatgcgccttagtttttgtagttagctaggagagactcaatagctgcatttttggcctgtacatcttcatatcggattcgatagccatgcccaggtaaataccactcaaaatctaggtccagtaactttctcatactatccagttgcaaattcactgattgcttgctgtacatccgaaagagattcagttcgtctgaatattctgattttgcgacatggtcgccagtgaacagcgcctttagtggtttgtacaacaagcagaccgagccttcagtatggcctggggtatggataagttcaaaatcatttccaatgttccagggaccacttccagtaagtttccactcgacatcagcagtaatgtccactacatctcctgaatggatgattctctcgcatttcaaccgctcggcccacttccgatgatccgctacatcatcaatgtgggtcaaaaacatgtagcgcgctccaccgagcttctcaatcttgtccaccagtttcggcgtataccttggactgtcaaccattatgtttccttctgggtgaactatgagataagatgttgctccatatgaggactcggaatggtaaccgcaaaggtaaacaccaggaagatcgtcgtcgatggggagcgggaacgtgttctgcacttggagaatgtccttcgcgggcttgtcggtgtggatcgaggctgttgggcaagagagcaaagcctgcggtgccttggtcctctgctcctcagagctgggctgcgccgccacggcggacatgccgtccaccctcttgaacacctccggcgccatccaccggcaggtggcgcagtcgatgcaccggtgatcgacgaagaactcgccggagacgttctgctctcgccgccggttccgtttgccgagcgccgcaggggacgcggcggcgcggaccaccgaggcggggcgtcggccgggacgtgcgcctgacggcggagaggcgagggacgcggcggcccgaaggctgagcgccatggcggtgagccggtgactcgactgaaaggagatagctagctagcgagtgacgggtgagctcttccgtctctacactgcagccacgtactacctgtgaagctgaactgagctgagcttgagctcgttcgacaattatgttcgacaattatgcacttaataggagcatgg

SEQ ID NO: 4857 - DNA, 1571 bp, Triticum aestivum
  Clone ID: TRIAE-23APR03-CLUSTER39629_1
gcgcgcactcgtccttcaccctcatcccgcctcctcagtgcggccacactcacctgacccacggaatggcgtccggtggctctggctgcaccgccaccgccggagccgcggcgctgctgtctctggtgttcttgtggctgctgcaggcctcagcgggcgcggccgcggccgccgcctgccccctcctgcccctgttcaacttcggccactccaactcggccaccggcggggcgtcggctgccttcggcgccgcggccacgcccaacaccggggccttcttctcgatgccggccgggctgtagtgcgactccggcgtcgcgaccgccggcatcgccgacaacttcggggtcctgttcctctgcgggtacctccaatcaggacgctggcgctccttcggccgcctccgtctccccaccgccgccccacgactgaaccgtcttcggcatgcccgccggccgctactgcgacggccgcctcgtcttcgacttcatcggtgcccgaaaacctgggaatacattacagaagtgcgtacgtcaacacacaaaggtggcatctatagggagctcctgccaaaggccgagtacttctcccaggcgctctacaccttcgacatcggccaaaacgacatcaccgcgggctactttgcaaacatgaccactgatcaagtcatagcgtcgattcctgaactcatggagaggctcacctcaataatcaagaatgtgcatgagctcggaggaaggaacttctggatccacagcacggggcctattggctgcctgccttacgctctcattcaccgccccgacattgccgcggtcaaggacaaggttggctgctccgtcacctacaacaaggttgcgcaactcttcaaccagaggctgaaggaaacggtggctcgtctccggaaaacctaccccgacgccgcgttcacctacgtcgacgtctacgccgccaagtacaagctgatcagccaagccagcaagctaggcttcgacgacgctctgctcacctgctacgggcacgacgctggcccgtacaacttcgacccgaaggttggttgcggcgggaaggtgctggtgaaggggaagtgggtggtgctgggaaagtcctgcgacgacccgtccaggagagtgagctgggacggcgtccacttcactgaggcggcgaacaagtttgtctttgatcagatcgtcggcggcgggctctcggacccgccggtgcccctaaggcaggcttgccggagcaaagggcagtgaactagaggcggatcgttggtcaggctggccgcgccgctgctgctgctgctgctgctaattgctctgtaagagtgtacaatatggaaagcgtccttgagttatacagaacgtgccagcttccttttgtgaacggggaaagaggggaatggggatggataacacggaagagcaacgcaatgcatgcatcctatcttctgccactgctgctgctacatgctctgtaagcgcatcaccgatgggagatgcaaatttggagatgtgaaacagtatatgtaaaaatttacatccttaaaaaatgcattttacaccttgaaa

SEQ ID NO: 4858 - DNA, 2471 bp, Triticum aestivum
  unsure (1)..(2471): unsure at all n locations
  Clone ID: TRIAE-23APR03-CLUSTER396_1
catatttgaatggcttcttgagcctccgcccggcactttttaatgttttttttttttttttcatgacaataaatagcaccgtttcacagatgatagtttcggcaccagttacaatcgtactgttttgaacttccatgccacagatgcacaggtctggcctactctagtaccaactggagctaccaaaaatacgaaaagtacttcaaagcacacgggacaggtacttaacagctaaccagccacgcagacagctgacaaacaggaaatcagaatcaagagcatcacacgatagtctgaccgaaaatgatttgcaactctgcagccacggtaacattcacgacccgaccgggatttacttcatggatgatctcaattccttgatactcccacttcttgcgctccaattccctcatggaggtgctttcttcaaccgtcgtattccccatatcctttctgtgggtttgggagaacggtccttttagactccacaaaagacttcatcattgctcatacgcatatcttcatcagcataaaagttaatttcacggtaatttttgttaaaatcaccatcaccatcaagtttttcatccttctcctgttttttcacttcagcttcaagcgtatcccagtcctttttggattttgatgacggattagatggcctcgggggtgattcagctaggtacctttatcggctgcgcatcccttcattcacctgttttatccaacagtgtccttgctgctggctcagcttttgcatggcgcatctcaacctttgtagacaacacagtatacttgcacttatctgggacgatctttgaaaacagacgaggccccaggtggtattgaggttttttttttttttttcagacaaaaaatagcaccgtttcacagatgatagttttggcaccagttacaacggacgttttgcacttccataccacagatgcacaggtatggcttactctattaccaactgtagctcgcaaaactaggataagtacttaaaagctaacctgccacgcaaacagcttacaaatacggaaacagaatcaagagcaacacacaataatccgaccgacactgatttgcaagtctgcagccaagttaacactcacgacccgaccaggatttacaacatggatgatctggattcattaatactcccacttcttgagctccattccatcaggagggcttccttcaaccgtctttttcccgacatccttccagttggttgagagaacggttccattagactccacaaaagacttcatcattgctctacgcatatcttcatcagcatcactgtaaatttcacggaaaaatttgttcaatgcagcatcgccatcaagtttttcatccttctcctgttttttcacttcagcttcaagcttatcccagtcctttttggattttgatgatggataagatggcctctgggctgattcagctggtacatttatcttctgaggagcctttggtttaccagtataatccaatgatgtccaagttactggctcagcttttgcaaggcgcatttcaacctttgtagacaacacagtatacttgcacttatctgggacgatctttgaaaacagacgaggctgaaaatggtatggttcctcaccgggaagttcaattgagacactcagcatctgttcaccaaagtcaacaaccacgctgtcagctggaacacccttagcaaatatagtcagtaccacttctgtaggagtattgtagtagtcatgcctgtatttgggcttgcttggcacttctatcgttggctgtgcattctccatatttgcaccatcctggtcctcagcttcagtagccacagttgtagccccggaagatgcccccgaagatgtagctgaagcaacagccgcagcggcattctttactggcacctggctagcctcctcagcaatacgatcatcacactccttcatcagacgagtaaacctcgagtcaccagatgcataagaagaacccacttcaagagcagcctttgcagtttggtattcctccagcttgatgcaagcagagcccttccgaaggtatgctttatgcatcgaaggatcaagttcaattgctttgttggcatcagctacagcctcagtgtaactgcccagcttgatgtgcgcctgggctcggtcggcgtagagttccgcggtggccggccccgcctcaatggcctgggtgtagagctcggcggccagctcgaagtcgtcgtcgacgaaggcctccttggccttgctctccagatccgacgcggcggcggcggccatgtctgcgtcgaggtggagaagaccagacgaagactttgggagaggtgaatagagatcgacggtatttggtggggaggggatggatggatccaagcaagggactgattggattggattgagcagcgtgcggttaaaacggatcagaacgagctggcgnatcanaannnnnnnnnnnnncnc

SEQ ID NO: 4859 - DNA, 1538 bp, Triticum aestivum
  unsure (1)..(1538): unsure at all n locations
  Clone ID: TRIAE-23APR03-CLUSTER3970_2
gttttcttttctcctcgtcgccggagcctcggacccccactcccactccccttcccctgccccctcatccccaggagagccagccagccagccagccaagaataatcctcttctccgcgcggcgacccgacgcggcggccaggcgacgtcgctgtccctctgctccgacgccggcaccgcgccgacgtttctctcctctccaatctccagcggttggattgccagggccgctcgccgccgccggaggaggtcggggaaaggcagccaccgaccacccgtccgtccacgccgcgcgcgacggggctcccgctccgccgaggaacgccggcttctccgcggcgagaccattgggttccataacttcgcccgttgattgagtcggcctagaaagtacatcgagaaagatgagagcaacggtagctcgctcgctacgccagcttcgccgtttggcgcggcaccatgcagaggggcgcgcaccaataaacaggctgaccaggcagcagaacgctctcatcttgcggagttccgcatctcgttcactgtgcacagtgcgccagaatgatgaacatggcagatttgtgagtccagctgtggagtcacttgaggaacatgttctccactgccgcagctgattcgattaaagatgttccacgaggtggtccgatggtggaatatgagaagagaattgcatcaggagatcttgtggatggtgatagctttcaggttgatacgattcagcaattacaaaggctttatgaggatcttgtagagaatgaagaagcctgccagctcgatagatatcagtcatctgagaaatctggaaggagaaggtggctatggtctcgcctcattgctcagccttctacccaatcaccagtaaagggattgtatctatatggaggggntggtacagggaagacgtgtcacattggttgatgttatgtatgagaacaaggggaggctattatgtagagtgagggccgagccaatagagctattcgagaatgtcgtgacggtcgctgaagcacaaaaaagttcacctagatcttcacgctcgcagaaaagtgacgatcccgatctctgtgtggacaatgagctaggattcgccaaagatcgtacgattagcaggttgacagagctcaacagcagagagtacttggaggactttgaagcaaaatggcaacatcccctgcatgctgtagataatggcggcgatgtcgtacttgcataagtggcagggcttcatttgcaaggaccgcattatagttttgttatataagtatctattatcccgcctggtttatatggaggaatgggagaaatgttgattttcctgtcagtgatgcatgtaatttcagtgtgtcatgatatgtaagcacttttgcatgtagctctgcaaaaatgtcacacttgtagagaatatgtgtcatgtcttactggaattctatcctatcctttatatgaaactggaaatcttcagataaaaaaaaaaaaaaaaaaggcccctannnnnnnnnnnnnnnnnnnnnnnnnnnnnn

SEQ ID NO: 4860 - DNA, 1447 bp, Triticum aestivum
  Clone ID: TRIAE-23APR03-CLUSTER397_31
gagtttggaatcctcgtcgtatactccttcgctttcctcagcttacaaatacggccaggttcccctcaagccaacagatagatcgagccaggctcacccgtttgcctttgattcgtcgcctgcgttagttgagttcgccatgggaaacatcaactcttgctgggcgacgcacccgcagccgccggtaagcatgacctcgtccgtatgcacgacggaggccaccaccgcggtgcacaagttcgtggtgaactactcgctgctcgacggcatgggcgccgacaagtacgtcacgtcgagcacgttcagagtcgggggctacgactggtggatcgatttctaccctgacggcgacagccgggcgcctggctatgtggcagccttcttgcatctcgtcggggaagaagcggcaccggcgggtgtgacggtaaagttcaccttaagtttgctgaagcaagatggcaaagtacacagagattccaacgctccgatcatcacccggacctttgagacgacgggtactggctggggcaatatgatgattataaagaagtccaagctgcgaggagactgcttcaccatcaggtgtgatttgaccgtcatcgctgtcagcccagaactactcgctagcactcgagtacactgatagatgaccggtggatgagcacacacacgtactactcacacactcactagtgtatcacacacacacgtagtagtagtagtactactactagtacacagcacttgaggcttggagcacactaggtactaggaggaaatgccttgtaatgaaattggaatggcctgagttttacaaccgggatgcagctccttttataggtagctgaaccgactaactatacgtatgagcttacgtcaagctcctagattacatcactgctgacgactagcttgctcagcttttaccatagtaaattactactagtagtagtttccttaactaccaaggcattgcagccgctactgcttttcttgccgacatgcagctgcatgtcatttccacctcctggctaagtaactgctactgctgccgctgtaaccaagcatgcatagccatgcatgcatcgaagacaggtttgactcaacaatctccccctcaaacctgtaggagggtcttgatgatcccggtcctgtcgtgcggctcttggaactcgatgcaaccaagtgccttcgttgggatgtccgccttctcggcggcccgtatgccctgttcgtgcttcttgatctcggcttttctatccctgtgataagcgagggctatgcaacgcttggttacctaccttaccttttaatggacaaaagtttctgtgtaatgcttctatgttaatttcgtttaaactaagttttgccgagacaagttacttatgtatgccagaaacctttgtttggaaaaaaaaaaaaaaaaaaaaaaaaaactggagactag

SEQ ID NO: 4861 - DNA, 1250 bp, Triticum aestivum
  unsure (1)..(1250): unsure at all n locations
  Clone ID: TRIAE-23APR03-CLUSTER397_35
ctattgggggggaatttggttacggggcccccccctcgaggttggggggaatcggataaacttttttttttttttttttcagaatactatcagtacctgcgatgatcgagttccatcaaattactgtcagaaaaaaccttgagatggagaggttttaattagctgctagtacaatggcgccatgctggagtggtagccgaagacgacgaagtcgtcgtgcttctccctgccgaccagttccgccaccgtggccgtggcgtcggtacgcatgtcgtaccgcaacacctcgcgacgccacacattctcgttgtcaacaccaccacccacgccgtggccgcggcgctgcctgtacccgatccgcatcgccaggcccaagacctcgtccgcgccgacgtccactcccgccggcaccaccgaccacaggaagcgcgacgcggggggcgccatgccagggatttcatcccagctccttgtcagcccagaactactcgctagcactcgagtacactgatagatgaccggtggatgagcacacacatgtactactcacacactcactagtgtatcacacacacacgtagtagtagtagtagtagtagtactagtacacagcacttgaggcttggagcacacacggtggtattagaaggaggaaatgccttgtaatgaaattggaatggccttctccaaccgggtggagtggtgctctttatatagcacgtacaaaccgacctactgttctaattgatctaagcacatacgtcatatcctatgacacgtcactgcttacatctagcatttgcttagctactaagttacggcaactgaagtaacttctctcctcttttactgctgccgctggtgctgcatgctgccgacatgcccaatacttcctagcaaagtatttgctgctgctgccgctgcatgcatgcctccgagacaaggtttgacccaacaatctcctcctcaaccttgtcgaaggagcttgtttccatgatcccgatcttgtcgcgtggttcccggaaccgaatgcgaccaagtgccttctttgggatgtcagccttctcatggtttgtgtagcccgtacgccgcgctcgtccttcttgatctcgcagtgctgcgatcgtcccgcaggctcgccgagaatatccctctgggcgtcggaacctgtgtggatcgccaccatttttgttggcatcgaacaantccgaccgcgctgttgatggggacatgaactgcccgggaaccaa

SEQ ID NO: 4862 - DNA, 743 bp, Triticum aestivum
  Clone ID: TRIAE-23APR03-CLUSTER39871_1
agttagtcggtcggtcccatactttcgtcgtgaaatactccatttgtcgcaacagcaggctgggccttgtccgcccaatcagcccgcgacgctagcctagggttctcgtcgtccgtctcccagaaaccagagtccctgccactcaatctccctctcccccccttcaccacccccatccggcggcggcgccccaaccccgtcaaccaccgcctggctctgccgaccagcgtcctcaccccctccggtggatcggcggcgagctttctgaagccaatatgctgttcttctcctacttcaaggagctcgtcgggaaggaggttacggtcgagctcaagaacgacctggccatccgcggcacgctccactcggtggatcagtacctcaacatcaagctcgagaacactcgggtcgtcgaccaggacaagtatccccacatgctatcggtgcggaactgcttcatcaggggatctgtggtgcgttacgtactgcttccgcaggacggggttgacatcgacatcctccatgacgccaccaggagggaggcacggggcggctgattgatatagtttattctcttttctcggccgtgagataattctaatctgatttgtggaactggaacatgtatggactgacatcggcattgcttaactccgctcgtggtacacttgcagtgcaaattatccaatgttacatatgtcaatgtgatattatcaaagagcaacaaccaagcattgccatgc

SEQ ID NO: 4863 - DNA, 1116 bp, Triticum aestivum
  unsure (1)..(1116): unsure at all n locations
  Clone ID: TRIAE-23APR03-CLUSTER39926_1
aaggagaggcgggggagaggaggaagtgggcagggcgtgctgcgctcgcgccatgaaggcgcgcggggagggggagggaggcgatggcgagcgccccgaggcgacgcccgcggcggcgggggctggtcgagaggggcttagaccgcctcgccttcctcacccgccacccccgccccctcccccccgcccccgacccctaccccggttcaccagccgcggataccagccaacaacccaagcataaaagccacagtagagatggtcaccaactccacagtttcaacgcaagcaccggagcttcagccatcctgccagcagatgagtcatcattgcagcgtcgacgagaggacttatgactatagaacagcaactgtgcagcctgagagggacatggaaatgagacccaggatatggaaatcagacccaaatccgtgccgcggcggggcatggacacgagacccagatccgcgcccccaagccagcctaaccaagcagactactcatcttggtctctggaaactctaaagcaactcgtcgattgcacgccgcaggagatcacccaagccatctcagccacagagctcaaccgctgcttagcatccattctcatcgccttcattgtggttgtttctaactgggggctggacgtcggttgggcaccatcaccagagtattggtttgcacgaggccgctcctgttcctcatcataacgaacgtaaccatcgtcatgtcattgctgatggagaacagggaccccaatgcgaggggcagacaggccggcatcagccttggttctgatggcttagggctgatgctggagctcgggatgctgctacagaaggcgtctgaagctatgctgatggacttcagcatttgcgctgtcatcatgatctgttttctttgattctgaacaccctggtcatgttttcttggattctgaagagaatttagatagttcgcggaagcgcatgtagaatttctttttcttttgttgctatatcgtactcttatgtctatttatccgatcttgtcacagggtcacttgcattatttttatttactgtacctctggtacgtccgctaaaagttcactgggacaattnatccaaggcaann

SEQ ID NO: 4864 - DNA, 1502 bp, Triticum aestivum
  Clone ID: TRIAE-23APR03-CLUSTER39941_1
tcatcggtcgccgttgcagccacgacaacacaacacagacgcaccaccaccacccactgaagttactcaagaactaattctccggccggccggaaatcgcgcgcgtcagtcaggatggcacccacggcggcggagcagcacacgaggaaggcggtgggtctggcggcgcgcgacgcctccggccacctcctccccgctcgccatcacccggaggagcactggagatgacgatgtggtgatcaagattctgtactgcgggatctgccactctgacctacacagcatcaagaacgaaatggaagaatgccaggtatcccatgatccctgggcacgagatcgccggcgaggtcactgaggtcggcaagaatgtaaccaagttcaaggccggtgaccgtgtgggcgtcgggtgcatggtgaactcatgccagtcctgcgagagctgcaacaagggcttcgagaaccactgcccaggcataatccccacctacaacacggtcgaccgcgacggcaccatcacctacggcggctactccagcatggtggtggtgcacgagcgcttcgtggtccggttcccggacgccatgccgctggacaagggcgcgcccctgctgtgcgccggcatcaccgtgtacacccccatgaagtaccacgggctgaacgctcccgggatgcacctcggcgtgctgggcctgggcgggctgggccacgtcgccgtcaagttcggcaaggccttcgggatgaaggtgacggtgatcagctcgtcgccggggaagaagcaggaggccctcgagaggctaggcgccgacgccttcgttgtcagcaagaacgccgacgagatgaaggctgcgatgagcaccatggatggcatcataaacacggtgtctgcaaacatccccatggcccctctcttggggctactgaaacccaacggcaagatgatcatggttggcctcccagagaagcctatggagatctccccctttgctctggttgccatgaacaagaccctggccgggagctgcatcggcggcatgagggacacccaggagatgttggacctcgccgccaagcatgatgtgacggcagacatcgaggtgattggagccgagtacgtgaacacggccatggagcgccttgccaaggccgacgtgaggtatcgattcgtcatcgacatcggcaacaccctcgacaaagccgccgccaccgcctccgagtgactcaggatctctgtttttgtcagcagtaacaagagagaaatttataatattgtgtgtgaaagcgtacgccagcaggtataggcgctacttgttgtactagtataatatttatattataatatttataattttattatatgtgaaggaagacgttacaaaaaaaaaaaaaaaaactcgcgtctcctcgcccccgcccccccccaggggggggcccccggaaccctcgtgtacgcgatgccatatttatttttttctaataataaagcggctgtcgtttctggtcgt

SEQ ID NO: 4865 - DNA, 1740 bp, Triticum aestivum
  Clone ID: TRIAE-23APR03-CLUSTER3995_1
gcacggctgggtttcagtgagatagaacctttgatcacacgccttaccagtctcttgtggtatggcggccctgcagcttgccgccctccttgccctgctgctcgccccgtggcgtcgggtctggcggccgcgcggcatcgggcggtcgttggtgaggcaggggatccgccggccgccgcacgcgatgctgggcggggccttgccgcaggcgaagccgctgctgatcgctgctcgccgaggtgttgcgccccccgtcgccgcgtgccacgacatcatgcttcccatactgccgcagctgcgcagacggcgtgccgattgtgataacagttccctcctgttcaatgatcggattctccctatcatctttaccgaggttcagcagattatacagctgctactcgaagtaagtagactcctttagcaaagagacatgatctaccatgtcatgaaaagactcttcggcgctctcgtcttgctgtttaaccctgaaaggttgcagtggtcccgactttgccctcgtgctggttaaagttatcagggcaatgatcctaagacagtcctccgggtccctatcccaagacaaggaacacaagaatcactaccccactgacttcaacaccaaggcgtggaaggaggggctcacaaaggcatcaacaacacctgcaagagcttgaacgcaaagttaagcgcgggggtcgccttctgcaaaagcctcttgaatttcgcgcagggcaaaatcgtggtgacggatcagcaaaaagtcgccactgcctcccagctggacattccaatactctgcaatctgtcgtctctgtgtgactcccaggctcgaggtctgaaccaacagcagagaagcaatatcatgggcggtcatgcaggcacggctggccgcagatggagccaaatatggtcgatgagacaccggcggctgcggggacgacctgctcgggctgctgttagaggcatggacaccgcaccggcaagggagcggcggcgatacaatgacaaccgacgaggtgattgatgagtgcaagaccttcttcgccgcagggcaggaaaccacggccaccctcctcatctggaccatgttcctgcttgccgtgcacccccagtggcaggacaaggtcagggaagaggtcctcagggagttcccaggcggggacggcgatgatgtgatacccaacgccgatattctcgccaaacttaagctgctacacatggtattgctcgagacatcgcgtctctaccctccggtcgtgtacatacaacggaaggctgcctccgacaccgtcctcggaggcatcaaggtaccccagggaacaatcatatcaatccccatcggcatgctacaccgagacaaggaagtttggggccccgacgccaacgagttcaaccccatgaggttcgagcagggcgtcacaaaggctgccaaagactccaaggcgctcttgactttctctctaggcccgagagtatgcactggtcagaactttggcatcgtgcaagtgcaggttgtcatggcgatgatcctcaccaacttctccatctccctctccccggagtatgttcacaagccaaagtatcttctgtctttgacacccaggcttgggatgcctctcattttgaggaatctactatagatgggcgagaaagattgcaaaattaagctcattgtaactcatgagagtaatttcattataatttcagtgtcttagttatggtcaaaaaaaaaaaaaaaaa

SEQ ID NO: 4866 - DNA, 1241 bp, Triticum aestivum
  Clone ID: TRIAE-23APR03-CLUSTER3_1
acgaaaacagtctgcctcgctctcgtcgtcggctgcgaactccgcaaccctcggccccagcccctctcccttcctgccgcctcccgcctccgcaccccgcactgctcagcctccgcgcccaccccttccagcttcctgcctcccgcccactccacactcgcctccgatcgagacccctctgctcacccaccagctccgcgccgaccgtctcctcctcctcagcgccgccctccctccgcttccgcttcggcttcccccgccgtggctgcgccgccgaccggagccggagggcgacgacgatggccgcggtggtctccccgggggatggcggcctggtccacgacctcgtgtcctcgggcgtcaccgcgggcatcgccctcggcctcctccgcttcttcgaggagctcgccaagcgcggcgtctgcgaccaagaaactgaacaggaaacttgtgcacataactattgggatggtattcttgctcttttggcctcttttcagctcgggaaggtatgctcctttctttgctgcacttgcaccagggattaatattataaggatgcttctattggggctaggaataatgaaaaatgaagctatggtcaaatcaatgagccgatctggagaccacagggagcttctcaagggaccactgtattatgccactactataactttggccacttctgtattgtggagaacatctccaattgctatcgcacttgtctgcaacttatgcgctggagatggtatagcagacgtagtggggagacgcctaggaaaagaaaagcttccatacaaccccaacaagtcatatgcaggaagcatagcaatggctgtggctggtttcttggcctcaattgggtacatgcattacttccacagtttcggtctcatggagaaaagctggtacatgaccttgggcttccttgtggtctccgtagccgcggcacttgtagagtcacaccccatcagcactgaactggatgacaatttaactgttcccttgacatcattcctagtcggtagcctcattctctgatgtttagcgccaaaggaagaatactgtgacgtttcttttcgccacgtgaacttccgacatgtaacaagattatcgacaagcatgcgatatttttgttgttgtaaatgctgctgaaccataggaacagttttctagtgtcaaaaaacgtcttacattatggggcggagggagtaactatttatccagccgtttacatactg

SEQ ID NO: 4867 - DNA, 1568 bp, Triticum aestivum
  Clone ID: TRIAE-23APR03-CLUSTER40020_1
aagccgttccaattcagcaggcgcgtgtcacgtgacagcaccatcgaccccagttgcccactcttccacacctacggccgcttagccaacgcgaggcgccgccggagccggcgatgcaggcggcggcctcttaccggggcgcggcaggccaccgccgcgccggccacccctcccggcgccctcccggtccctctcttcttctacccgtcagcgtcgctggcgtcggccgtttctccgacgcggcggttccgctccgagtcggctccctgccccttcctcgggctcgcggcggcggcgatttcgcgcggctggatgccagggacggggaggcgtggcagctgacgcgcgcgctcgggctaatccttcctggtcaccagaaaatggtgcatgctaacctgctgaaaactgctgttctttcaacaatgtcgatgctcataatgcctcttgaggcatcagcggaagacatgtcaaccaactagttcttttgccaatatgccgattttcattgctgtcgctctaataggagctgctgtgggtggattattagcacggcaaagaaaggacgaactgaagcgattgaataatcaacttcgtcagattaatactgcccttagaaggcaggcacagattgaatcgtttgcccccggccttacttatgcgcctgtagggagagcaggagaaattgaggtcattgttgatcccaggaagcagcagttggtggtaaatttgaaaaatgggaagaattatatgaggaatcaggaccttgataaggcagtaatggagttcaagacagctctggagcttgcagaaagcataggggatcgctttgaggagaagaaagctgcgcgaggattaggcgcatcactacaaaggttgggacagtacagagaagcaatgagctggtactacaaggttctggcgctatcaaaggagaccggcgaggattctggctgcaccgaggcctacggcgcgatagccgactgctgcgtcgatctcggcgacttggaaggagcagcgaagctgtatgacgagtacatatcaaggctgcagccccgtgattgagcgctcggaccgttgttggagatcaaacacatcatatgccagagcccgtccgttgccctgcttctgatgtcgcggttgcttgcttgctatctggcggaaaacgagccgattttgcttgtcttttaacttggttggagcacttggattgtccatgaggagcccctctctacttgtgtatatgaatttcgatggtgctatggcatgtgctggttcagagttcacaaaaaaaaaaaaaaaaccatccatctagttgaaaatttccttgactgtgcggcttcaggactgtaccgcagagtatcatatcctgacacgtgatacagcaacagtcctcgagcgtttgctctgctgacagtgagcagtagtgactagcgagtgatggtcgactaacagttggtagctggtgctgttgaatggttgttttattcagcgccatcgagacatttataagtgcaaatacagtataaagttggctatccgaacacgtgcaaaaaaaaaaaaaaaaaaaa

SEQ ID NO: 4868 - DNA, 1671 bp, Triticum aestivum
  Clone ID: TRIAE-23APR03-CLUSTER40071_1
ctcccccccaccgcgggcacccgccgcagatgggcgtcggccgcaccagccgcggcgggccctccaccgcgggccggccctacttcccgccgatctccgcgccgccggcctcctcctccccctccccgccctccccgccggcgccccccgtcgagacggcctccacgtccgtcaccaagaccgtcaacgggtcgcaccacttcaagatcgccggctactcgctcgccaaggggatcggggtcggcaagtacatcgcctccgagtccttcaccgtcggcggcttcgagtgggccatctacttctaccccgacggcaagagcgccgaggacggcgccgcctacgtctctctcttcatcgcgctcgccagcgagggcaccgacgtgcgcgcgctcttcgagctcacgctcgtcgaccagagcggcaagggccaggacaaggtgcacacccacttcgggaggtcgctcgagggcgggccttactggtctaaatacgacttgggtttccactttgatggctcagcatttgcttgcagctgctgaccggtatgcattggagagactaaagctgctctctgaactcaagctactgcgaagacgttgcaataaacacagttgcaaatactttatacaggataccagtgccacagtctgacatgtctcagcatattgggcatttgttgaccagtgggaagagaaccgacataacatttgaagttgatgaagagatgtttcctgctcacaaggtggttcttgcagcccgatcaccagtttttagggcacaactctttggtcccatgaaggataaaaacatgaagtgcataaagattgaagacatggaggctccagtgttcaaggccttgctccattttatgtactgggatgagttgcccaacatagaagagcttactggtttaaatacgacttgggtttccactttgatggctcagcatttgcttgcagctgctgaccggtatgcattggagagactaaagctgctttctgaactcaagctatgtgaagatgttgcgataaacacagttgcaaatactttggcgctggctgaacagcaccattgccaccagctaaaaactgtttgcttgaaattcgtggcctcgccggaaaatttgaaagctgtcatgcaaactgaaggattcgattatttgcagcaaagctgcccttctctcctgactgagcttctggagtatgttgcgaaggtaggagaccatgctgtgcccccctgcttatattccaatgaagtgctggatggtggcgatgccaatggaagacgcgtgaaaccaagactttaactgctccccagccgtgatgctagtctggagctcgttgttgctgatatatattcaactgactggcctacaattgcatttgctgcgaagctctgttactttgcagcctgtggtcataagtgcacacatacacaggtggcgcggcgaaggttggctgacctgaccggtacaaggtttgatcaagcagaaataaaagcgcaggatgtgttcacagttggtgtgtgctaggtcagccttgtcgattcctagtcgtctgcatgactacttgtattgaattgaaatgatgtaacccaatgagatctatttgatttgaatgcctatgtttaaagttctgaaaaaaaaaaaaaaaaaagcttatcgataccgtc

SEQ ID NO: 4869 - DNA, 1345 bp, Triticum aestivum
  unsure (1)..(1345): unsure at all n locations
  Clone ID: TRIAE-23APR03-CLUSTER40128_1
gaggaattcggcacgaggcccccttcttctttcttccgccccgagaaggcgagccgcctgtttcctccgccggtttgccctcctccgccctctccatataaaccgcccgtctcaaacctcaggcgcatcgcacacaccaaaacaaaagtgaaaaaccacatcctccctccctccgagacgccgcccggcccgaccaatggctcccaggaagttcttcgtcggcggcaactggaaatgcaacgggaccggcgacgacgtgaagaagatcgtcaccttcctcaacgaggccgaggtgccctccgaggacgccgtcgaggtggtggtgagcccgccgttcgtgttcctgcagcaggcaaaggggctgctgcggcccgacttcgccgtcgccgcgcagaactgctgggtgcgcaagggcggcgccttcaccggcgagatcagtgctgagatgctggtgaacctgcaggtgccttgggtcattttggggcactctgagaggagagcactgttgaatgaatcaaatgatttcgttgctgataaagtggcttacgcactcgcccaaggactcaaggtaattgcttgcattggtgaaactcttgaacagagagaagcagggacgacaatggaagttgtttctgctcagactaaagctattgcagagaaaacatcagactggacaaacgttgtgctggcatatgaaccagtgtgggccattggaaccggcaaggttgcttcccctgctcaagcacaggaggttcatgatggtctgaggaagtggctccacgctaatgttggtcctgcagttgctgaatctaccaggattatctatggaggctctgtaaatggggcaaactgcaaagagcttgcagctcaacctgatcttgacgggttccttgttggcggcgcttcactcaagcccgagtttgtggacatcatcaagtctgccaccgtgaagtcttcttctgcttagttgtttttgagatgcatgcagttgcttgtaggagtggattctgcttatctttataagactgtttgaccatcttgttctaattcgagtgcactgttatgtcgcattgaccatcttatctttagggtgatgcatgcttatgtttgcttgtttttgtctggaacgataatcggattacttatatgtaccaactatgcacaaattcgacaaaattcgcagaggcctgttgacaccaaaaagggaaacagttcctgtcctgaagtccgaagtgccgtacattgaacccgtaccggtgcctttaaaactctccccaacagccctgaaancccttccacngtanacaaggcnancattccttcaatnnnctatgaaggaccccct

SEQ ID NO: 4870 - DNA, 968 bp, Triticum aestivum
  Clone ID: TRIAE-23APR03-CLUSTER40294_1
accggaatttctagacgcgtccaaaatcctcccggcggctgggcttctcgccgtccgtcgccgccgggcgacgcgtgcacggccgctgtcgccgaggcccgcacgggcaccgaggctctcctctcctctccagacagggcttgccttcgcggctggacgatggatttggggacggagaatcgccttgcggcgttgctcctcgaggaggcccggaggctgcggatgcaggcggagaaggaaggggtgcacgcctatctgcagaaacctaacgtgacgctccgcccccactcccggttccgggcgttaatgagatgtggcgtgccagggagaaggaactggagctggaatcaaagatgaaaaccagaaccaatggtcgaattgactcgagatcccacaaacggaagaacgactcaagagaccagagccctgtctctaagacccagcgagacagaccgtatggcgcatcattttcgtcgagggattcacatagcagttcttattcggactgggaggatgggctaggcgatgatgaaatcgaagagtttcttcgatcaagggtgaagcgcggacgaggagccattggttctagaatggatgagcctggcccatacctcaagcctccatccggtgggcaagacaattcaataagtccggatgcacgagtgaaagaagaacggaagcgccaagtttatggcccagagaagccactatttttgagatctaagtcctcagacgaggagcctcccgcctcgccgctcttgctcagttctgaagcctcggacgagggcccctcccccgcgaggcacgagcacatcaggcggtccaaacatcaccatcgtgaacataaaagccgtaagtagggagtgatggctgatgattaatcggaacgtggacaaaaggttcaccctttgccactaatttgtgatctgttgaaactgttgtatcaaaacatgtctcttttaagtaaa

SEQ ID NO: 4871 - DNA, 1350 bp, Triticum aestivum
  unsure (1)..(1350): unsure at all n locations
  Clone ID: TRIAE-23APR03-CLUSTER40341_1
gcgactctcctggtcggtgcagatgagggtgcatggtccccatgcgtacgacccatcattcggcagccggcaggagcaagaacatgtccatgagcatgatgatgaacatggtcatgagcatctggaagatttctcacttttccccttcgactcttctctagctcccaccctcacctccaactgcgggaagcagccaatccagcaacccgtgccgccgcgccgcgccgcgcggatggcgggtggcagcggcgagggcgccgcaatgtcgccgccttcctcctccggcgttggcggcggcagcggtggcggaaagcgcgggagggatccggaggaggacgtgtacgtggacaacctccactcccacaagcggtacctcagcgagataatggcgtccagcctgaatgggctctctgttggagattcgcttgccgacaacatcatggagtcccctgcgaggtcggagagttcctcttgtatcagggacgaaataatctcccaatactcaccaatgtcagaagactcagatgactaccggtacttcgacacacaactaaaccccaacgggagtcaaggtgatgcaatggtcagcccatcaactagtccaatgtcatctcctcaccggttccagaaaccgcaagctggtttcctaccatcaagcccatatcctctccccagctgctccctctcatccgtggcttgctctcaccctcgacgtggctctgagaatgaaggccggttcccgtcttcacccaatgacatgtgccacggcgcggacctgaggcgaacagcgctactgaggtcggtgcaaatgagggtgcatggtccccatgcatacgacccgtcattcggcagccggcaggagcaagaacatgtccatgagcatgatgatgaacatggtcatgaacatctggaagatttgggagggccggaaagaccatcttgcaggaaatcaattgataatgaagctagtggctaccagggggctgaaaacagctatgggcggcaggagcatgatattgattacatccacggctgcacagctgatgatgtcttgagtggccccaagttcaagcaagaagatgataaccaaggtaattctgacgccagtatggataaaactagatagatactatcagagtgcaatcacaccatgcaattgttgtagtattaattatggcaatgggagatcaggttttttgctgttgtaattttctatgctgttagatttgttgcaatctggctgctttccgtaattttgaaattgtggcatttgagtacctgtctgctgtttgaacgaaaaagtcttgcggagagtgatttatagtatatccgtgcatgcaatgntttttc

SEQ ID NO: 4872 - DNA, 694 bp, Triticum aestivum
  Clone ID: TRIAE-23APR03-CLUSTER40432_1
cacccttaagccgccgtcttcctcctcgactctgctttcctcctccccacccctaagccgccgtcttccttctccacctccgaccgcaacacacgacgctttccccttccccacccctaagccgccgtcttccttctccacctcctaccgcaacacaggacgccacaacttccagcaacggcgcggttgctcttgaatcaggctgaaaaatgatgggttcacgaggtaccagtgttgtgctctcaagagctgctcggatgaggcaaaagctgcagtctgctttggaggccagtgcactagatattgaagatgtttcttaccaacatgctgggcatgcagctgtgaaggacaatgcaaatgagacgcattttaacatcaaggtaatttcacccaagtttgaagggcagaaccttgtgaagcgtcataggatggtgtacgatctcttgaccgatgagttgaactcgggtcttcatgctatctccattgttgcgaaaactccaacagagtcgggatcatgaatgtaattttttttgacttgattaatgtttgttccagaataagttgattgcagcaatagcatgtagccccgaatcggttggtaaaacaatgttatggcatgcatatttcttcatgataaagacatattgttgccttggttgaagcaaaaaaaaaaaaaaaaaagcttatcgatacc

SEQ ID NO: 4873 - DNA, 1341 bp, Triticum aestivum
  Clone ID: TRIAE-23APR03-CLUSTER4052_1
attctcttgttgccgccaaggcacctctggtcatacagaacgcctttggtggagaacatagcagccgtcatccacaggagtgcataaaggcgctcaggcgcgggctcgaggcgacgggaagcaggaagaggaagagggcgcggggctcgggcggttgcggggagaacgcagctcagctcgttaatgagcatcggcaaaacggctacgccgacaaaaacagcgtccgtcaccagggacaacgggtgcatcacgtcggccttggtgcccttgcggctcgagaagcgttacgccctcaaggccccgatcagaaacgacgaggccgcggagaagggcgcgtagccggcggccgaggcagccctcgcctcgtcggtcgcctgcagcgccgatctgagcgacgtgggcaggccggtatacatcggcgccgtccacgggaacctcaacctgatggcggcgtgcgtgcgagggaggacggagaagcctgaggtcgaggtgaacgggcgggccggccaagggaccctgcctgtggtgaactcgtgcgtgagggtgctggtggagaagggggcgctgcgcgctcccggaggaaaggggcatcagcctggtcaccgtgtgccccgccgtgacggtgggcgggggcgccggcggcgaccgacctcacctgcctcagcatcatcctctcccggctctccgcggatgatgcgtacgccggccgccctggagcacatcgagagggcgacgggctcgatccccattctgcacatcgacgacctctgccgagcggagatactcgtggccgaggaggaggccgcgtcggggcggtacatcgtctgcggcctcaaccccaccgccgtcgagattgcccgcttcttggctgccaactacccgcagtacaaggtcaatacagataggttcagagatctccctgagaagccgagagtctgcatttcgtcggcgaagctcgtcaaggaagggtttgagtacaagtacaagaacctggacggagatatatggcagcgtcgtcgagtatggaagggccttgggaatccttccctactaagaagtatgatcgatcttagaaccagacgatgcgcttggaagcaaaataagccttttagtctcctgaagtacacaaatgatgaaatgtgggtgttcagttcatatgaaaaatgtattataaaatgtactgtagtacttgtatggaaagtgatagttgtgtctgatgagagcatgctcagtcatggtgaaaaaagccatagtcgtgcacgtagataaaccgccattaaaatctcccccaacgcagaagaagccttcttgttttcctccaaaaaaaaaaaaaaaaaagct

SEQ ID NO: 4874 - DNA, 1761 bp, Triticum aestivum
  unsure (1)..(1761): unsure at all n locations
  Clone ID: TRIAE-23APR03-CLUSTER40668_1
acacctctctctgcctgcccatttcctctctccctctacccacacctctctctgcctgcccatttcctctctccctcttcctcccctcgccgtgggctccacccgtcagcctgccgcgtagtagagactagagagagagagcgacaagggagagggggctagcagctagcgagagaagagaaggaaagggcgccggaggaaggagatgggagaggagaggaaggcaggggagcaggcggcggaggcggcggcccgcgcggcggagcaggcgcgggagctgcaggacgccgccgccgcgctgctctcgcggacgtgggcggaggaggaggcgctgcgccgccgcgccgccgcgctcagggaggacctcgcccgcctgcgcaaggccgccgccaacgcacaaaccgaaaaggtccacgaggacttggatcgagcgtcatgcctcataagtgatggtgacattgcggcgattctccctagcaaggcgcatggcacttttttgaagctgttattgggaccagtgaatctccgcgcaaggaaggaggtacagctcaaggtgaaagaggaatacaatagctacagggataggactgccatagtgtttcttggttttccgatgattctgttgtttcttcggtcatggctatggaatggatgctttccagcattgccagttcagctatatcaggcctggctgttactcctctatacaactttagctttgcgagagaacatattgcgagttaatggaagtgatatccgtccttggtgggtatgccatcactattgtgccatgctgatggctctggtgagcctcacatgggggattaagggacaacctgattgtgcccgcaaacagagaggtgtcgagttatttctgtgctgggctgtgatgcaagggtttgccatgatgttgcagaacagatatcaacgtcaaagactatatactcgaattgctttggggaaggctaaaaggatggacgtcgtgtggggcgagactgctggtgttgaaggccaactattgctgctgtgtcccatcctttttctcttgcaggtctttgagggttatgttggatttttacttcttcggacagctcataaagggatcattcctgagtggcaggttgtggtgtgtgggatcctgcttattgcaatggcaattggcaactttgcaaacacagtggacacattgatggttaagtccagattcaaagcaaagatgaagaagtccaagagcaaacgagatcttgctgcatgcacgtcaccgactcgctcatcgctgacaaattcggcagctggagcttgaaatggagacgctctcatcatatgaacattgcccatattcaatcaggggctatcaaaattgtaaagtattagttttttggccaccagctccttgtgctgacagtctctgtcaaagctcatacccatgtaatcatcaaacgactcggttgctgatggtgtcaggttgagggtaactaagaataaactgttcatgtttgtttatttaaaaaaaaaaaaaaaaaaaaaaaaaaaaaaaaaaaaaaaaaaaaaaaaaaaaaaaaaaaaaaaaaaaaaaaaaaaaaaaaaaaaaaaaaaaaaaaaaaaaaaaaaataaaataaaaaaaaaaaaaaaaaatnaaaaagggggggccctttaaaagaaccaaattttagtaccggggcctggcaaagtaattttttttttttggggccccaaaaattaaatccgggggccggtgtttaaaaacggggggcggggaa

SEQ ID NO: 4875 - DNA, 1055 bp, Triticum aestivum
  unsure (1)..(1055): unsure at all n locations
  Clone ID: TRIAE-23APR03-CLUSTER40842_1
gcagagatcgttttttatacggaaagatcggtgggagctgatagcaacaggagcggcattataaaacccaccgcggtggcgagcgcaaaggcgcgcgcgcgcccctctcgatctccatggagcccaggtaggtcctctgctcctcgccgcccggctggtcgtctcgtctcccggattggaaggctgctgccggtgtggaacaaggtggcgacacgcgagatttcgccggcgagccgagtcggagacggtggccgcgagaggaggcgggctggcggggtgccttggtgctcgctgttcgagtgtgaggtatacgttggtgtcgctcgcctcgcggttcattcggtgcttggccttggggctctgcgactgccctggcgtcatgcctgagctctggcgagagcctcccgcgggtcaacggggagagggggccagcgtgccagggcctgagccggaacgcgacgcaatgcaatgcggcgaccgtctggatttccccctacctctctctctttgtgtgttgggattttgctgctgggcaagtactctgattcgatattttgctgctgctggcagggcagggcggggtacccactgctgcttcgtcggcctcggcggagtactagcatgatgacgcgaggactttgatgagatgtgaaccggcgcggcgtctggctggccggcatggagcgggattggtcgtcgcagagttcgagccagggcgcgccgttcgaggtcgaccgtgacgcagggtctgtatctgtatatgcttggacagagcctgcgtggtgcggttccgtccatgtcattcatgctcggaatcgttcaacaaggacggacgggaacacatcatgcttatctatctatctatccgtgccggccgtactattgtacattgcttgcttgcgttcgtctcctttctatgccgactgttttggcttttccaggctgccgctgcttgctgcattgtgaagttttggatcttgacctgctgcttaaataactcttcctggttnatttttttataatttattagtaataaattaaataaagagggctgc

SEQ ID NO: 4876 - DNA, 1390 bp, Triticum aestivum
  Clone ID: TRIAE-23APR03-CLUSTER40944_1
acctacgcccgccaccgccgcacgctacgctagccgcccgcgcgcccccgctaccgtcggcggggccgccgccgagcaggcaaaacctacagcccgaaccctaacgagctccgtccatggcggactcccccgcgcaacccgcaccagctgcggccgccgctgccgccgggaacccccacaagcgcaagaacaaggggaagggcaaccccaacaagaagaacaagaagctgaagggccccgacgacaccacccgccgccgccgcaagccgagcgccaagttcctcaagctgctcgagaagcgcgcccgcgactacaactccgacgacgacgacgacgctgcccaagtccgaccacgaaggtcacagccacgaccgccgccgaagcaacgtgatgctgctcccgatgttggcgacgacctcaaagaggccccctcgtccgaggaggaggcctccagctccggcggggagtcagatggagaaaaggcggtcaccatgttccaggaaggctgcagggctttccaggccgccttcaccaagatcatggagaagaagctcgccgacaacccattgggtccaattctgtcggcggacaagaaattggtcgccgccaagttggccgaggaggcggacgagcacaagtccaagggagaggcccgcaaggagaagcgccttgctgcacagaagggtcataaaatacctgagaatgctattgacaacaaagaaaagatgcttatcaaggttgcaacccaaggagttgtcaggttgttcaatgaggtgagcaagcgacagactaggaaaggtttgaatccatcaagaagtaaagatgtcaaatctttggcaaaacactctgtaccatctaacgaaggacaacaaggccagggatcttccaagttctcaaagaatattggcaaaggtgaagatgagccagggtgggcccctctacgtgacacatacatgcttggttccaaattgaaggactgggataaagcgcaggattctgatgtggctaaaccgagtgaggtccctttggacaacttttctgatgatgaataggaaacaaaatctatttgcacggttggctgaggggctacattttgaaggggggaatggagggtggttgatgcttttggatgcatccaagagcgcaagattttggagaggggaagaatggcgtctctgatgtggttttcgtttactaggtttcattgcatgcatccaagagcgcaagatttctacatgcaaaccttgtagttttagtttctcttcatccttgtatcacaacaaaattcttgcagaattgttgtcacagcttaatgagtataattgttttgcccagaattctttactagtgcattaagacaaacctcatatttttatgctgcaatgattgt

SEQ ID NO: 4877 - DNA, 1287 bp, Triticum aestivum
  Clone ID: TRIAE-23APR03-CLUSTER4095_5
tcgctctcggggttggcttctcctccccttccggttcgggttctggttcggttcgggttcggttcgagagagaggccgccgtagccaccgccgccctggccgtagccgccaccgccgccctggccgtagccgccgcccaccgcaccgcatcattcctcctcatccgtcgccaatccgcataaggcagagctccagcccgtttcattgcagaaccagactaaactcatcgcgtgccatggcgtcgatgcaggctcccgcgccggcgccggcggggtacccgacgcacggcggccaggccgcgcgcccgcagtccacggccgtcgccgtcacggcggccagcaacggcgccggcaacccctacgtgcaagtcaccccggccagcgcgtccccgtccacctgccagtccatcatgaaggcgctggggcggtacgggaagctgctggaggacggcacccgcaaggccgccgacaccaccggcaacatctggaaccaccgtgagtattactcatccctgcttcggatcatgatgcacgcgcactgacaccgcacgttttgccctggcgcagtccggacggcgccgaacatggcggacgcggcggtggcgcggctggcgcaggggaccaaggtgtacgcggagggcgggcacgagcgggtgttccaccaggtgttcggcggcgtgccgggggagcagctccgcaaggcctacgcctgctacctctccacctcctccggccccgtcatcggcacgctctacctctccaccgcccgcctcgccttctgcagcgactcgcccgtctcctaccacgccccctcccccacccagccgcccgagcccatgtactacaaggtggtgcttccgctgaaccaggtgaggacggtgagcccgtcggccagcatgtggaggccgtcggagcggtacatccaggtggccaccaccgacagccacgagttctggttcatgggcttcgtctcctacgacaaggcgctcaagcacctctccgacgccctgcagcgccgtccctgaccgatctcccgccgtctgcaccatcgccgctgctataagctccggttctccggcagtggcactgtcctgtcagtgactgatcagtgtttgtactcttctttcctgtaccgcaactcgccccatcagcagttcttgctctggaataattataagacaccaataaagctccgttgcctgccaaaaaaaaaaaaaaaaagctatcgatccgtcgacctcgaggggggcccgggtaccaattcccctatagtggtcgtattaccccg

SEQ ID NO: 4878 - DNA, 819 bp, Triticum aestivum
  Clone ID: TRIAE-23APR03-CLUSTER409822_1
ctagaacatcctaatcgaaaaaacacccgactgagtgagagagcgctagcgaccggataaggtttcgcctaccagctgccaacggccagcctcgacgccggcgggggctggtccgaccacgcgcctctccgcctcccgtcgcagcctctctcccccgagtttcccttctgcccaagctgcaccttgctagcaaggatactgcgcactccgatctataatatcagctctctatagcgaccgtcgctgtcgcccacctttcgccctgtaggcaagaacaagacggcatggcttgtgacgagtgccgcggtccgaaccataaacagaaagattgccccacactaccctgtcacaactgtgggggaactcttcacacccgaggcacttgctgttacacggatcctgtttaccgcgttggagaaagatgtcccagatgtggtggttttcaacacggggtacccggcaagcccccctgcccagtccaagaagctcatgctcgcccgcctatgtgcccgcggtgtcaagtgccacatcgtccaagagactgccctcatcgtggagccgaatattccgggtggacaagctccgacagatgcacgcaatgcaatgaaactggtcattttttccccgactgccctaacaaatactagtactagtttctctgtatcttgttattgtagctcgtaagtttgtttgagtatttttcaagactattagcttagtggtttgcccattgttgatgtatattattaagcctgaaagcacttcaattctcagtatcttttaatatatagtattatttatataaaaaaaaaaaaaaaa

SEQ ID NO: 4879 - DNA, 1335 bp, Triticum aestivum
  Clone ID: TRIAE-23APR03-CLUSTER4098_1
aaactcctttcccccctcccagttcccattcattcagagttgtaacaaaaacccatcagtatacgccgccgacgccgccgccgcccgagagcactccgtcctccctccacaaccgccgccgccatcgcaaaccctcgccccctccccaccaacccccgttctcggcccccacaccgcccccctccactcgagcaaggttcgctgatcgctggcccgtgccgggaagggccagcgggccgacgccccacgtcgccaagcagaacaagaagaggcagcgccgcggccgggccccgcaagaagaaccagcacagccgccgcttcgtcatcgccgtccgccggctgccgcccgaggcccggcgcccgcccctaacacctcgggaggagcgcgcccatgacaacgctcgcgccctggggaaagcgcttcactttgcctggtatttcccgcacgtgctgggtggtgggcgcggacacaatcctgacagggtgaaactatgctttggtctcggttatctggcgactcggcggatggagtgatatgaggaactagtacgattcgtagatttaggcagcagccgtcgtcggctttcggctaagtagcgcggccccaactcctccgagaagtaggcgcgccgcaccgccgagccaagaaaaaggctacttcctttgcgctagttttcctctcggtttgttgttacgcaagattataatgctggaagcgacattactgaagtgttaaagtatgcatgttttgcttagttgaagaatctgagatattgcggggccagacgcccaaggtggcgaagcaggacaagaagaagcagccgcgcggccgcgcccacaagcgcatccagtacaaccgccgcttcgtcaccgccgtcgtcggcttcggcaagaagcgcggccccaactcctccgagaagtagatctaggtcgtctcgcgccagccctcctttttttttcgtgtttcccagtagctgtgatccgtttattcagtatgcatgctaagaagaagacctgatctagtatctgtaattgactgtgatgttggtaatggaaatctcactgcattgtccagttaaaaaaaaaaaaaaaactatttatcctataatatcatgcttgtggcggtcgcgcgcggcaccaacgcgccatgaaaaaggctcttcctttgcgctagttttcctctcgtttgttgttacgcaagaaaatgatgatggaagagacttcacttacattcgtactcaagtgttaaagtatgcaatgttttgcttagttgaagaatctgagatattggtggtatgagtatgcatgcatgttatccttagttgaagcatctgc

SEQ ID NO: 4880 - DNA, 904 bp, Triticum aestivum
  Clone ID: TRIAE-23APR03-CLUSTER409946_1
agcgctgctcttgcataaaccatctcctcgcggctgccgccgccctcgctcctgcgcagcggccgcctcgcccccgcccccgcccccccctgccgccggtcgagagccgacacaatatcggagcatggcctccccgcggcggctgctcccgctgctgccgccccctcgtctggccctgacggttcttctcgccgctgcgcttccttcgaggagcttcggcctgccccgcgcggtcgtcggatcggcctcgaactcaggttctattgacggtgacttcggttgtaaggggtcaacatatgccgcgatactgatggggcaagcagctgttggtcttggcctgcgcagcaactttgtattggttcaagtatgatttggttgctcaagcagctacaagtgagcacgctgatgtaaatgttactggcctgcgtcgtattgaagatggttcagtgatctcaaatgaacacacgatcaaatggagaatgtgcactgataaagcacgagagtttttcatggaaggaaaactagatgaagccgagaagttattcaaggcagccttacaagaagctaaagaaggatttggactcagagatccacatgctgcatcagctttgaacaacttggcagagttttataggctaaggaaagagtatgagaaagctgagccgttatatctggaagcgattgaaatcttggagcaatcatttggacctgatgatatacgggttggagcagcttttcgtaatcttgggcaatactattatattcaacgcaggtttgatcaagctcagacatgttttgagcgtgctttgaagatagaaggacgtgttatggggcttggtaacccagactatgcaaatacaatgtaccttcttgccaaggttttaagccaacaaaaaaaaaaaaa

SEQ ID NO: 4881 - DNA, 861 bp, Triticum aestivum
  unsure (1)..(861): unsure at all n locations
  Clone ID: TRIAE-23APR03-CLUSTER409950_1
gtcgcgngggatgttaggccgccctcagtgctgtttgcgctttatatgacttcgcggttccattttgttttgtgggggaattgggaggccggaagtccaatttccgcgtcaggttaccctggtgtggggctatttcttgggccaaggggcctaaatttatgcctgctttaaaagggtgccaaaaggtgtgaactcgcaccaggggtggtggttcgctgctagaagttaatgggttcccctgagggtgcaaggaaattcggcgtattggccatttgtctagaacatctctagtgggaaaaaaccaattcggctgcatccctcccagagaaaaatccccaattccttcgtcctcctcctcgcgagacgcgcacagcagagccgagagggagaagatgtccgggcgcgtcaagggcggcaaggggctgggcaagggtggggcgaagcgccaccggaaggtgctgcgggacaacatccaggggatcaccaagccggcgatccggcggctggcgcggaggggcggcgtgaagcgcatctccgggctcatctatgaggagacccgcggcgtgctcaagatcttcctcgagaacgtcatccgcgacgccgtcacctacaccgagcacgcgcgccgcaagaccgtcacggccatggacgtcgtgtacgcgctcaagcgccagggccgcaccctgtacggcttcggcggttaggggatggctagcttggcttcagtgtgtctatcaggtcgccgctctgcgaatgctcgtgcttgtggtttaatttaaaatgcttgttatgagaaaatgctacctggattttttggcaaaaaaaaaaaaaaaatctctgttcaatatcgtcagtgcggtc

SEQ ID NO: 4882 - DNA, 1576 bp, Triticum aestivum
  Clone ID: TRIAE-23APR03-CLUSTER410380_1
ctctgtagctgaatcggcgtccccctcacccctaaccggcggcggcggcgctcatccctaaccggcggccaccggcgacgccccgacggccggttccccacctcagcccccgtccaccgtcttcaccccggcggccgtacatctctcccgccgcgcccgactgctgcaggtccgccaccgctgtgccgccgcgccgcagctccgcgtcgccgccgacggctcattccctccgcgcctcgcgcgcgtggccgccgtcgcccgtccccgttccgccccgccgcgcccctgccgcctccgccccggccatctagatccgccgcccctgtctggcctcggaccggatggacctctccgtcacgctggccctgaactcccccacggagcatggggagcagctgaggaggcgccagcactcattatcagagctgagttatgcaagagatgaagacgcaacaaaacttgagaccacgcgtgcacggctgttaaatgttctcaaaaggcatgaagatctgaaagagcgcctctcgcgggattctgataagctgatttttgagcgtctacagaaagagtttgaggctgcacgagttgcacaaaccgaagagatttcaatagatgatgagcagtggaatgatggcttgctggcaactatccgtgagaagaccaggtccatatagaggctgaaaggaaggcgatgatcaacctggcaaatgttccaacagactctcaatttcaatcaaggacgacttatagaatcagaaataaggttatctattgtttggatggtgccagaattggtatacagtatgagacattcttcgctggagagccttgtgaaatttatcattgtgttttggagagcaagtcattccttgaaaagatgactgtgactgaacacaccttacctttctttctgccgattcgagaagtagaaactgatcacctgtcatctaacgccatcaagtttattgatcatcttgaagaaattttgcagtcgtatattgacaggagagaacaggttcgtcttatcaaggagctctatggcaaccaaattggggaattgttctacagtcttccatataccttgatagagtttacattggaagattttgaatgcaaggttacagtgagtatccgatattcagatctaatcttgaccctgcctagtcaggcgagggtcttggcgtggccgcttcgctctgcaaagagaatatccgcagcagaccgtcgtgctcagcctgtaccatctcgactctcctatgccgagagcgcgttgaagaccttgagtttgccagaagcatacgcggagattgtcctggagctgccccgtgctctgaagcagatgttctactctcaggaaagcgactgaagcgaagcgtgcgtgtagatagtttatttaaccttacggatgtgcatgtgggtaccgaatatttgacagcagagtagtagtttgattcttcactaggtgcctgtcattcacgctgcctaatgatcgtctgccctgaaaatttgggctatgttgccttgcaaattttcaaataaaaaaaaaaaaaaaaaagttatcgataccgccgaactc

SEQ ID NO: 4883 - DNA, 2184 bp, Triticum aestivum
  Clone ID: TRIAE-23APR03-CLUSTER4104_1
aaaaccaacacctaccgtattacaatctctcccctcgtttccccgtcgcacgcgacctcagaggcgatgcggcggcgtgagcgtttgtgccgccgccccctccgatccccctccgttgccggccacagacaatatcacgccgccgcctgatttcttatctacctcgccccccagccccccacgcacacaccctccacgcctcgtccgcgaccccacggcgagggcggcaggaggtcacgtcggcttcaacacgacgccctccggaagcggtccaccagccggccccaacagcgaactcccatccgcgccggctccacctctcccgagcaaggtttttttgtaagaaaagaagaaaatcatagatggatatcatgcagactagatgattcttcacatcatggcaattgtagaaaacagcccttatacaactccctatgatagacgtgtggcaccagagccatatgcgggatgaacggaagagtcgcacgagaaataatgcaagaaccaccgccaaaaccgagaaatgcaatgcctgtagcaatggatgctacaatgcgtcgccatgggcggtgctggcagcagcaatgagggaccggctgaatcggggtcccggtatggatgcagaggaaaagattgctgatctgtctgagagggagctgaagcatggagtggaattggttgccgaggatgacgaaaaacacgacagaaggcagaccgtcccccgtcccccgcacagagaggatcatcagaaagccgctcacacgacagagggcacggaagagggcgagccgtctaaggacagtcaagagtgccattcaaagcggaaggagcacaggagccatgatcacagcagcgagagggaccttaagaggttgaggccataaaaggaagtatcatcaccacctgggtagaatgatcccgcggtggcattgtgctaatgcaactaccagggggaaaacctatacttgtttctcttgttgcaggagttgctatgctcagtcctttgctggccatgtcgggagtttttaaccgccattcgagaatatggtgcgcaatcttccttgctgccaagttccttaaagtcaagcttccagcagatggcgaaaaggtctggtggcaagagtttgatgtaaccccatggcagttggaagaggttagcaaccaaatgatggagctctatggaccaccaccatctcaagggaataatactaaaagcagctctgcaagtttagctgatcaacatgctgcggaaaaagctcctggagtgccgaggagcctcctgcgcataaaactcatccagcatccagacaatcgagcttgccaggccgtcacgggcatgaccaccatcaccctgaaaggcaaaactcaaaccagaggatagtccagagcgaaacaagggatggcactgccaacagcaatgaaggcccaaatatgtcctcatcaatgatggatgcgatgaaaaagatagataaggataaggtgaaagctgcgctggagaaacggaggaagtcgaaaggcgatgctggtaggaaagtggacgtcatggatgatgatgacctgattgagagggagctggaacatggcgtggagttggctgccgaggacgagaaaaaacacgacagaaggcagagctggccccaccccgcgcaccgggaggatcaccagaacacggctcgcaaggcggagaacaccgaagagggcgagctgtccctggatggccaggaataccgctctcctggccccgacaaccggaagaggaaggacgcgcacgagcacaggagcaatgaccgcagcgccgagagagacatcaagaggccgaggccatgagatgaagtattcattgtggggggtgatcagcggtgacggactgagaactggtgttttgagcgccagtgcgtgatacctagtttttgcatcgcgggaacatacaggtgcttgtttgcctatgctgggagatttgaaatgtactgtactgtaacttgaaaagatgaggagtatgtacatgttcaggttatggaacattcggcagccgtttggtgtcgaggaacgataggaaagaggctgcatggcctgcacccgtaggctatataaatagctttttaaatacatggattccaagcaaatttggattgggacatttatatggatttgaaacaaatttgattggcacaaaaaaaaaaaaaa

SEQ ID NO: 4884 - DNA, 1867 bp, Triticum aestivum
  Clone ID: TRIAE-23APR03-CLUSTER410_104
gttttttgctttcatcaagagactggttggatttaaatacaaataccatcatcctattagcaaacgtaagaataggagggaaagtacagatccggtactatgccaaagctctactgtgcagtgcatatatctcaatacatgccgagccgtgtcctctctcccgacaaaactgaataccgtgagagcacctaacaaagcaaactaaacgaggttttgttgcagccttcggtttcccatcttattcagcagccctgcagagaagcagatgaagttggagaccgttccatgcccggttcacgtcaatggctgctggtgtgtttcaagggtttagtggctcatcttctgctgtcatctctgcggtagttgatctgtgaaggtcggacacggacatcagccgcctctgcaaaattgctgcgatgaataggaaaatggagcacatgccaaacatgacagcgattgggaaggcattcacattgtaaagcaccacacatacaaacaggttaagtggtatgcggaagaagttcatgatagtgcttctcgcctcctcggggatatattgagatctcatcttcatgattgagggccagaatatgccaacacatgactcgaatatgcagaaaccaagaagctgtacacagcctccgaaggagatgcttccacctttctctgaggggggtactatgaaattggtaacaacagggaggaaaagagtgaaagctgatattgagaacacaatctgcatataaccttcgaccttcatcttccgagctaatagacgagatgcaattgagctacccaacatcgaggagagcatgaatgtggcaaatatgaagccatgaggaatgtcttcttcatttgggctcaaagcaggagtccacaagaaaacaaaagtgtacattgaaccctcaaacaatgactgtatggctccaagcaatgcaatcttttcatcggaagcaatggctttagctgcaaccttgaactgggccatcaagtcctttccttcagatgcatctccatagttctcaccccacgacgataagatgattgccatgcctattgctaggaagcaagcagtagcatcaaatggagcgacagggccaaaacccaagttatcagccagtagatttgcaaatagccctgcgacaatggcaactaggccattcccaagaaatatagccttggagaatgttattgacagccactgcggatcaaaacctctcttgttgtgctccgcgacgagccacgactcgaacgccgagaagagcagcgatgttgcaatgcctccaagcacacggccaatcatcagaatcctgtactgcggggagtgcttcgtgatgcagctgaggatgtaggtgatacagtaggtgatgcacgccctcttccttccctgcttgtcggcgagcgacccgacgatggtgccgaagagcatggaggagccgaagccggcgatgaagaggcggccgatgtcgcccttgtcgaacccgtactggctgtagaggtagtacacgtagggcccctgcagccagtccccagacatcatgagggagtagacgaggacgtagttgttcttgaaggagttgaaggccgtcggggtggcgacgcggtccttgccggacttgccgagctccagcgccgccacgacggcggcgaggccgccgaagacgaggtagtagaacacctccatggcggggccgaggtgcggaggggatcgcgattcgggggctggcgaatgcgattgggtcggtttgttataggggaatggattttatacgcgcagcggcgggcgtgtcatctcattctcatctgcgtcgaatttcggagcagtgggcactgagggtgcgcgtgccagacgttttggttgggtcgc

SEQ ID NO: 4885 - DNA, 970 bp, Triticum aestivum
  Clone ID: TRIAE-23APR03-CLUSTER410_65
ttccatttgtttatccttttgtccttttaatcaagaacaatgtttagagcttacatggttgtcgaaatttagttatgtaaaagaggaatattgatatcatgcaatgatcagtgcagattaggatagttatagagttcttcctcagttttcattgagcaaagattgaatctgtatgatttgttctaataccaagtaaatcttggtctgcattgtgttagttttcccactgagtttttttggctattttcgtttaaattggtagttgatgtgaaaaagtgtgttgacatgcatgtaaccaaatcatgtattaatgtgaggtactacatatacttgcctatctctttccagaagaacagccctcttgatccaactaggaacatcaaaaccaaatgggatatcattgagtggacttcagatggccatgctgccctctagctatagtcatggaaaagatggtgttcggagctatatcttggaaaatatttccttgtcattccattaaatttcggagttcttgctagaagtttagatatggaggagctggacatggatggcgagaasgcggccagaccagagttcgcctacccctactgctatgaggaccatgaggttgcctccttgtgcgcgcatgtagaagaggagcacccattggagtggagatatagtttgcacaatgttytggtccagcaaagtattttagatgtgcaaaagagtagtgtcttggggtagaaaattaatattgatcttgaaacctcgagatagaaaaaagagcttttcacatttgttgctgttgagtcctgactagcaattatataaccctcaggcctcagtagcaattatgttaccttcttatttgttctcaggttacttgccttcttctttcaacccatctctctaagaattatagtgcaggttttgtagggcaggttaaagaacccaatacaatgctctttgagtcgagtttttttgt

SEQ ID NO: 4886 - DNA, 1288 bp, Triticum aestivum
  Clone ID: TRIAE-23APR03-CLUSTER410_70
agcgctctttctccttcccctccatccccacaagctgccacacccctccctctctccctcatcctctcctcacctgcagccgccggccttgtctctccactcgcctcctcctctcctctaccacgtcgtcgttgatccaccgccgaccttctcctctgcttacctcctcctgtcctcttccatgttgccgtcgatccagatcggacgtatcgtcgtgggggagcagcgccggcagggtcatcgcggtgcaggtgtggggtaggatgcaacgacaaggggaaggaggaggccggtgaggaagtcaagcaacaacgggtgggggtaaggggcagggtgaggcctcgcgcacctgccggcggccggcgggtcgacttgtcgcgccaccgcgtcgtcgtctcctctgcatcatgaggtgccacctctgcctccaccccccgccgggcaaggagctcgaggtgaacaggcggtgtgggaaggcgagaggaagcaggagctcatgtctcctccaatggatgtctcgtgcatctggagtacaaggagaacaacacgtgcctgttggaggtggctcgagcgatgcaggccagcggcgaacttgatctgacatagaagaccacgttcctcagggatcccagaatctattagacaatatggtagtccaatgcttttttgaagtatatattggcactatgctgaaaaaggacatggcaggaagtgaagacagccagtcatcgcgccatattcccgtttgctatcaaactctcaaaaaggaaaaacaatgttactctgttttttggagaaccttcctgtagagtaccttgacagagacatatgcgatcgaggatatattcgatggattttcacgcaaaactgggaggatattttttgcagatagtttggtgttctcatggttattttgtagtgattttccttccgttcattacttggtaaccatctaccgcagctcagctattgtccagttgctgtccttatggtcaagatccatgaataggagcaaggcatcacaccagctctgagaagaaaaggatatgaagacaaagatagaccagtgttctgctccgaagcaaaaacattttgcgtgtaataatgaactgtaatttaccacaatctctctaaaataggcctacctattaccagtccgttgcttgcttttgtattaggatacattcatgttgtttagttatggtttgtatgaatgaaattacctttttaatcgagcttcaaaattcttatgtgcagtgaaattgtatctaaaaaaaaaaaaaaaaaa

SEQ ID NO: 4887 - DNA, 1450 bp, Triticum aestivum
  Clone ID: TRIAE-23APR03-CLUSTER410_86
cccaattcccttcccccgtggaaatagacttcttcccctctctcgatctcgcaggcctccctcgatgtccagcagccgcggcgacgcgctccttgactcggcgccgctgctcggcggcggcgccagcggcggcgccggcggggggcagcgtagaggcaacgggctccgccggccgtcgctgcgcggcgccgcgcgcctgctgcgccgcagcgggcggcgtgcgatgcgtgagccgtcgatgctcgtgcgggaggcggcggccgagcacctcgaggagcggcaggcggactgggcctactcccgccccgtcgtggcgctcgatctcctctggaacatctccttcatcaccgtcgccgccgtcgtgctcgtgctcagccgcaacgagaaatcccccatgccgctccggacctgggtcgccggctacgccctgcagtgcgtcgtccacatggtctgcgtcgccgtcgagtaccggatgcgccgaagccagcgcggcggggccccggcgcccgccgacgaggagaggggcagcgacggctcgtcctcgtctagcgacgaggatgccagcgagcaccatcttcgtggtcgcgacaccgattacgtcagtttggcaaagcatctggagtctgcaaatacaatgttctccttcatatggtggataattggattttactggatatctgccgggggtgaagaggttatccgtgatgcacctcaactatactggctttgcatagtcttcctggcgtttgatgtgttctttgttgttttctgtgtcgctctggcttgcattattggtattgccgtttgttgctgcctcccttgcattatagcaattctgtatgctgtctctgatcaggaaggagcatctgaagatgatattcgccaaattccgaaatataaattccgtagatggatgaacctgaaaaggattctgctgatgccactgagtcttctggtggaataatgatagagtgtggcaccaaccaacctatagagaaagcacttgcagctgaagatgcagagtgctgcatttgcatttcagcatacgatgatggtgcagagctgcgtgaactcccttgtggccaccatttccactgtgcctgcattgacaagtggctgcacatcaacgcaacatgccccctgtgcaagttcagtatccggaagggcggcagcagcagcggtagcgaggaagtataaatgtatcccacttgagaatgccatcggtccgacttcacgcctgagtcctcgctaatgtggtgtaaatttttgtatcccaaatgtgctgatagtgtcaatcatgtcatgtcttaaaggtgactaaagtgctgtccatattacagaattagttctggggtgtatctctgcagttcggactatatgcttagttacccagtgggctgtataattatgtttgagcgattcatactatatccccatacctgtttgtgtc

SEQ ID NO: 4888 - DNA, 1517 bp, Triticum aestivum
  Clone ID: TRIAE-23APR03-CLUSTER410_91
attccccatcatagaaccgggggaggaaaagggagaaaagcgagaaaggactcttccagtctccaacccatcccaattcccttcccccgtggaaatagacttcttcccctctctcgatctcgcaggcctccctcgatgtccagcagccgcggcgacgcgctccttgactcggcgccgctgctcggcggcggcgccggcagcggcggccagcgccggggcaacgcgctccgccggccgtcgctgcgcggcaccgcgcgcctgctgcgccgcagcgggcggcgggcgatgcgggagccgtcgatgctcgtgcgggaggcggcggccgagcacctcgaggagcggcaggcggactgggcctactcccgccccgtcgtggcgctcgatctcctctggaacatctcgttcatcaccgtcgccgccgtcgtgctcgtgctcagccgcaacgagaaatcccccatgccgctccggacctgggtcgccggctacgccctgcagtgcatcgtccacatggtctgcgtcgccgtcgagtaccggatgcgccgaagccagcgcggcggggccccagcacccgccgacgaggagaggggcagcgacggctcgtcctcgtctagcgacggggatgccagcgagcaccatcttcgtggtcgcgacacagattacgtcagtttggcaaagcatctggagtctgcgaatacaatgttctccttcatatggtggataattggattttactggatatctgctgggggtgaagaggttatccgtgatgcacctcaactatactggctttgcatagtcttcctggcgtttgatgtgttctttgttgttttctgtgtcgctctggcttgcattattggtattgccgtttgttgctgcctcccttgcattatagcaattctgtatgctgtctctgatcaggaaggagcatctgaagatgacattcgccaaattccgaaatacaaattccgtaggatggatgaacctgaaaaggattccgctgatgccactgagtcttctggtggaataatgatagagtgtggcacgaaccaaccaatagagaaagcacttgcagctgaagatgcagagtgctgcatttgcatttcagcctacgacgatggtgcagaactacgggaactcccttgtggccaccatttccactgtgcctgcattgacaagtggctgcacatcaatgcaacatgccccctgtgcaagttcagtatccggaagggcggcagcagcagcggaagcgaggaagtataaatgtatcccacttgagaatgccatcggttccgacttcacgcctgagtcctcgctaatgtggtgtaaatttttgtatcccaaatgtgctgatagtgtcaaccatgtcatgtcttaaaggtgactaaagtgatgtccatattacagaattagttctgaggtgtatctctgcagttcggactatatgcttagttacccagtgggctgtataattatgtttgagcgattcatactatatccccgtaaaaaaaaaaaaaaaa

SEQ ID NO: 4889 - DNA, 1154 bp, Triticum aestivum
  Clone ID: TRIAE-23APR03-CLUSTER411_3
ggcacgaggacgactgaaaccctacccggagccccgccgccgtcgcctctccctctcgctgtttagagccgtcgcgccgccagcagaagagggggtgaagaaggccagcgtcaccatggcggacgaggagcagatggagcggaaggaggaggcaaccgagattgcaccttttgatccaaccaagaaaaagaagaagaagaaggtcgtcatccaagatcctgctgatgaggttgataagctggcagagaagacggagggcttgtcagtcactgagtctggtgaggcaagcttcgtgggattgaaaaagaaaaagaagaaacttgtggaacttgatccatcacttgttgaggctggagatggtgaagacactcttgatgatcaagttggagaggatgaacaaggagaagggattgtgctgggtggagcaacccaatacccatgggaaggaactgatagagattacaaatatgatgagctgcttggcagagtcttcaatatcctgcgtgagaataatccagatcttgctggtgatagacgaagaacagttatgcggcctcctcaagttcttagggaaggcacaaagaagacagtttttgtgaacttcatggacttgtgcaaaacaatgcataggcaacctgaacatgtgatgatgtttttacttgctgagatgggaacaagtggatcccttgatgggcaacaaaggttggttatcaaaggaagatttgccccgaagaactttgaagctatactcaggagatatatcaatgaatatgtcatatgtaatggatgcaagagcccagataccatcctttccaaggagaatcggttgttcttccttcgctgtgaacaatgtggttcgtcaaggtcagttgctcctatcaaggctggattcgtggcgcaagttgggcgtcggaaggctggaacttaaaagttgggtagtgcggggatgctctatcaacgtaatccagcaatttgccgatttacaacaatctttattgtcctgttttcactgtgcctagaccgctttgtggattttgttacttcctgtactatgaatgctgctggtgtgaatttctatttatctcagaggatccaagtttgcctttttttaaaaaaaaaaaaaaaaaaaaaaaaaaaaaaaaaaaaaaaaaaaa

SEQ ID NO: 4890 - DNA, 1794 bp, Triticum aestivum
  Clone ID: TRIAE-23APR03-CLUSTER41231_1
tgtttttttttttccttgctttctttccttcttccttgtcgcagctcgtgacaatcaaggactgttacattactttctttgggaccaactccaatttcgtgtaagacagaattatcattcgaagccacagctcacaaatcacaaaaaaagaaacaaaaaaaaatttgtggcatttcgactgaagccgctatagcataagcagtctccatgccatgggtcacaagaaaatggttgctgaacctacttgtgcattccttccttgcgctctgagcttttcatggtacaacatagaggacctctaatttgacggtgttttgcaggccgagcagagctacttcttgatcttcttatcattccggcccctcttccgctgctcccgcctctcctccgagtagttcttcttcaccagcatcttgtgcatcgacactctgagggcggcgagcaccgcggccagcacctcctcctgctttgaggcgtcaaggcttccctgcagcgccaacagaagcttctcgccatgtggtacttcgctgtcctccaggaccgcagggtcgtggtcagccgaggctgatagatctttttgggaccgggggatgattctgacacgggttaataactgggaggcggcctggttaggcatgtttgatgcgcccatgacagtccacagaagatctgcggatgagctgtaggctaagctagtgggaatgtagctcttttccgttgtaatcaccttcagaaaagacaacttcttcgctacgagatcacatgctaagagcattatgccattcaaactttgaatagctacagcaaccagtgagtcatcatttgtcacacacaagtctgcaatggctagattgctatcttcagtttcatctggctgttctcccaccttgtctttgacttcatatgtatcaaggaggcagccatttatgtagtcccataaccgaacagttgaatcaccgcctccagataatagaaagcttgatcctcctgaaaggcttgtgaaggcaatggaagaaacgaattctgtatgtccaaggcaaaagctctgtatttggggagccccttttacaggatcctttgggaatgatgtaactcgaattttgaagtcccgatcagcagtggcaatgaaccgtccatctggtgagaatttcatgctagtaataatactgcagtagtgaccataaattgagacaggtttgttatcatcagatgcctgcccttcgccatgtccccccacagtaactaaccaaatgacaccaaatttatctgcaaatgttacatacaggccatctttgctaatagcaactgcgctaaccctcttttcagaagttatagtctggatgcagcgccatgagtcagtcttccagatcttcacaagcttatcatcaccggcagatgcgaacaaggcaccatcagcactaaacgaaattgctctaatagcatccgaatgagaacaaccaccagaatcatctgacaatgaaactgcacagccgcccttgagatcgaacacgcggagctcgggcccgacggcgacggcgacggagtggccgagcgggtgggcggcgacgagcgccggcgcgaactcgccggcgccgctcacctccgcctcctcgaccgcggcgtcctccatggcggcaagcagcggcgagcgtggatttgctgtcgggttcgaatcgagcgcgaggcgcgggaggcgggggagggagctcgggagtggggaaattgctagggtttatggccggctcttcgtgggacccggtggccagtgtagttctatttttctctttctgaggg

SEQ ID NO: 4891 - DNA, 2403 bp, Triticum aestivum
  unsure (1)..(2403): unsure at all n locations
  Clone ID: TRIAE-23APR03-CLUSTER412802_1
ggtgccctctggaggccccctcccagccgggggccgagcccggcttcctaattacagcatacccgacgaccgaggcccgggcctgcaatgaagtctttatcaagggctagcagatccgtgcggccgggtctgcgcccggggccctggggctccaaagcggcccttccttcctagagctccttttgcgacgcccccgggggggtggccaccgcgagatgcccggccgggtcgccttccccctcgccccggcctcacccccacccgcccacagatttcccgctccccttggccggagggccagggaggccggtgcgcgagttcccgtccgccacccccggccctgcccgacgcaccagtatacgaagagccggcgccgcttcaaaccggagacccccctcccggatccaagcagctgccctctccgaccttgacggcagttgctcgcagccgcctcgccagccgggacggggcccccccccgaggtggccggtatcgataagcttttttttttttttttttacatttaacaagtttattctgaggagaccttcataattacatcatacacaaagacatatatccggcctgaagtgaagtctttatgaaaaactaacaaatacttgcctcgagttctaaatcctaatcatgaggttcgaatcggcccttgcttgcaagatcttcttatatgatgttgcggcatgtgttgtcgcaagggtatgggcaatcgatcgccttcacttcggcccggccaaagtaccaatcgccgacagatttcgcgatcctcttgttctgaatggcaggggtgccattccaggtggccggcagttcggactggcagtgggcgaaacacgagtttatgaagagcccgttgctcttggaaccggagaagcctctcacggatgccaccatctgatctctgaaaccttgcaggaagtttatctgagacgcgttgcaggccgagcggttgaacttgcaggctcgccaggcgcggctggggtcggctttgcttggggccaggctttcctcaatctgccagacgtcgtaggctgcgttgagcaagaagatgggggtcttgatgctgtcgattatattctgagggaagaagcacgaggtggcgtcgaggtgatcggtgcaggtgggcggaaggtttggagccactccctgcatggctacaatgtcgccgtagtaagatctcaagctgcggcccccggaaacatcaacggcgtcgaggaagaggcctgcgtcggcgaggcacttgacggtggtgcttcggccggcgaagaaggcgccgaactggtcgcagtggagtatcgccgccagcccaccggcggagcagcccgtgagaagcgcccggtcggccgacgccatcccgatggagaggaggtgctggatggcttcctcccaaatccgctgcccccggaagtagagcccggtacccttgtcgaaggtgtcgccggcgaaggaggcgctgtcgcagtagcggatcttcacccggttccagttgtagaaatcaggattctcggcggggctggcgctcatgatgccggtgaaggcgatctgccgctccatgaagttggaggagccatggtgagtccttgtccggaacctgcacgtcctcgcgttgttgcaccacccgcctccctcgaggttgacgatccagctcttgctccctgccccggagcccgggtccaggtcgtaagcggccggcgtcccatccatacacacggcgcccttctcgacggaggcgttgaggaaggtgatgggcaccatcatgtccgcgaccgccgccgcggaacgtcgatgcgtcctcctcctcctgccaccgccgttcgccgcctgctcgtccgccgcctccacgcagctgccggcgatgaggaggagagcaagagcgagaagcgcccacggccggacggcaccggccctcgtcttcaccatcgtttcaatggatcgagtagtggaagcaagatcgagccgatcgataggaaaatccctggacgacgtatatttaacgagcgcatagcaagggagtgacgcacctatatagctacacataaacaaggagttaatcaagcgagatatatcctaatcaatgaggaagtaaaatgcttccaaatacgggtgtgcagtagcgtactactccatataggagtatccacattgcatagacaaatcaaccatgttaattacatgcatgcgttccatatttgccagcgagctatattttggaggcaatttggcagctaactaataagcagcaggagggaatcaaacaggaattaagttaggcatgccattgccaccctggctcatagatgaangctgtggcaataaagtctagctcgccgaatgnncgccacccctcttttttccggggcggggggaaaagagggccnnnnnnnaaaa

SEQ ID NO: 4892 - DNA, 1194 bp, Triticum aestivum
  Clone ID: TRIAE-23APR03-CLUSTER413810_1
tctccggttttttttttttttttggtgacagtttaggatataatttatctgtaataatataatcactgaaaagcaaaataaaaccaaatgatgaaatatgtatatgactaaacgcaaacgcaccatcagatggttatccttagaagcaataattaagtaacattggaatatatcaagaagatgcagatggaagtttttttcacaatgtcaacagaaactctcatcaaacaaagtgtacaaagcatcttcgaagctccttaaaatggaaatgtcttagagagtgggagctctctcagcagtaccagcgatgacggtaagcaaattgtttccgaaaggatcacttagatgctttgaaaggttctcaacaggaccttctccggtaacataagcttggatgaagaaagcgaacatggaaaacatggccaatctcccgttcttgatctctttaaccttgagaagagctccttgttcagggtctttagcaagtcccaaagggtcaaatgggcctcctgggtgaagcttgtcttcgaagtccaagccgttggtgattcggtagtactcagctccaccaaggagaacaacctcagcaactacagcgagaacaaggttgattgggatgttcttgccaaagtagctcaatgtgtttccatcaagaagcagagcaccagtcttaaaccagacagcttcagggccacagttagcgccatatttgtttaaggcttcagggatgatgcaaccagctgctcccaacatagcccatctcgcgtggataagttcaaaggcttggtatttggcgaagttctcaggcttcttgccaagtccaaatgggtcataaccatagtctccagcaacttcaccgttcaagtactctgggatttctgatctgtccaaaagaccatccggcaagaagattctcctgtcaggaccataccacttggcgagctcgtcgttggcagcagagacggtcttggccttgggaggaggagctggcttcttcttggagaacagagcaactgtcttgaacgtggcgggacttgacgccaatggagcagacggtcttgacactgccctgaagttaaggggcttaccaagcatttccgacacacccaaagacgccatctttttagcccaagcttttttttttctttttactctgcttcaagaccaagaaaggttaagtttttcgattagaag

SEQ ID NO: 4893 - DNA, 1840 bp, Triticum aestivum
  Clone ID: TRIAE-23APR03-CLUSTER413820_1
ttttttttttttttttattgtagaaacatgtcacatacatagaacggcgaatcaaaacagtacaggaaggcattgctaataagttcaaaatggaacatcaaacagtactaggggtaaaaggagcagacatcaaactgctttagttaaaaggccaccaaaggccaccacggaggcgcaggacaagatgaagagtggattctttttggatgttataatctgccaaggtacgcccatcctccagttgcttccctgcaaagataagcctctgctgatctggaggaattccctccttgtcctggatcttggacttcacattatcaatggtgtcagagctctccacctcaagagtgatggtctttccagttaatgtcttgacaaaaatctgtatgccaccacgtaggcggaggaccaagtgaagagtagactccttctagatattgtaatccgccaacgtacgcccgtcctcgagctgctttccggcaaagatgagcctctgctggtcaggcgggataccttccttatcctggatcttggcctccacattatcaattgtgtcagagctctcaacctcaagtgtaatggtcttcccggttagcgttttgacaaagatctgcatcccaccacggaggcggaggaccaggtgaagggtagactccttctgaatattgtaatctgccaaagtgcgctcatcctcgagctgctttccagcaaagatgagcctctgctgtcaggcgggataccttctttatcctggatcttagccttcacattatcaatggtgtcggagctctcaacgtcaagagtgatggtctttccggttagtgtcttgacaaatatctgcatgccaccacggagacggaggactaggtgaagagtagactccttctgaatgttgtaatcagccaatgtacgcccatcctcaagctgcttgccagcgaagatgagcctctgttgatctggtgggataccctccttgtcctggatctttgccttgacattgtcgatggtgtccgaactctcaacttctagagttatggtcttcccggtaagagttttcacaaagatctgcatcccacctctcaggcggagaacaaggtggagggtagactccttttggggcttctttgattcaaaggattctcgaaggaattttggaggattctaatccttaggaatttttcctatcttggttgtttgattcgtaggattgtaaaccataggaatttttccatatgattcatttgcactagatttcataggaaacatcccatccactcaaacctctttgaaagaatcctgggttttttctatgcacaatcaaacactcgtaccatcctgtaggattccagacgacattccactctaatcccatgttctttctattcctgcgttttggaaatcctacgaatcaaagaggcccttggatgttgtaatcggccaatgtccggccatcctctagctgcttgccagcaaatatgagcctctgttggtccggaggaatgccctccttgtcctgaatcttggctttaacattgtcaatggtatctgaactctcgacctcaagagtgatagtcttgcctgtgagggtcttgacaaagatctgcatcttggcggggcgacgattgctgtcgaagacggtgcggcgaaacgacgacgagcggattgggggagaagggttgtggcgacggtgatctgcttcaagccttttttttttttttctaaaaaaaagttcttaaaaggggtccccggaatatttcccccccccggggggtcctattttttaaaaagcccccccccccgcggggggccccccttttgtttcccctttaagggggggttt

SEQ ID NO: 4894 - DNA, 3303 bp, Triticum aestivum
  Clone ID: TRIAE-23APR03-CLUSTER413830_1
gccccacccgtggccccgcccgaacccggcctactctccccggcgcaccgcagcgctcgctaccctgccagtcgctccccgctgccaggcacggattcaacatgctaccacttgatggctaagaaacatcaaacctgaagtctctggtgtacgcacaccacaaccgtgccctcaccaaatccactactactgtttgcatctctctctatacatgtcctgcacattcttgcttccttggctaccaaaaaactcgccatcgagctctgcttccattcttcagactatcagcgcagctgtttctggacgcggcgttgctcgctagtttgcttcacgaccgcggctgacgggcatggagaggaacggcaatgccaatgccgggccaccgctggaagagaacaagggcgcggacggcaagagcgggagccggcggagcacgcggttcaaggaggagaacgagtacgtggaggtcacgctcgacgtcggggccgacgacgccgtggccgtccagggcgtcagggccgccggcgagacccccgaggcggcgctgctgccccggagcggcggcctgtcctcgaggctcaaggccgagctgaggcgcatcgcgtcggccaagcgtgggggcggcgacaacgcgccggcgagccagccccggctggaccggagcatgaccggcgccgcgcgcgcgctcaggggcctccacttcctcaaccagagcgtggtcacgcggggcagctggcccgaggtggacaagcggttcgaccgcctcgccgtcgacggcctgctcctccgctcacgcttcggccagtgcattgggatggttggatcggaggaattcgcggcgcagatgtacgacgcgcttgcacggcgaaggggggtcgttgctcaggtgctgaccaaggatgagctgagggagttctgggagcagctatccgacccaggctttgatgccaagctgcagactttctttgacatggttgacaagaacgcagacggtcggatcaccgaagaggagctcaaagaggtcctcactctgacggcctctgcaaacaagctcaccaagatcctggagcgcgtcgacgagtacacggcgttgatcatggaggagctcgaccccgaccagctcggctacatcgagcttgcgacactggagtccctgctgctgctgcccccttcccaggcgccgacgagcctggtggcgcacagctccaacatcagccagctgatcagccagaggctggtgccggcgcgggacgcgaacccgctccggcggggcctcacggcggcgcgctacttcctggaggacaactggaagcgcgtgtgggtgatgtcgctgtggctgtccatcaacgccggcctcttcgcctggaagttctacgcgtaccgccgccacccgacgttcgacgtgatgggctactgcgtgtgcgtggccaagggcggcgccgagaccaccaagttcaacatggccctcatcctcctccccgtctgccgcaacaccctcacctggctccgctcccggaccagcctcggcgccgccgtgcccttcaacgacaacatcaacttccacaaggtggtggccgggggcgtggccgtcggcgtggcgctgcacggggtgacccacctgacttgcgacttcccgcgcctgctccacgccagcgacgaggcctacgagccgatgaagcgctactttgggcagacgagggtcccggactactggtggttcgtgaggggcgtggagggcgtcaccggcgtcctcatggtggtgctcatggccgtcgcctacacgctggcgcacccgcggttccgccggagcaagctcggcgccgggaacccgctcaagaggctcagcggcttcaacatgttctggtactcccaccacctcttcgtcgtcgtctacgtcgccttggtcgtccacggcgtctgcctctacatcaaccggacatggtacaagcagacgacatggatgtaccttgccgtccccgtgctgctgtacgccggcgagcggcttcttcgggcgctgaggtcgcacggactcaccacggtgaggatcgagaaggtggcggtgtatcctgggaatgtgatagccatccacatgagtaagccccacggcttcaggtacaggagcggccagtacatctacgtcaactgcggcgaggtctcgccgttcgagtggcacccattcaccatcacctcggctcccggcgacgactacctcagcatgcacatccggtgccggggcgactggacgagcagattcagagccatcttctcccagatatgcaggccaccgttggcagggcagagcggtctcctgagagccgacttcacgtccatggtggagcacaacgccaacgccaagttcccgcggctgctgatcgacgggccctacggcgcgccggcgcaggactaccgcaagtacgacgtgctcctcctcatcggcctcggcatcggcgccacgccgctcatcagcatcgtcaaggacgtgctcaacaacgtccaccggcagggtcaggagcaggagggcgacgaggggttcatgacgaagcgggtctacttctactggtgcacgcgggaggagggctccttcgagtggttccgcggcgtgatgaacgaggtggcggagcgcgacgccgccggcgaggagtccgtggtggagctgcacaaccactgcaccagcgtgtacgaggaaggcgacgcgcggtcggccatggtggtgatgctgcaggcgctccaccacgccaagagcggcgtggacgtggtgtccgggacccgcgtgcgcacgcacttcgccaggccctgctggcgcgacgtcttcaagcgcgtcgcctgcgaccaccaggggcagcgcgtcggggtcttctactgcggcgaccagaagctcacgccggagctcaggcggctgtcccaggacttctcgcaccggaccaccaccaagttcgtcttccacaaggagaacttctgacctgaatttcgacatgcatgttaattaggctatatatatacatgaacgtagaacatatacactttattcgcttgctgtttgctagtagtatcagacacgtacggtcttgcattgggtatgcacatttcttcctttcttctttgcgtatcttattaactaatacaagtaggagagcatctctcaaatcattaatttccacaaaaaaaaaaaaaaaatccccgtatctcagtcctctagtttatactctctctgtaacttactactagtataagcctactcataatgaaagtaacttagactagcaacatgcatatgttactagtttatgttacaccctttatagt

SEQ ID NO: 4895 - DNA, 610 bp, Triticum aestivum
  Clone ID: TRIAE-23APR03-CLUSTER414301_1
agaacatcctaatcgaaaaatcaccactccccactgcctttgccgagaagaagagatcattggccagagcgagagttcaccgttcaacaacaccccttcactaaaccttgctcgcttccaacgatcatccatcgccacgccacgcacagggagagagagtgcgtgtgttgaagagaagatgaagcttgccgggagccagaggagtggaggcggcttgagcaggaccttgaaggagcacagggccaggctctacatcatcaagcgctgcgtcgtcatgctcctgcggtggcacgactgactgactccctccctccttccgttccatggatggtgtctgaactctgaagcgaagatttcttttctgattttgggtctgtgattcgatcgtgccgtgccagaatggcgtcggccggcacagattgtactgtacatacgaaaaaggcctaattgtagaagtagaagtagcagcaaagcaataggattaggatatatgtagtgttcgttgattcaccgctttctgtcccagcattgtactgttcttgcatcactgcagaatactggaggaatccaacatcagctgaaattaagagaagtgatactgttctagctc

SEQ ID NO: 4896 - DNA, 1632 bp, Triticum aestivum
  Clone ID: TRIAE-23APR03-CLUSTER4148_1
ctccgagccccgctcgcggctccgccgccccggcgcggggacgtgggggccggcggccccggcggacggcggctcagcagggcggccctacgtcggcgcgcaggcctgcaggccaacgcgccgacccgagatccaggaggcgaagccccggctgggcttggtccgagcgcccgctcccccacacacgtaccccccgtcgcctcctgaggttctggcgggccccccgccgtcttgcagctctggcgtgcactgccgcacctacccgaggaacagggtgacttacgagtagtagaaagcaagatctacatagtccacggttgtcgtttgagtttgtgtattccctacggtagcaaaaataacgtcgattattaaggcaaccaccggttcatacaatgtgcatcaggtttattgtctgtgttgggtgttcattttagctttagtgtgagtactggacagctttcggccaacatcgtatacctccgactcgccagcttgccgccatcgttgacctcatgtcgtcctcgtgtctcgccggacagcgcattcgacaaactttgtctcaccgggcaggcaccgctgtctacctctgctctgttgttaattgtgtgctagcaactcctccgggcaacttgttaggttattctaactctgccatgtatccgtgatcttgttttctgaatatgtacttttttttagtgattttcattttcattttattcatcatagcactccccttgcctgatcgcaccatcgcgttgcatgctctaatagttccaagccactcttcctcattgaacacttgctgcctggagtttgttcatcgacacatatacagttcgggtcaatggcgtggttactcaagtgaataactaggacatagcttggaagagtgacaagaacaataaattcggcaagaatatctatcccagtaacttccagaagggaaggcttataggtggcgctacgctaaatgagagcataccattaagtgagcaagaagatctcattgtttggatgagaactgctgccctcccaactttcaggaagctgtatggcagaattgagaaagatatcaatgcaaacgataatgtaacagtggttatacagaacaactataacacatatagttttggaggatcaaaagcgttggtcctttctactgcatcttggattggaggaaaaaacaacttcattggtattgcatatctgactattggtggtttgtgcctttcccttgctatgggcttcttagttctctacatggttaaacgaaggaactttgcagacccctcgaacctgtcatggaatagatgaatagagttaactattagactggagtatcctgtctgagaataaaagatcattcaatgggtaaattcttccaattggatctatgggtgtctgttcttattcccattcactgggcttgtcatggctcataggcatgaggatcttgttgactttggagccgtaatagcatcatacatacatgaacagaatgtattgtgatcggttgacttaaaccttatctgaccttatctgaccataccgagagtcgtttctgaatgcttattatgaattatgaaccaactaattgtgcttatgggaggagatacctatacttgttcttgc

SEQ ID NO: 4897 - DNA, 1036 bp, Triticum aestivum
  Clone ID: TRIAE-23APR03-CLUSTER41538_1
aagtaagattgccatgtttatgctttttaattcaggtaatgaaatctaaagataccagataagcagatccatagccaatgatcaagatacctattcaaataacaaagccaggtctacgttttggctagggagccatccgccacttctactccatgaagtggcacttttgtctagcgcgcgagcaagcctgcatgctctatgctcaggcttcaggccttgtaactgcaccgctgcgtgcttcttttggcctgttctaaaacgctcgtgactccgcgtcggcgttggccttgagcctccgtgctcgtgtttgttgtctaagactatgtttggtacgctgcctaagttgtgggctttattaatttaataaagaattaataaagccgaacgcgtccagcgtctccattctgaaaaaattataacaaagctagaacaggaaaacatccgaagacagaaacatttatcgacaacaaagatatgtatggacaagttgaatgcacaaaccaactcgaataaaggtctgtaccagaatcttagcccaaagattcatctcggcaacgatcggcgctgattttcgctattaagaagaggaacacagaatccttaaaagagcatttcaccgattgcaatcgatcgaaaaacatgacaaaacaaaaaaaaggaaacaaaaagaacagaggagaccgcattagactcacgaaatcttggtgtatttgacttatcatcatttgtaagtgcaatggtatggtgaagaaatcgtcttcccccaattccacgctctagatactcgctgcaaaacagaaatccagaacaactaagcagtgagctggtaagtggagagaggaatcgcagcggaaatcaatgggtagtcaactgtcggccgaggctactgtagatgcagaaatttggttatggattgattttcctcatttcaacccgggagaaatgcatccaagaggaagaaaaaagcaacaaagagacggacaggaaatggggagaagaatcgactgctgcaggagagaggcggcttggcttgggt

SEQ ID NO: 4898 - DNA, 1640 bp, Triticum aestivum
  Clone ID: TRIAE-23APR03-CLUSTER4157_1
aaaccaccgaagaacaaaaataaaggctgaggttcagtttatccaacgacaacaccgcacgccgccttctctctccgctcgtcccggtccttctctccagcgcgagcaccgagcagcgcgccggcgatctcccgtcgccgacccacgagtcccaacgctggcaacctcccttagccgcccctttcctccgccacgagccccgagcagcaacgcccgacctctaccttcccttcccggggcatctccgacaagaaccgcgacgtgccaaaaccgtgctgcttagttgggtgcatgaaaatggagatcgacagtttgagagaggcatttgaccgagttgttgaaaagcgtgtgttatcttctgctaaagttcaggaagctattggtcagatagtgaatgaagttgagcaggcaatatcgaagatgcagatgatgaatacagataccatggacagttgtgaccactcatccatccttgcagaactgaaggccaagctaaatgtaatggtgcccttgatcgaacttgacggttgtgaagatgtatggaatgcttgcagggacgaatatatgaaacttttagcctacgctctatggggctgccaagtgcaagcatctacaattatagattattataatgccccaatttaaaacacaattctttatagtttgttctacatattcaccaaaggaagcagagacgtgtattttacactttgcgaggacttacttggttgccctttgcctctatagtacaaagcagaaatccagaacctaatggcttgcctgatctgggactgaccggcttagaacagcccccatatgccgagtttgtcccatcgacgcattgggagaagctaacccaggagctaatccaccagttctgcagcctcttaggtcagtctagcaatagcccactgagcgtagctatatcagctggttttcaagggctgccaaccttgttgaagctaacaacggtaatggctgccaagaagcaagagtggcagaccatgaaacagcttccagtccccatagacatcggacctgagttccagtaccactcagtcttcgtatgcctggtgctcagggcgcagtcgagtgacgagtaccatccgatgctgatgccctgtacacatgctgtataagatcagtcgatcatgaagctatcaaagagcagctccagacctttcaagaaacctttctgcccctcgaatagacatgcgtcgcaattcaagcagcctaatttctagatgtttcactttttccagatcaaattctgtttatacaagcccttccttcgtgtttctgtttcacccataccaccgtatcaaagcaatcgatcatgaagctctcaaagagcagctccagacctttcaagtgcccttacggcccctcggaggcagtaacttcgctgtgcaagcagctccatttctaggtgctccatttttcccagatcaaattctgtttatacaagccctttcttcgtgtttctgtttcacctatccagtaactttgcctgtattataatcttgtatccttatttaaacctggatgttcatctgtacagtagcaaattccactgtgttaaaaattatctcttggtacaaaatacaaaaataagtttcactaaaaaaaaaaaaaaaaaa

SEQ ID NO: 4899 - DNA, 1107 bp, Triticum aestivum
  Clone ID: TRIAE-23APR03-CLUSTER416486_1
ttttttttttttttttggccagagaaaacagagctctatttatatatccatgatcccttctttgcacaaataggagagatatggggtgagctcaagcacataaacaagcaccagtgcctaattaaaacataggacacttcaggggtgtatttccatatttcacacctctgaatcggccacccgaatgcaagatttgcaatcgagcagcgaatggcgagaacccaaaagaaaaaacaaaacgaaaaaaaaaacactaattggtatccacagagtgatgctgctgggggtgctgactctccaggtcctcgacatgcatttccatcgggtgcgcgtggtcaccctgcgtcagcctccgcgccagcggcctctccctgttcagcatcctcatcagcgacgcgccgagcccacacggcggcgccgagctcccacttgcagcacactccttctccaggccctgcttctcctgcacccaggctggcgcggccggcgacggtggcggctccaccagggcacggcagaccgggcacgacgagctggacgcgagccacgtgtcgacgcaggggacgtggaacacgtgcgcgcaggccggcagcacgcgcaccgcctcgccctcctgcatggcgccgaggcagatggtgcactcgctagcgccgctgcccggctcgcccgtctccttgtacgccgcggtcggcagcgccgcgatggccgacgggtccagcccgaccttggccggcttgggggccgccgagccggcctccagcgcggccgcggcggcctccgcctgcctgcggttcctgcggcggacgcggcagatgtagaggtgcaggagcagggagaggccgagcacggagacgaacgcggcgacggccatggcgatgagccgcacgttgtgtgtcggccccggttgcgggctcctgctgccgccgccgaaccaggcggaacccgggtcgctcgccttcccggacatggacaccgacatcgacatgctcgctccggcgtgcgctcgcggcgcgctccttgtcgttggttggcgggtggggtggcgcctggtagctccagtagtaagtggctagagtggtagtattgtcccttgcgatggagctggtt

SEQ ID NO: 4900 - DNA, 1567 bp, Triticum aestivum
  unsure (1)..(1567): unsure at all n locations
  Clone ID: TRIAE-23APR03-CLUSTER417289_1
gttacgtagcactctgtctgacgcatcaatagccccccagccacttcctacaccacttcgtctccctccacttccttccctccctagtctgagtctctacccgagaccagagctcgcacgcgtcgccggcgcgccgatcagtcaagaagccgcgcaacggcgttggcgcattgccccggagaggccggccggccgatgaagccgctgtacctgcggggcagcggcagcttcaagaggctgctgctctccctctcgccccaccgcgccaagcgcgtccacgcgccccccggggacgcgcacgccgagtcgccgcagtcaccgccgccgacggagcggaggcccgagtgggagtgcttctcgtacgaggaggtccggcgcgccacggacggcttccgcgcggccaacctggtgggccggggcgggtcgtcggaggtgtaccgcggcgagctggcggacgggcgcgccgtggcggtgaagcggctcatgggcgcgtccgcctgcgagcgccgggagcgggacttcctggcggagctcggcaccgtgggccacgccaggcaccccaacgtgtgcccgctcctcggctgctgcgtcgaccgcgacctctacctcgtcttcgccttctccgcccgcggctccgtctccgccaacctccacgacggcgaggagggggcgccggcgatggggtgggaggcgcggtacggcgtggcggtgggcacggcgagggggctggagtacctgcacaaggggtgccggcggcggatcatccaccgggacatcaaggcctccaacgtgctgctcaccgacgacttccagccccagatctccgacttcgggctggccaagtggctgccgacggagtggacgcaccgggcgatcgcgccgatcgagggcaccttcgggtgcctggcgccggagtactacacgcgcggcatcgtggacgagaagacggacgtgttcgccttcggcgtcttcctgctggagctcatggccggccggaagccggtggacggcacccacaggagcctcctcggctgggcgaggcccctgctcaacgagggcaagacggaggcgctgctggacccgaggatcgtcgccggcggcgatggcggctacgacgccgagcaggcccggcggctggcgttcgtggcgtcgctctgcgtccgcgcgtcggcgacgtggaggccgtccatgacagaggtcctggagctgctggagggcgtggagatcaaggaggagcggtgggcgatgccggagccggcggccggcgacgacgagggggaggaaatgtggggcttcgacgacctcgacgacgacgacgatgaggaatccggcacgccgtcccctttgtcaacatcctcagccttgagcacttagcacgggctaagattgcgtcagacgagtgtgatgcttgctgaaatttttgctccttcccacctgccccgccccacatgtaaaggcttttcgttgtcgaggttgtgaatacaaaggttatctgtgagaggcaagtaaaaaccaaaaaaaaaaaaaaaaaccgcctcatgtggtnnnaaaanaaaaaaaaaaaaaa

SEQ ID NO: 4901 - DNA, 1604 bp, Triticum aestivum
  unsure (1)..(1604): unsure at all n locations
  Clone ID: TRIAE-23APR03-CLUSTER4185_1
agaataaccatcaaagcagtagtggccccttcttccagctcttcttggctgctaaggtgacactctctgtggaatagatacacctcgcgatgaaaatggcgagggccctgcttgtcgcccttcttccttgtctcgtgctttgtggcgcttggcctgtccggccgcgccgatgcggcggccgagaggaagaccgtcggtgtctacgagctcaacaagggggatttctccattcaagggtcaccaactggggtgccaccctcatgtccgtgattctcctcgactcgagaggaaactttggggatgtgatcctgggctacgatacggttgctgaatacatgaatggcaccgcctacttcggagggctgatcggccgcgtcgccaacagaatcgccaacggcccgcgtcacgctggacgggaaaacctaccggctcgttccgaacgacggcagcgtcacggtgcacggtggtgaccagtggtctatgaaggtcaccaactggggtgccaccctcatgtccgtgatcctccccgactcgagaggaaacttgggggatgtgatcctgggctacgatacggttgctgagtatgtgaatggcaccgcctactttggagggttgatcggccgcgtcgccaacaggatcgccaacgcccggttcacgctggacgggaaggcctaccggctggttcccaacgatggcaacaacacgctacacggtggtcaccggggattcgataaggtcgtatggacggtgaaggagcacgtcgccggcggcagctccccattcatcactctgtactatcatagcttcgacggagagcaagggtttccaggcgatgtggacgtgcacgtgaagtaccagctctccggcccgcacgagctgagcgtgcgcatgaacgcgacggcgcggggcaaggccaccccggtgaacctcgcgcaccacgcctactggaacctcggcggccacggcagcggcggcgtcctcagccgagggggtccgcctcttgggctcccggtacacacccgtggattccgccctcatccggacgggccacctggcgcccgtggccggcacgccctacgactgccgcacgccggccgccgtgggctcgcgcatcggtggtatcctgagccggggcgttaatgggtacgacatcaactacgtcgtggacggcgggggcctgcgcccggtggcagttgtccgggacggcgcgtccggtagggcgatggagctgtgggcggatcagcccggggtgcagttctacaccgccaacgggctgaagtggcgtgagggggaagggcggcaaggtctatgggcgatacggcgcgctctgcttggagacgcaggggttccccgacgccgtgaaccgcccgagtttcccgtcgcagatcgtccggccggggaaggtgtacatgcatcacatggtgttcaagttctccttctagtatagctagtggtagtgtggtacccgagcttggtcgtttgtcaggcaacacagccgctcttgtgttttgtgtgctgtctgaatttgatcggttgagcttcaatggaggaataaaagcttgcatgctacaaaaaaaaaaaaaaaatttgcccccatatnagac

SEQ ID NO: 4902 - DNA, 1827 bp, Triticum aestivum
  unsure (1)..(1827): unsure at all n locations
  Clone ID: TRIAE-23APR03-CLUSTER4197_1
ccacacacgcaacacaccccccaagcccagcgcacacgcaagccagcgaaaggcaaccgggcagacacacgcgcgcgcgcacacgcaagaaccgcccaagccgaacacacaagcaaagggagggacagcgcgcgagatcgagcatgaaggtggaggtggtggacacgacgctggtgacgccgagcgagccgacgccgcggcacacgctgtggctctccaacctcgacctcgccgtgcccaagacgcacacgaccgctcgtctactactacccggcgccccccgccggcgacggcggcgagaagcaggaagagttcttcgcgccggagaggctgcgggaggcgctggcgagggcgctggtgccgttctacccgctggcagggcggatggcgacgggccccgagggccggctcgagatcgactgcaacggcgagggcgcgctgttcgtcgtcgcgcgggccgacttcaccggcgacgagatgttccgggacttcgagccctccccggaggcgcgccgcctgctcgtccccttcgccgcctccggcgacccgccctgcctcctcgccatggtccaggtgacgttcctcaagtgcggcggcgtggccgtgggcacgggcatgcaccacgtgaccatggacggcgcgggcgcgatccagttcatccggacgtggacgaccctggcgcgcgggctggacgccgcgtccgtgcacccgaccccgccggtgcacgaccgcacggtgctgcgcgcgcgctcccccccgcacgccaccttcgagcacccggtctactccccgagcaacctcaacggcctgccccgccccttcgtcacccgcgtctacgccgtgtcccccaagctcctcgccggcatcaagtccagctgcgcgcccggcgtgtccacctactgcgcgctcaccgcgcacctgtggcgcgccatgtgcgtggcccgcgggctggcccccgacgccgagtcgcggctgcgcgtgccggccaacatccggcagcgcctgcgcccgcagctgccggccaactacttcggcaacgccatcgtgcgggacctggtgacggtgcgcgtgggcgacgtgctgtcgcagccgctggggttcgtggcggagcggatcaagcgcacggtggcgcgggtggacgacgccttcgtgcgctccgtcatcgactacctggaggtggagtcggagaagggcagccaggcggcgcgcacgacgccgcctgccggagacggacctgtgggtggtgagctggctgggcatgcccatccacgacgccgacttcggctggggctgccccaagttcgtggcgccggcgcagatgttcggcagcggcacggcctacgtcacgcaggcgcccgacaaggacgacggcgtgtccgtgctgttcgcgctcgagccagagtacctgcagtgcttcgagaaggccttctacggggagtgaccgaccaaagccttctacggtgatgcgcctttcaaagagccacttgggagttgggatctcgagtccgtcgatagtgtggagtgctgtatcataacgcaacagatactgcggaagtgtcgaggttgctgcttgtttctcgcgcctttcttcactgctactatgtgacattgtgggctaactattatctatacaaagtcgtaaatgaaaatggcctcaggtttagctcaaaaaaaaaaaaaaaaaacccaaagccgctataancccncaaaggcgtcgtttaaantcngacgggaaacctgggttccaactaaccctgaagaaaccccttncaactgggtatacaaagcccacattcctccanattccacctaagnaangagcccctt

SEQ ID NO: 4903 - DNA, 1506 bp, Triticum aestivum
  Clone ID: TRIAE-23APR03-CLUSTER4202_1
atacacctccacctacacatctcctacacttgcagcccacacacatagtacacacgaagaccccagcggtgctagatagctcaagaaatggcgcagctgccgccgagagcgccgagcgccggggagcaggactggccggtggcaggcgagttcctcgggttcgctgcggcccggcggggcgtgcaccggcgctcggccagcgatccggcggctttcctggaggccgtgccaatggaccacatcctcagtggcggcggcggcgacgacgagttcgacaggttcgacgacgagcagctcatgtccatgttctccaatgtcgacggcgggtgcgacaggccgggcttcatggacacgggagaggcggaggagggggcggccagcgcgggcgcaatggccgccgcggacggcttcggtgaccccaagcgggttaaaaggatattggccaacaggcagtcagcgcagaggtcaagagttcggaagttgcagtacatctcagagcttgaacgcagcgtcaccggtctccagatggaggtgtcagcactctcgccccccgtccccttcctagatcttcagcgggctttctggaccgccggcaaccgcctcctccgcctacggattgccgcccctgctcctgtcttgctctcccaacaaatagtccctaattttgtgtgtgtgaagaaataagtgtccacgacttatgcatacacctagcacactcagaacattttcaatgtccgttttcttttcagtgttgtttgctatttattttttcaaaattactgttcatttgggagtggatgagctcagtctccaagagcaattaccaagtttttcactattactcgagatagttcagagacaacaaaacgagaattttaaccattgatgaaatcccaaaatttgattggttgtttacttggttcagatggaggtgtcagcactctctccccgcgtggcctttctagatcatcagcggtcattactgaccgtcggcaacagccatctcaggcaaagaattgccgcccttgcacaagacaagatcttcaaagatgctccccaaccggccccccccgcggagattgagcgactacggcagttgtcccaccaccagaagatcaaggccacaggcggcacagacatggccacggccgcctcaatgcaggccaagcaagagctccttatgtgtgagggagccgcgatgcgatagcacaacatggcgcaaccagcctttttgtggtgactttttcctttcactcttgtcgattcatcgtgtggaaacacaccaatgttactagattatttgtgcagtttgacatgttctttatttttgttttttgtgatgtttactcatccctaccgataattgtgttgggatggaaaattgtcgtagatatattgtttggaccatccttacatttgtgttggtaaagatatttttattacatttattcggtcttcggtttgtgggaaacagattttttctctctataaaggacgcttttattg

SEQ ID NO: 4904 - DNA, 1004 bp, Triticum aestivum
  unsure (1)..(1004): unsure at all n locations
  Clone ID: TRIAE-23APR03-CLUSTER4217_1
atatagagcaagggaggggggttgcagttgaggcccagccacatacagccgaaggaagaagagaacgtctgtcatctgcttaattccttgtgccgaggtagctgccaattccaaagactgtgagtaagaggagaacgtggttagctaggaaatgtgcggcggagctgttacagccgactttgtcccggccggagcccgccctcccggatggctcctccgccgacgtccccggctccagcctcaccgtcaccggtgaggaggtgacggagaaatcgccggcgccggggcggaagacggcgtaccgtgggatcaggcgccggccatggggccgctgggctgcggagatccgggaccccgaggaagggcgcgcgcgtctggctgggcacctacgccagcgcggaggaggccgcgcgcgcctacgacgtcgcggcgcgcgatatccgcgggccgaaggccaagctcaacttcccacccgcggtgggcgcgccgcaggaggccgcggccgttgcaggggcgggggcgcccaagaagcgtcgcatcgtcgcggcagaggagagctccgcgtcttggtctccacttccggccccggctagcggcggcggcggcggcacagacagcctgcgggagcgcatgtccggcctggaggcgttcctggggctggaggacggcaacgtggagccctgggaggccgtcaatctcatcatggagtaggcgtgtgccgtcgccacgtgcggcagctctgcggcgtgcatgggttacatttgccgataaataagcagattggtcgaagtcttttgattagttagagtatcattcggctttcctgggctttcgccgggcatatccaggtcctttgtagtggaatgctatgtaattcaagcatgacgatcagaagaaatgtggagaacttgcacccacttttctgacataaaatggaactttccacgctctaaaaaaaaaaaaaaaaaaaaacanccccaggggggggcccggntaccaatttc

SEQ ID NO: 4905 - DNA, 1165 bp, Triticum aestivum
  unsure (1)..(1165): unsure at all n locations
  Clone ID: TRIAE-23APR03-CLUSTER422_1
attgacagagggagaagaagaagaagggatggcgcctatgaaggtgtacggctgggcggtgtcgccatggatggcgcgggtcctcgacacagaggaagaagaagaaacagagagagaaagaagaagaaggggtggagcctatgaaggtatacggctgggcggggtcgccatcggatggcgcggcgcctcgtctccctggaggggggcggcgccgggcacgagctcgtgcccacgagccgcaacggcggcgaccgccgccgcccgcggcacctggggcaccaaacccctacgccgagatcgcggtgctcgaagacggcggtctgaggctttaccaatcccgcgccaccgcaaggcatattctccgcaaacaccagcccgggcttctaggagcaggcagccgtgggggagtcgccgagggtggaggcgtgggtcgacgtggatgcctcccacgctggagcccgctcactcaaggcccatcgtgtggaactcgcatcatcaaccctgttcgtcgggagggacgtcgaccatcgcctcgtcgatggaagcgtcgagaagctcaagaagctgctgggggtgtgacggagggcgagactgtcaagcaaggaaggtgtaggacgggggctttccatcagcatttcggccgacctcacccatttctccttcaatgcgctacttctatggcgacggagcatgcggttgtgctcggatgcgtatccgcatgtgaaggcatggtgggaagggcgctgctggcaaggccatcggtcaaggaagtcgatagctggcatgccatccggattttggacttcgggagcgggagaataccatgataaagcatgcttgtttgtctatgatgctcttgattatcttttactgaaccaacggaaaataaagtaagcaagatatttatgtgaaaaggggtggggtgtggatatgaaataacttgtttcgggaaaattgttttctaataccatattatgaattgattctcaaaaaaaaaaaattcaaggtctatgccctctatttctgtcaacggtaccatggttttcacaccaatgttgttcaaagtctctatctctactacttaaaaagaatgtaaggtcccgcttctttttccatcaaccctttgtcaacctccccatatataacaacaccttanttaaaaaaa

SEQ ID NO: 4906 - DNA, 2150 bp, Triticum aestivum
  Clone ID: TRIAE-23APR03-CLUSTER4248_1
gccgccctgagcaccaccaacccccctccccgcgttcccacaccgccacgcgcatacagactccacagccccgcactgtacctcgagctgtaacgtgcggtcgcgtcgcctcacccgtccataagatgacctccgcctcgggcaccgcgcaacgggggaccttggaagcgatcggcgccaggaagcccgcgggcccctccaaaggggagcggcgcctgcaggatgggcgccaccgaggtggcggcgctggtgggtcgcgaccctgctgcggctgccggcgcccccggcaaggcgtcccgcccctcccccgcttccgcgacgcctcggcctccctcacccccagccacgcttcggtcgtcctacgaggtcggttgtgccttgagtaccgctttcggtgggttgcttccctctgattgctatgccggacaagtgaatcatggtctttgtgctaaagcgaggcattcccacaacgggagcgccccccctggtcccccatcgtcactaaaaggggcagatcggcctctacacgatgggtccgcacctgatgcgctgggttccggcctcctttgcaccttgagacattatcggagggtgggtctcgttcatgcccttgccccttgagtggttgcaatatcccgcctggcctttattgccatctcggttcagacagcgtcctgtcttcgagttgtgtaatctatagcttggaaagcctgaacgcttcttctggccaagttatttcgcctatagaaccgctgatcgctcccagaattacagatggctcagaaggcgtctatgcttgcagcgacgagtcttgctttcatgtccttgctcgtcattctacaacggttcttggaggcccctgtctccgtgccgttctctctgtacggacactcttgtggtcctgcgagggccgtgttccacctcgtcatggaccagaattgctacgtctcgattcactcgtggttcgcgctgcacccggtctctccggcggtcgtcgaggtcaagggcctccaccagttcgactggcgcgacggcgatgccatcgcctctgtcatgaggaccatcgacgaggtccagaagagctcgctggattaccaccagctgtgtgatggatcggtggagagggagtacagaaggcttgaggccaccaagccaagcacgttttcgatcctcaactatctcaaaatccatctcccagagttcttcccggagctcccgagggtgatactgctcgacgacgacgtcttggtgcgcaaggatctggccgggctgtgggagcaggatctggacgggaacatcatgggcgcggtcggcgcgcaccggcccggcgcagacggtggcatctgcatcgagaggacgctcagcgagcacctcaacttctctgaccctgcagtgtcgtcgctaggcctcgacggttcgaactgcacgtggtcttggggcgccaccatcgtcgacctcgacgcttggcgaggagcgaacgtcaccgagacgtaccagctatggctgcaaaagaaccgcgaatcggggttcaggctgtggaagatgggatcgctgccgccggctctgatagcgttcgacggccgggtgcaggcgatcgagccgctgtggcacctgccggacctcggctggcgcatgcccgacgccgagctgctgcagctctccgccgtcctgcatttcagcgggccgcggaagccgtggctggaggtggcgttcccggagctgcgggagctgtggctcgggcacttgaataactcggacagcttcctacgaggctgtggcgtagtggaatgacggtaatggaacagggagaagattcaagctggaaaaggggatacgtacagtgatccggtgcaagaatcgggtgcggcgctgggtttgtgaggagagggaagtaggtgctgccttcagcctttcctcgacctggctctgccatgtttgctggtttaatgccactgagtagaaactactcatggcgtatacatatatataactgggatatttatttgttattagttacaaaacggaaagtggaaattgcagaagttgtagccacgagataatttttctttggctccaatgatgaactcactgtatggaactatggttcatttaagagtcaaatacattactggtgaaaaaaaaaaaaaaaa

SEQ ID NO: 4907 - DNA, 1456 bp, Triticum aestivum
  Clone ID: TRIAE-23APR03-CLUSTER4258_1
acggagaaaccaaacccctctccgaacccaggactactccctcggcggcggccgcgggggcggtgacacgtttaaatggccgacgggagggaaagcgaggatgctgcggtcggggaagacggcacccatccccagcagtccgagagagcgacgaataagctgctaacgccggaccggccggaagcgcgaaaggccgagcggaaggcgggggagaaggagcgccggcgcgccgacatagagcggcggaggcgcgagtgggaggagtctctggccgcggcgccgtcgcaggaggcgcgcgaagcgatgctggcggcgcgcagggagacgcggctcgagcgggtgggaaagcgcgtggaggagcggggagcgcgcgccgagaggctccggcgcgccgccgagggtgggcagaaggtggtgctcgacctcgagttcgccgacctcatgcggcccaacgagattcacagcctcacgcagcagattatgtactgctatgcagtgaacggaagatcagcaactccggctcatctatggttgacaggttgcagcggagaaatggggacccaggttcaaaggatacctggctttgataagtggatcatagaaaaagaggccaagtcttaccttgaagcatttgcagactgtaaagaaaatcttgtgtatcttacagcggatgctgagactgtccttgatgaactagacatgtcaaaaatatatatcattggtggtctagtggatcggaacagatggaaaggcataacacagaaaaaggcagttgatcagggcattcagtctgccaaactccccattggaagttatttaaagatgtcaagttctcaggttcttacagtcaaccaagtgtttgagataatgcaaaagtttgtggaaacaaaggactggaagacggcattctttcatgtgatcccaccgaggaaacgaggagaagctggagcagcaaatgatgatgattcacctgagggggctgcaaacggagatcttgacaagtgtttagaagaggaggttgatgatgatgacgatgatggtgatggggatgaagaagccgatgttgctaacaaaagacattgttttagaagtgaaaatggaaaatcttagaatcactcttttggtgcagtggtggaagcgactcctggataggttattatctccggggaagagcagagggaaagagcaatctactgtgccgacgactgaaatatgattcatctccaagtgtatcattactattaactttgctgaactgctttgtttacctaggtttacttgtttggagtactctgaggtgtcgtagtatttttgtttttgttatctgaactacaccctgtacttttgtacggcgcgaggaaggaacgcgctatataacagcacagataaatagagtgcttttgttcgaaaaaaaaaaaaaaaactcttggaattcagaaaacacatgtattttcat

SEQ ID NO: 4908 - DNA, 1459 bp, Triticum aestivum
  Clone ID: TRIAE-23APR03-CLUSTER42_23
aagaaagggagaccataggcaggcagattgcgtagctaattcaacgagttcgagtatcaaacattacacgtagttaattatgctaccacatgcgtatcttaaaaactttgttaaccatggaacgacataagttcagaatacaagtccagcaacgtgcagttacacgcttccacagactcaagcggagaaagctcgggtcctcacttccacagcttccgcaaggacatgttcttctcattgccttcttcatcaccttggccaccgccatctcgaagtcctcctgtgttacgtgcacccttctctcgcggagagcaaacattccggcttcggtgcagaccgcctttagctcagctcctgaagcgccattcatctttcccgcaatctttttcagatcaataccacgcatcaggttcatccttcttgaatgaatcttcaagatatcacctcgtgaatcctcattaggatttggaaattcaatcttcctgtctatgcggccaggcctcaaaagggcttgatccaagatgtctatccggtttgttgccatcagaaccttaattttgtttgatgcttcaaaaccatcaagttggtttagaagctcaagcatggtccgttgcacttcactatcaccattgccagttccagactccattctagcagatccaatggagtctatttcatccatgaatataatagacggtgcatgctccctagccataacaaagagttcacgaaccatccgggagccctcaccaatatacttctgaaccaactcagaaccagatacccttgatgaaggtacagtcggtgtgatgagcaactgcacgtgcccagtaatgttttgcctgtccctggcctcgtgccggattcggcacgaggcactccactcccatcacacacacggacacacctgcaagagcgagagcgtgagccatggcgggcatggggaagcagcaggtggtggcggcgctgatgctggcgctggtggtgctggcggcggcgccgggcggggcgcacgcggcgtgccaggcatcgcagctggcggtgtgcgcgtcggcgatcctgagcggggccaagccgagcggcgagtgctgcggcaacctgagggcgcagcaggggtgcttctgccagtacgccaaggaccccacctacgggcagtacatccgcagcccccacgcccgcgacaccctcacctcctgcggcctcgccgtcccccactgctaggcgccggcaggcccctggcgcatatggcaagctagctgcctcagtgaccatgagagcgtcagactatagctagccctagctgagtgcgtgttgcgtccatgaacgcatcttcctgtcaaccatgtggttcgactttgatgatgctggaataaaaatataaaatgttgggtgatgatctacggcagccatgttgcttcttggctgctgctggtaataaaatttgtgttacaactttgaa

SEQ ID NO: 4909 - DNA, 2857 bp, Triticum aestivum
  unsure (1)..(2857): unsure at all n locations
  Clone ID: TRIAE-23APR03-CLUSTER42_34
agtaccgggacaagaaaggagaagggagtagagctgtctcggagatcggcgggcggcggctatggcgatggcggcggcagcagcgggcggcgagccggtagagccgcagtcgttgaagaagctgagtctcaagtcgctgaagcgctccctcgacctcttcgcgcccacccactccctccccttcgctcccgacgccgagagcaaacggattcgcgtcagctgcaaggtgaatgcggagtacggttcggtcaagaacctgccgactgagcagggccgagcgcaggtgaagggcgccgccgctccttccaatgcgttggcgcttctaggcacacaagacacaaaagatgctcctagggaaggcactagtaatgccatcatcccttcaccgcttatgcttcctaaagcacccgaatctgcagtgcctggcaaaaatacaaccgtattatcgatccctgggtcatctgatagattctcgacatctgcactgatggaaaggttgccaagtagatggcctaaacctgtatggcatgctccctggaagaactatcgggttatcagtggtcacttgggatgggtgcgatctatagcatttgatccaggcaatgaatggttctgtactggttctgctgatagaacaataaagatatgggacctggcatcaggaacgttgaagctgacactaactggtcatattgaacaagttcgcggacttgctgtcagtcagcggcacacatatctattttctgctggtgatgacaaacaagtaaaatgttgggatcttgaacaaaataaggttattcggtcttatcatgggcatctgagtggggtttactgcctagctccccatccaacaattgatgtcttgctgacaggtggtcgagattcagtttgcagggtgtgggatatccgaacaaaggctcatgtttctgctttaactggacatgataacacagtttgttcagtgtttgctcggccaacggatccacaagttgtcactggctcacatgatacaactatcaagttctgggatcttgtagctgggaaaactatgtgtactcttacacaccataagaagtctgttcgggccatggcactgcatccaaaagagaaatcatttgcatcagcatctgccgacaacataaaaaagtggagcctgcccaaaggcgaatttctgcacaacatgctgtcccagcaaaaaacgattctgaatgcaatggctgttaatgaggatggtgtcctggcaactgcaggggacaatggaagcatgtggttttgggattggaagagtggccataattttcagcaagaacagactattgtccagcctggatcattggagagtgaagcatgtatatatgccctttcttatgataatagtggatcaaggcttgtgacatgcgaggcagataaaacaataaagatgtggaaagaagatctaacagcaacaccagaaacccaccccgtcaacttcaagccaccaaaagacatccggagatattgattgccgcataagttacaagattgatttcgaccacccaaattctactctttggttgagtgttcacctcgttgagcctttatggtggtgttcaagccctgacgtccctgttgtataatacagattgtcttgtgctagtatttattactgaatctgaagcatgttttctaagttcaaatatattttgttctatgcattgggaatttttgtgatgtatcaaaattcccccaagatacagcaccctcacagccacagacgacgcgcgaagcgatatcacgagtgagagtctaggggccatggcacagtcgatgctcatgtccggcgtcaacggcgtggcctccggcaggagcctgctgcaggcggcgcggccgtcgtcggcgtccacgcccttctcgcggctcgcgctctcctcgtcgtcctcggcggcgtactacaagcacatgccgtccctctccgtccggaccatggccctgttcggcaagaagaccaaggccgcgccggccaagaaggtcgctgcccccaagcccaagacggaggacggcatcttcggcacgtccggcgggatcggtttcaccaaggagaacgagctcttcgtcggccgtgttgccatgattggcttcgccgcatcgatcttgggagaggccatcaccggcaagggcatcctgtcccagctgaaccttgagaccggcatcccgatctacgaggcggagcccctcctcctcttcttcatcctcttcaccctcctcggcgccatcggcgcgctcggagaccgcggcaggttcgtcgacgagcagcccaccggcctcgacaaggccgtcatcgcccccggcaaaggcttccgctccgccctcggcctcagcgagggagggccgctgttcgggttcaccaagtcgaacgagctgttcgtggggcggctggcgcagctggggatcgccttctccatcatcggggagattatcacgggcaagggcgcgctggcgcagctcaacatcgagaccggggtgcccatcagcgagatcgagccactcgtgctcttcaacgtcgtcttcttcttcatcgccgccatcaaccccggcaccggcaagttcatcagcggcgaggaggacgactagagatcacgcgcgaatgctttttggccattaattgtacgtccgtccgtccgtgctttgcttgtttgttgtgtacgtgagaccttggggtgtacttaggtgtaagaaagaagttggtcgttgccttatgaaaaacaagagctagcagctaatttgccatgcaaaaaaaaaaaaaaaaaaaaaaaaaaaaaaaaaaaaaaaaaaaaaactcgagggggggcccggtacccanttcgccctatagtggctg

SEQ ID NO: 4910 - DNA, 1906 bp, Triticum aestivum
  unsure (1)..(1906): unsure at all n locations
  Clone ID: TRIAE-23APR03-CLUSTER430158_1
ggccggcccgccagcggccggcgtcgccccaggacaccgcggcgcgcccgcgcccgccgggtccgggctcccgccgccgccccggatccgggcccccccgggcccatccgcccgccccgccccttacgggctcacggaccctaaaaacgcaatgcccccgcacacataagaacgtgacatgggcgcacattgacattaggctgctgctgccattccttcctctttcccctccttccacatcccagtcttctccacccacgccaccaaacccccgagatcacgcgagctatatatactgcatattctcccggccctgcaaagcgaggcctctattacttactgatatccccgccgaaatcaagatggggctgcggacctgcggcgccatggaaggcgagcacgttgtcgcctcgcctttcttcgagtggttgaagccgccgccggcgtcgccgtcctcgtcgagatcgtcgtcgactttctcgtcctcctcgtcgtctatggcgtctgggcaccaagaggatcgcagcagcgtggcatgcttgcccctgctccgcatgctcgaggaggggaagggggctggtggtgaccatgatcaccctgcacctccagtcaaggaagagatcatgggcagcggcgcggccgaggtgctggggcctggcgtggatctgaatatcggcttgccggttggtggatcttgcgatgatgacatcatggaggaggagagccaggaggaagatgatgaccacgactgtgacgaagaggaggaggaagagatggatgagttggaacctaaccatggcggttgcaaggtggaggcagaggagaaagagaagcacggcgagccggtggtctcggtggaaggatcaaacagcgtcagcatgccggaattcggcgtgctcggagcagagagcggcgtgcccatgagctgcgggtactggatcccgacgccggcgcagatcctcgtcggcccggtgcagtttgtctgccatgtctgtaacaagagcttcaacagatacaataacatgcagatgcacatgtggggccacgggcgcgagtaccgcaagggcccggagtcgctcaagggcacgcagacgctggcgctcctgaagctgccgtgctactgctgcgccgccgggtgccggaacagcgtggcccacccgcgcgcgcggccgctcaaggacttccgcaccctgcagacgcactacaagcgcaagcacggcgccaggcccttccgctgccgccgctgcgccaagcccttcgccgtcaagggcgactggcgcacgcacgagaagaactgcggcaagcgctggttctgcgcctgcggctccgacttcaagcacaagcgctcgctcaacgaccacgtccgctcattcggcggcgaccacctccccgtcgccctcgacggcgcccccgcccccgcccccgcccccgtcgaggaccgccgcatcatacgcttccaacggtgagatcgtacgtcgaccgagctagctgatcgtactacatagatcatatatatgcatgcatgcatgcagtgcatgctagggtgcatgcaggaggagcaacgaggtaagtgatagcgcaataagggggttctcgaccagttgctaaaagctgtgaagtagctgaattttcttcagccggactgtgggagctgcaggcagtgctattagctaggctgtcaatgcagctttgtaatggagaaaatttatcagcttcacaggctaactaaactggtatttggacctagtactgtatacatagcattttgaacatgagacatagcaatttatgagcaaaaaaaaaaaaaaaaccaccacccaaagnnccacccttccccattttcttttgtccccccctgcgctgtcgcacacatagctcatctccaccgcccccccattccattcca

SEQ ID NO: 4911 - DNA, 1211 bp, Triticum aestivum
  Clone ID: TRIAE-23APR03-CLUSTER430182_1
ttttttttttttttttcccaaaattgtttcctatccagaggggatatctgtcatcatcgataatttcttcagaacacagtgattttattgacatataagttctgtacatgcatgtaataagtcagatcctaagaaaaataagaaagaaatgtcacgagtccgaatgaattgggatgctactccctctgtacagcttcttaaatttcatacagtatatgaaccgccgtaacaagttcctctatccgccacacggagccccgtcctcgacctgcatgtccaccacgtcgttctcctcgttcatgtacgccgacaggttcatgtactgctgctggtcctgctcccggtcccggctcggcttccgccacctcgcgcggcacacgacgcacgtcgccgcccgcctcgcgcggctgcgcttccaccgcgcgaagcactcggcgtgcaccgagttccggcaggtgccgcacgtcagcagcggcgccggccccgttgccgccgcgccgccttgtgcctctgccgacggcgccatctcctcgaggcacaccggccaggcggcgccgtcgaggcggcccaacgacggaccggcggactcctgccggcgctggtcagcggcctttgcggctgcagccgccgcgtgggccgcccactgctggtggaacctctcccgggcgcgagggccggcgagcacctccgggtacgtgggcgcggcgacgagccgcgcgacctggcacggccgcagcgactgcctccacacgcaggcctcgtcgagggacaggccgaggacgcggagcagcacgaagaggatgtgcttgcagggcgcgccggggtcggggcacgtgcacgccggcgtggtcgccagcgtcaccgtgtacacgttgcccgtggcgcccagcacgaagaagtccgcgccggcgcggtgcagcagctggaggtggtgctgcagcgcgcggatgatgcggttggccacgcgccgggtcgacgcctcctcggtgctcgcggagttggacccgaacgacggctccatcggcaggtcgttccgcgtttctggcatgggatttggcgagagcccgcgggcgagcggctatgtaaggccggggcgccatgccataagatgcgttgagtgccgtgggagaagactgcagcgatgaggattacggggggaggaagcaaagctcgcaggaggaaagaggaggcagctccgtcaagttgaaatc

SEQ ID NO: 4912 - DNA, 988 bp, Triticum aestivum
  unsure (1)..(988): unsure at all n locations
  Clone ID: TRIAE-23APR03-CLUSTER430472_1
nggggggggnaaaaagaannnnnnnnnnnnnnnnaannnnaaagannnnannnnnnnnnnnnnnnttttttttttttttttgatcaaaacttcactttttctttctctaagtttctgtacatttgtactgtatacatatggcaaaattgtatgaagaccggctagtcctcaaaaaggcggatgccaatcacagggtgtagagtgacttggagcatctatgagctaagaatgttcaagagagaaactctgatctggactaatttcctgaacagatgtcccaccccattctcgagatctccaatactacactctaactcctgcaattgctcctcctggcagacaactgccttcttcttgtgaaatgcctttgagacaagagactgttttggcattccgatttcctttgacaggagatggactgtggactccagcagagacacagaaatctctctagccttggtcaatagcatgaccatcttgcaacccgcagacacagcattagccttcttcgcgctcttcttgaaatgtttcttggccgtcttcaccaaacgggcataagactggatcttggcttgagcagttacatcatctccttttcttagagccacttgtagctcttggatgatggccttcatcttgacgaagatctcttgcatggtgctgcagagatctagcagctcgagagagacttccatctctgaatccaacatcttgccagcctggttgcttggcaggccaataatctcttcaacaccattgtagatgtctccgagcctcctcagaccggcacacatggtgccgatggtggtggtggaggaagagatgctcgcctctaggctcagcacctcttgctcgacttcagtctggttggcctgaggccttgatggcaaacttatcgatctcaggtggaaagccatttctgatcttgaagtttttctctgtattgtggttgaagagaggagaatagaagagcgacttttggtttgat

SEQ ID NO: 4913 - DNA, 1965 bp, Triticum aestivum
  Clone ID: TRIAE-23APR03-CLUSTER4315_1
agcccccccctcccccctgcatgctccaccggcgccaacccccccccgctctccccagcctcctcggcgccgccgcctcgtcttctcgtccccgcccgcggctcggcggctaaccctagccgccttgggagcgagggagaaagagcggcggcggcgcatccgccgctgcggatcgagcaggtgcagtcgccttcgaagaagcagcgcatcgccacccacacccacatcaagcgcctcggcctcgacgccaatgggacggcgatagcgatgtcggcggggttcgtggggcaggcggcggcgagggaggccggcgggctggaggtcgacatgatccgccaggagaacatggctggacgcgcgctgctccttgccggcccgcctgctaccggcaagaccgcactcgctctcggcatctcccaggagctgggcagcatcctccctttctgtcctgcgggaggatcacgaagtctactcttccgacgtcaagtccactgaggggcttatggtaatttctcgtagaggtataggtttgcgtatgaaggaaaacgaagtagtctatgaaggagaggttacagagctttccccagaagaatctgagagttcaaggggtggatatgggaaaagcatgcgtcgtgtagtaattggcctgaagactgcaaaagggacgaagctactaaagttagatccgactattgaggttgttctaatcgtggaaaagggggcagccggggaggttatttacattgaagctaacagcggtgcagtgaaaagagttggcagatgtgatgcttttgctacagaatacgatcttgaagcagaggagtatgtgccaattcccaaaggggaagtccacaagaaaaaagaaatagtgcaggacgttacactgcatgaccttgacgccgcaaatgcccagccgcaaggaggccaagatattttgtcccttatgggccagatgatgaagtcacggaagactgaaatcactgagaagctgcgccaagagatcaataaggtggttaacagatatattgacgaaggtattgcagagcttgtacctggtgtgctgttcattgatgaggttcacatgctggacattgagtgcttctcttatcttaatcgtgctcttgagagcccattatcgccttttgtaatacttgctacaaacatatggatatgtactgtaaggggaactgacatgacaagtccatatggtatcccagtcgaccttctagataggttggttatcgtacggacacagatatatggccctatcgagatgatccagatattagctattagagcacaagtggaggagattgaaattgatgaggacagtcttgcatttctaggagaggttgggcagcagacatctttgagacatgctattcagttgctgtcacctgctagcgtagttgccaaggctaatgggagagagaagatctgcaaggctgatcttgaagaagttcgtgttctgtatttggacgcaaagtcctctgctcagttgcttcataagcagcagggaagttacatcacctaaattacccttgcacaagaattctcagctgccggctcaggtgactggactgtcttcccctaccttgacttggtaagcaggcgctgacttcaagagcacagttgggggcattgtttttgtagcaggtgcactctggactggacttccattggttccagaggacaatttgattctggtctctggcttctgtttgctgattagatttagattatgtgtagggattattgtgcatcttcgttgcccttgctaattaatggttagatctcgtttccccccttcgactaccagtcagccttggatgtatcaggtcgtgattcctttatggtagaactggaatttcttggattatgtcttgtgttaagaccgtctcaacttattgagcatgccattgcacgttgcctttgagaccgactcaacttgttgagcatgtcatt

SEQ ID NO: 4914 - DNA, 1956 bp, Triticum aestivum
  unsure (1)..(1956): unsure at all n locations
  Clone ID: TRIAE-23APR03-CLUSTER431_24
tccacacacaccacgccagcacgcctcgcggtaaccggcagaggccacccactaccccaccaccaccaccactccaccactccactacaaggcaccagcgcacacaccgtcggtgtgancaccaccaccactgccagcccaccccatcttttctcccatccattcccggactcccccaccacactgcagtagtcgccggcggccatcatggtgatctcgaacgcgagctccagcgccggggaggccgtctactccaccttctcctcgcgctacgtgcgggaggagctgccgcggtaccggatgccttcggggtcgatccccaaggaggcggcgtaccagatcatcagcgacgagctgatgctggacgggaacccgcggctgaacctggcgtccttcgtcaccacctggatggagcccgagtgcggcaagctcatgatggactccgtcaacaagaactacgtcgacatggacgagtacccagtcaccaccgagctccagaaccgttgtgtaaacatgatagctcacttgttcaatgcaccgatcggtgaggatgagactgctatcggagtctcaacagtgggctcctcggaagcaataatgcttgcgggcctggctttcaagcggaagtgggcaaacaaaatgaaggagcaggggaagccatgcgacaaacctaacattgttactggtgcaaatgttcaggtttgctgggagaaatttgctagatattttgaagtggaactgaaggaggtcaagttaactgaagggtactatgtcatggatcctaagaaggctgttgaaatggtggatgagaacactatatgtgttgcagccatcctgggatctactctcaccggagagtacgaagatgtgaagctgttgaatgaccttcttgtggcaaagaacaaggaaacagggtgggatgtgccgatccatgttgatgctgccagtggaggattcatcgctccttttctccagcctgagcttgaatgggacttcaggctgccattggtgaagagcatcaacgttagtgggcacaagtatggccttgtgtaccctggtgttggatgggtcatctggcggagcaaagccgatctgcccgacgaactcatcttccacataaactatctgggaacagatcagcccacattcacactgaacttctccaaaggtgctagccagatcattgcacaatactatcagctgatccgcctcggtttcgaggggtacaagcacatcatggagaactgcaagctgaacgcggcggtgctcaaggagggcatcgacgcgacggggcggttcgacgtgctgtccaaggcggacggcgtgccgctggtggccatcaggctcaaggacagcaccaacttcagcgtgttcgacatctcggagaacctgaggcggttcgggtggatcgtgccggcctacaccatgccggcggacgcggagcacgtggccgtcctccgcatcgtcatccgggaggacttcaaccggagcctcgcgcagcggctcctcaccgacatcaacaagatcgtgggcgagctggacgcgcacgccgtccacgccatcaagctgtccaccgccgccgccgccgagggcgcgtccaagagcaccgtggacgccgtcaccgaggccttcaagggcctggccgggaacaagaaggccggagtctgctgaaggccggccgggggcgtgcttgcttgctgagacgcctggtgcattctttcatcacgtgtctatgttgtattatcttgcattgtgtaattattgtggaggggtgcatatgtgaactgtcaggacctgcctcctccgtattttgtactgcgtacgtacgcggattgcactctccctttcggccctgctggcgattggttctgcacaggacacctctccaccgaggtcactatgtatctgtcgtttgctttagctgtttgtcggaacgttaaaaaaaaaaaaaaaaaa

SEQ ID NO: 4915 - DNA, 1767 bp, Triticum aestivum
  Clone ID: TRIAE-23APR03-CLUSTER431_27
acaccaccactgcccgacctcatcctttattccatccagacacactagaccactccagcggagcggagaggagagcagtagcattgagcgccggcggccatggtgatctcgcacgcgagctccagcgcgggggaggccgtctactccaccttctcctcgcgctacgtgcgcgaggagctcccgcggtaccggatgccggagggttcgatcccgaaggaggcggcgtaccagatcatcagcgacgagctgatgctggacgggaacccgcggctgaacctggcgtccttcgtcaccacctggatggagcccgagtgcggcaagctcatgatggactccgtcaacaagaactacgtcgacatggacgagtacccagtcaccaccgagctccagaaccgktgkgtaaacatgrtagctcacttgktcaatgcgccaatcggcgaggatgagactgctatcggagtctcaacagtggggtcctcggaagcgataatgcttgcaggcctggcgttcaagaggaagtgggcaaacaaaatgaaggagcaggggaagccatgcgacaaacctaacattgttactggtgcaaatgttcaggtttgctgggagaaatttgctagatattttgaagtggaactgaaggaggtcaagttaactgaagggtactatgtcatggatcctaagaaggccattgaaatggtggatgagaacactatatgtgttgcagccatcttgggttctactctcactggagagtacgaagatgtgaagctgttgaatgaccttcttgtggagaagaacaagaaaacagggtggaatgtgccgatccatgtcgatgccgccagtggaggatttatcgctccttttcttcagccggagcttgaatgggacttcaggctgccattggtgaagagcatcaacgttagtgggcacaagtatggccttgtgtaccctggtgttggatgggtcatctggcggagcaaagacgatctgcccgacgaactcattttccacataaactatctgggaacagatcagcccacattcacactgaacttctccaaaggtgctagccagatcattgcacaatactatcaactgatccgcctcggcttcgaggggtacaagcacatcatggagaactgcaagctgaacgcggcggtgctcaaggagggcatcgacgcgacggggcggttcgacgtgctctccaaggcggacggcgtgccgctggtggccatcaggctcaaggacagcaccaacttcagcgtgtttgacatctcggagaacctgaggaggttcgggtggatcgtgccggcctacaccatgcccgcggacgcggagcacgtcgcggtcctccgcatcgtcatccgggaggacttcaaccggagcctcgcgcagcggctcctcgccgacatcaacaagatcgtgcgcgagctggacgcgcacgccgtccacgccatcaagctgtccaacgccgccgccgccgagggcgcctccaagagcaccgtggacgccgtcaccgaggccttcaagggcctggccgggaacaagaaggccggagtctgctgatggccgtgctttgttttaacacgtctgtctatgttgtatcttgattcttgtataattattgtggaggggtgcgtatgtgaactgtcaagagctgcctcctccgtattttgtacgtacgcacgcggattgcactgtcacttgtataattctatctgtttctttttaataaaggggttttccccggctccagttttaaaaaaaaaa

SEQ ID NO: 4916 - DNA, 1938 bp, Triticum aestivum
  Clone ID: TRIAE-23APR03-CLUSTER431_28
ctcgtgccgaattcggcacgaggcgcacgccatctactatacatacaataggaaacgttcccgctgttcctggtaacggcttaaccccgaccccgcgttgatcaagcacaaaccagcggcagcactagcagtctagcaccaccaccgcccccgccggcccccgtctcctgatcggatcggccgtcgtccccgccggcgagcaggatggtgctctcccacgccgcgtcggcagggtcgtccgatgagtcggtgcactccaccttcgcctcccgctacgtccgcgcctccctgcccaggttccggatgccggagaactcgatcccgaaggaggcggcgtaccagatcatcaacgacgagctgatgctggacgggaacccgcggctgaacctggcgtccttcgtcaccacctggatggagcccgagtgcaacaagctcatgatggactccatcaacaagaactacgtcgacatggacgagtaccccgtcaccaccgagctccagaaccgatgcgtgaacatgatcgcgcatctcttcaatgctcctctcggggagaccgagacggccgtgggagtgggcaccgtcggctcttcggaggccatcatgctcgccgggctggccttcaagaggcgttggcagaacaagatgaaggccgccggcaagccctgcgacaagcccaacatcgtcaccggcgccaacgtccaagtttgctgggagaagttcgcgcgctacttcgaggtggagctcaaggaagtgaagctgagcgaggggtactacgtgatggaccccgagaaggccgttgagatggtcgacgagaacaccatctgcgtcgccgccatcctcggctccaccctcaacggcgagttcgaggacgtcaagatgctcaacgacctcctcgtcaagaagaacgaggagacaggctgggacacgccgatccacgtggatgcggcgagcggcgggttcatcgcgccgttcctgtacccggagctggagtgggacttccggctgccgctggtgaagagcatcaacgtgagcgggcacaagtacggcctcgtgtacgccgggatcgggtggtgcatctggaggagcaaggaggacctgccggacgagctcatcttccacatcaactacctcggcgccgaccagcccaccttcaccctcaacttctccaaaggttccagccaggttatcgcgcagtattaccagctgatccgccttggtttcgaggggtacaggaacatcatggacaactgccaggagaacgcgatggtgctcaaggaggggctggagcgcacgggccggttcaacatcgtgtccaaggaccagggcgtcccgctggtggccttctccctcaaggacagcagccggcacgacgagttcgagatctccgagttcctccgccgcttcggctggatcgtgcccgcctacaccatgccccccgacgcgcagcacgtcaccgtgctccgcgtcgtcatccgcgaggacttcagccgcaccttcgccgagcgcctcgtcatcgacatcgagaaggtgctccacgagctcgacgccctcccgtcccgcagcagcgggcccgccctgcagcaccccaacggcgacaccgtcagcgagaaggacctggccaggcagcgcgaggtggtgtccgtctggaagagggccgtcgccgccaggaagaagacccagggcgtctgctgagcggccgccatgcatgcacctctcacctgctactggtgtttgctgatgatatagctgctggtggatctttatggttgtatttcctaatttaagctactgctacttctcttgttctggctccattggatcgatcgagtatattcatgtacttgcatatttgtgcacaaaacactggagtacctagcggcagtcgtatgtttattttggggcccaatgttcaaccaaaattgatgtttccctttttgg

SEQ ID NO: 4917 - DNA, 2217 bp, Triticum aestivum
  Clone ID: TRIAE-23APR03-CLUSTER431_29
acacccacgcccgcctccgcctccattcattcgtggagaagcgaaccgattcccggccgactcgccgtcactttcccggtggtgcccgcgacagcgaggaggaggacgatggtcgtaactgtggcagcgacggggtcggacacggccgagccgctgcaccccaccaccttcgcctcccgctacgtccgcgaccagctcccccggtcagtcccctcccctccttctctcctccacacacaccacgccagtacggctagcggtaaccggccacccactaccccaccaccagtccaccaccactccactacaaggcaccagcgcacacaccgtcggtgtgacaccaccactgcccgatctcatcctttattccatccaccccccgtcgcctgcactgcgctacacactatccaccagcggagagcagcagcggtgagcgccggcggccatggtgatctcgcacgcgagctccagcgcgggggaggccgtctactccaccttctcctcgcgctacgtgcgcgaggagctcccgcggtaccggatgccggagggatcgatcccgaaggaggcggcgtaccagatcatcagcgacgagctgatgctggacgggaacccgcggctgaacctggcgtccttcgtcaccacctggatggagcccgagtgcggcaagctcatgatggactccgttaacaagaactacgtcgacatggacgagtaccccgtcaccaccgagctccagaaccgttgtgtaaacatgatagctcacttgttcaatgcaccgatcggtgaggatgagactgctatcggagtctcaacagtggggtcctcggaagcgataatgcttgcgggcctggcgttcaagaggaagtgggcaaacaaaatgaaggagcaggggaagccatgcgacaaacctaacattgttactggtgcaaatgttcaggtttgctgggagaaatttgctagatatttcgaggtggaactgaaggaggtcaagttaactgaagggtactatgtcatggatcccaagaaggctgttgaaatggtggatgagaacactatatgtgttgcagccatcttgggatctactctcactggagagtacgaagatgtgaaactgttgaatgaccttcttgtggcgaagaacaaggaaacagggtgggatgtgccgatccatgttgatgctgccagtggaggattcatcgctccttttctccagcctgagcttgaatgggacttcaggctgccgttggtgaagagcatcaacgttagtgggcacaagtatggccttgtgtaccctggtgttggatgggtcatcctggcggagcaaagccgatctgcccgacgaactcatcttccacataaactatctaggaacagatcagcccacgttcacactgaacttctccaagggcgctagccagatcattgcgcaatactatcagctgatccgcctcggcttcgaggggtacaagcacatcatggagaactgcaagctgaacgcggcggtgctgaaggagggcatcgacgcgacggggcggttcgacgtgctgtccaaggcggacggcgtgccgctggtggccatcaggctcaaggacagcaccaacttcagcgtgttcgacatctcggagaacctgaggcggttcgggtggatcgtsccggcctacacratgccggcggacgcggagcacgtgsccgtcctccgcatcgtcatccgggaggacttcaaccggagcctcgcgcagcggctcctcgcggacatcaacaagatcgtgggcgagctggacgcgcacgccatccacgccatcaagctgtccaccgccgccgccgccgagggcgcctccaagagcaccgtggacgccgtcaccgaggccttcaagggcctggccgggaacaagaaggccggcgtctgctgaaggccggggtggtgcttgcttggtgagacgcctggcgccttctttctttcatcacgtatgtctatgttgtatcttgtgtaattattattgtggaggggtgcaaatgtgaactgtcaggacctgcctccttattttgcacgtacatttcgtctgtggttctgtacaggaaggacacctctccatcgaggtcgctatgtatctgttgtttgcttagctctgtgtcggaatgttacgtgtttgttgtatcctttgaatgtattgcattatatagtgctgctggacaacgttgacaaaaaaaaaaaaaaaa

SEQ ID NO: 4918 - DNA, 1127 bp, Triticum aestivum
  unsure (1)..(1127): unsure at all n locations
  Clone ID: TRIAE-23APR03-CLUSTER431_30
ttttttggcgccccccgggttttccctttttttttctccgctttttttattttgggggaaattgggggggggaaaacatttcccccccggaaacactttttccccctttttcccccaagccccccaatttaccctcccttaaaggggaccaaaaaggggggcctccccccgcggggggcggccctttaaaaattaggggttccccgggctccaagaattcccccggggcccattccctagacctcctaatcgaaaactcagcgtctcattttcatcccctcgcccgccgccgccgccgctcccgccgctagaccagctcgccagcagcaatgggtaagacgctaactctcggtcgtctctgattgatttggttctgttgtaccctccggatctgacattatcgtgaccaacggcggcagcccggatcaaggtgcacgagctgagggggaagaacaaggcggagctgcagggccagctcaaggacctcaaggcggagctctccctcctccgcgtcgccaaggtcaccggcggcgcccccaacaagctctccaagatcaaggtggtgcgcacctcgattgcgagggtgctcacggtgatctcgcagaagcagaagtcggcgctgagggaggcgtacaagaacaagcgtctcccgctcgacctccgccccaagaagacccgcgccatccgcaggcgtctcaccaagcaccagctctctttgaagacggagagggagaagaagcgcgagaagtacttccccatgaggaagtatgctatcaaggcctaggttaggagcacatgttttaccggccgagttttgctcagaagttgcatgaattttatgttctgtgtggacaccgctgctatctaagtactatgtattcgatatcctgcatgaaattcgaacttatgcttattgacactatgatctacaaaaaaaaaaaaaaaaaaacncgagtctctctctctctctctctctctctctctctctctctctctctctctctctctctctctctctctcgtgccgaattcctgcagcccgggggatccactagttctagagcggccgccaccgcggtggagctccagcttttgttccctttagtagggttaagtcgagcaangga

SEQ ID NO: 4919 - DNA, 617 bp, Triticum aestivum
  Clone ID: TRIAE-23APR03-CLUSTER431_9
tcagcgtctcattttcatccccccgcccgccgccgccgccgccgctagaccagctcgccagcagcaatggcccggatcaaggtgcacgagctgagggggaagaacaaggcggatctgcagggccagctcaaggacctcaaggcggagctgtccctcctccgcgtcgccaaggtcaccggcggcgcccccaataagctctccaagatcaaggtggtgcgcacctcaattgcgagggtgctcacggtgatctcgcagaagcagaaggcggcgttgagggaggcgtatgtctgccaagcaccgagaacacaagaagcggaagataacagcgatgaagatgggaaggtggttgaggtagtttttgttggtgctagatgaagatcaaacaagttacttctgccagcgatgaagatcaagcagaagcaagttgtacagcgttcacttctgcgtggcaatgtgttctgctgttggacttcgaaaatttgtgctagatggctggcagaaaattttgtatgcttgatgtatacatgcatatatcaatcaagttacgcctataccattgcagttttgttgacgacctgtagaatccactgaatgaatattgatgaaactttcattac

SEQ ID NO: 4920 - DNA, 2107 bp, Triticum aestivum
  unsure (1)..(2107): unsure at all n locations
  Clone ID: TRIAE-23APR03-CLUSTER4320_1
agccaatccccacccacccgtcttccccttctctcctcccaaaccctccgccccctcctccccctcgcccccgccgccaacgccccctaggcggtcgtcgacgtcgccgtcgtcggccgcggccaccggaacgctcgccccccacaccgccgacgccgggccccccgcctccgccccccgcgcccctcaccgcgacgtcccggacaccggatttccgggtcctgcgcctcagaccctcggcattccgcacagaagcgaggggggctcaatcaagaggcacacgcgcctgccgcatggtggagggcgcggggacggcacccagcgcctcccccccaattcgccccgtcgcggcgctccggcccggcgccgatttcccccgagagcccaatgagattttgggcagcacgtcagcaaggagacgtgagggtgtcaccaatgaggacaagaggggatgccgcgaggggaataaagcgcggggacagctagtcgcggccgatcccgcccgtagggtgcctgcaagggctgcgctcaagggagattttgggggtagtgttcaataagggaatgaagggttgcaggacaagaaacaatttgattgaatttgagaagggaagcaaatgacttcgtaatgagaaaggttgaggataccaatgatgaattgcaagagcagcttataagactggagaatggggaggttattgctgacaaagtaatagatgatttgaagagaagaaagcttgtaacaaaagagaaatctatttggtattcactgaagaaggggcctgaatttgttgcaaagagaaaaacattggcaaccgatgtgacacgagaacatctcaagagtggcgactggaaggatctggaatttaaagattataactatggagctcaaggacaacctattgcgataggatatagccaaccgttgttagaggtccgtgaggcaatccagaacatttttctcgagatggggttcagtgagatgccaacgaacatgtatgtagagagcagcttctggaatttcgatgcactgttccagccacaacagcatcctgctcgtgattcacacgatacctttttcctcaaagcccctgctacaacaacacaattacccgatgactatcttgagaaagtaaagcaagtacatcagtctggtggccatggctccaaaggatatggttacaactggaagcgagatgaagcagagaaaaacctgcttcgtactcacacaactgcagtttcaacaaggatgctatacaagctagcacaggagaaaacttttgctcctaagagatactattctattgatcgtgttttccggaatgaagctgtggaccgaactcatcttgcagaattccaccagatagaaggtcttatttgtgattatggtttgacgcttggtgatctgataggtgtattggaagatttcttctccagactaggcatgtcaaagctgcgtttcaaacctgcctacaacccgtacactgaaccaagcatggaaattttcagctaccacgatggtctgaagaaatgggtggagataggcaactcaggcatgttcaggcctgaaatgttacttcccatgggactgccagagggcgttaatgttatcgcatggggtctttcacttgaaaggccaacaatgattctgtatgggattgacaacatacgtgatctctttgggccaaaggtcgacttcaatctgatcaagagcagcccgatttgccgcttggggctgtagtgtagtgagcttgatagaactttatctggatgtctggatgcgaagcatgtttatttgtggttataactttgaaaaccagtactttgcatttaacagagggagtgcagaaatacacacatgtagctctgaattgcaattttgaggtgttcatgttcgatacaagtagggtcttccatttctatgcaaaaaaaaaaaaaaaacttttcctagatcgcatcctcaacgagagggccgttcttctttcccccccctctccccgggcgagtcgccccgtgcccccgtgcccccccaaagagagtgggaatttataccggctcccctgacgtgtcttntaaaaanncgngtggttttgtaaaacacctcccg

SEQ ID NO: 4921 - DNA, 1905 bp, Triticum aestivum
  Clone ID: TRIAE-23APR03-CLUSTER43481_1
ttggtccccttaccctacggcaccgcttcgcctgccgccgcgcagccacgccccgccgggcgtcggccagttcggcccgggtaaagaccgcgcgctcccgccccctcgggctctcctgctgctccgtttcccgccggcccggtgaccttagcttcaggtgccgcttttttttttttttttacagcacagcaaggcacgcagcctcttcaccaggacatgcctagtttccagcagctaagaaatgctcacaactatgagctcacatgttcgttggcttaattaccaacaagaataacagccactgcctcaacaacaatggggtaacataacagcagctaacaacatcaacaacgaagcacggacacgactacatacaattagagctcagcaagcaccggcacagcacctgatcacggcggcacgagaagagcgccgtcattggcttcccaggagtatcctgaggctgttgagcccgtcggccgagatgctccgcgccaccctacgtggctgattcactctgatctgaggaggcgccaccaggtggaatgagaccagcactgctgttaaattgtctgtggctccgcgccttatcgcctcctcgacgatctccctgcagcagcgcttcacgtcgttgtgctcctggaggcgccgccgggcgaagtccacggcgttctggttcgagaagacgtcccacagcccgtcgctgccgatcaccaggaactcgtcgtccttggtcagcgtggtcagcttgatctccggctccgcgctcagggggcctcccccgggcctgctggcctccttcattccctcgaggtgccagtcgccgagggctctggtgactcccagcagaccgttcaggtagccgtcgtccacgtagccaccgagcgactcgacccgcagcttttcgctgaggctgcagggcctgtggtccatcgacatctccattgcgatgccacaccgggaaagtactgctctgcaatcaccagcgttcgcgaccagaagggaccttccaaaaatcattgctgtaagtgccgttgtgccggacgacagagttctctggtgagagcatttatcggcaaactgactatcaatctgcacaaaggatctgctcactactttctcaagctccagaggaaaatcagcatcttccacaatgacccttggcagattatcgcgaacgaaatgggcagcatcttttccaccatgcccatcaaagaccccataaaaggaaacaacttctttatccactgttggataaccaaagtttttagctagatcggcaatacacacatgggtatcttccatgtactggcgacttccaatatctgaccaaccgcctgatctaacatttggaaggaaatttccaaagttactctgcttgaaatcagcagttgtggtgttctcgcaaacactctccatatgaggcgaggggagctcggcgggcttctccgctccggcgtctgcagaatcgggcttgtcggcgtcgtccacgcgcatgccggcccgcctccggcgtttccttggcagaactggcgctctgctggagtgctggtgggaagatcgggcacgagggaaaagcagagagagagggggaagggaagaataatacgggcgggtaggagcagagtaggagggaggagggggcaggggaagaggaatccgaggaggagagcaacggggaaagaaaggagatgctttgggaatatctgtggcgaaaaaaatggctccgggtcggggcaggaagggaaaggtggggggaagaagcttgcggtggtccaaatttttaaagggcccccccccgcggggagcccccttttttttcccctttaaaggagggaatttgcggggtgtgggaaaaaaggggaaaaaattgtttccgggggaaaaatttttcccccccccacc

SEQ ID NO: 4922 - DNA, 1177 bp, Triticum aestivum
  Clone ID: TRIAE-23APR03-CLUSTER4359_1
atccttttggttatctgcagagagtcttcagagtcttccgtccgtcgcctccaacaaatctcctccccaacctccaatggcggccgcgacctcctccctcgccacgctcgccctccccccccccgagcccccgcccgcggccgcgcagagcgccctcgtcgcctgcgagccccccctgtcggccccccccctccgcgcccgccgcatcgcgtggccgggccgcgccgtcggccctccacgcctccgcgcgcttcgtcgcgtccgtcagcgccgacgcctgcgccgctgcgtttccgtccaaagttacgaccaaggtgaacttcgagatctgcattggcaaccccatcggcaagcccgttggggaggattgtgcgtcgagctttatggggctatgatgttccccaaaccccgttgcaggtaagttccgtggctctttctgcactggggagagaggggtctcggataaaggggttcaagtttcccaccggtagtcatgaaggccttcatcagggtcaggggggagactttgacaagggcaacggtactggagggaaaagcatatatggccgcacctttaaggatgagaacttccaattggttcatactggacctggagtgctcagcatggcgaatgctggaccgaacaccaacggcagccaattcttcatctgcacagtcaagacaccgtggctggacgggagacacgttgtctttggccaggttcttgaaggcatggacatcgtaaggacgatagagtcatcagagaccgacagaggtgaccgtccgaagaagaaggtggtcattagtgagtgcggggagcttccagtggtctgagttttatttagatggctatcaccttccatctgcgcatcttgattttgctgtggacttgttacttgtctttcttcaagtagttagagaccgcactgagttgaactcgagatttctactctgaggcatacggcattcatcaactgttcgactggaataagaatgtgattgctttcctgaaagctagagacaatacagcattcatctactgttcggctggaataagaatgtgattgctttcctcaaccttttttatagcattgttcatgatagataatgacttgtaaataaactggcaaatccaaagaatgcctggatatctcttatctatttgtttttacgtgct

SEQ ID NO: 4923 - DNA, 2880 bp, Triticum aestivum
  Clone ID: TRIAE-23APR03-CLUSTER435_1
acatttggagctccagtccagggcatgtccactcgggccgactcgaatttttagaggagtgtcactgtgaagcccgtttgaagctccctccagagcatgtccactgagactttttagagaaagaagaagagtcatctcaacgcttgaacatccgcgatcattccaagctgctgatcccaagctggtgagctcacacttatgggctgcttatcccctgtcgccatttcctcatgcacagctccacctccagttcagtctttccatacagcgatctccagccacgtactcttcggcccggcgctgcgctaccgaatgtccccttttccgcctcccgcgcgccgaaccttttatgtacgcggttctatgctttcgtggatgctaccaagttgccactgcggaggtcgttgacgcggcaatgcacgcgcccaagccgccggagcccaagccgcgcgtcctggtcgccggcggggggatcggcggcctcaccttcgcgctcgcggccaggcggaagggcttccaggtgctcgtgctggaaaaggacatgagcgccgtccgcggggagggcaagtaccggggccccatccagctgcagagcaacgcgctcgccgtcctcgaggccgtcgacatgcccgccgcggaccagatcatggacgccggatgcatcaccggcgaccgcgtcaacgggatcgtcgacggcatctccggctcctggtacatcaagtttgataccttcactcctgctgctgacagagggctcccggtcacaagggtcattagccgcatgacgctgcagcagattcttgcccgtgcagtcggcgacgacgctataatgaacgattgccacgttgtcgactttactgataatggcaacaaggtcaccgcgatattggaggatgggcggaaatttgaaggtgatctcttggttggagcagatggcatatggtcaaaggtgaggaagtcgctttttggcgaaacggatgcatcttattcagaatacacttgctacaccggaattgcagactttgtgcctcctgatattgacacagtcgggtaccgagtgtttcttggtcacaaacaatatttcgtctcctcagacgttggtggtggtaaaatgcagtggtatgcatttcacaaggaacctgctggtggtacttatcctgagaatggcaaaaagaaaagactgctcgagatatttagcggttggtgtgataatgtcattgatctgctaaatgcaactgaggaggaagcaattcttcgccgggatatatacgatcggccacctactatcaactgggggaaaggtcgtgtcaccttgcttggtgactctgtccatgctatgcagccaaatctgggacagggtggctgcatggctattgaggatggttaccagctggctgtagagcttgagaaggcctgggaagagagtgtcaagtctagaactcctgtggacgttatttcctccttgaggagttatgagaaggagagaaagctacgtgttgctatcatacatggattggcaagaatggcggcaatcatggctaccacttacagaccatatctaggtgtgggtctgggacctttgtcgtttttgacaaagttgaggataccgcatcctggaagagttggtggcagatttttcatcaaggttggaatgcctttgatgctgagctggattttaggtggcaacagctcaaagctagaaggaagaccgttaagttgccggctttctgacaaggcaagcaaccagcttggtcgatggtttcaggatgacgatgcattggaacaagctatgggtggagagtggtacctcttccctatgagctctggagatgactctgccttgcagcccattcgtttgatcagggatgaacagaggacactctctattggaagcaaaccagatccgagcaattctgattcttcgttgtcgttccccttgccacaagtatcagagatccatgctactatcacatgcaagaataagggtttctatttgaccgatctcggaagcgagcatggtacatggtttaacgacaacgaaggcagacgctaccggttacctccaaacttcccagttcgtttccacccttctgatgccattgagtttggttcagataagaaggccatgttccgggtgaaagtgctcagcacgcttccatacgactccgcgagaggtgggggagaagttctgcaggcagcatgagtggggacttcagcgaccccttgtcaccagccactgtacagcattcttcagtaaacagccgacactgcatcatcgccaaggaaagaaaaagaattgtaatttttgcactcatccagatatcccaaacaggattttgaatagcttctgacagaattactacgttgcagttctacgaaaaagaactgagggtgtacaataggggtaggcaattttagctgttgccactgtaatactgtacccagtacagtacattgttgtgcctattaacacgtgttcatactgcaaaaaaaaaaaaaaaaaagttatcgatacgccgacacccctccagggggggggcccggaacccattcgccccttaggggggcgtcgtaccgcccggcccccccccgcgcgtcgttctgcccggacggcggtgactgggtttcccactttttagccttgtggaaaatccccccttttcccctgggggaaaaaaaaaaaggccccccccatatcccctttcccaattttggcaccctgattgggggaaggagaattttaacgcccaaattttttttaaaacccgcgcaaattttttttaaaacccgcctttttttttcaacaaagggggaaaggggggaaacccctttttttccaagaataacggccgggggtggggggtgtgttccccctcttat

SEQ ID NO: 4924 - DNA, 1737 bp, Triticum aestivum
  Clone ID: TRIAE-23APR03-CLUSTER4363_1
cccgcccccccctccccacacgacaaaacgaccgcccctacccccttctcccgccctcgcccctctccctctcccctcccctccttccccggcaagactagggttttcagccaccggtccgccctcaccatgtataacgggggcgaccactacgacgggaacggacgcggcgccgcccacccccgccgcctcttcagcggcggcgctctccctctcctcctcccctccttcccccgcaaggactagggtttgcagccaccgggcctcaccatgtacaccggaggcgaccactacgacgggaacggcggcggcgccgccaaccgccaccagcctccttcagcggcggcgcgttcatgccctcgcagagcaccaacaccccggggggcagcggcggcatcagaaagactcgcggcgcgcagacgctgctcccgctcaccgtcaagcagattatggacgcgtcccagaccaacgacgacaagtccagtttcgctgtcaatggcaccgaggtgtccacggttaggcttgtaggacgcatgatgaataaggcagagcggatgacagatgtacaattcattcttgatgatggtacaggcaggatagaagtgaatcgctgggaaaatgagacatcggacactacagaaatgggtttagtcaaggatggtgactatgttattgtcaatggtggtctgaaaagctttcaagggaagcgtcacattgttgcttattccgtgcggcttgtaaccaactacaatgatataacacatcactttctgtactgcatttatgtgcatttggatcttgccaaggctaagaaatctgggacacagcctcaagtaactgctaatgcatcatggaaccaagctccaccccctaataatcaggccccaacactatctgcatctgggaatgctggtgggcaagatttaactgatatggtcatgaatgtttttcatgacccagtgcttgtaaacctggagcatggagttagtatcgaacaggttgcaagccgtcttaacatatcagatgcacttgccaggtcgactgttacacatcttattgatgttggcaacctctatccaactatcgatgacaaccattacaagtctacactgaatggttgatatggctgtgcccacgcgtgcaagcgttaggctcccctggagcgatcgaataatataagcactcttgcaagagttgtttttgcagagtggcttgctggtcctctagacagtcgcaaggagagcaacttaacggctaggttaagttgcatatctaagcacttgcgccttatgtgtaatggatatgagtaggttagatctctaggtgctttcgtttgtgtttgctactgcagtacctcgagaacatccatgcctgtgtgacctgcaattagtttgcgacttgtttgtggttatgactctgccctgcatattgtttctggattcagttaacgtttgccctaaaaatgcatatcatgcatctgattatttctggattccaaaaaaaaaaaaaaaaaacttatcgatacggccaccttcgagggggggcccggaccccattccccctaatggggagccaattacccccgttccctggccgggtttttaaaagggggagctgggaaaacccgggggtaccccatttaagccctttggacaaacccccctttttcccgggggggaaaaaaagaaaaagcccccccaaattccccttcccaaaattggccccccaaagggagaa

SEQ ID NO: 4925 - DNA, 1284 bp, Triticum aestivum
  Clone ID: TRIAE-23APR03-CLUSTER4365_1
ccccccgcccccaccagcccgccccccgcccttgccctgcagaaaaccgcagacctcaccatccccctcccccctcccctccccagcagccagcctcccccgcgaacgaaccctagccaggcacggcggcggatccctcgggcggcccggagccacaggccgccgcgatgatggacggcggcggcggcgtcggagacccggtcgaggagttcctcatcgggggcgccggcgacggcggggaggactccctcgccgccttctgcgacggaggacttgggattgaggatgtgcgcggaggtgactctggtctcgggcactctaatttggggaaaaggggcagagatgaaccatctccatctggtccaaagtcaaaggcttgccgcgagaaaatgcggagggataaactgaatgacaggtttcttgaattatgctcggttatgaattctggcaagcacactggtgttgaagaatgttcggctagcaatcctgggaagaacgctaagttggataaagcaagtatcttgagtgatgcaactcgtatgttgacacaactcagaggcgagaccgaaaagctgaaggaatcaaatgtgaatcttcgagagacaatcaaggaccttaaggcggagaagaatgagctccgagatgagaagttgagcctgaaggcagaaaaggaaaggctggaacaacaactcaaagcagcaagtgctgctcctacaggatttgctcctcatatgccttatccagctgcgttccaccccgcagtattccctccatttgcaccaccttatcaagtcccagccaacaaaggcgctccggtccccgctgcattccctggaatggcgatgtggcactggttgcccccaactgccatggacacaactcaagacccaaagctttggccgccgaatgcttaggcgtgccgaccccgggatgctgacttgcgctgccattcgcccattggcaagtcagaacgtttgtcaggtccctgagatgaaaggaagctcgcgattgcagttattgtgtttagcctgttgttttggggtcacttgtcccatagagaggtgatacctgtaattaatctggatcttaaccctcttgcttggaaaatatattcagtgctaccatacctcttgtatgagtgttatgtatggaattgcactggtttgtttcttgaaaaaaaaaaaagaagaaaaaaaaaaaaacatttggcaggacctgttttgtctatataaagttgaacatgtgagcacttgcattgctgacctttgaagaaaataaaatatg

SEQ ID NO: 4926 - DNA, 1055 bp, Triticum aestivum
  Clone ID: TRIAE-23APR03-CLUSTER4382_1
gatcgtcaggcagcaacccccgcacatctgctccctcctccaccagctccccatcctcaacgagctcccaccacccgctgctacccagcatggccgccgccgccaccgccgtccgcttccacacggccgccgcgcgacgcgccgcccctcggcgaccggcgcgcttcgccgtgcgcgcagatgccgcgcaggcggcgacggcgctgacgcaggatgacctcaagaggcttgcggcggtgcgtgcggtggagcaggtgcagagtggtatggttctggggctcgggacaggctccacggccgcctttgccgtcgccgagatcggtgcgcttcttgccaacgggaagctctccggcatcgtcggtgtgcccacttccaagcgcacctttgagcaggccatgtccctgggaatccctctttccacgctcgacgaccaccccgtgatcgacctcgccattgacggcgctgacgaggttgatccagatcttaaccttgtgaaagggcggggtggagcccttctccgggagaagatggtcgaagctgcatcaggaaagtttgttgtcgtcgtcgatgagacgaaactagtcactggcctgggagggagcggtcttgccatgcctgtggaggttgtgcagttctgctggaagtacaatcaagtaagtctgcagggtctgttcaatgaagaaggttgcgaggcaaagctgagattgaatgaggatggcaagccctatgttactgacaactcgaactacatcgtagatttatacttcaagacgccgatcaaggatgcgctgggcgcgggcaaggagattgcagctttggaaggagttgttgagcatgggttgtttttgaacatggcaagctcagtgatcattgctggatcggacggtgtcagtgtcaaaacaaagtgagtgttttggatcggctgttgttggtgtgttgaatttacggtttttcactgaataatctatctgtgtaaaaggaggaaataatgctcttctataaatatatcttttccatttttcaaaaaaaaaaagctatgaaaaaaaaaaaaaaaa

SEQ ID NO: 4927 - DNA, 1126 bp, Triticum aestivum
  Clone ID: TRIAE-23APR03-CLUSTER43877_1
taggcggcgcttcccttgcggtggagcgggctttctgaggaaggagacgccaacatagctcccctcttttaatattgtgcgaacttgagaaaaatgttatcagtgcaaccaggcacagaagttggaggcgtccccgaaagttcaatgctcccatttgtaatacagcaaacacactacaacaccaacacgaaaccactgcctattctttactactaatatctcatctgcttagctctttcttcctcctcttcaatcttttttctgcgtaaggcttcttctctctgcttttggatccgttccagctccaaatatcgctccatctctttctgatgctgctcctgagcttctctcctttgagattcctctactttcctccggttctcctcgatcatcctatccaactcctccctctccttcctttcttgctctactttctgcctggcttcatggagagctgcttgcttttctttttgtagctgagcatcaacctcatcaaataactttttgataccttcctcaactcggcgttttatttcatcttttacttcctcagagttcagacactcctcaacatttttcctaacagcttcttcaactctcctagcaagctcctcttccaacaacttaagttcagcttccttttggcgtcttttcttttcttcttccttcctttgtttttcaattaaactgttctgttcggatccatgacttgggctggagttatttacaagagaacttgagctgctccgacttctccgtcttctatgtctcctcggtgatggagggcttttacgcctcctaggaattggggactggctcctgtcccatctaggagaaggagaccggctttttctccgggaggagtaaggggagcggctgcgatctcgtcggatccgcctgctgccataccgcggcgacggggagcgccgcctgctgccgtaccgcggcgacggggagcgccgccgacggtgggatggcggcgaacgagacaccacgcgcggcatgcctctccgtgggccctccgcgcggggagggatagataggagtgggatgcagatgcggcggcgcggcgactcggcgaggggaacgaacggcggaaagccgatgcgagggattgttccgattt

SEQ ID NO: 4928 - DNA, 2685 bp, Triticum aestivum
  Clone ID: TRIAE-23APR03-CLUSTER4410_1
acaagccatcataccgggctgctcctgggcaacccattgcgatcccagtctgctccacaggcctccccacctgaacctgaggcgggtgtccgagccaccaactcccactccgctctactaccacgaccgccacccggcgcctgcccctgccttcatcgtggacgcgcacctacagccgctcccgcgcaacaagactccagaccaccaacccgcccctgctcacgcccctgatgagcgggacgccaccgccgtcaacgcgcactcccccgcggccgcgcggcctccgggcaagtggaatgctgtgccgaccaccgcagaacggcagtccgcaggctgctcctcgacacctggaagcgccgcagcggtccccaactagcatgatggacgtcttcggctccccaagcggtaacacacccggtagtccatttaggaaaactcggagctgcctcaaaatgtgcacggtggagcatacatgggaaacggatatgagccagtgtgactgcgtcctcatcgtttggatccctaatatttctggtgtcctcgcggatatccatcaccaccctactactaccctagcggttattatggctcgacgaatgagtgggacactcggtatgttggtcatgaaggaatggaagtgccccatagtctgtatggtgacatgtaccatggatatggttatgctccctatggagccgtatccttcaggttctcctgtcccaaccgttgggcatgacgggcagtcatatggcacacagcaatatcagtaccctggtcagtattatcaacagccggctccaaccaatgcgatgcatggtgttaacagtgccaatcctcaatctgagctgccttccgctgcggctcaccagacacgtgctacggtagtttcagcaaaagtaactaccgggactgctagtgggattgcaaatgctgccagttcactaccgcgcaagcaaactcaccaccatgtatcagtgaccaacagtggttcatatggaagagggccctcgcaaggtggaccttccgctagcaattttggtcacactggtcaccgttctccagctcagtggtatgatggctcgttgctgtaacatgcggtagtccattgcgctacaactcgggcatcttatgaaacgcgcggatcatatatgggacaactaaatttaggtcgtgcgacttggttctcgtgggcgtttaggtctcttatatacttggtgacaccgggctgttatatggccccttttcctattcctatttttgtttcggagtctttttggtacaataattacaacgggaacacactgaaagctggacttgggttttggttctaatgtctataactcgagaaataatggacagtggggagtcgtggataccgtcaaatacaagcctagaaaccgggcaacttttgggtttggcagtgagaatcaagatggcttcactgagcttaacagaggaccaagatctggtggattcagacaccaaaaaccatttggacctactgtcactattgctgtgaaggggcaggtcctcccttcagctgggaaacaagataatagcgttcttccagataagagtcaatttaaccaggaaggcttttctgcaacatacaaggatgcaaagttcttcgttatcaaatcttacagcgaggatgatgtgcacaagagtatcaagtacaatgtgtgggcaagcactcctaatggaaataagaagctggatgctggataccgagaagctcaggagaaatccagtgaatgcccggtgttcttatttttctctgtgaacacaagtggtcaatttgttggtgttgccgaaatggttggtcctgttgactttgacaagacggtagattattggcaacaagacaagtggaatggctgcttttcaatcaagtggcacatcgtgaaggatatccccaacaacattctgaagcatattacgttggacaacaatgacaataagcctgtgacaaacagccgtgacacacaagaggttaagcttgagcaaggtcttcaaatgctcaagattttcaaggaacatgtcagcaagacctcaattttggatgactttgcattttacgagaaccgacagaagttgatgcaagaaaagagagcaaagcaacaaccgcttcaggggcagggtgttgatgagaaggagaagagcgcagttaacgggaattccgctgcacagaagcagacaccgagcaaggagagcaccacccctgccgccggtgaagagccgaacgcttccaaacccaccacagctgaaagcggcggcgcgagtgccaactagcgtgatatatttcttacgctcgttgctgtaacatgcggtagtccattgcgcaaaactcggtcaggcttcggaatatgcgcggatcatacatgggaaactaaatttaggtcgtgtgacttggttctcatcgtttaggtctcttatatacttggtgacatcaggttcttatatggcccctttcctattcctatttttgtttcggagtcttgttggtttagtaatttcagctatttgttattgtttagactaaaggagccgattttcgatacttctagacaacatttaaggtactaagtttttatgagtgttgtagtgctggagaaagtaataagaacaaagaactcctggtttttctagtcaaaaaaaaaaaaagaaaaaaaaaaaaaaaatagc

SEQ ID NO: 4929 - DNA, 1752 bp, Triticum aestivum
  Clone ID: TRIAE-23APR03-CLUSTER44121_1
gcaccattggtccgtcccacaatatccactgcgccaccccgcccccccctcccccgctccccgcagcccgccaggggcgctctccgcccccccccctcgccggccctcgcgaggcgcggcgcgctcggtctgcgcgcgcgcccccccccctccctcccccccgcgcccccccccccgcgcccccccgcgcgctccttccaccgcgcagcacgggcggggccggccgcgccgtgctgcggcgcgcggcgacgcctcgccgcatcgcgcggctgcaccccggaggaggccgcgggagtccacccggcgatcccgcctcaccaccgcatccccccgaccatcatcgccggcttcatcgaatccgacaagaccactttactaaatcacacactgacatctcactatggaaaactgagcgctagtattgagaattagtatgttgaagttgacattgatggttcgttagttgccgcacaaactgctgaagcatggtacacaatgatgctcatcgatgctctttgcgtggtgatttagtacgaatgatcggtgaattggttgacaagaagaagggaaaggatgacgagaatgtttgaccatcttgttattgaaaccacaggtttagcaaacccagcacccataatacagacattctatgcagaagatacagtttttaatgatgtcaagctagatggtgttgttactctagtggattcaaagcatgcaaggttgcatttggatgaagtgaagcccaagggtatagtcaatgaagcagttcagcaaattgcttatgctgacagaattataattaacaagactgaccttgttagcgagcctgaagtttcttccttggttgagcgtataaggagtatcaatcgcatggctaatttgaaacgagctcagtatggtaaagttgatttggattatgtgcttggaattggaggctttgatttggagaggattgagagtgctgtcactgaagaaccacatgatgagcacgaacatgaacatgaacacaagcatgaacatgaacatgaccatgaccacgatcaccatcatcatgatcatgaccataaacatgaccatcatgcacatgatcacacccatgatcctggtgtttcttctgtaagcattgtttgcgaaggggagatggatcttgaaaaggctgacatgtggttggggaacctactgctggaacgcagtgatgacatataccggatgaaggggctgctctctgtcagtggaatgcctcaacgcttcgtctttcagggagtgcacgacattttccagggatctcccgacaggatgtgggagcccaacgagccgcgcatcaacaagattgtgttcatcggcaggaacctcaaccgggaagagctggagacgggcttcaaggactgcctgctgaagtaggccagagcttctgcttttggatggatctccagcttcatgattttgagctttgcggctgcagaccttatccttcattaaaatgtcgaaactgtaaccgttattgaactgacacggaacgcgaaatgtatatatagattggggagcagtagcatatccttggaacctggccacgatgttgttcgcagatgtctactgttatgcatgatgttgcactgtgacttgcagagatttatagactgtactgtgacttgaggaattgctctgtaagtcctaaaaatttccatagcatgtgtttcgttcaaaatttgcattttttaataaatacggttgaagttggtaaaaaaaaaa

SEQ ID NO: 4930 - DNA, 1414 bp, Triticum aestivum
  Clone ID: TRIAE-23APR03-CLUSTER4412_1
cttccccgtcaccacgccgaccatagctgcacttgatctgtgcaaacacaacttacagcaaaggaagaaccttatgcacttcatatttttgtttacatatagatattgttcacaattcagcaacagcatgccatcactgatgatgcatgcgtgctttattccaaatccacacatgatttgatgaggccctactgtactttatctgtgcgcggggttcacaacatcaccgttgttcgccttcccttgggtttggctcctgcatgccacgctcggacgcgccccctgctataacatcgcccccggaaagggcgatgctccacaccgaccgtgcgcaatatatacctcgatgcagcatctaaaatggacggcagcggcgccggacaggcacctgcaggcgagggcgggccttagttctctttagctcgagatggcgtgggtgaactgagaaacggcgatctgcttgatacggtgtcgtcgttgttgccggagtaaatgacgcgggtcttcacaccgccgttactccagaggaactgcccgtagctgctccggtggtggctgctgtccggctcctggtcgatgccgctggagagcatgtcctccccgtgccagttttggaagaccccgcctcggaggtgcagtcttcaagcacaccgtcctgtcgggatcaaccttcgacgaggctaatatgaaggacgtcgatttcgaggacacactcataggctacattgaccttcaaaagctttgcagaaacaccagcatcaacgaagatacaagattggagctgggatgcaggtgattcaatcacagctgcacttatggcagcatcgacgtacattgtccggtaaagattagtaagtcaggtctgttatagagcaccagcaggatgaaaatatgtataccgtaaatatcataccacagctgcacttgatctgtgcaaacacaagttacagcaaaggaaaaaccttatgcatttcatatttttgtttacatatagatattgttcacaattcagcaacagcatgccatcactgatgatgcatgcatgctttattccaaatccacacatgtattgatgaggccctactgtactttatatgtgcgcttgcttgacaacatcaacattattcgccttcccttgggtttggctcctgcatgccatgctcgcacgcgcaccctagtataacttggcccctacaagggccgatgctgctcaccgacagtgcgcaatatatacctagatgcaccatctaaaatggccggcagcctcgccggccaggcacctgccggcgaggtcggtctttaattgtctttagctcgagattgcgcgggtggcccttgctccggcgattggcttcattcagtgtcgttgttgttgccggagtcgatgacgcaggtctccacaccgccggtcatc

SEQ ID NO: 4931 - DNA, 791 bp, Triticum aestivum
  Clone ID: TRIAE-23APR03-CLUSTER4413_2
ctaacaaacccctcacccctcgtcgccgaaacccttcctcgcccccgcccccgcccccgccgccaaacacccatcgccatgcggccaccgagaggtggcggaggtttccgcggacgcggcggcgaccaaggtggccgcttcggtggaggcggccgcggcaggggccgcttcggtggaggcggcggcgggttccgcgacgagggccctccagccgaggtcgtcgaggtgtcgacgttcctgcacgcctgcgagggggacgcggtaacgaagctgacgaacgagaaagtgccctacttcaacgcgcccatatacctccagaacaagacccagatcggcaaagtcgacgagatcttcggccccatcaacgaatcatatttctcggtcaagatgttcgagggagtcattgcaacatcttacaacgaaggtgacaagttcttcattgaccccatgaagctgctgcccctctcacgcttcctgccgcagccaaagggctcgactccaagaggtggtggtcgcggtggaagaggtggtggtcgcggtggatttggtggccgtggtggattccgtggaagaggtgcaccaaggggtcgtggacctcccaggggtggagggcgtggtttcagaggacgaggcagattctaggatgtagttttaagtttgctgttttttgaaacatgatgctctacattatctcttcagctggaaacattatgctaagtcacctgtgagcgccctttgtgtgggagttgattcaatatttgtatgaataaaatgttgtcaagtgttgggtt

SEQ ID NO: 4932 - DNA, 790 bp, Triticum aestivum
  Clone ID: TRIAE-23APR03-CLUSTER44148_2
gcttccaagtacccccccacgggggcggggatcccgccagaggccggtttcctgttggggggatttttggtagccctagcggcgttccagttacgcacttacgggtagccattcaccggctgccttttttgtgccctcccgcttgcaacaactcgccggagttaccggtcgtggagatggccacaccgctcatagctggacttgctgtggcagccactgcttttgcgggtagatatggcatccaggcttggcaagcttacaaggcaaggcccatagttccaaggatgcgtaaattctatgaaggtggctttcaagctacaatgaccaaacgggaagctggtctaatcttgggtatcagggaaaatgtccgtcctgataaggtgaaagaggcacacaagagggtcatggttgccaatcacccagatgcaggaggaagccattaccttgcgtcgaagatcaacgaggcaaaagatgttttgctggggaaaactaaaggaggtggttcagccttttgatcatatatcatgcaaaatgtgctcacccaatgaagatactattatttttgcacctccagtctctgcacctagaactagaaggcagacaaaagccttggtgtatcactgaaatttctggagaaagaacattagatgtcttagacgtagcaggttctttgactgtttgacacttccaagaccaaagttgtgctggttaaggaataaatgatgtactacatgcaaaaaaaaaaaaaaaaggttggcctgtgttgagttttgcataacatttgttcatc

SEQ ID NO: 4933 - DNA, 1970 bp, Triticum aestivum
  unsure (1)..(1970): unsure at all n locations
  Clone ID: TRIAE-23APR03-CLUSTER44167_1
cctattaaatccgcggcctcgccactccactgcagcagcagtccagcgcccgaaccgccgcacacacacagcgccaaccaactaaaccgccacccatcaacaccggggaagcaatggcgtcgccggcgaaggcaatggtggcagccgcggcaatgctgctgctcctgtcgacggcgaccgtggcccagcacaactacggcgacgcgctccacaagagcatcctcttcttcgagggccagcggtccggccgcctcccgcccgaccagcgcgtccgctggcgccgcgactcggcgctcaacgacggcgcgaccgccggggtggacctgacgggcgggtactacgacgcgggcgacaacgtcaagttcgggttcccgatggcgttcacgacgacgctcatgtcgtgggggctcatcgacttcggcaagaacttcgggtcgcacggcggggaggcccgggcggcggtgcggtgggcgacggactacctgatgaaggcgacggcgacgcccaacacggtgtacgtgcaggtgggggacgccttccacgaccactcgtgctgggagcggcccgaggacatggacaccccgcgcaccgtctacaaggtggacccccagcacccgggctccgacgtcgccgccgagaccgccgccgccctcgccgccggctccatcgtcttccgcgaggccgacccggcctactccaagcgcctgctcgaccgcgccatctccgtgtttgagttcgcggacaagtaccgtggggcgtacagcagcagcctgtactcggcggtgtgcccgtgctactgcgactacgacgggtaccaggacgagctgctgtggggggcggcgtggctgcacaaggcgtcgcgccagcgggtgtaccgcgactacatcaagaagaacgaggtggcgctcggcgccagcgactccatcaacgagttcggctgggacaacaagcacgccggcatcaacatcctcatctccaaggaggtgctgatgggcaaggactccttcttcaagtcgttccgggtgaacgccgacaacttcatctgcaccctcctccccggcatctccaaccacccccagatcgagtactccccaggtgggctgctgttcaaggtgggcaacagcaacatgcagcacgtgacgtcgctgtcgttcctcctgctcgcctacgccaactacgccagccacgccaacgcgcgggtgccgtgcggcggctcctccgcctcgccggtcgtgctccgccgcgtcgccaagcgccaggtggactacatcctaaccgacaacccgctgcgcatgtcgtacatggtggggtatggccccgccttcccgcggcgcagacgccagcgcccggtttcgctcctgtcccaggtggactacatcctgggcgacaacccgctgcgcatgtcgtacatggtggggtacggggagcggttcccgcggcgcatccaccnccgcgggagctcgctgccgtcggtgtcggcgcacccagcccggatcggctgcaaggccgggacggcctactacggcagcagcgcgcccaacccgaacctgctcgtgggcnccgtggtgggcgggcccagcaacaccagcgacaacttccccgacgcgcgggccgtcttccagcagtccgagcccaccacctacatcaacgccccgctgctgggcctcctcgcctacttctccgcccacccaaacctgccccagtccgatggcaccgactgaagaaatgtggttgaagtggcctctttagctgtggtgggccgaagaaggaagcctggttggtggtccttgttttgtatgggctgcagtgggctgattcgtcctgttgctttgctgcccctgtattgttatctctatatttctacgtgtaacggatgccgctcctttcctgtaaaaaatggcaggaaaaggatcggtcgtgccaagacaagtaatctatatctatctactactactatataaaaaaaaaaa

SEQ ID NO: 4934 - DNA, 1732 bp, Triticum aestivum
  Clone ID: TRIAE-23APR03-CLUSTER44341_1
gaaaatgaaaaccatggacaccgtaccgatgggtaaaatatgaagaaactgagcgagccgacaggcaggggctaaccgaacgcacaagaccagccggaccttatccgaaaacctgcccaccttcaaatcgccgtggacgaccaaggagacggcggccgtgggcacaggaggggaatccgcatccggggggaacaagagcagaggaatcgggaagagatccgtgttggtggtaactggagttgatagccggattcccggagggagacgaattcgacctagcagcggagttgggagcccgattccaggtgggagacggcagagatcaccaagaaggacgacatcaatcgctataaataaagggggccaagaacacccaagggccaaggcgcagccagagatccgggtgctgagtctttttttgcttgctgttgctgaatactagtgctagaaatacttgaggaaattcctagcctgcaggctgcagcagatggaaggccccttcccattgcttgtgcatgatcttgggaaccgtacagatgactgccagacgcggttcagcatctccaaccaggccgtgagcaccgcagccatccatgaactcaaggactacaggtgcttcgagtctccacagggctgggtgctcgcgctggaacctgcttccctgcacacgttcctgtggcgtcctcaggacggccagaggatcagccttccatccccaaaacaagaatttcccaggaggtgcaagtgcctgctttccgacaagcctagctcgacatcgtcttgcactgttctggtcctcgatcttgaccagcctaatctgttggtgtgccgaatcggaggaagccaatgggactcttacaactatgagctcaccatgttcctcgcagatgacaagccccgggagatacatatggccaaacttaaaggcattgctgctgttgggggcaaggtctactacacgttcacgggacacgcccttggagtagtggagttcagccctgagctcagcctcaccgagtttgaagttgatatggttgaactgcccgacaccatgccgtttacttcaacttacttggttgaatcatgtggtgacctctttatggtggtcgttgtctttcttggacacaacgtgcacaaaatcgacaaggtcgacgtgtataagatggacttctcgaggccggaatggtgcaaggtggacaggattggtgatagggtgttcctcttgggtggagacagcatcggagcttccaactttggagcatcatgttcggccagtgaacatggtttgtctagcaactgtatctactttctgaacaacatcgctgccgaggagaattacctgcacattttcaacctggagaaagggactgaagaagtgcaacgtccttttagacacaaaaatggttgcctgctgccaccgccacgtccaccgatgtggctgttacccacagacgactgacttcatgtgcaaggaaaatttagcactgtactagtactttttttgtttgtttggatacctgcaataaagtggtgcctagcaccttagttcaaggttttggtgtattctcagttagagagagtacatgtttattatgcgtcgtagcatttgttttcgttgtcacctctgaaatgtgaactgtgtgacgagaggaaaactattaccatctgcatttatcactgttttctccaaagcattagatttttgtatatatatcatctgtcaaaaaaaaaa

SEQ ID NO: 4935 - DNA, 1364 bp, Triticum aestivum
  Clone ID: TRIAE-23APR03-CLUSTER44413_1
accatccttccatgcttcctcactcttcttcctcgctgcgactcactccttgttatccagggatattcacgccacttccgcacgattagcggcggctcccacactcgtccttgcggattagggggggaggcgtttaccatccccccacgaccaccatgttgcgaggcaccggcgtagctgctatccggccgccgccggcgcctccgccgccggctgcgccgaaaagggccaacgagccctccgattggcccctggtggaggcctgcgcggccgcgcccttcgagggcagcccggccccgggcgtgcctgctgcgaacagccgcgcggccaccgcggccatcgcccctccggcgtccgcggcccgtggcccccccgagtgctacctcccgcccacggccttccccgccccggactccatcctgggggacgccggggcagcccccgcggttccacttccgatggttcacgttccccgtcaccgaggttgacctctgcgggcacgcgacgttggcctctgcgcacttcctcttcacgactgttcttccggagcatggaaagctggagttcatgaccaggtccgggatcctaactgccaagaaagtccctgcaccagggagcactggcgtcccaggtgaggagcaggggaagctgtttattgagctggatttccccatgattggttttctggactgcaaccaaatgccgtcgattccagagaccctaaacggtgcgcccattgtcagcgttcacaaatcggctaccgacggcgacctcattgtggaactttcttcaggaaaagaagttgttaatatccttcctagcatcgatgaaattaaaaacttggcctgcaggggtcttattgttacaggaccggcgccggctggatctggttatgacttctttacacgtttcttctgcccaaaatttgggatagatgaggaccctgttacgggcagtatacattgtgttttggcaccctattggggcagaaagctggggaagcaaaaattgacggcatttcaagcgtctccaaggggtggaacactatacctgcaactggatgacgcaaatcagagagtgcaaatccagggagaagctcttactgtgatggatgggacgctcctagcctagccagccattggcaatttggcatccatctactcgtatatgctttgaagggactaccattcatccatctactcgtatatttacggagttataatatgactttggatgtttgtgattatatttgctgttatatgcttgttgaacagttaactgtttatggatataaaaaatgccccctccattccctaaaaaaaaaaaaaaaaaagcttatcgataccggcagagggagatgtaag

SEQ ID NO: 4936 - DNA, 1354 bp, Triticum aestivum
  Clone ID: TRIAE-23APR03-CLUSTER44573_1
acccgccccaacctccacccgccccccccttccccgccgcccccccgacgccgcctgccgcccgcgccccccaccccccccgcccccccccccacgccccccccgccctcctcctcctcctcctcctcgtcgtcccccgccacccgcggacgcgtgggtgtttggctaccataccaaccgatgtaaaggctgaagccacttttatcgctaaggaggatggtgtcatcgcaggcataagcctagctgagatgatatttaaccaggttgatccgtcgttgaaggttgaatggtttgaggctgatggaaattatgtccgtaagggattgcagtttggcaaagtatatgggtgtgctcagagtatcattgttgctgagagggttgtgctaaatttcatgcaaagaatgagtggaatcgctacaatgacgaaggccatggctgatgctgctcgtccagcatgcatactggaaacaagaaaaactgctccaggtttacgtctggttgacaagtgggcagtactaattggtggtgggaagaatcacaggcttggattatttgatatggttatgataaaagataatcatatttctgttgctgggggcattacaaatgcaatgacatctgttgatcagttcttggagaaggaaaatcttgcaattcctgttgaggttgagacgaggacactcgaggaagttagagatttattgaagtataccgatgagaacaagacttcattaactcgtataatgttggataatatggttgtacctcttcctaatggggacctagatgtgtcaatgctcaaagatgcagttcagttgataaatggaagatttgagacagaggcgtctggaaatgtgacgatcgatacggtgaagaaaatcggagaaactggagttacatacatttcaagtggagcgttgacgcattccgtgaaggcgctcgacatatctctcaagatagacaccgagctggctcttcaagttggaaggcgcacaaagcgcgcctgacaccacaggatgtttggcgtcgctggccggttcatcattcgacaacgtgatcgccacgctgtgatttctaactaatatagtgaaggatgcaatccccgcctcacgatcatccagttcggatgaacgccacagttgctatagtatccaacggaaggacaataataatagcctgaatgcccagctttcagtagattgcgaaacatttaagccgttgactagacaggcagaaattgttgctaaatggcgtagaagttgtatgtgacgccacaaaacatctgtttcccaggaactgagaaagaaataaaatggtgtgcctgttgcctttagtaaaaaaaaaaaaaaaaaaa

SEQ ID NO: 4937 - DNA, 1848 bp, Triticum aestivum
  Clone ID: TRIAE-23APR03-CLUSTER44608_1
aaaaaattaggatcgacagtaggagtaggatttagggggaaagtagagggggaccctgcagatcgaagaaagcacagccgccgccgatgagcgcaacggagaagagcacggagggggagggggagggggaggggtcccagcgcgtggaggcgttcctcgacatcctcggccgcgtcccgatgggggaggtggagggggcgctgacctcctgcggcgtcggcccgacggcggaggccgcggagcaggtgctcaagtccgaaacctgctactcccgccccaaatcggccgtccgcttcttccgctgggcgaaggcgtccgtgcagctcacccccttggcctggaacctcctcgtcgacatcctcggtaaggccgccatgttcgatcccatgtgggacgccgtcctctccatgagccaggagggcggcctcctctccgtcgccacattcgcctccatgttcgcctcctactgcgcgcgcggcaacttcaaggaagccgccatggccttcgacgtcatggagcgccacggcgtgacgccggacgccgttgccctcaactccctcctcgccgccatgtgccgccgggatggcggcgggcaggccgcgtgggagcttttcgaacgctacaagaccacggtcgcgcccgacgccgacaccttcgcgatactgctcgaggcgtgggagaaggaggggaacgtccagcgcgccaagagcaccttcggcgagatggtcgtccgcgtcgggtgggacgccagcaacatgcctgcctacgatgctttcctctccacgctcgtgcgaggggaccagttcaacgaggcactcaagttcctccaggtgatgcggaccaagggctgcctcccggggctcaagttctttgccaacgcgatcgaccttgtcgtccgcaagggagaccatgccaatgctattgctatctggcaaattatggtctcggatgcaggactggttcccaatctcccaatgtacaacgccgtaattggcctctgctctagtgtcggtaacaccgactacgccttccagatgctcgatgaaatgcccttaaatggggtctttgcagattctgatacatataattccatacttgaggggctcatcaagcagcgcaaggctcgtgagactgaaggtttcctcgcggagatgagcaagaacgagcagctgccctccgcctccaactgtgctgctgctatcagcttattttgtcaggagtttaacccatctgccgcagttgacgtttggcactgcatcgtggagcaccaaattactccggctgaggaatcagccaaagagttaatagctgggcttctcgactttagcaggttcgccgaggtgaagaaatataccgatcagatgcttgacatgggaattgagttgccccagtccaccattgaaaaaatgaagcgagcattttacaaggctgagaggcaccacacatatgaccaacttgcacgaaggttgaagcggcggtaacaacacattgatggtataattcattagaaacgagcgagaccgagaagctgtaggatgaggtttcatgctgccagagcaagctgcggtatgtattcaaagtggaaagtggatggaagtctttggtgcagcgggtacaggttctggatgttgttttgcgccactggttgtatggaagatgtttcctggaagtatagcattgtactgttgtacttggcatggaagagcagtttctgagatagctgtaatgctgtacttttgcgttaactggagtagcctgttgccttttaaaaaaaaaaaaaaaaaagcttatcgataccgtcgacctcgagggggggcccggtacccaactggaggggggaaaggagtt

SEQ ID NO: 4938 - DNA, 1451 bp, Triticum aestivum
  unsure (1)..(1451): unsure at all n locations
  Clone ID: TRIAE-23APR03-CLUSTER44609_1
actcgcctcctctgacccccgggagcctgcgaccgatccccctcgccggcgaacacaaccgcacaaacgaacgcgccatggtgtccgcgcggaagggccagggccgcggaggcggggtccgaggccctccccgcgtcgacggcggcggcagcctggcttcgcgcgtggccgtgctcgccttctgcgtcggcgggatctggtcgtcctacatcacccaggggatcctccaggagacgctatcgacgaagcgattcgggccggaggagcggcggttcgatcacctcgcgttcctcaacttcgcgcagaacgtcgtctgcttcgtctggtccttcataatgatcaagctgtggtcgggtggtagcagtcctgccgggcgggcgccgcttctcaagtactggggcgtcagcatcaccaacaccatcggcccgaccatggggatcgaggcgctcaagtacatcagctacccggctcaggtcttggcaaaatcttctaagatgattccagttatgttgatgggaactatactctatggtgttaagtatacaattccagagtacttttgcaccttccttgttgctgggggcgtgtcatcctttgcattgttgaagacaagttcgaagactatcaagaagcttgctaaccctaatgctccgcttggctacgggttgtgcttcctcaacttagcttttgatggctacactaattcaacccaagatttgataaagtccaggtaccccaaagactaacccttggggatataatgcttgggcatgaacttctggggaaccatatacatagcgtggtcgcggccgaggtcgccattactgttcagtaactggccatacgcaaacggttttgaggctgtaagtttttgccgggagaacccagaggtggcctgggacattctcatgttctgcctatgcggcgccgtgggtcagaatttcatcttcctgaccatcagccgattcggctctcttactaacactacaatcaccaccacccgcaagttcatgagcatcgtcatctcatcagttatcagtggtaacccactgtccatggagcaatggggaagtgttgtgatggtcttttctggcctctctctccaaatatatctcaaatggaagagaaagaagggcagagatcacaaggaatgaactcaattcttataagcacattttgatttgtagctttgattgcgcacatttgttgtggagatatccgggagatcattaatgtagcccattgaaatgataggaaagaggtttacatttacaggaatgtttgaaatgtacggtaatcgctaatagtgttagctatttaaaaaccgctgggtagtctattctactcaggggagttgcatcatgagcaatacgataaatcatgtactcaaactttctccatctagctgagcaattagcaaaaaaatcatgccnctaaaaaaaaaaaaaaaa

SEQ ID NO: 4939 - DNA, 2459 bp, Triticum aestivum
  Clone ID: TRIAE-23APR03-CLUSTER44624_1
gtcctggtgggaggccccgccgcatctggccccgcaaaacctatctcgaccgccttcctccccgatctcgcccctcctcgcctggcgaccagcttcgatatccacgtcttcggagcacgccccgctcgccccggccaagtcgtgagttgagtaagggaggcagcagcagcagccatggcggcggcggaggagaacagctcgctcttcctgatattcatcctgaccatgatcgcgctgcccgcgctgcccctggtgccgtacacgatcacgcggctgtgccacgcggcgacgaagaaggccaagaccatccactgccgctgctccgggtgccaccggtccggaaagtaccggaagtcgatctactccaacttctccacctggtgcaagcttagcaatttgcttctcttgcttctctggatcgttgtgatcttcctgatttactacatcaaactcagcagccgcgaggtcctttgagccatacagcattcttggacttgaaccaggggcatcagaaaatgaaatcaagaaatcatacacgacaggagactctctattcagtaccatcctgataaaaatcccgatcctgaggcccatacgtactttgttgaatccatctccaaggcgtatcaggcgttaactgatcctatatctcgtgaaaattatgagaagtatggtcatccagatgggcgccaggggttccaaatgggcatcgctttgcccaagttcttgctgaatatggatggtgcatctggcgggataatgcttctaggaattgtggggctttgcatactcttccccttgatgatagcagttatttatttatcaaggtcatcaaagtatactggaaattatgtcatgcatcaaactctgtccacttattattactttatgaagccatctctagctccaagcaaagtcatggatgtcttcatcaaggctgcagagtatatggagatgccagtacgacgcagtgatgatgagcccctgcagaaattgtttgtagcagttagaagtgagttaaatctagatttgaagaatattagaactgagcaagccaagttctggaagcagcatccatcacttgtaaagatggaactcttgattcaggctcatcttactcgagagtcatttgctttgacaccagcgctagtaaaagattacaggcacatgcttgaacttgcgcctcgtcttttggaagaactagttaagattgcacttctaccgaggagtcccaacggttttggatggctcaggcctgcaattggtgtagttgagctgtctcaaagtataattcaggctgtccctctcagtgctcgaaaagctggtggaggtaattcagaaggaatagcacctttcttgcagctgccacattttactgaagcaactgtcaaaaaaattgcccgcaagaaaatcagggcattccaagaactttgcgatatgtcggaggtggaacgtgccacactgctgacacaggtagctggactttcagaagaagaagctcgggatgtagagcttgtactggagatgattcctactgttgaggtggatattaaatgtgaaaactgaaggagaagagggcatacaagagggtgatgttgtgacaatgtatgcttgggtctcacttcagcgtcgcagcgggctaactgctgcccttccccatgctcctttctatccgttccacagggaagagaacttctggctgcttctagcggacacagcgtcaaacgaagtttggttatcccagaaaatcagcttcatggacgaggctaccgccataactgcagcgtcaaaagctatacaagatacccaggaagcattgggagcaagcccaaaggaaataggaattgcagttagggaggcggttgacagagtgaagaaaggcagtaggctggtgatgggcaagttccaagccccatcagagggcaatcacaacctgacgtccttctgcttgtgcgacgcatggataggctgtgacagcaagactagctttaagctgaaggttctgaagcgcagccgcgcgggaacaagaacctatgtgcctgaagaagggccagtggcagaggatggcattgaggaggaagaggaggaggaagaagaggagtatgacgattacgagagcgagtacagtgaggacgaggaagaagaaaagaagaagggaaagggtaaggttgcaaacggagcagcacatcaaagggcaagctctgatatagattcaggcagcgatgattgatactataccttgtgatgttcaaccatagatgattaacatccatgttttttgccatttgacttgtgaaacttagagagaaaacatctcccatcaacttatagagcatgcggtaatagatactggattttttgttttgtttattattcttgcgctgtatgaatggaaccaataattgagaataggctgtgaaatcaaaccggcgggatatcttgggtccccaaaaaaacct

SEQ ID NO: 4940 - DNA, 1808 bp, Triticum aestivum
  Clone ID: TRIAE-23APR03-CLUSTER44638_1
cagatcgaccgacgaatcctcttcctcctcctccgcgccctcgcctcctgtcgccaccgcaagcaaggcaaggcaaggcaatgccggcggcggcggcctcgttgtcgcgggcggcaaaccgcgggtagataggcgccaaatcttggggatgcccgcccgccccctcctaacattcttcaccgtttcttctttataaaaattctctcttggcttttgtgctccgccccctctccatatattcgctgccgattgcggggtctgctctcggtctgtcctccctgttctcgctgttgcccttcttgtttgttcttggtgcccggtgctgctggattggtccgcgttccgtgccggccgccggagatggagaacgggcatgcgggcaagcaccgggtggccgtcatcggcagcggcaactggggcagcgtcgcctcccgcctcctcgcctccaacaccgccaagctgccctccttccacgatgaagtgagaatgtgggtgtttgaagaaacattgccaacaggcgagaagctatccgagtccattaaccaagcacatgagaactgcaagtacttacctggtattaagcttggagccaatgttattgctgaccccgacttagagagtgcagtcaaagacgccgatatgctggtctttgtgactccccatcaatttgtggagggtatatgtaagaaacttgtgggcaaactaagaccaggagttgaggctatatccctcatcaagggcatggaggtcaagatggaaggaccatgcatgatatcaaaactaattaccgatacacttggaatcaactgttgtgtcctcatgggtgctaacattgcaaatgagatcgctgttgagaagttcagtgaagcaacaattggatatagggaagataaagaagcagcaaaccgatgggctaaacttttcaccactccttacttcctagttgctattgtggaagatattgagggagttgaactatgtgggacactgaaaaatgttgtggcgattgctgcagccctcgcgtccggcttggatatgggaaacaacaccaaggctgcgataatgcggattggtttgcgggaaatgcgtgctttctctaaacttctgttcccttcagtcagagacaacactttctttgagagctgtggtgtggctgaccttataactacatgccttggtgggagaaacaggagagtggcagaagcctttgcaagaaatggcggcaaaaggtcttttgatgagctagaggcagaaatgttgcatgggcaaaaactgcagggggtatccactgcaagagaagtctatgaagtattgacttatcatggatggcaggaactgtttccgcttttatccactgtacatgagatctgtatcggacaactacctcctacatcaatagttgaatacaggctcgctgaaggtcaatcttgaagatgccatcaagaacaatttgggctttgtaaagttttcgaagaccaagcattccattaccttccaattcctggcaaagcaaggcccaggaagttgtagatgctagatgctagctcattttgtttattcatttgtggcatcatgtgtcacatcttacatatgtgctggcttcagcaagaccaagcaaggtgtcatcacctgtttgtaacagtttataaactctatggaggctgttaaatgttttttaggaggtaacatttgcatcagcagccatgactgggaatctttgcctgcatgataattcctcactgggaatctttgcctgcatgctggttctcaaaaaaaaaaaaaaaaaaaaaaaaaaaaactcagactag

SEQ ID NO: 4941 - DNA, 1595 bp, Triticum aestivum
  unsure (1)..(1595): unsure at all n locations
  Clone ID: TRIAE-23APR03-CLUSTER44703_1
gcctccaacaattcccgaacctcaggactcagggtgacctccctccacccgcaacgcgttcgccgccggcgccgccatctccaccgacaccgcctcccccttccaatcctccctcctttccatggcgtcgccgtcgggaagcgccggggacctagcagagccttgcgggggcgcctcctctactatctccccaatccggccgatgctctctgcagctcctcctcctactgttctccccccagtgtggagggaatttgtgtggggagcaattgcaggcgcatttggcgaaggcatgatgcatccagttgacaccctgaaaacaaggcttcagagtcaagctataatgtcaggcgctaaggttcagaagaatatttttcagatggtcaggacagtttgggcttctgatggactgagaggtttctacagaggaattagtccaggcgttactggttcacttgctacaggtgcaacatattttggtgttattgaatcaacaaagacatggctggagaacaataatcccaatcttagtggtcattggtctcactttattgctggaggaattggagatacacttggatcttttatctatgtgccttgtgaagttatgaagcaacggatgcaagtccaaggctccagcaaatcttgggcactaaatgctacaaaaggaaatgtttctcaatctcctggcactcagatgtatgggtactataatggaatgttccatgctggttcttctatctggagagatcatggtgtgaagggactctatgcaggatatgggtctacgcttgccagggatgtcccgtttgctggcctaatggtaactttctatgaagggttgaaagaacttactgtgtatgggaagaggaagtatttgccagacagtgatttacaagtcagcaactcttttgaagggcttgttctaggaggattatcaggcggttttagtgcatacttgacaacccccttggatgtcatcaagacaagacttcaagtacaaggatcaacaactaggtacgatggatggctggatgctgtaaaaaagacatggaatgctgagggagtgaatggcttattcaagggaagcgtccctcggataatatggtatatacccgcatctgcattcacgttcatggcggtggaattcctgagagagcatttcaacgagaagatcgatatggatgcggagacggccttgaactagcctacctgctgagtctgaggctgaggtgcaagagagaattgacccagaggattttttggtttgtctgacagcggagttccatttggctaatgcaggagtagatatgcattttcagcaatgcagaaacatatgtaggtagaagagaggagtagagctggctgtccttcgttaagtcggagatttttgggagttagagaccagccgtcttggagctagttgcctgtaccgattccgtttgtagcccctaccatttttgccacattgaagattctaaatgcagttacgattccttgtgttttgtttntgaagctcttagtttttgaagatcatatgcaaatgttcagtgttcatgcgtntcatacattttntacgaaaaaaaaaaaaaaaa

SEQ ID NO: 4942 - DNA, 1772 bp, Triticum aestivum
  Clone ID: TRIAE-23APR03-CLUSTER4478_1
gcctccccaccggcatcgtcatcctacacgcgaaccacgcctccgacccgattcaccaggagcgagtccctctccgggcagcagcagatgggggcgacgggcgactcggaagtggcggcggcggaaggggcggcggcggggtgccgcgcgcgggcggcgctgctgggcgcgtacgagctgggccgcacgctcggggaaggcaacttcggcaaggtgaagcaggcgcggcaccgcgccaccggggagcacttcgccgtgaagatcctggaccgcggcagggtgctctccctccgcggcgccgacgaccaggtccgcagggagatcgccacgctcaccatgctcgcgcaccccaacgtcgtccgcctccacgaggttgctgctagcaaaacaaagatctatatggtgcttgagtttgtcaatggaggcgaactttttgacaggattgcaataaagagaaagctatctgaacgagaaggaaggaggctttttcagcagctaattgatggtgtgagctattgccatggaaagggtgtctaccacagggacctcaagcctgaaaacgttcttattgaccggaaaggcaacatcaagatctctgattttggtctcagtgctttaccacaacatctcgggcaagttgccccaatgatggattgctgcatacaacctgtggtagccccaactatattgctcctgaggttctgcagaacagaggttacgacggatcattgtcggatatctggtcttgtggagtaattctttacataatgcttgtaggacaccttccgtttggtgaccgaaatatggttgttctttatcagaagattttcaagggtgacactcagatcccggagtggctttcccccggtgcacaaaaccttcttcgtcgaattcttgaaccaaatccgatgaagaggattaacatggcagagatcaaactacacgaatggtttcagaaagactatattcctgctgctccatatgatgacgatgatgaagatgtacggcttggtgcaattctacctatcaaacagcaaattagtgaagcacccggcgacaagagtactcatcagatgaacgcttttcagctgatcggaatggcatcttcccttgatctttcaggtttatttgaggaagagggagtgtcccagagaaagatcaggttcacatcagcacatccaccgaaggatttgttcgacaagattgaagtgtccgcgacgcagtcagggttccatgttcagagagcacatagcaagctcaaaataacgggcaattgcaatggaccgaacaaccccacaccattcttagtctgtgccgaggtttttgtgcttggcccctctctgcatgttgtggagcttaggaagtcccatggtgacactgcagtgtacaaaaagctctgcgataggatctcgagtgatctggggattgacaagactttcgggatgggctcgctcttcgacgacaacctccctggcttcgacagcagagcaacgacaccactggttgccttgtgatgagtgttgtgctgtaggtaccccaactgacatgatgttgtaggacgctaggatcatagctgtttattgattggaaatgacggtgatggtgtaaggattaggatcgtacggtgtacagaactatatacatatagtcaagtcgtgaaattgactatcagtgatgtagttttttgcggaagagcggcaaaaacggcgctcagcggggtcagcgttgtttgcgcgtttgcgccaaagcccttggcctttataaagtcgcca

SEQ ID NO: 4943 - DNA, 1221 bp, Triticum aestivum
  Clone ID: TRIAE-23APR03-CLUSTER4483_1
gccagcaaacaaaaagagctcctttcctcctcgcccttcacctgcctccttccctcccaatgccgccgcccaatctccaagcgcgcgactacatcggcctcgtccgccgcgccctccgcctcctcctgctcctcctccgcctcgggcgacgccggcccgcacctcgccctccgcctcggcctgcccggccgcgaccacccggaggccgccgtcgacgccgcgctcacgctagggccggctccagctactgctcccgtccctcacaggggcggcgccaagcgcgggttcgccgactcgctcgaccgctcccctgccgctgctgccgcgctgccggggaggaagacaagcacaagggcgaagccgccgccgccggagccggagctcctccagccgccaaggcacaagttgtaggatggccgcctgatcggagctaccgtaagaacacgctagccgccaatgccgtacttacctatgaagacaaggatgctgactgcgaggcaggttgctgctatgtcaagggcagcatggatggagccccgtacctaaggaaggtcgatcttaagacttactccagctatgacaacctttccctggagctggagaagatgttcagctgcttcatcactggccaaaagtagttcctgcaaaaccttcgacgagagacaggctcactcgatgggttctaagggctgatgctcttcaggaccaagagtatgtacttacctatgaagacaaggatgctgactggatgcttgttggtgatcttccttgggacttgtttaccactactttgtcggaaactgagaatcatgagaggctctgatgctgctggaatggccccaagatagctggaaccgaccggccagaacaaacaggaggcgtccgtccgtcctggtctctcctcctcctgaagtcttctgtctgaatcacgcaagtgtggaattttgagttaacgctgcaaggcgccgctgaagggtgcgaaggttgtctcaactctctgaaagtgtctgcgctgctggtagttttatctgtctacgtgtgtagtggaatatgtgcgtcctactgtaaaacaatccgtttttggcctcgccgttgtagatgtccttttggttcatgaaagatcgccgcctgtatgatgatgctttcgcctatgctcttacatatatatttgaagtcaagtcgtattttatgaagaaaaaaaaaaaaaaaactcgagactag

SEQ ID NO: 4944 - DNA, 2246 bp, Triticum aestivum
  Clone ID: TRIAE-23APR03-CLUSTER4484_1
attgtttgagctgtgttctcttccgcgccactcctcccggcggcggccccccctcccccgcgccccctcccccgccgcctcctcgacgacgaactccccggccggcctccgccgcccgcgccccctccccgagctcccgacccggagcggggatggggccatacgggagaagccctagggggcacggcgggcgccgcccgatggtgccctttcgatggcgcaatgggtttagacaacttgctgaagacaactaagggccaaaatggattggccaaatgccttagggcggcgggccacggttgggggttatcggtataaaattttggggtccctttttaaagacccctcaacttccaaaaccctggtgcaaatgtccaagttgcaatatgaaaagttcaggaagatgaagttggtggtggatgatcttcttgggttgctttggcgggagaacggttgatggaggctgagaagtattaatttttttgcattcattgtgcgttaaagtttttacatcaagagttcccgcccaggaatattctacaaaccatagtccttcaatggtgctgcagacaagttcagatcagatctcatgaacatcgccatgactacacttagttcgaaaattctctcccaggacaaggagtattttgctgaacttgcagttgatgctgtcctcaggcttaagggtagcaccaacttggaatcaatccaaattctgaagaaacctcggacatctcttaaggattcctttttggatgaagggggcattcttgataagaagattgtccaaggtcaaggatgaagaattgaaaacgctaatattctggtaatctacactgctatggacacagtataaagttaagcaagccatgccaacaatcatagcggacactgctggtctggatagtgatattgaagcttctcagaaccaagcaaagcgccacaaagagaagaaaatcgttggaatcgacgtcatcagcgtcggcctgggagacatgcagaaccgttgcacctgcgaggcgttcaaggttgcgcaggccatcgtcctgtcggcatgcgaggctgcggagatgatcctgagggtcgacgagatcataacctgcgccccacgcaggagggggcaccccaggggctgataccctcgggctgtgcaagctcatcgaagagattatgagtggggtgggccggctggtgcatggctccccgggggtccagggctgctttgaagtctccatttcgattggcgtcgatccccgtcccctaagcgacgggaacttgtcctggcggagtagctagcgtgccctttctcagaccgtaactgacacgcgtgtcatatatggtgggggatggcctgagatggtgatgtccaaggaggtggacgaacttgcaaaggaagacccctgggaagaaatctcatgcgattgacgccttttcgcgcgccctgcaagccatcccaacaatcattgctgacaatgctggtctggatagtgctgagctgatctcccagctccgagccgagcaccacaaagagaacagcactgctggaattgatgtcatcagcggcgggctgggagacatgcagaagcgcgggatatgcgaggcgttcaaggtgaagcaggccatcgtcctgtcggcgaccgaggccgcggagatgatcctgagggtcgacgagatcataacctgcgccccgcgcaggagggaggacaggatgtgagcgctgtctcgatgcagcgctctcttatgtatgatggtttgccgagttttggctgggttgctgtggtccacgactgctttaaagtttgattgaccccatttcgattgtcgttgaaccctgacccctaagcgactggaacttgtagctgctagcgttgttctgtagggagtggcttggttttctttcggttgattttccactaagaggatatagtgatgtgtaagtgtaaccttgttttttgtgcatcttttgcatgcggaggacttagttaagaagatgcatgcaatgctacgagttttcagtttaccaaatgtatactgtacatgctggatatctatcagccgttgctagcagtgtgttggacatggcacatgtatggctggaatccggcccagttttgattgtgattgtgccgaaacaagataggacaatctgtgcgcaatctgtgcgcttggagtgtttgattatctgtttgacaagtgttttcttaaaaaaaaaaaaaaaaaaaaaaaaaaaactcgagactagttct

SEQ ID NO: 4945 - DNA, 1243 bp, Triticum aestivum
  Clone ID: TRIAE-23APR03-CLUSTER44948_1
gtcggtgctttgggcgggggagagagggggggggggagggaggacggaggcataaaaaggggggggtgttcaggatagggtgagtaaatttccgtgttaccaatactttttcggaatgaggggtgtgtttgccgggtttctggtcttggtggaaggcttctacagcaccacctcagcaatgggaattttccttctcaccttcatcacgcgcttacctcggacctcaaggagatgtcgaggctcagctcagcggtgggccgcttcctactcgtagatccgatgagtctcgaccgtttccacgcccgtctccaggagctcatacagaggtccatcgatcattgagcacctcccctccgtcggcacccgcgagcgtgacggggacgccgacgccgcctcctccttccaggagcgcgccaaggacatcctcgtcgtcgtctcgggcctgctcttcggcttcggctgcggcgccctcaccgccgcctccatgtacctcgtctggtccctcgtcgcctccaccggcgccgccggcccctacgaggagctctacagcgacgacgacgacgacgacggcgccgagagccccaagaaggccggctacgtcatcatccacggcgccgaggacgtcgtcgccggtaagaactaactaggatcgggctttgcaatcgtcgtcggcaggcagaggattcgggttgcataattatatggaattgtggagtactcttatactatattcgcacctatgatacgtgttgcgcctgtttaccgttctctatgtgtgtgtgtgtgtggttggggaggacaaattgtgaagaatgtgattcctatctgttcttacatatatatggtcaatttcatgcccaaacatgattatgtatccatccctaagcatgaaacttggtgtttctgctgcctagtaaaattgcaacatgtaaaggttgcataactacatggaattgtggagtactgttattactatatattcgcacctatgatacatgttgcgcctgtctaccgttctctatgtgtgtgtggttggggaggacaaattgtgaagaatgtgattcctatctgttcttacatatatatggtcaatctcatgcccaaacatgattatgtatccgtccttgagcatggaacttgttggtttctgctgcctagtaaaattgcaacatgtaaacaacctgtggtgaattgtggcaagctgtttgtttgtcctagaaaaaacccttaccaagtagggaaa

SEQ ID NO: 4946 - DNA, 1442 bp, Triticum aestivum
  Clone ID: TRIAE-23APR03-CLUSTER45063_1
aaaaatcccaacacccaagtccacttccccccgttccggtcccttccgtttctcaggttctctttccaaactctatcgaccccggttcagtcccgttgtggtcccacacgtaccctttcctcaccacctcgaccggtagtcgaccgtgcaacccccagcgagtatgaacagcggccggggaggggtagaagcgaatccaccgtcgtcgccgctgatgccgcgcgcccggcattcgagctaggagcgctaccggagcgggagcccaacgacccccgcccgccccgccccgatcgatggccccgcttccggtgctgaacctggggacgctgcatctgcggaggctgtccaaacccttttgcctaaccgcggacacaggagcccggaccgccgcaccaccccaatgtttgcgcgagttcatcatcagcagaggaccaaacgcaaccatcgtgtcactacaaggatgacgaaggcgcagtttagggggcattctacgaatgtggctatcagacctttagatgaggagaaggcagtacaagttgctacagatctcattggagaaggcttcatcttttcggttgctgtcgctgctttaattttcgaggtgcaaagaagtgctaggtcagaggctagaaaggaggaagctcgtaaacaggaacttgaggaactgagacaaaaggaagagattttagctaaagatttagaagatctcaagctgaagctggctgaacttgagcgcctcgccaaaggccggggcctttctggaatattgaacttcaaaggtgtcaatgcagcagatagcagcaaggaagcaacacctgcttgatttatcgattcaactttggtcaggagaaagggggatgttgtgttgttgagtttatgcacaaagcacctcacaattggctaattggtttcttctgtcacagttctttgatattatagccatgcccattctttgggtgaatggatcaaattttatggtggttgatccattagacatcctgaaataatagagtgattgtgtgaggaaaaagcccgggtacttttgggtaagtgaccgcagaacaagatataaagatgaatgtattcttactttgggcctttggctcgctaacaaaaaagaaaaaaaaaaaaaaaaaaaaaaaaaaaaaaaaaaaaaaaaaaaaaaaaagaaaaaaaaaaaaaaaaaggttcgtcgagaccgcgcggccgcggcacactgttcttttataactgcgccctcattgtttttcttagcgcgtgaggggggataactgcgcctgtttttctctttttcatggcaccccctagggcgcggcggcccgggggaacaaagctcccccccttatcgggggaccaataaaggcgcctccctctgagggggggggttttcacgagcggggcgggggggaaacaccttgtgggtcgccgctttttttctcttt

SEQ ID NO: 4947 - DNA, 1634 bp, Triticum aestivum
  Clone ID: TRIAE-23APR03-CLUSTER4509_1
accaccaataatctcctcctcctcactcccccttcttttcctcctgcctgccaacccaccccccctcccttccatccatcgatcgttcgcctccttccgcccgtcgcgagcatctggccccggtccctcgaggcttctccctctgcgcttgcccttgcttgggatcgcgcggtcgatcttgctggggcgggaggggtggctgccgccgcgcgcacgccgggcgcccccccccctggggtccctgtccctgcgcccgccgccgcgtgccgggagcgccgtgcgccgctggcggcgggcggcccggccggcggggcgtggcggcgggatgttcggtggcgtggtgctcaccaggccgggcctccgcccccacgcacggtccgcccccccccgcgcccccggccggccgcgccaacgagcaccgggcctggatggggcacccctcgcccgccctgggaatggtcgaggcgatcgtggccgcctctgggggaaaagatcgtgataatggtggcgacgcccatggcagggcccaacgtggaggacaacaagcctccgcgtgtcagtccagttcagatgcgtcgacgaaaagagctggggcgcgctggcggagacggtgaaggggcgtgatgcgggaggtacccgaagctgcgccatgtcgcagggggcggatggtgttcgaggtgcggcccaccatcaagtgggacaagggcaaggccctcgagttcctgctcgagtcgctgggcttcgccgactgccccaacgtgctccccgtctacatcggcgacgaccgcaccgacgaggacgccttcaaggtgctgcgccggcggggccagggcgtcgggatcctcgtctccaagcaccccaaggacaccagcgcctccttctcgctgcaggagccggccgaggtcatggagttcctgctccgcctcgtcgagtggaagcagctctccaaggcgcgcctcaggctgcggcggcaggccgacgcctgatcggacgacgaggatcggccggccggcgggaatggccgaactaattatttcactgctacgtgtagcttagctagttaatgaaaatcccctgcttgctcatccgaacaaagccaaaggctacgtacgtggatgggaagaaggaacgtactacggcgaacctgcggagcattgttgcgccacatgttgtgttctaattaaccgtccttctttttctggggatgtataccgtacctaccgattatgcatgcatgtaaattacctttgtccacgtacaaggggaggaaccatggaataaacaaaaagaaatctgagtaaatgacaaaaaaaaaaaaaaaaactaattatttcactgctacgtgtagcttagctagttaatgaatcccctgctcgtccgaacaaagccaaaggctacgtacgtggatgggaagaaggaacgtactatggcgaacctgtggctgtggagcattgttgcgccacatgttgtcttctaattaaccgcccttctttttgtggggatgtataccgtacctaccgattatgcatgcatgtaaattacctttgtccacgtacaaggggaggaaccatggaataaagaaagagaaacatgagcaaaaaaaaaaaaaaaaaacccgcccgtattttttgtgt

SEQ ID NO: 4948 - DNA, 1630 bp, Triticum aestivum
  Clone ID: TRIAE-23APR03-CLUSTER45105_1
ctcaacagaataaaccctgggcctccgaccgccgcccctctcctcctcctcctcctcctcgccgtcctcctaacccaggcgccgcgccgccgccgccaccgccacatcctccgcccgccgccatgtcgaagaaaggaggtaaaaaggccgcggcaggcggcggcgagctgtcccgcttcctgcagccgcacctccagaccatcacggacaccctccagatgatgtcggaggcggctcccgggggattggagcggacggagtggtcggaggtcgtcgcgctcggccatgtggtgtccaggcaggccaccgtcgctgggatggtctggagcggagacttgcctggtgtggagacgctcaaggagaacattgctgcgtatttcaacgtcctgcagggtttccttttggcttgccatggaagcaccgtcggtgctggtcctactcttcacaagtatatcactagttctgcaaagggcgtggtggatgccagcttctcgttgttcaaggtagctttttctgcctacaaatctggcagtcctgcccggatgcctatctcaccgtccggcaagggatccgtttggcatgccctggatgccctcacggagatggtcgcacccatcagaagcaccccactctgtgcccagacgccgctatgggtacgacgcaacgcgatcctgcggctgatgaaatacatccctgctaaggagtccgatggtaccaaagctgcaacgcctccgaatggagatgccgccatgagcttttcagataaggatgaatccttctctgatcttgaggaagatgaaggcttcactgaggaggagatagccgtcgccaagttgattatcgctgttacagcagattcgcttgatgcggtgaaagaaacaatccgtttcatcactagtttgctcaagagctctggcaaccaaagcggtgctgctgaggacaaggtggagtcaatggagaatttgctgagccactgcagggacgttgctgaccaggttaacgagcttggggcctccgtttatgcacaagacccatctgaaatgaagtcagccataaaaagactgtacgttggcatcacagggatgtgccaggaaatagcgggcctcggtggctcgcccaagaacgcctatgcagccttcagtggatttgagaagtcgttgaaagctcttgaggaagagataggtgaggatgtcgtggacgaaatgaaaaatcttaccatcagcccatcctgattgttgaagtagaagacttcttttatgctattatgccctctagtttgtagtagcagtgttttgatgtgtcttctagttggagttgtgaagcttgtattgttcaaccgaatggcagagtgcatagttctttccagtgaacaagagaatgcttagtgcttagtgtggtattggaattcctggtgtgttaaggcagtatactaggttggtactacataattttgggtgctgtaatatccaaagttgattctaggtgaactctggtagttacccgatgaatcctaaggaccccctgaatgtgtaaaaaaaaaaaggaatccgccccgtttggttatggcccgctcgtgccggactcaacatcaaaaaaaaaaaaaaaaaaaaaaaaaaaaaaaaaaaaaaaa

SEQ ID NO: 4949 - DNA, 2264 bp, Triticum aestivum
  unsure (1)..(2264): unsure at all n locations
  Clone ID: TRIAE-23APR03-CLUSTER45211_1
agctcttcacgcggcctcaccaccattgccagccacaaccggacagatccccgcataaattcctattcccgtccccccccccccattcgcccacgcccacgcgcgcgcgcacgcggcctcccccccactcccccccccccgtcgctccgtccctccctccctccccccgccggccgcccacccccactcggggggaggagatggggtacgtcgggcgccacggcgtggcgacgctgcgcaggtgcggggacgccgccgtcgaccactccaccgtcgccaagtacatcctccagcccttctggtcgcgattcgtcaagcgctcttggcccgcctctggttcccaccaaacatgatcacgctgacaggtttcatgcttctgagccccaacggaacagatcccccgcataaattcctccacccgtcgcgccgcccccattcgcccacgcccacgcgcgcgcacgcggcctccccctcctcctcccccattcgctccctccctccgccggccggggattcgggtttggggggagatggggtacgtcgggagccacggcgtggcgacgctgcgcaagtacaagtacagcggcgtcgaccactccattgtcgccaagtacatcctccagcccttctggtcgcgattcgtcaacgtcttcccgctctggttcccaccaaacatgatcacgctgacaggtttcatgtttctgctgacatcggcattccttggctttttgtattcacctcatcttgatacagcgccccctagatgggttcatctcgcgcatggaatccttctcttcctttaccagacttttgatgctgtggatggtaaacaagcaagacgtaccaactcatcaagtcctttaggcgaactttttgatcacggatgcgacgcgcttgcatgtacttttgagtccctggcttttgggagcacagctatgtgtggaaatgctaccttttggttttgggtcatttcggctgtccccttctactttgcaacctgggaacactattttacaaacacacttgttcttcctatagtcaatgggccaactgaaggccttatgctgatttatgtgtgccatatcttcacctttttcacaggagctgaatggtgggcgcaggattttcggaaatcattgcccctccttaattgggtgcctcttgttcctgaaatctcgctatatggcattgtgctgtttctaatgattgcttttgctgtaatcccgacgattggatctaacactcacaatgtttacaaagtcgttgaagcaagaaaaggaagcatggtgctggcactagcaatgctcttccctttcggtttactcatggctggaactctcgtgtggtcctatctatctccttcagatataatgagaaatcaaccacatctgctaattattggaacgggttttgcgtttggctatcttgtgggaagaatgattctggctcacttatgtgatgaacccaaaggtctgaagacaggaatgtgcatggccctggcatattttccgtttgcaattgcaaatgcgctgactgcccgacttgatgatggaaaccccctttttgatgagcagctcgttctcctgatatactgcttatttacagtggcgctgtacatgcattttgctacgtccgttatccatgaaatcaccaacgcacttgggattcattgcttcagaatcaccagcaaaaaggcgtaatctgactcagttggtaatcacatggtgtctaccaaagaagcaaacatgcctgcttgtcttcgttacaggggtgatgcccgaatcatctttgcatctgtcattacagggacactgtcccctgaaatttacatcagcactaaaatttgtgctgatgagaaaacaatgtatgtgaaacagttggcaaaattttgttgtattgttcatagagcaaatgctcagcaaaaactttatggaggaaatgctgtgctgattggcagtggttgcctttgtaacttgtcacattgtaacatcagcaaagatgcggatagtgttgtttaaaaaaaaaaaaaaaaaaaaaaaaaaaaaaaaaaaaaaaaataaaaaaaaaaaaaaaatagcctaccgaccccggggggccccgagcccctttccccctttggggggggcaggaccgccccccggggccggttttgatcgacgggggcgggcaactcccggtttaccccttttaccnatagcataatagnataaaaaaatnatananaagacaaaatacagaccccaggagggtggtgagtgagtggg

SEQ ID NO: 4950 - DNA, 1470 bp, Triticum aestivum
  unsure (1)..(1470): unsure at all n locations
  Clone ID: TRIAE-23APR03-CLUSTER45222_1
cttcattctcactcccccctcctccgccctcgcccgccgctccactcaccggcacccgataccaggccggctcccgccgccccgcgcctcgccgcccggcctggcccccccccccgcgcaccgcccggctcctggttccgtcgcccgttcccctactgtccttgtctcccgatcccctctggaggttagtggcctggctgggatggctgctgaatccaggaccgacagtggcaacagcagatgcctgggcgacacaatgtccttcaggtgtcttcgcgacatccagatgtaacttaaagattgagtcactggacaatgtttttgggaggatttcgcagtgtgtggtctggtactcagatgttgtctttgccagaattctccagaatgcctcggtgtatgctttggcctctgggcaggtaattgctggagttgtaactaaggttggtactgatgtcaatggcttcaaagtggggaaccatgtggctgtgtggaaatatgtcaactcatgccgcgactgtgacaactgcaatagcttcctcgaaaaaaacctatcaaaatttgtttgtactaaacatggtctttatcaagtaggtgcttgaaaggctggacaacagtgatgtgacatagcagttcctaaacggtatagctacataagtacattatggttaccgagtggggaaggctgcacctttagtttgtgctggaatcactatgtacactccgatgatgcggcataacatgaaacagccgggaaagtcacttggtgtcgttggtcttggtgggttgggtcacatggcagtgaaatttgggaaagcctttggactgaaggtgactgttcttagcacaagtgaatcaaagagagaggaagcaatcagccttcttggtgcagataattttgtggtatcatcagataaaagccagatggagtccctgaaaaattctctggacttcattgttgatactgcctctggtgaccacccatttgacccgtatctcgcgcttctgaaagttggtggcataatggcactagttggctttcctggagaaatcagagtgcatcctgcgacacttaatctgggtgcacggactttatctggcagtgtaaccggaggcacgaaggacacccaggagatgataaacttctgcacggcaaacaaaatctacccagatattgaattgataaagatagactacatcaacgaggctcttgagaggctggtcaaccgggatgtgaggtaccggtttgtaatcgacatagagagctctttaaagtaatatctccgcggttggcacatttcggatccttatggaagcatgtagaataagtagaatcttgcacacaatcgcgactgttttcctctgtaatgttgtgatatattttcctgtnccatgtgtttcgataacgcatatgttatgtggggacagcagtaaagtggaaaaaaaaaaaaaaaaataaaaaaaaaaaaaaaa

SEQ ID NO: 4951 - DNA, 998 bp, Triticum aestivum
  unsure (1)..(998): unsure at all n locations
  Clone ID: TRIAE-23APR03-CLUSTER45231_1
gccacgtctcacaggtacgacaaagaaaaaagagaaagataaaaagaaaagagcagcgactggtcgggcgcgttctcttccccgggcggacctagggttgccgccgtcgccgccgtccgcacatcccatgctcccagctccgccagcgcccgctcctccgtcgagagggcaggaacatggtggcggcgaccggtggagagggggcgtccgggtcaatgagacgttgtggtacgaggtgaatcggcggcaagcccggcgccagcgctacgcgccgcctctccgactcctcactccgtcctcgtccacaatggccgctgccgccctcacctgcgctcgtgccctcttcatctccggccgtgagctccatcccgtccaacctcatcttcccggatcttcttggttttggtccgggagcatacgggtgcggatcaaagcgttgatggacaggttcgtgaaggagttgcagaaggcgctggacgcggacatccaggatcgcatcatgaaggagcgggagatgccagctacatcaggaacgcaaacgcgaggtcgccgagagggaggccgtttggaaggccgagctctcccgccgcgagatggcaacttctttggggttgtgtcagcaagctttattcaacttctttggaatgtcgtaggataattgccatgatttagctttagattcccacatgtttcttgatctgagtgtatgctcatgtggtagttaattatttggttccatgacgaggaatatggagatcaagttgcacactatcaagaggccttctccagaggtattctacaagttatcggaatagatcctcctcattccctgtaccttgcagcatctccatctaaggctgggagttctgcacctacctacctgttggtgtaataaattccaactatgaaactaagcatcaatttatgtcctacacatagtgttggcagtgtgtcattggtgctaagttaantggtgggtagatgtcaaaaaaaaaaaa

SEQ ID NO: 4952 - DNA, 618 bp, Triticum aestivum
  unsure (1)..(618): unsure at all n locations
  Clone ID: TRIAE-23APR03-CLUSTER452714_1
tccctgatttttctcgtttccaatcacagccgcatcggccttaattctctcgtttccaatcgcggccgcaccgcccggagccaccctcgcccagatcccttctcccccgcctcccttgcagctgccttctgctcccctcgccgtcaagcagcacggccaccccaccagccagctccgcccctgcttctccaaagcacatcgggtcaaatcaggtgtgccatcggctgaatcggctgccggagtagccccggccggctggagaacctgcagcggctagctagccagccttgttgttagacaatggattgctcgttctattcctagtggaggctatttttggcgtatgcgacaaccaagtcggaggtgacggatgcaccttccggacatcatcagagcctacaatggggaagagggtgatggcagccaaactgaagttgagggagagactgttgctagaacaagtttaggcacactatgattttagtttctatgttttggaaacatgtgtaatcgaatggaaaactagcattgaatgttggcaggaaataaatatattttatgttgcattccnctggatcggaataaaaaatttgcatctttgtaaaaaaaaaaaaaaaa

SEQ ID NO: 4953 - DNA, 1420 bp, Triticum aestivum
  unsure (1)..(1420): unsure at all n locations
  Clone ID: TRIAE-23APR03-CLUSTER45338_1
aaaaataggctcgtggcaaatctggtctaccagtcgccccctcacccacccaacccgcccacggagaaaaatcccccaggaagaagaaattccacgctgctgccattccgacgatgcgccgcgccgccgtcgccgtcaccgccgcgctcctcctcctcctcgtcgccggcgcagctgcgggctcccccggcgcggagcccacctgcccgcggggcgccggcccgccgttcctcgacgcgctcggatcgcggtgcccccgcggcgcccggatcgtgccctccccgcccctcgaggtcagaggagatgctgttgataaagaattgaaccttcgctgtaccggtgcctcatgctccattctcttctatgccgcatggtgtcctttctcgagcaaatttcgaccaatatttgaagctctcagcaccatgttccctcagatacatcactttgctgtcgaagaatcttctgcgacgcctagtttgttttcaagatatggtgtccgtggcttcccagccattcttctggcaagtgagactacaatggttcgttacaggggcacaaaagatctgaagtctctggttcagttctatcaagagactacaggcctcgacccaattacatatattgatgttgatcagcaagagagcactggaagtttaggatcagccatgccaggaggccgctctctgcgcaaaatggcgaaagacgagccctttctgtttcttggagccctttttataatcatgaagatcgcggcacacttcgtccccactgtcatctcccaactgagagccttcttgattgtgcgtgttcagaacttgaacttaagaatctgtaggggatcaagccaacttatggaacgggcattgactgtgcttgatgttcagaggctctggagcaagcttagactgagcagtaagacaagggacctaagtaaaggggcgagtaatgctcgagcttgggcttcgtcgtttgcgtccgtctcactgggtgaaccatcctccttacggcatgcctagcctcttcctcatgatgctggtcgatagtctagctgctgatatatggcccaaaattgtttggtcttgcttccccatcctgctatgtacgtgcatccgcgcatgtggggacccaggaatgtaaattttcaggatctcatcttgttgtatataggaacgcgttttcgctttgctgacgcgatagctgatctctgacctttgtttcagttaactctttgatgtatggtgaagatctgagtatttcttcgatctctttcggttgctgttagaatttggctttgctatgtcgcccttgcctgcgccagcttaaatcctgggccgccgactcctgctctgaattgtaaaactgtcttgatttttattcacaccatgctgtttggaagtaaaaaaaaaaaaaaaaaagcttn

SEQ ID NO: 4954 - DNA, 1732 bp, Triticum aestivum
  unsure (1)..(1732): unsure at all n locations
  Clone ID: TRIAE-23APR03-CLUSTER45393_1
gacaagcttcggttggttgccttgcctcgtcgtgtctcccgttcccccacctctccaaccgcggcaattgcagaaccggaggagctccgggttcctccgttccgaaatcccccgaatcctcccgagctcccgcgccggccgatccattgctcgccgcgatggagtctcagcacgcttccaggggccgccgcaccctggaggagatccggcagaagagggccgccgagaggatgcagcagcaaacgcccgccgcgaccgcgtcccacggcgaccctcacgggaaccaaagagccgcggcagagctccttgcacgagttcaacaacttgaaaatgggaacttggaattggagagggaaaaccaaatgctgatgtccaagtctagtgcaaaagaagtcgaaaaggattccctggttaaccgattgaatgacctcgagaaaaatgtagtaacttcaataagaaacgctcgaaatgacatttcattggagcaagacgatgcagttgtccctaaggaagatactctagcgcaactaaggatcatggacaagcggttgagtgaggcagacgaggagcagtacagggcagataaagagtatgcatccatgagagcgcagctcaataccctgcagtgacatgtcaatagtatatgctgcagtatttagtaagcgggaacataaagtgaacaaacaattgacaagcaactggagatacaggatttacaagctcagctcaagcgagcgtccccgcgccggcgacaggggcagccaggacttgctgacgcggccctactgaggcagcaagatcagcaaaggctagctgaagaacaatcccgtaccacttctcttgcggctgaaaagcgagagatggaagagaaaattgctgcattaacaaagaaatcttcagaagaggcttctgaatttgctgcacgccaggcattttccatgcaagatagggaaaaacttgaaaaccagttgcatgatatggctttgatggttgagaggttagagggcagccgccaaaagctgctgatggagattgattcccagtcattagaaatagagaatctgtttgaggagaactcagtcttgtcaacatcatatcaagaagctatgtctgttacgatgcaatgggagaaccaggttaaagattgtctgaagcaaaatgaagagcttcgtctccacttagagaagctaagaattgagcaagctaacctgttgaaaacaaacaatactagtgtccagctagatggccaaagtgagaccagcatcccaccagaactggtcacagagaatctttctctaaaggatgaacttgtcaaagaacagagcagatctgagggattatcggcagagataatgaaactttcagctcagcttagaaaggcagtccaagcacagaataacctgacacgcttatatagacctgtattaaaagacatcgagggtaatctgatgaaaatgaaacaagaaacttatgcgacaattctatgattttgccgaggtatgagtgcaaacctcagcaatgacaccacttgcaccacaaattgatcggtttttttttttttttgctgtatctgcctaccttcattaggcagttcttaatttgtagagttcaatcaacattattgtacatgtgtggcactgatgtatttatcatttatgcggatgtattttgtaaactgactgaaatgatgaaaggaaaaatcagtntnccnnananaaaaaaagggggagag

SEQ ID NO: 4955 - DNA, 880 bp, Triticum aestivum
  unsure (1)..(880): unsure at all n locations
  Clone ID: TRIAE-23APR03-CLUSTER454200_1
aggctcacagcacccattccgtccgtgagagagagagagagagagagagagagaggaagcggcgatgacgaagccaccagcggccgatcggccgcggatgacgctggaggactacgtcctcttcttcaccacccgcagcggtcgacatcttaccatcgaccaactcaatcagatcctcttcatgcacggcttcaagaagttgtacaactccaacaagccggtgatcgtcgacgcgctcaactcgctcgacctactgcgcccgcgccgcgccacagtcagcatcaacgccgtggcgcccccgccgggcgccgcgggcccctccgcggccctgctctccacagaggccgtgaagcgcgacatccaggacctcggctggcgcgagtgccccgtcggctccgtcctctccgtccacgccggggcggccgcctcctcccccgtgccgctcgccaccatccgcccgggctccgcggccgtcgtccagcgcgtctcccctccgagcacactcagcgcctcctccagcccgtgtcccgcggcgcccggcgtggacgggaccaggaagcggaccctgaggggccaggggaaggcggcgaccaagaggaaggagaggcgcatgagggagctgctcaggctcccgtccgtcgaggtccaggacatgcccgccgacgccgccgcccagggcagcagcggcggcattgcctctgctgtgtgatttgtagcgtggttgattgaagcggcgtggaaccggcggttgatctggtgtgctttgttcttcgctgcttttggttcggtggtgatctgcagtagttgtaaattaattttagttttactggttttgttaatgatgaagaaccatgttncnngttcaaaaaaaaaaaaaaaa

SEQ ID NO: 4956 - DNA, 2056 bp, Triticum aestivum
  unsure (1)..(2056): unsure at all n locations
  Clone ID: TRIAE-23APR03-CLUSTER45437_1
cgcacgggtccccgtcgcccacccctccgtgacggacggcctcagcgacaagcagccaaaacggcgcttcgcttcgcccactcgaacgcctttgtttgcatccccctcgtgccccccgcacagccaatcaatcccgtcagtttcgcttttgcggctcaacacaggttcgattcgacggctcctcccatcgcatggggatcgcacaggctgccgccccgctgcgcctgcatctcggatgctccggcgcggcgcccccgcggctcacctccctcaggttcggggtcggatcccatgcgaggaagggcgggaggcggcggaaccctccccgcgccgccagctcgctgcatcccagcagcaacccgagagcgcacgaccatgaccccgccctcaagcctcccgctcccgctcccgccggcgatttcgccgggagggacttgaacggcgccgccgaccacgcgccgcagcagaggcggcgcgcggcgagcgacctggaggaggaggcgtgggcgctcctccgggaatcggtggtgagctactgcggcagccccgtgggcaccatcgccgcctgtgaccccaacgactccagcccgctcaactacgaccaggtcttcatccgggacttcgtgccctcgggcatcgccttcctgctcaagggggagtacgacatcgtccgcacgtgcattcctgcacacgctccaggaagagagctgggagaaaaccatggacgaccacagtcctgggcaaggcttgatgccagctagtttcaaggtgcgtgttgttccgcttgaaggtgatgaagaaggcgcaactgaggaagtcctcgatcctgattttggggaggctgctataggccgtgtgactggaataaaattgatcttgaagctctgcttagctgatgggtttgacatgttccccacattggtagtcactgatggatcctgcatgatggatcgtcgaatgggtatccatggacacccactggagattcagtcactgttctattcagccctcttgtgtgcacgtgagatgcttaccccaatgaatggatctgctgacttgatccatggacacccacacaggcttatggcgctctcttttcatattagggaatattactggcttgacaagagaaagctaaatgagatatatcgatacaaaacagaagaatattcttatgatgctgtcaacaagtttaacatatatcctgatcagattcccccctggctagttgaatggatccctccggaagggggttacttaattggaaacctgcaaccagctcacatggatttccgantcttttctctggggaacttgtggtctatagtaagcagtttggcaacaacccgtcaatcccatgctattctggatctagttgaagccaaatggtctgatctagtggcagaaatgccattgaagatatgttatcctgctctcgaggatcaagagtggaaatacattacagggagcgaccctaaaaacacgccttggtcataccataatgcaggttcctggccaacattgttgtggcagctcacggtggcatgtatcaagatgaaccggcctgagattgcagcaagagccgtggaggtggctgagaggcgtatttccgtggataaatggcctgaatactacgatactaagcgtgggcggttcatcggcaaacaagctcgactattccaaacgtggtccattgcgggcttccttgtggccaagctgctgctcgaaaaccctgaaaagtctagaatactctgtaacaacgaagacgaggaatttgctaatgcttttaatctcatggctgattcatgcaacccgaacaggaagcgtggcaggaaagccctgaagaagacctacattgtgtaagtctaacagcagctccaatgttaggggggttcatagatgtagcagtgttcagtttttttgtgcgaatcgcacatataccaccaggatttgtacatattacagtgaacttgtctagaggaaatgcccactttgagacgctgtcattctgtttatggttaattgtaaggtaatcacgtcttcaaaaaaaaaaaaa

SEQ ID NO: 4957 - DNA, 1332 bp, Triticum aestivum
  Clone ID: TRIAE-23APR03-CLUSTER45442_1
acctgcaagagaaaaaacagtagcctctagtccatccgatttcgcgtcccctcgaacagaacagaggaggagcggagccatggcggggatcctggcgtgggcggccgacgtggtcggcggcgccggcgacagcgacgacgaggccgccgccgagcgcgagcgcgccgcggccatgaccccggagcagcggctccgcgccgccgatctggacgcgcgggcatcgtcgctgcggcgcgcgatccaggacctgcgcgcccgcgtgcccccgccgaacgtggcgcagcggctgccgcacctgcacgcccactcgctcgcctcctctgccgccctcgcactccagctcaacgcccactcctccaccaaagagcaggcactgcatagagaggtgaaaattcaagaggaaaataccgcctatgagaaggcgatatccgattgccgccagaaaattcaggagaagcagatggaggctgctgtgctccagagtaatttgaaggaaatggaaattgcagagctggatttaaaagcaaaggttgacaatgctatcatggagcaagaggctgctcaacataaagcatcaatggctgcttcggaagctactggaaatgctctgctagaagctgaatcgttgatgaatctcaagtctaaagacttggaagagaagaagggggagttgaaattattggaagacaagatacaaagattggagaaagtatggtcctcggttgaagaagaatctttgaaaaatccaagtcctgcccagagggagaaggtactggagaaacaattacatagcctcattgaacagttgacagctaaacaagctcaagctgaaaggctcatcactgatatacatgccaaagaaaaggatctggaaaggttgaacagtatacagagaaatcttcacagcggctccagcgaagcgggtgcagcacggaaccggtttggcggagggcttttgagcggcgatgaagattctggctcaaaagctgctcggagacctggccaatctggtggttttagaacagaaggccagaaaaggctcatgattcttaggtccgcttttgttctctatatcttggtactgcatgttgtcgtcttcataaagatatcagtttcgaactaggcagtgtacaaaacacaagtactatacccttgtgtaaatagcacatgtaaaattgatggtggttgtatttcttggagttgaacttgcagcccctgagtttgggccttgtgttaaactagagcaaatgatgagcgcatcgatgtgatccctgttgctgaatatgttctgaggataaaagatttcatgtttacttgcccatcagaaggcgc

SEQ ID NO: 4958 - DNA, 687 bp, Triticum aestivum
  Clone ID: TRIAE-23APR03-CLUSTER454443_1
atcctcagctcccacagtgatggcgtcctctacctcttgaccaatgccagcagcgaaaacaccaggatgtcgaaggtgattgctgttgacctcaaccagaagaagctgctggatgagcagattttcgacaagcaaagacccaacccctacatgggcactatcatctccagctatctcatgcccgctgctgcagtttcaaaggagaaggagcatatgaagcggcgtgcgcccatgtctatgggatcctctcgcaagaagcagcctgccttcgctaacccagcagccgtaggaggaaagggtgatgtcggggatgcaatggacttgtcacagtaggtggtttgtttggtggtttgattgggtacgagtgccctttgagatgactacaataatggattatttgctctcacaagtttcaaaccatgccatcccaccatcagaggaagtagtatgaatcagaattttatttattaaggttatgatggaggttaaattaggagacgtattattaatatttaaagctcccttcaggtgcctgttaatttgcttactattattattgtgctataggtagctagtacaagatgatgtccctgcatggtttgtaatcccctccgtacctgctttgtttgactttgtactattgttaaggttattatgaatgtttcggctgcaaaaaaaaaaaaaaaa

SEQ ID NO: 4959 - DNA, 1147 bp, Triticum aestivum
  unsure (1)..(1147): unsure at all n locations
  Clone ID: TRIAE-23APR03-CLUSTER4547_1
accgcataaatcccaaaccaaaacatcaccagcagcagcagagtgaccgcctccgccgcacgcgctaatctcgctcgaatccatccgccatggccatggcggccgcgagcatcggcggcgcactgggcttcctcgccccgcgccgtcgcggcgtgtccttcgccgcggcggtgggccgtaggaggccgacgctggcggtggtgcgggcggcgtcgtacgaggcgggcgtcggggtgatggcgaccaaggtggggaatgatgacctacttcgacccggaaaacgggaagcccgtgccggtgacggtggtcgggtttcgggaggggggcaacgtggtgacgcaggtgaagaccgccgccaccgacggctacgacgccgtgcaggtcgggtaccacggcgtgcgcgaggacaagcccacccgccccggagctgggccacctcggcaaggccagcgcgccgccgctgcggcacaggacccgttccggctggtggcccgccttcgaccccggccagggcgcgctcgagttcaacgagctccgttcaagggggcgacctcgtcgacgtctccgccaaatccatcggaaagggattccaaggtggaattaagaggcacaacttcaagcgtggtctgatgactcacggttccaagagccacagagccctaggttcgatcggtgcggggacaaccccagggcgggtgtacaaggggaagaagatgcccgggaggatgggcggaaccaagaccaagatcaggaagctcaagattgtcaggatcgacaatgatctcaaagttgtgatgatcaagggagccattcccgggaagcaggggaaccttctccgcatcacgccagcgaagattgtcggcaagaacatccccaagagctagatctgtgctgtgtttcatcttgtaagagttcatttgtttccttttccatgtctggctatgttgtattcctaggtccaggttttgtatacatgttcagttcgctaaagctaatctttggacaaaaaagcattctcctccacgttgtcaaccacttctcaccttccttttggactccgaaacgaagcagatctctcctaaaaaaaatgacagacaaaaaaaccccangggggcccggtaccattcccctanntgatccttttacc

SEQ ID NO: 4960 - DNA, 696 bp, Triticum aestivum
  Clone ID: TRIAE-23APR03-CLUSTER455231_1
aacacactcgaccactctgttctctccccacgacgccaaccctaatccctaagctagcgctgccagcggcggcggcggctggccaggtctccaggagtgggcggggcaggcgacggcgagtgacggcggggcagccagtggcagggcaggcaacggcggcgcagtcgggggcgctagagggcggcggcaccgcggcagcaagcggcgtctccagccagggcctaggcgcctagcagcagcaacagcagtccggccatccggccgtccggccacttctgagtccggccggcgcagtcacggccagattgcctgaagatggaaaggaagagaaggcagtaggaaatccaaaggaaaggggaggaggtcgtagcggcagagatccctgccggctttgaataaataaagaccaggatgaatttaaaaaaaaaaaaaaaacggttgctttatctcgatagccgccggcacctattcacagatccatccctggccggcgcatcccgttcccgttgggcataggcgcgcggaaccaattatacgcgcctggctgcaaagatgcatagagagaggaggaagaggggccttgaagccagtcatggtgacacttgtgaagaacgcattatagagcgaaagaagctaagagggcccaagaagctagtcgctacttattggtttcaagtattatttctaaataaaatg

SEQ ID NO: 4961 - DNA, 617 bp, Triticum aestivum
  Clone ID: TRIAE-23APR03-CLUSTER455243_1
attctacaaaagcaaatggttgagaaagatctaaaactcggagagaagagagagggaaaagagaacggggaggcgaggagcacctgcatcacatcatgtggctgcagcaggtcggcctccgtcatcggcttcttcctgctaggacagggcaggacagggtgtggcgacaaggagtggtagacaagaagggcgatgtagtagttgacgaggacggcgatggagatagcgagcaacgtgaggaggaagtggaggtcggtggggaaggcctcccgcccgcgagatcaccaccatgccttctccgactacttgctgcttgacaacatgatcagaagctcattatcgtcttgtctagcattgctgttattctaaacctggtccggcctcaaaataaactgaaataggggagttgttggtcaaacaaataattctgcatgtttggacactcagttttctgcactttagtcatctgtatggtttgtgttcatgaataatcagtggctggcctccttttatatttgcaccgtttgagtgctgattacagtaggtctacattttttagtcaaagtgtttttatgttactttgttctttcagttttctgtcagtagtttgttcaact

SEQ ID NO: 4962 - DNA, 953 bp, Triticum aestivum
  Clone ID: TRIAE-23APR03-CLUSTER455250_1
gttttttcttttcctttttttagccgcatcagattgagaattggatatgctgggttcagcggtcctccggctcgccaccccgcctcgcgccgccgcctccgctgctgccaaaaacatctcgctcgtggatgggagcctccgcgctgtgctgcacccgggggcggacgacgcagattcagcggcagcggggtgctcgcacaagtggcggatggtgatcgcctacgacggtaccaagttcaaaggctggcagtatcaaccatcacctccaactatacaatgctttctagagaaagcactgatacgcatcacgaagctggaccggaaggagctttgtttggttggtgcaggaagaacagatacaggaggctgcaaatcattttgttggagtacatgacttcacatctttcgccaatgcagtacataatgatcgtgtgcgcagtccaataaagaagatatcacgctttgatgttactaaaatggatgctatcatacagctcgaggttgaaggcactggctttttgtacagacaagtgaggaacatggtagctttggtaattcaagttggaagggagggactgcctcctgaaatcgtcccgacaatcattgcggcaaaggaccgcaaagaacttgcgaaggtcgccttgtcagcaccaccacatggattgtatctcatgtcagttaactatgacaaagaaatcttgaagcctcctgtgggttcccctccggtgagctttggaaggactcatcaaatcagtagatgcaaacttctattttactagcacaaatgtccgtgcgttgcaacagaaatttttttatgtttattagtataaaacacatccgttgttcattaaaattgtacgtgcagatcccatgtgttgcaatggatattataaactaaatttgagagcttgtgtggtattcgagagtttaaaaaaataaaaaaaaaaaaaaaa

SEQ ID NO: 4963 - DNA, 873 bp, Triticum aestivum
  Clone ID: TRIAE-23APR03-CLUSTER45525_1
acacacacgtgcgccgcgcgcctctctctttctcctactcctccagccccgagactccgtaccgccagcacccccgcccaccgccgccaacactacctccgctggtcccagtggccctgtgcggtctcgcttcgacgacgttggcgggctgttgcctggacctccttctgcccctgcgtcaccttcgggaggatcgccgcgatcgtcgacaagggagaaacatcttgctttgtgagcgggtccgggtatctgctcctgaacgtggtttgacggggttgggcctgcctccactccttccgctaccgctcccaagctgcgggaacagtatggcctccagggagaagccctgccccgactgctgcgtccacatgttctgcgaggcctgcgccctctgccacggagtaccgcgagctcaacgacccgcgggcttcgacatgagcgccggatggcagggagaatggcgccgcgaccgccgcgccccagatgaacccaagggatgactcgctagtgcgtccgcatcttccgatcagtcgactactgcacacactgcatgcatatcagtctgactactgcacacagtgcatgccagcttctacgccggtctcgtcatcagattatgtttatgatcgagtgtatcgtgtccgccttccaccatatgagtcgtttccatagatattcgaatcggtataattgtatcaatgccttctttatgtgatatatgcgtgttattgagcgtgtggactgtatgggcgtctatatccatgatcaatataacttccaacttctgcttcaaacaaaaaaaaaaaaacaaaaaaccccggcggcaaccccgctaccaacttcgcccgcccctcgaaatcacttagtgaattc

SEQ ID NO: 4964 - DNA, 3489 bp, Triticum aestivum
  Clone ID: TRIAE-23APR03-CLUSTER4560_1
gtattcggcacctgcctcgcagcacaccacaacttagtacagtccacccgccgcctcgcggctccaaaaccctcgcctcacccccgcccccctagggttcgcctcgcctcgcagcgccgcgccgccgcagccatgggctcatcgctcccggccaaggaggccaacctcttcaaagtcatcgtcaaatcatatgaaactaagcagtataagaaagggctgaaggcggcagattccatattaaagaagtttcccgaacatggagaaactttatcgatgaaaggtttgaccctacgttggtgggatcggtgctctgacgcctccgagccccggcgccgcggccgggagttcgcccggaagtggcgtgggtcctggcccgcgtgcggatctcgtggcagacccgctcgggttgactgggaccctgcatgttgttacagaaatgctttgaggttccatccggtaaatgcgccaactagttgctgcctggttacagctggggcgcaaatgtgggtcgtgccgggccctgtgcccaactaaccaaagtgcacggcaagatatccaagctgcagaatggtgttttgtgcgcagtgattaacttcttgatgcattcatttgaagagaatattattgattgggagctgagttctcttcaatctccggtgattatctctgttccagcttgtaccttttcattgtcatcttgcatatggtggaaggccaaaacctttcatcccagttacaatgaggcgctgccacggtttgttgcttggcagcaacaggatgttattgttgataagctctcattcagagaacaaatggcctgcattttgttgaaacttagccgttttgaggaggcagagaaaatatataggtccctcctttttttggcataagacagttgttaatcccaaacttttttgaacaatgaacttgttgtatgcagtgaaaatggtcaatattccgctgatgatgttgaacgattaagtgcattatataaatcactcaaggaagaatatagttggtcatcggctgttaagcgcatacctcttgatttcctagaaggtgagaaattccacgaggcagcagataactatgtcagacctctattaaccaagggagtgccgtcacttttctctgatttaagcccgctttatgagcatcctggcaaggcaaacatattggagcaattatttcttaagctagaagattcaattaggacttctggatgctttcctggaagtttgcagatggaacctccatccacactcatgtggactctgctgttggtttctcagcactatgacagaaggagccagtatgatattgctctggataaaattgacgaggccattttacacacgccaactgtcattgatttgtactccataaaggggaatattttgcaacatgctggcaatttttctgcagcagcagcattagcagatgaagctaggtccatggaccttgctgatcgttatttaaacagcgagtgtgtaatgcagatgcttcaagccgatcaggtcgggctagctgagaagactgctgtcttgtttacaaaagatggagatcagcacaataatctccatgacatgcagtgcatgtggtatgaacttgcttctggcgagagttattttcgtcaaggtgatcttggccgggctctgaaaaatttcttggctgttgaaaagcattacactgatatgactgaagatcagtttgacttccattcatattgcttacggaagatgacacttcgggcgtatgtttctatgctgaagtttcaaaaccgtttgcatgctcatgaatactttcacaaggctgctgcaggggctatcaggtgttacatgaaattacatgattctccattaaaatcatctgctgaggagaatgatgagttgtcaaaactgccagctgcccagaggaagaagttgaggcaaaaacagaagaaggcagaagctcgagctaaaagggaggctgaagagaaacaagaggatgaaacaacttcaaccaacagttcgaaatctgggaagaaacaacaagcaaggccagttgatttggacccacacggtgaaaaattggtccaggttgaagatccacttgcagaagccacaaaatatttgaagcttctgcagaataactcgtcagattcattagaaactcatatactttcatttgaactgaacatgagaaagcaaaaggttttactcgcttttcaggcggtcaagcagctcattaaattggacgaaaataatccagacagtcaccgaagtttgataagattcttccataggataaacaatcttccggccccagcaactgattctgagaaattaatatggaacgttctggaagctgaacgaccagatctaaggcaattacacgggaaatctcttgttgaagtaaatataaacttccttgaaaagcacaacgcttctttgacacacagagcagctgcagctgaaatgatgtacctcttggagccggataagaagctgcaggcgattaaattaattgaagactcaacaaataacacagcatcaggaaatggtgtgcttggtcccattaaggaatggggcattcaagattgtattgatgttcataaattgctggatactgtttttgctgatcaggatgttgcaaacaggtggaaggtacgctgtgctgaatattttccttgctcaacctacttcgaaggcgcgaaaagtgctattactgcacatattcccggcagtacttccgagagttcaccagaaaatggagatgtaccaagcccacaagcaaaacttgagggagacagacacagtttgaatgggaccgtgcatgttgtggatgatctgagcaaccttagcatgaggtaaatgcgccaactagttgctgcctggttacagctggaacagaaatatatttggaactggagccagtgcccaactaaccaaagtgcacggcaagatatccaagtgggaatgtgttttgtgcgcagtgattaacttgatgcattcatttgaagagtatattattgattgggagttgagatctcttcaatctccggtgattatctctgttccagctttgtaccttttcgttgtcatcttacatatggtggaaggccaaaacctttcatcccagttacaatgaggcttcgccagggtttgttgcttggcagcaacaggatgttacgattcttttgtcgaagccgatcttgaatttgttgcctggtggttctttttgtcgcagatagctacctgcacgcttgttggactacaacaatttttggcataaaacagttgttaatctcaaacttttgtgaaccatgatgtgttgtttgcagtagttggatgtactgggggttgctctacttttgcaacttttggtccccatggttgtaaattagccaagttaatcctggacattgatattgtatttcggtctgtccagacaaataatcgtcaatgttaactgagtttttttcttcaaaaaaaaaaaaaaaaaaactcg

SEQ ID NO: 4965 - DNA, 1421 bp, Triticum aestivum
  unsure (1)..(1421): unsure at all n locations
  Clone ID: TRIAE-23APR03-CLUSTER45626_1
ccccctggccccgtccgccggccccctggcgttcctgtctccaaaaattccaacttttctttcggttctttaattttcctgtctctcgccgcccccctcctgccagcgagccccaggcctgagaagaggaggaagggggtcaaggccggcaaagtccgggcagccccggggggcgacgatggcaacgaggagtaggagcaggcagtccgtgccgccctcccgctgactcgcagctcctccccctgcatatgcctccaccgccaagggccaaatactccaatgctcctcgtcctcggtctggcgctgggtagcgcgggggggagtggggggacgggtggcgcgggtcgggtacgccgggtacgccgtgcacgaagggggcgacggggggccactgcgagggccggggcaggttcccggggctcacgtcctcctccccctcattcgccccctcagtccgccacaccgagcccttcttcaccacccgcacctcccccgccgcaaacacggaccctccccggttcatccccggcgggtccattggccgccccgggggcccgctccttcctcggatgcggccggcgtacttgaccggcgccgtcctggtcgcccccatgtgcaagatcgctgatgagatgcggccgcatccggtggtggtgagcgtcctcaagctgatgaccaacatcatccccacgtggaagatcgtgccgaccaccgacgtcatcgacgccgcctacaggatgcaggagaagcgcgacgagatcaggaacaacccccactgctaccagggcaagccgcgcctcaagaccgcctacgagctcctcaaagtcagcctcaacctcgagaacaacgtactctcaaaggtgtcattgccgttcctgatcgttcacggaggcgacgacaaggtgacggacccatcggtgagcgacctcctctaccgctcagcggtgagccaggacaagaagctcaacctctacccgggcatgtggcacgccctcacctccggcgagagccccgaaaacatccacaccgtcttccaagatatcatcgcatggctcgaccaaagatcatccccgaaatcatcatcgtcggcggccgccttggacttgtcatcggagatggaacagaaggccaagcacgatgagcagaatatcgacaagcaatagcacgaaagttaatgacaatgagcagctgtaggcatggttaagtacagctgggatttggaatcatgttaagttaactggctggctacaagtgtggtgtattaatccattattgtactaacttgctagctagttcgtcaatttctgtcttcttgtaaaccagaataccatgcaacctggatctttcaaagatatatcatatagcagtgctatttcagttttacaaaaaaaaactcgactttaacaggtntnaacaacaag

SEQ ID NO: 4966 - DNA, 1135 bp, Triticum aestivum
  Clone ID: TRIAE-23APR03-CLUSTER4570_1
ggatccccggcccgcaccccccctaccttatcggcgtcatcgccatcacccgtcataactcgcggccgcacgcgtcgtaccaaaggagggaggaaaaagggatctccactccactcggcctcctcctccgccccgcgcggttccaatctggttcccgggccagcaatcgacgatggggaagaaccaggcgtacaaggcgatgcagcgggcgcggctgggctcgtcctccggcgcccccggcgaaggggaggaagacggcatgacggacggttcatttcattctccagagtggcacgcggcgcgcttggccagcctcaacaagacccacaccctcacgtgggaggagttcaagaagaagcagaaggacgaggaactaaagagaggtgaggtggaggctgacaaagataaaatgatgagagagtatagagctcaactggatgctgaaagggcccaaaagcttggtcgtggaagagacgtaaaagtcaaaatcatcatcttccaagaaagaaaagaaggaaaaggacgcaaagaaacggattaaaaagaggaggaagcacagaagttcgtcagaaagttccagctcatcagaatcatcaagtagtgatgatgaggacaggggttcaagaaaatcccgatcccgatcaagatcaaagcgaagtaagaaagataagaagcacaggtcccgatccaagcatgccggaagtgacagcgaggaggaaggccctgttcgcctctcgaaattctttgggaatgcaaagaactagatgctatatcgatacgcccaataccaatttgcttgctcctgaggtcatatcattttgaatcgtcaattggtgggtgttgattgtattctattgagatgactctcagaaggttgtgggaaccagtttctgtgttgtttctcaacagaatgtttggtaactggaggtttaggtgttgaaccattatatggtatcctgcaacttgtaagaaatgtcaaatcattgttacattgttgtacttgatggatagtgacagtattcatattcgatttgaactgctttaattctttcaaaaaaaaaaaaaaaaaagcttatcgataccgtaaaaaaaaaaaaaaaaaaaaaaaaaatttttttttttctccccgcccccc

SEQ ID NO: 4967 - DNA, 1054 bp, Triticum aestivum
  Clone ID: TRIAE-23APR03-CLUSTER4580_1
cgccgccgccgccgccgccgcaggcggccaccgcgccataggttaggggccaggggaggcggcagagtccgcgaacacccatcgggtacgactagtgggtcgacccgcttcacgacccgccgccgccgcccgccttcttcgccgcaggtggccaccacgccgtacacgctctccgccgtcaacacccaactcccagcctcctcttccaccttcttcgaggagagccgtgtcccgcgtggcccaggccatcgccgaccgccgcgccgacctcgcgcgcgtccagggcttcttcgccgacaacgccgccctcgtcaacctcgtccagcgcctccccgacgagctctcccaccaaatcatggtcccctttggtggcgccgcctttttccctgggagcttgatccacaccaatgagctcctggtgcttctgggggatgggtactacgctgataggtctgcgaagcagacgaccgagatactgcacaggagggggatggagttggaggctcaaatggaggccatcaaggcaaccatctccgacctcgaggctgaggccaagttcttcgagtccaccgctgcggaggcttcggagggtcttgttgaaataagggaagaatatgatgaagaagacacagaaataatttcatcaaaaacagaggcttcaagttcttctgggggcatatcagatgaggaacatgctcggatgatggctaggtttgatgagcttgaaatgttagaaaaggaagctggaagtacttccgaagatgaaggtgatgatgacgacgacgatggtgacgatgaagatgctggaacaagtgaggatggtgaggaaaatggggaaacattaagttatggcaatgagcatgacaatgttagttttggtgcctcagtttctggaagtggtggtaatggccagagtcaaggaaatgcccagctgaagagtgcactaaagaagctaggagagaaggaaacactacaaggttcttctcttgcgccatcaggcagtacctccataacaaactctgaagttcaggcttcgcttagaaaagctgtttct

SEQ ID NO: 4968 - DNA, 1547 bp, Triticum aestivum
  Clone ID: TRIAE-23APR03-CLUSTER4584_1
ctcgcgtcccacgagaccattacctagaacatcctaatcgaaaaaatccaaatcgccgcctcccaccaccaatccgtccctcacatggctgcgctccactcggcggcggggccgcgtagtccgtctgcgtagcgatcggaacgtagtgtttcggtggtgcgcgccgggttgccttatcggagttcgtgggtgttgactatcagggcgagcggatggacgccgacggtcgcctccggcgcgcgctcgccgccttcgggggcggagacgtgtgggacctcgtcgatgccgcgctcgccgcggccgcgccagccgacctccgcgcgcgtcgtgacgggatcgtggagcggctctacgccggggcccgctgccgcaattgcgatgcccccgagagtccaccgcagccgccgcgtcagccggccgaggccgcttctccggcctggcaggaggaggaggaggaggaggaggaggtggccgacgtggatggcctcggcctggaggaggagaccgacgagggcggcggcttggagagcaagatcctggcgatcaaggatttcttggaggaccccgaccagtcggaggaggagctcgtgagcctgctgcagaacctggcagacatggacatcacctacaaggctctccaggagacggacatcggccgacatgtgaatggcctgcgcaagcacccttcgggtgacgtccggcagttagtgaagctgctcgtcaggaaatggaaggagatagtggacggctgggtgcggctccacaactctggtggtgacggtggaaattcgatcctaactgatggtgactctcgtgagaggactcaaggcaaaaggctaccaaaatgcccgggtttcagacttcaagtatacgcccagcccaccacagaggcacagtggtttgagttcagagcggtctaggaataacaatgggttcgagtcgacactggagaggcatagagcaagcccagctcctacgtatcatacgaagcagaacaatggcaataactattcaactacttcgtcatctgctccagctagggcgatgagggagcagaaggataatcatttggacgagaagctcgattcagccagaaagaggcttcaagaaaattaccaggaagcacaaaatgcgaaaaaacagaggacaatgcaagtgctggatatccacgacatacccaagccgaaaaataaaaacaccttcatccgcaagcctggtggaggtggcctccctggccgacatcggtgacctggtgaacatgcaaattcttagccgcggcaaggttcaaaatgaaaaataaattgagcacgaaaggtttatgtttgttctttttttagttacactctggtccgctgaaatattgtccagcacaaccaagtcaagatataatactagtactactgataaaaggaccaaggttatatatttgagaatttgtgctgtagcttgttttttttaagaggtctcttgaatgtacctggaagtattcaaaaaaaaaaaaaaaatggtggcgtcgtttatccattttaccgttactcgggcgtact

SEQ ID NO: 4969 - DNA, 1416 bp, Triticum aestivum
  unsure (1)..(1416): unsure at all n locations
  Clone ID: TRIAE-23APR03-CLUSTER45863_1
agcccatcgtcaaagccaatccccacaccctcgtcgccggcgaagaccctagcgagccatggagaatcggtcttaccacggcggcatcggcagcggcagcaagaaacccgccggcctctgggaaaggagggcgagtacgggggagggtacgaccggctggacgaggaggtggagttccggctgccgaggggccaccggccggtggagaacctggacacggaggggctggagcaggcctccgtcgacacgcggctcgccgcctccaacgtcggcttcaggctgctgcagaagatgggatggaagtccggcaagggcctcggcaagaacgagcaaggtatactagagccaataaaagctggtatcagggatgcaaaattaggaagtggggaatgcaagagcaggatgacttcttcacaggtgaggacagtgtacaaagaaagagattagagcttaatgttgaacctaagggaaaagcatattaatagaacggtgaggtggcagacagaaccgtgagaagaaaatctgcagtgagattaaggagatacagaagacattcttttgcaacctctgtaataagcactacaagctggcatatgaatttgagagccatctaagctcatatgaccataatcataggaagaggttcaaggaaatgaaagatatacaaagcggcggcagtggcaaccgtgatgatcgtccgaaacgtgagcagcagcgagaagagaaggagctggcaaaatttgcccaactggcagatgctcatagaaagcagcagaaagagaagcaagaacaaccagatatctcaggagagcaagctacgtcaaagaacttgcctaccccgggcaaccaggatcagcgtcgaacattgaagtttggcttctccaaaatgaccccttccaaggcacctgttggcagcatgagcaagaagccaaagattgcgacgaaagtcccttccgtcttcggaaacgacagcgacgaggaggcatgatcttcctttgccgtcacatgatacctcacacaggaggggaatgccggctttctcagcagattccagtgagtcatccctgagaagacgccatgcatgtaatgtgccgctggtttgaccagatgcggatagcggcatctttgacaaccccatgaacaaacagggacttggacgttgtggtgtcaattgtattgaactgatggtacactgtaagagcaactctgtctgtacttccctgtgatcagagtctggaaactggcttgagccatggcaagctggcaactagaagaacatggccccccttttgttggggcacatttgtatcacccttgttggattcttgcgagattcctcngcggtcggtgggtggtgaaagtgttttttgctcactttttcacaaagcaagtaaaaaaggagggtgntttgnnggg

SEQ ID NO: 4970 - DNA, 1505 bp, Triticum aestivum
  unsure (1)..(1505): unsure at all n locations
  Clone ID: TRIAE-23APR03-CLUSTER458_1
acaagccccccgaccgcgcgtgctcgccacccgattggccggcggagcgtcgcgggtataaacgctggtgcgcgtcgcctgagccgcacgccgccgcgcatcgccttcccaaacagccgaccagtcaactgaacggcagcccatcaagcgtcccagcctgtcactgaggggcgccgccgccgggcctgggcgtcccgggaactgcaggaacgatgcagtcgctgcaggacaaggcgtcggagtggagcggcgtggcggccgccgacgccttcgccatcgacgaggtcaacgtcttcgaggcgctcggcggcaccccgcagcccttcgtcgacctctccaccaacttctacaccagggtttatgaggacgaggaggagtggttccgggagatattctcggggtccaggaaggaggacgcgatccagaaccagtacgagttcttgggtgcagcgggatgggcggcccgccgctattctcccagaggagaggacatcctgccttgataggacgacatcggccatttccagttacccaccaagctgcggagcgatggctacaccacatgcagcaagctttggagactacagaaagcataaacccagatacaaaaaccaaaatgatgatttttttcaggcacactgcatatttccttgtcgccggtaatgagatgacaaggcaaacccaaagtgtccctccctgcaaacatgcaacgagcaaaccgagtagagtatccgctcaaagtatatgaagttgaataataatttcagcttccgtgattgctatacgattccaatgtgcaacggggattaaggttgtatacgcattatgggaaacaacacgcatggtgttgtagagggggagagacctaatcaggagagcatctcaaaattgataaatttactttcttgatcggacacctcttctctcgatgttctatgtggaggataccagtagtctgcacctgctaagggtagcactgctatggtgtattggtgctcgtacttcctcttctctctgggtttgtgtttgagggcacaagttcctatgctgtataggtgctgaactgctcgtgctattctatccaatgctcttatcagttaagcatggcatttcaacccagctaaataattaaaatggaacggtacccggaaacacaccctgatttcttatccccaccccaaattattacccttgcccgcactatttactcctttttcccccaccatgatcctttactccccgaaaacacccccgccccacccttaatatccccttccccccacaatataccccaaaaccctcgaaacggacaccatgtaaaaactccataccccgccactacatcccaagataagaatcccctttatccgacccttcaagtttaataacatttttacaactctctataccaaacacgcgcccgaaaatccgacacaaaccccctttacataatttcgaccccactctgtacccctcttctcgcactgtcatttatcactcccacn

SEQ ID NO: 4971 - DNA, 1787 bp, Triticum aestivum
  Clone ID: TRIAE-23APR03-CLUSTER4590_1
aaagccggtcagacgacgtctgaagcagaggaggaggagacaggattgaggaacccgcgagacgaagcaggaagccagaggggctctccaatccaagcatgtaagcgagctaatcgatcctcttccgttcttccgcgcatcctgcgattaaccctcacgccgtcttacccaatgtgccatccagtccgccggtgtttctatttctcaagaatgttgcgttctttttgttcttgttggcaggaggtcggcgattaaccggccgccgacgccgaacgatgacgacgaggaggaggaggagggagggaaggaggcttctctcggagacatcatcaacctcaagttggtggagagcggcgagaaggagcggctgatggagcttctccgggagcggctcgtagagtgcggctggagggatgacatgaaggctctctgctgggcttatgcaaggaaaaagggaagaaataatgtaacattagatgatcttattcatgttattactccaaaaggaagaggtcagtgattttcatttgtccagttaatttatttctggttgcaagaggtatgttacttagttccagcgcacattagatacgagttggaagaattgttataaaataatataaccatggcttgcatatgtccatctttgcgtaagtgtcaagcaagggaaaaagtagtgcctaaactcccaagtcaattgcttccttactgtaacaggatctgggacaaaattttggagaacgttctttttttgcacctgcttctcgcctcctatgtttgccatagatttgtgcattttttgtcaataacaatgatgctaagccctaagcaaatgtttctttcatttgtgttggttcttgttgcacgattatcattttctcctgcttctgaaacagcctcggtgcccgatgcggtgaaggcagagctgctgcagcgcatccgatcctttctcatgtcttcctcgctttggtagcccatgaatcacgccgatcggaaggcacgtgtaggaagcttgaagcatcgatcttgaacgcgtgacacttcagagaagcagcaaatatcgacataaaacggatctggtgctgtggatgtgtttcctggtcaggcatgtggttggccctgttctctgactgcaccatcaccacactgtatttgtagcgctacagtgcgcggtctcttcgatgccacttggtaatcttaattagagaactcagaatcaatgcgttgtggtagtactcgcgtatctcatgtcaaacctgattgagtgatcctcatgagggaccaacaagaacagacgccccttttgtcaaaaaaaaaaaaaaaaaagcttatcgataccgtcttcctccgtgcccctcctctcttcgttactcccccccgccgctcactcccttttctcgccgcccccgcgccctcacttttttacaccttatccctcactcatccctaacacccatttctcccgcaacacccatcatacccccttctacctcctgaccccttcctcactccctcccctccccataacatcctctcctctccttatacccatgatgaccccaatacagttccccacaggacccacccaccccttatcccctactttcacatcacaccgtaacctatacacaacacttccacttcaactcaccccttccactattttctcaaattacctctctactcagtacgtccctcgtccaaccacgctcatttaaaattcattcttccccccccctttttatgatttcatagaaaacttccttttagtccaacttccccccgcc

SEQ ID NO: 4972 - DNA, 722 bp, Triticum aestivum
  Clone ID: TRIAE-23APR03-CLUSTER45939_1
accgtcttttcccgtgtgcgccacccgaaagccaaatctcctgcaacttcttcctcctctccccctctccgtcggtctcaggcagccgcgcctccgcccttccgccgacgatcctcggagctcaaccaaccattgacatggattccgggaataccgaggacacgacggttctcaggccatgctgctcctaagaaccctcccatgacgtcattgccggaagaagcaaactgatggtgctgttccccttccttgaagacgtgaaagaacacatcgatgagttcatccacgcgtccatggatgagcacaagacctgcttcaagaaaaaccatacatagaggtgttcgtccacgcctgaaggtatgtccgcaggagctgctccaatgcaaccatgcaagctaagttcgggaacgctttaggcctttggggcacggttgtctcaagcaaaggaagctgcagtggaaggcgctttgcccttccagcccggtgtgtccgtgttagaagaatgcgctggtgtcgggccctagttgctttctggtggccttgttcttgtatcaggtgttttgtttcaactggtcactacaaatttcgtgtaagaaagctcgagtaataacatgagtataacctgagactggatcgctggcaggccttggtatgcaaggcccccggtatagatttccagagtatagcccaataagagcaacggaaaggcaacaaaaaaaaaa

SEQ ID NO: 4973 - DNA, 959 bp, Triticum aestivum
  Clone ID: TRIAE-23APR03-CLUSTER460957_1
ctccctcacgcttcccagctctgctccgttctgctcacctctcaggatcgcaactccgctcaattcccgccatcaaccggccgatagagatactcttgcatagctgatacggtttcgtcggggtttgagctcgattcggcacttctacaattccgagccagcccgccgatggcgcacgacttgcaggcggacgcgtgggcgccggccgcgattacgacgacttcgagttcgacgatgccggtggcaacgggttccgaacctccggcggcgcttcccagcaccagctggatactgagatgaatgacacttgacccttggagtacagacaagggaaggacatgcaagagataccctgggagaggttgaactacagcagggatcagtaccgtcagatgaggctaaaacagtacaagaactaccagagcctcgctaggccgcgagatgcactgcaaaaggaatgccaacgagcggagagaagagacgccttctacgattttcacttgaatacaagacatgtcaagccaacaatagtgcacttccaggtaccaatttttatggacatctctttccggcctcggcactcacatgtatatgactactgacacccgcatgaagttgttgcgagattgatttaacctattttatttatattttcaccacaaattatttatgtttgttcgcatggacaaacggacacttgattcagaaaattggcactccgtcattaacaagtaatatggatcagagggagtattagtactccctccgtcccaaaataagtgtctcaagcttaatacaactttgtactagagttagtacaaagttaagacatttattttaggggagagtatttgctaacttaccaccggttaccacactggtcataaattgtgacatcttatcatgcatgggcgcgtttccatgctcgccttttgtgtgttagctattgtacttgctga

SEQ ID NO: 4974 - DNA, 2509 bp, Triticum aestivum
  Clone ID: TRIAE-23APR03-CLUSTER460_1
cgatgagcagcccgcggtcgtggttggacgacgctgcggctgcgggggcgtcctccacctcgtcgtcgtctgcggcggcgtggatcatgctgcggcggatcgacgactcgcgcctcctctctggcgtcttcttcacctatcacgacggcaagctagccgccagcaggatcacctactgatccatccacacagccgcagcgagcctagtactaagctagtagagcagcagtagtcaagccatgtcgagcccgcggcggccggagatgccaccggcggcgaggaacaacgacaatggatacgtcgagaccgaccccactggtcgctacggccggttcgacgagctcctgggcaagggggcgatgaagtcggtgtacagggggttcgacgcggcggccggagatgtcaccggcggcgaggaacagcgacaatggatacgtcgagaccgaccccactggtcgctacggccggttcgacgagctcctgggcaagggggcgatgaagtcggtgtacagggggttcgacgaggtgcgcggcgtggaggtggcgtggaaccaggccggccgcggcaccaccgcgggagccccgacgccggcggcgacgaggggcggccgcggaggcagcagggccgcatgacgaggaaccggtcgatggtggacgtgcggagccagctgctgcaccggacgctggtggaggagctcaacaagcgcatgttcttcaacaccgtcggcgcggtcgagaacatcggcttccgcggcatccccggctacggcggcgggccctcgtcctcgtcggcgacggtgtcgtcctcgcgcgggggccggagaagtggcaaggacaagcaccagttcttcatgttctgagcagattactttgctcagatcgttggtatgtactgtacgcagtagcatctgcaggtgtgtggtgattaatgcatgtgtcgatcgtgtgtatccttccgggtatatccctgcgggtgcaacaacacacctgcttacgcgagagtacgaatacataacacaacacgggtacgacgaggactacgacgagctcgtcgacgtctactccttccgcatgtgcatgctcgagatgctcaccgtcgagtacccctacgccgagtgctccaaccccgcgcagatctacaagaaggtcacctccggcaagctgcctgacgccttctaccgggtcgatgacgccgacgcgcgcaggttcatcggcaggtgccttgtccccgcctcccatcgcccctccgcccaggagctcctgctcgaccgtttcctctccacgcaggacaccaccatgacactgtcacctccgccattgctgcctgccttgcccacctccggtgaccggaaggataacccggaggaggctgagccggtggcagcaaggactgacatgaccatcaccggcaagctcaacaccgacgacgacaccatcttcctcaaagtgcagatcgtcgacgaagcaggccattcgaggaacatctacttcccgttcgacatcgccggcgacacagcgacggaggtggcgagggagatggtgaaggagctggacatcaccgaccgggacccctcagagatcgccgccatgatcgagcaggagatcacgaggctggtaccggactgggtcggcggtggctgtgatgatcagcaggagtactatacgtacgccgataatgacgacaatgaggagcagcctcctttctactacctctcctcttccccgacctcttcaaacgggtctcattgtggcacagggccgacaacatcaggtggcggctacgctggctggttccaagattacgctgtgagcagcgacgacgacgagacgagctccacgcgctccgcgctgcactactcctccgaagaggcccagcccgaagagaagcctggcgtctccaagacgggccaggtgaaggccaccagattcggcccaggagacagcggcacagcaggacacgacgtgtcgtcgttcgcgcgccggccggccgcggcaccaccgcgggagccccgacgccggcggcgacgaggggcggccgcggaggcagcagggccgcatgacgaggaaccggtcgatggtggacgtgcggagccagctgctgcaccggacgctggtggaggagctcaacaagcgcatgttcttcaacaccgtcggcgcggtcgagaacatcggcttccgccgcatccccggctacggcggcgggccctcgtcctcgtcggcgacggtgacgtcctcgcgcgggggcgaccagcgcggccggagaagtggcaaggacaagcaccagttcttcatgttctgagcagattactttgctcgatcgttggtatgtactgtacgcagtagcatctgcaggtgtgtggtgattaattcatgtgtcgatcgtgtgtatccttcgggtatagccctgcgggtgcaacaacacagctgcttacgcgagagtacgtatacataacacaacacggaactatccatgtatatactttgattttgtaccggggattgaaacctg

SEQ ID NO: 4975 - DNA, 2564 bp, Triticum aestivum
  Clone ID: TRIAE-23APR03-CLUSTER4610_1
agacattcagaaagaaaagacagaaatctacctcccccctcccccccccgcctccggcatcccgcccccctcccttcccgtctccggcgcgccgccagatcgggccagaagagtgcctccggcacccatccctcgctccccgccggcaccttgggcccggcatcggccgccgcggcgcgtcagtcgggcgagcggctcggccgaccgggagggggggcggtccggcgccgcgggacgggcacggcatccgggtatgcggtcgccggagcggacttggagcgcagatcggcccgcccggcaagcggcaatgcagcacggcgcaccggaagcaagggttcaggcggaggccggacttatttactgagtacggcgacgccaaccggtacaagatccagggaggtcatcggcaagggggagctacggggttgtgtgcgcgcatacctccgacgccgcgcggattctccgtgagatcaagcttctgaatatcttccggcatcccgccgacgccgcgccgatcctccgcgagatcaagctcctgaggcccctccggcatcccgacgtcgtcgagatcaagcaccctatgctgcctccctccagaaaggacttcaaagacatttatgttgtttttgagctcatggagtctgatctccaccaagttattaaggccaacgatgacttgacaaaagagcattaccagttctttctctaccagctactccgagccctcaaatacattcatactgctagtgtttaccatcgtgacctgaagcccaagaatattttggcgaattctaactgcaaattgaagatatgtgattttggactagcacgagttgcattcaacgataccccaacaactgtcttctggacggattatgtcgcgacaagatggtatagagctccagagctctgcggatccttcttcacaaagtatacacctgccattgacatttggagcattgggtgcatttttgccgaggtgctgacaggaaagcctttgtttcctggtaaaaatgttgtccatcagttagacttgatgactgatcttctaggcacaccttcaatggatacaatttctcgggtccgaaacgagaaagcaagaaggtacttgagcagtatgagaaagaaagacccggtcccattttctcagaagtttcctaatgcagatcctttgggagtaaaactcttggagaagctattagcctttgatccaaaggaccgtccaactgcggaagaggcattgactgatccgtactttagaggcctttccaagccagagagggaaccatcctgtcagccaatcagaaaaatggagtttgactttgagcacagcagagtgtcaaaggatgatataagggagctgatattccaggagatattggaatatcatccgcaattgctgaagagctacattgatggcacagagaggacaacctttctctacccaagtgctgtcgatcattttaagaagcagttctctcatcttgaagaaagcgatggcagcggccctgtagtcccagcagatagaaaacatgcatctcttcctaggtccactattgttcactcgactccaattcctgcgaaggacactcggccgctctttggcaagccttgcaacaaaacttcctcggagacagggaggtatgctgggaatggtcacagtgcttctcaggcttcacatgcggcacaagcagtggtttcacggagagctgctggttcagcgttaccttatgacgcggcaagcaggccgacgattagcccaggatgccctcctcagcagcagatcccacaaatgtatgggcaatatcagcatcaagcacctgctggtgctgggataccacaggccatggggggctatgcctgtggtgggtacaccaaaggcacagcgccgaatgctgctgctgctccagccatgagagcacccccctaccgccaccttccggcggggcagaagaacggtccgctggacagactggcggtggagaccaccgacatatacacgcggtcgctcaacggcatcgtcgccgccgccgcagcatcggctggcactgccagcgcccacaggaaggttggcgccgtcccgtttggcatgccgacgacttactagcgtctaagaagatggcagcggcgcgtctctagacacttcggccggaaccgtagcaaccggagggaggcattggcctgaaataagttggcggatgaggatcgtctgacgacgacgacgacggcgaaggcatacagagatagtaggtctgaaatcctgttccaagtcgtctctaggctacacacaaaagacggagggtggaccgtggacgggtgtggccagacgagctgtttatttaggtggaaatgaaaattaattagccggttagcggccggctggagacaggccaactcaacacagaaatgaagtctgtactgtgctactgctactatccaacagactgattaattgattaaagggatgatggtccattgatcatcatcatatgattcatttgctcaggaaaaaaaaacaatttttttttttttaaatttcccccagaggccctaattgttaaagg

SEQ ID NO: 4976 - DNA, 1494 bp, Triticum aestivum
  unsure (1)..(1494): unsure at all n locations
  Clone ID: TRIAE-23APR03-CLUSTER4627_1
atcatttatcccccctcctcgcttccaagccaagccgcgcgcgacgccacccaccttccactactcctacactcccacacactacagctcgtacgtcgccgcttcccctcccccgcccgcggcggctgctataactacaggccacgacgcggcgccggcggggggggcgccaaccctaggtaactcgacatcgcgcgcgttaggggcggtgccgggcggcagggggagccagcagggggaggcgggcggcgccggccgcggcggtgccacgcaagtacgcctcctgacgccacccggcaccgtgctaggcggagcgccagccggcggcgctggctcgtgccccccgtgctcggcgcctgcgactcggtctaacgccgtcgagcatgtacgtcaacgccttcccccgccacgggatctacctcggtggccgacgcctcctgtcgtcgccggattcctcccccaggtctcctttcagcccgctgcgcgagaacccgctcctccggactcggcctggccactttgaacaaaatgggtgctcgtcaccgatcctgacgtcttttccgccataactggctccgtccattcatctttaacttgatccacaccggcatgagtcacttatttataagaatcctgcttttgctactctttggcattctccgcgtccggcacttttgcttgctccgcggttgtggcagctacttgccatccggcattgttggtactgttctatctgcactgttcttacgtaatcactacatctctgtcggtgcctctggagctttgtttggcctgcttggctctatgctctctgagcttattatgaactggaccatttattccaacaaggcagcagccatcacaactcttctgttcataattgcaatcaatctggcaatcgggatactaccgcatgccgataattttgcgcatattggtgggttcgtatccgggttcctttttgggtttgtgctgctggcaaggcctcaatttggttggatggagcggcatgagttgccccagaccgatcaacccccaaagtacaagacgtaccagtatgctctgtggggcgcggcgctgctcttgctgctggttgggtatgtggtcggcctggcgatgctcttcaagggaaagaacggcaacgacggctgccactggtgccggtacctgaactgcgtgccctcgtccaggtggaagtgcagcacttagaagacatggttcggttccccccgttcggcgtttctccgaaatacatcccctctccggagaaccatttttatgcttgtgtgtttacaaataccaacgtcagaggcttgtgcctaggagagctgaatccctcctgtatcttgattgacgatgtaatttgagtttgtacctattggcctcagcatgattctgcaccgaccaaaaaaaaaaaaaaaagtacctncagatttttgtcatggtatatgctgaatttttttggttaaaaaaaatcctcgcaagcaattcatc

SEQ ID NO: 4977 - DNA, 2340 bp, Triticum aestivum
  Clone ID: TRIAE-23APR03-CLUSTER4628_1
ctagcagcgcccattaaaaaaatgaataccacgctgagggaggccatcttcctcgcttgatcccgaccgatcccaccgcagtggggcccccgcctctccatgacgcacgggcctacgtcacttctccccggccgggcgcggacgactgcgcgaagccccagtagtcgacgccagtccctccaccccaccaccgcagaggccatggatggagaagacgcgcaccacaggccctcttcctcctcctcgtccggcggcccctttctctccggcctctgcgccgccgcgctccgccgcaagcccatctccgcgcgcgcctctgccgccgcctccggcgagggcctcgtgcggcagctcggcgtcctcgagctcgtgctcctcgggatcggcgcgtccatcggtgccggcatcttcgtcatcaccggaaccggcgcccgcgacgccggcccaggtgttacaatcagttttgctctcgctggagctgcgtgtgtgctcaatgcattgtgctatgctgaactggcatctcgttttcctgccgtggtcgggggagcatacttgtacacatatgcagcgtttaatgaactcacggccttcttggttttcacccagttgatgcttgattaccatattggggctgcaagcattgctcgtagcctagcaagctattttatccaattcttggagctgattccttctgtgaaaggcaatgttccgagttggattgggcatggagaagagttttttggtggtgtcgtttcagttaacatattggctccaatccttcttgtcatcctgactgtgatcctatgccgcggtgtcaaagaatcatctgcagtgaatacctttatgactacattgaagataatcatcgtcatagtcgttgtatttgctggtgtgtttgaggtggatgtatcaaactggtcaccatttatgccgaatggtttcaaagctgttgtaaccggatctacagtagtcttctttgcatatgttggattcgatgcagttgctaattctgccgaggaagctaaaaacccacagcgggacttgcctattggcatcctaggaagccttctggcatgtgtcatcctatatgttgctgtatgcttggtgattactggaatgttgccatatacattactgggtgaagatgctcccttggctgaggctttttctgcaaaggggctgaaatttgtaactgttttgatcagcatcggagctgttgctggtcttactacaacacttcttgttggtctgtatgttcagtcacgtttgtatcttggacttggaagggatggcctactaccatcggagcttcacaaaagttaattctcgcttccatgctcaactttcattcctgatctggattgggttgtgttgcagcattcttagctggccctctttaatgagaatgcacttttcctatattctcacctgttggatcgccttcaagcaacacagctgtttctgattgcgagagtcgcacttttttctcgcgtgcaaagacaggagtatgttcctgtggaccaacctcgcttttctggtcggggggtgtcctatggtcttgacagactcggttttcgtcaatatgttgttggttgatcctgctacatgaacaagcttagttccatatttgtcatccttagtctcatcggcggtgggggtatatgctggatatggtcagtacaacgttgttccgtctacttcggaccactcgtctgttgcgtgtcatggagtgccttcggattccctatgatctattgcaagcctccaagtttatctgaaaatccatgtaccattggatcgtcaggggaggccatggccgtaagcctacctgtattgctcgaagccgtatgtgtagtatgtttctccatagttccatatgtacatctgtatgatattttggaggtcagccaccatatccatttaccactgaaatgaccgcgaaagttttgttgagcaggaaacgcaccctcggaccctccagaggtggaccatggccggtaagcctaacctgtattgctcgaagccgtatgtgtagtatgttctccatagttaccatatgtacatctgtatgatattttggaggtcagccaccatatcatttaccaatgaaatgacagcgaaagttttgttgagcaggatacacacacacagacacaccaaagattcacttggaaaggctttgaaagtcacgattgaaagctttatgtacttgtagtattacagttcataacttcatacatgtacttaattcatctgaaaaaaaacttagttcgctcccagtggggaaaaataagaaaaggccccccccaaatccccttctccaaaatttggcgagacgga

SEQ ID NO: 4978 - DNA, 839 bp, Triticum aestivum
  unsure (1)..(839): unsure at all n locations
  Clone ID: TRIAE-23APR03-CLUSTER463702_1
cccatccccgccctaccagtaatttnccagaccaaacctctgcattcctccacaattaagcaccacagtgggctcgcgtccgagtgggggtgccgccactttaactgaacacaccaccttcctgcctgccctcccctccctcctcctcacttcgcctctcacccttcctccccccttccagtcggtgcgcgcaggcggcgctaggtcttggaggcggggagccatggcctgacttacgggttccttcttcaaatcttcttcgcgagtggtgtggggctgatcggagacgcaaggaggggtgtgttcgaggtgagagatagataaaggagcaaacaaagcgcaacgaaagaaaacagacagagagagattgttcagagatgaagagcagcagcgtccaagaagcgtgtgaggatcaggtgtccgagatcagcagccaggcggcgtccaacaacaacgaggcgtccaacacctcctccggccccaagctcgccctcgacctgtcgctcaccgtcaccgcggccgccgccgccgccaccacgaccgccgagtcgagcaccaccgacagcaacaacggcgcgcaggccgcgcgcgagccgacgcgggtgttcacctgcaactactgccagaggaagttcttcagctcgcaggcgctgggcgggcaccagaacgcgcaccggcgggagcgcacgctggcccggcgcgcggcgcaccggctggaggcctacccctacggctacgccgacgtggcctccctcccgctctacggctcccccgggctgtaccccatcggcattcaggcgcacgcgtttgctgctgggcccgatgccgttccttgtggg

SEQ ID NO: 4979 - DNA, 1089 bp, Triticum aestivum
  unsure (1)..(1089): unsure at all n locations
  Clone ID: TRIAE-23APR03-CLUSTER464118_1
tctgagccctgaccccctcgccggagcggccgagcgcgcgcccatggacgagtaccggccgcgccggtcgccggctaccgagcggttcgtcgggttgttctcgtcgccctcctcgtcgccgacggagtcgtcgttcgtcgctggggatgagttccacgaggacgacttcatgttctcatccgccccagtcgccgcctcggacgcgcggcccgacgggccagggagccccacccgggttccgcatagccacctcggtctcctcgccgcgctgcacgagggggacaaaaggctccttgttcgccgcgccggggtcgggagcggggcagcggcgtcggctgtcgcggccaccccggccacgctgctccggcgcaaggccaccatcgcggctgccacttcggcatctggtggttcgctgtcgcccacccagtcccctgcctccgccgcgtgggctatcccggcgaacccgaggcccaagaaccgcgcaccggccccgcagtatcaccagtcggctccagttaaggttcccgtccgcccgcccccgaagccggccatggacaagtgggacgaactggacgacgatgacgagctccgacacggggatgccaccatgctgcccccgcacgagatggtcgcgcgtgcgtctgctggtggcgccgggccggccgcccccttctcgatgctggagggcgccggtcgcacgctcaagggccgagatcttcgacgggtacgggacgctgtgctccggcaaaccggatggctcgactgaatccggtgaggtgatgtggctctggacttgtattcagcttagagtcatagattggttacattaggatataattcttgtggcgttgtagatcggaagggaagatgagaaagtaaggtaacaggttgagtttttttgtgtgcaagtgcttgcaattttgatctcagtgaattggaaggatgtgtctgttattactgaagtttcaacagtaataagaacttgtgtcatgtattcgtaaattgggagttttctgtaattcaggaggaagggcaattttgtcaacgctgttgagtttatctcgacaattcncaaaaaaaaaaaaaaaa

SEQ ID NO: 4980 - DNA, 1114 bp, Triticum aestivum
  Clone ID: TRIAE-23APR03-CLUSTER46417_1
ttttggagggtaaccgcgaccctgggcttgggggtgccgcggtgttggacgagtgaagaaagttaagaatggggggagcatgtatgtggggaacataaactactaccacaggcctctgcgatctggaaagtgggctgtaacgtacgaggaatgggaagaggaagtatacccaccttacgcaaacggaccgggctatgtgatttcatcagacatcgctgagtacatcgtatccgagtttgacaaccaggcgctgagactgttcaagatggaagacgtgagcatgggcatgtgggttcagaagttcagcaagactcgccagccagtggagtattcgcacgacgtcaagttcttccaggccggctgcttcgacggctactacacggcgcactaccagtcgccgcagcacatgatctgcctctggaggaagctgcagtccgggagcgctcaatgctgcaacgccagatgacttgccacaaggagatcgtctaacagggctgcccggttcttcggcgctctgaatgggaaaaaagaggtcaacgaggagctgaagaaggaggctgagttctttggtgacattgttctggtccctttcatggatagctatgacctcgttgttttaaagactattgccattgctgagtgtggggggcgagttgtgcaagcgaaatacgtaatgaagtgtgacgacgacacatttgttagaattgacgcggtgttggatcaagtgaagaaagtaaagaatggggggagcatgtatgtgggaaacataaactattaccacagacctttgcgatctggaaagtgggctgtaacgtatgaggaatgggaagaggaagtatacccaccttacgcaaacgggccgggctatgcaaacagcaaggatgagttcgagtttgatcttgatttggaggctctctggagaattagcttgcgtaattcgctcattcttttggtcagtggctggttaattcagctactgattctgacactagctagatgctgacaccatgtacatgtgtcaattgtttttgacctaggaattataacagctctgctgatctcacttgtataccggctgttcttatatatacatattagatgtttcgagtaaatc

SEQ ID NO: 4981 - DNA, 1646 bp, Triticum aestivum
  unsure (1)..(1646): unsure at all n locations
  Clone ID: TRIAE-23APR03-CLUSTER46420_1
cacgagaccattacctagaacatcctaatcgaaaaatcccggtccggggcgcacatccatctcccatgcccgcacctccacctgagctggactccctggtatagcgagcgcgccgaccaactccatagctggggcttctccaatcaatccagccggccagagcgcagctcccgcccacccttccccggtccccgtctcttccgcaaaggagcagccgcgccattgccgtgggaggaagcaatgggggcgacacgcgcggacgccgacgagaaggaggaaggcgtgatggcgacggacttcttttggtcgtacacggacgaaccgcacgcgtcccgccgccgggagatcctggccaagtacccgcagatcaaggagctcttcggctcggatcctctcgccttcatcaagatagccgcagttgtttcgcttcagctatggaccgccacgctcctgcgagatgcaggctggtcgaagatactgccggtcgcttacttcttcggttcctttctgaatcacaatctcttccttgcgatccacgagctcagccacaacctcgccttcgccaccccatccctgaaccgctggctaggcatcttcgcaaacctgcccatcggcgtcccaatgtcggtgacattccagaaataccacctggagcaccaccggttccaaggcgtggacgggatcgacatggacatccccagccagacagaggcgcacgtcgtaaagaacaccgtcagcaaatccatctgggtcgtgctccagctcttcttctacgcgctcaggccgctcttcctgaagccgaagcccccgggcctgtgggagttcaccaacctgacgatccaggtcgcgctcgacgcggcaatggtgtacctctacggctggaagtcgctggcctacctcatcctgtctacgttcctcggtggcggcatgcacccgatggccggccacttcatctcggagcactacgtcttcagcccggagcaggagacctactcgtactacgggccgctgaacctgatgacgtggcacgtcgggtaccacaacgagcaccacgacttccccaggatccccggcgccaagctgcacaaggtgaaggagatcgcgccggagtactatgacagtctgaaatcatacaggtcctggagccaggtgatatacatgtacgtcatggaccagacggtaggccctttcagccggatgaagcggaaggcgcccaagaaagatttgtagaagaaacctctgcctgtaggttaagttttgccacacatagctgttttagatgatgttttgatcccctgggccactgtctcactgaactactgaagtgttaactcgaaggtattttgcttgtgtgttcagggaacttgcacttgttccaaaaaaaaaaaaaaataaaaaaaaaaaaaaaatttccgctggagcaaaattttcagattgtagnanggttttcgagagncananatttntaagtaaaaaannntttggaacatntgnnaacccagtgtttggccttttgttttnccggnccggggtttttttcttatacccaaannagggttcananntgtctcggncgggntccngttcncaaaaaaaaaaaaaanncncggggggcgggccaatcncccaantggcctttacccccc

SEQ ID NO: 4982 - DNA, 1539 bp, Triticum aestivum
  Clone ID: TRIAE-23APR03-CLUSTER46509_1
gaccactgactgaccgccggccgctttctcctctacggcgacgcccggccgcccagctgctcaccgccggcgctctcgccgacggcgatgtcgtcttcggagccgcggccgcgccccgccgcctccttctccggcgacctgcccgaggacgcgctgtacgaggtcctcctccgcatcccggccaaggagctctgccgcctccgcgccgtctgcccggcctggcacgccctcacctccgatccgcccttcgtcgcggctcacaagtccacccaccgcacggcgcccccgctcctcgccattgcctaccgcgacgacagtgaggtcaacggcgttgcgatttcggatctgtcgggcaacgtcgtgaggcggattccagtcaccgggtatgagattgttatggtgaacgagtcgggcgatgccgttcaccggagctcaagcaaggaggagcatgatagcatctgtgttgtgcgcagccggctagacctcgtgtgcttccactggaatgtgtactctaggaccttctgcgtgctgaacccggtcactggagctactctcgacttaccgatgggccactcaaaggaattggagcatgagctggaggtacagggaagaaaatggggctgccatgtcgagtggtgcgcttttgggaaggtctcctctaccagagagtacaaggcgctccgcatctgtagcattcgtgaccggcaggtatgtgaggttatcacctttgatgacaccaaccatggaagctggaggaggaagcaggaccctccgccccgtatctgtaccggtcgtcagatgagatgcgtggtcgtcgatggggtggtgtacttcttgatggattttcactacacatactttgaaaccggggttataaccattgagcctggtagcatagcttcattcaacctcgaggcggaggagtggggtgttctacctggtcccggacaggtcaagaggtttgtgcaagagaacaagaaatacagttactcacagcttgagctccagttatcattggctgagttgaacggctgcttagttctggttcataatattcataaggtatctatggacttgtggtttttgacagattttgagaaaggtatctgggtcaagaaatacagcttgccttcacatgttgctaggcttttttggtatccttttctcatgttagatgatgggagaattttcttcagtgggatggattgtctggaaggtatattaagtggtggagagcaaggagagggattcctgcaaagttatgatccaagaaatgacacttatgctgatgcactagaactgagagatcccagatcaatttgcatttacacaggaagcgtgctgagtttatagcatagctgtcactgatgaggtcaggaatgatacatcgtactggctgttcaccttatgttctaaatgtgaacaattagtgagataatgttctgatgcatgcatctttgaaaaagtacctttgtgccttcaaagtatattatgttaatctccaatacattttgcgcaaaaaaaaaaaaaaaagagctt

SEQ ID NO: 4983 - DNA, 1232 bp, Triticum aestivum
  Clone ID: TRIAE-23APR03-CLUSTER4651_1
agtcgttgaaatcctctcctctctttgactctctctctctcacgactcacccgtgacggcggcggcgtccggcggccgaccccgcgacccggcgccggcacggcgaggaagagaggctcgcggcgtggagaggtccctctgcttccgcaccacgcgcggacgccgctcggcctcgagatctcaagatgcggctggtcggcctgacgggcgggatcgcctcggggaagagcaccgtctccggcctcttcaagtccgccggcgtcccggtggtcgacgccgacgtcgtggcccggaatgtagtgcagaaaggtactggaggttggaagaagattgtgaaagcttttgggaatggcattctgttggaaaatggagaaattgacagagctcaattgggtcaggttgttttcactgacccagaaaaacgcaagcttctaaaccgtcttctggccccacacatttcatgcggtatattctgggagatactaaaactctgggtgaagggatgcctggttattgtcgtcgacatcccgctcctgtttgagacaaagatggaccgatggacggaccccgtggttgtcgtatgggtggatcccaaaacacagatcgagaggctcatgtcaagagacagttgcggccaggaacaggctcagggcaggatcgacgcccagcttgcgttggactggaagaagtcggaagccgacatagtgatcgacaactccggctcgctggacgacacgaaagagcagttccaggaagtgctgaagcaggtgtctggtcccttgacatggaaggagcgcatgatgtccagggatggccttctctctatcgtcgtgtgcacggcggcgggggtttctacttgctcagaagaatctgctgtgatcttttcacgcttaggaagttaaggtaactaggattggactaagattgattggttgaaaatttcgaagggtcagtgcagagcactaggcgagcacgattactgttatgtcatgtctggagttattataccacaagtgctgaatttcgagtgaaataaatttgtaactgcttgcttgtgcttcgagtgaaataaaatttgtactgcttgcttgtgctgtctctgcagttttcataggattcatattttatttcttatcgaaggaattatttgtacagttttgacgaaattcctttgaaattcgaatcattcagtcccaaataccccatgtaaaaataaaaaaaaaaaaaaaaaa

SEQ ID NO: 4984 - DNA, 788 bp, Triticum aestivum
  Clone ID: TRIAE-23APR03-CLUSTER465_51
acgcctcaccaccgccgcaacccacaagccagatcgggaaggggatcgccagacctagggtttcgacgaaatcgatctacatggagaaggaggcttcgatcccgattgacaaggaggattcgatccagacggagaaagaggcggcgcctgctggtggtgctgcgacccccgattggttgaggctcgacctgtatctggttgatggatacgggttcaaggagcagaggatggtgaagatggaccatcggaacggctacatcaagtggctgctcgagtgggacaagaagccgcgccctcccctgcccaacctccccgaggagtgccgcgaggccatggacgccatcaaggctcagcgcgaccacgacgagagggtcctcgccgacttcaagcgcgacggctacgcctacgtccaggtcgatgtcttcaacgacgacgacccaagggccaacctccccgaccaccactacgacatcatccacgacgacagcgacgaagtaggccaagaagcggaacgcatcctaggccgtctctaatcttattagaagatccgtcgatgcgtcctaaatattgaagttccatagacgacgatacacgtcgtcttggctcattgttagtgttattacttagttgtgctattagatcgaccttaattagttagttgtgttgtatgttgctgtccttgtaccttttcagtttaagatgtttgttgaacgatgtgcgttgcgttgtttgctttcacagcttgctggtgtcgtttaattgctgatgttcgaaaaaaaaaaaaaaaa

SEQ ID NO: 4985 - DNA, 1064 bp, Triticum aestivum
  Clone ID: TRIAE-23APR03-CLUSTER465_62
actcggtcccagccgccgccgccactagcttccagcgaacagagccaagggtttgggagagagcgatggagggaggagtgatctcgttgccggcgccggcgccggtttcttgcctcgccaacagggagttccaggccaccccaacccccagcccgtccgacgagtcgacggtcctccgcgagctgaacgtttccgtctccctcgccggtctggacatctcccgcggccaccacggcgagccggacgtcctgggccagagacgcagcaagtgcaagcccaaggtccggacagtctccaagatgcacatggcggccaaggccaaggccagggcggagaaggcggcggcggcggcggtcgacaagggccaaggcggagaagaaggcggcgctcgacaaggccaaggcggagaagaaggcggcggccgacaaggccaaggcggagaaggcggcggcggcggcggacgacaaggccaaggcggagaaagaggcggcgcctgctggtggtgctgcaacccccgattggttgaggctcgacctgtatctggttgacgggtacgggttcaaggagcagaggacggtgaagatggaccatcggaacggctatatcaagtggctgctcgagtgggacaagaagccgcgccctcccctgcccaacctccccgaggagtgccgcgaggccatggacgccatcaaggctcagcgcgaccacgacgagagggtcctcgccgacttcaagcgcgacggctacgcctacgtccaggtcgacgtcttcaacgacgacgacccaagggccaacctccccgaccaccactacgacatcatctacagcgacgaagaagcttgatctactgagcaacatctatctatcgatcgatctatttatctaatgtatgccatggattagtgtgtgattcctcaggatctactgcgtctttaagtttatgtctacaaggacgatgttatatcgtagctctgtagtgtgtcctctggcttttgcaacccggcaagctactatctatctatctaaaaaaaaaaaaaaaaaaactcgagggggggcccgggtac

SEQ ID NO: 4986 - DNA, 1836 bp, Triticum aestivum
  Clone ID: TRIAE-23APR03-CLUSTER465_89
tgaggagaacagcaagctttattcatcaacccggatgtcttgagacatatgtttcatagtatttaggcataacacgctaaacacggggaatgggagagcatgatacacgatatgtttatagttgcagtaacattctgggtgattttacataatgaaccgctgcacacattgttgatgcttgcatacggtgcaggcttaggtaacaaggccatcagctatagcgcagcagagtttcttcaagtcttcaaagtcaccatcttggaacgagaacgaagccatcctattggaaattccggtctcagaagctcggtcgaaatcaactttggtgtgatgaacaaagtagccacagcactcccaggcagaaagacagcagccagtgaccagatttttcacctgggggaataagaaaacatttctgccgttgttggacatcattaggctgtgcacagtattgttctcatgcaaagccaagcatgcttcactcactacatcgacaagtgcatttacattggtgctcgtgaacacaagtgcttttagagggtaatcaactatttcagacacacaaatgcctgatctggttgccccatcatataatgcaacagttgaggaagactccactggtaaaggattggcaaagtaacaggcctgaaaaaacatgtgctttggcacaatagatgtaccatcatcaaagaaaacccggaacgctgcactgtttacttcagaggcaatctttgtaatcagcccaaacatccttttatcccaaaaggaagatagctgattagttgcatttgggaccaagaaaatgtgaccatattcaacaggatatgcattcgcgatcagcagtactccattgtttgggggtgtaatcgaaggaacaacctccggttcattattttctccttctgcgatgcacaaaagtaattcctcgtagcttctagcagaatttggcttcaagcatccgaaaggatggccgaacttgtcatgtttcttgaggggaaatgtattccatttatcattcatctgaataacaaaatccctttgaccttcaatgaccttaagttcacaagcagtaacatcatatcccatgtggcccttctgggcaaagttctcccactgagaaagaatgagtgtatcaagtaaacttgggctgccttgaccagcatatgcaaagcttttgagggcatcgtgttcacgctgttctataccaagacggtaaagatgtatcttcacaccttcaggttgatccagaggagagttcttgctgtgaaaacaatatccaccttctagtttggtggctgacaccatacttacaattcttattattatggaatactaactgaactaactataatgctaaaggcctacttcagacttgtgcagcagcaccaccaccagcaaggtaggtgagatcagaaggatgcccccctgcagatgggagggcaccacggccaccgtggaaagaaggcgatgcaagcagaaacttaggaaagcgatggacacattgtcttccccttcttagtgtaacacgggttgctttccttagagccgtggctgatcttctgaagccagccctgccggaccagctatccaattttgcaggatcaacttggctcttcttctaggagctccccacaagttctccgatcataaaatgcagtatttttgcaggacaatcctctattccgtcacaagctataccaatttgcgccggctggactccatgaggaacacacaaaatcgatcgagagaaaacactcggagattccggtgaaagctagcggatttcgatctcgcggacgcgaataaacaagaatggttggatggaccggtacctgg

SEQ ID NO: 4987 - DNA, 1395 bp, Triticum aestivum
  Clone ID: TRIAE-23APR03-CLUSTER46607_1
atctgttccagcctgttcttcccgttcccctccgccctgacctcatcgaggcgaccggccgaccgatcagtctgaccccaaacccctccgccgccgcccgcctccccatggccggccgccgcgcgccgcacgtcatgagcctccacgactccggcccgccgctgctcggccgcgcgccgcagcacccgcagcccggcgacgaccgcgacgagcccccgcacggcgccctcctccaccacccgcgcgggggcccctcgcagcaccccgccgtggcggccctcgaggaccgcatcgtctcccgggaccgggacatccaggagttcctcgtcgacaaccagcggttcgccgccacccacgtcgcgctccagcagcagctcatctccgcgcagcacgagctccgcgccgtctccatcgccggcaccagggcccgcatggagcgcaaggccgacgtctgcaacatcgccgaccaggccgcgcgcatcgaggccgaggcgcgctccgtcgccggcgcgcgcgtggagatcgagcaggtccacgccgatgtgcgggtgctcgctgccgcgcgcaacgaactcatggaccggctcaaagacctccgcgagcagctagggcgcgcgcagtccaattccgccaagtcggagaacgtccgctcccagattgagaccatgcgacgggagatccagaagggcagggctgcggttgaattcgaaaagaaggcacatgctgataaccttttacaaagtaaagcaatggagaaaaatatgattgctgtggctagtgagattgagaggcttcggggtgagcttgtaaatgctgaaaagcgggccactgctgtcaccacagcagcagctgtaaccaaccctgggtatgctcaaccgtacagcagttctgaggcaacatatgccaccatgtatggcaatcccgaggcagcatatgcagcatatggcagtgctgaggcaacatatgctggaacatatgccaattctgatgcttatagcaccactaatcaggctcagactcgcactgatggcaatcaacattacatggcccagccggttcactatgcgcagtacgagggccagcagcagcagcagcagcagcacaccaatgtgcaaagatgaacgctgactcagggtatctttgacctcgcgctctaccttcttagggctttgccagtgtaaacgagtagctgcaggatgcaccgaattgaggttggcggagggatgaattcattgcattggaggtgccaggagatcttgtttatacattgtcattggttaatcaactctgaaatgcctgtgcaagtcgatagctcggagtccgcaaattcttgatgcagtgccctcttgatcagcaatccaccagttagttgattgtccaaaaaaaaaaaaaaaa

SEQ ID NO: 4988 - DNA, 7301 bp, Triticum aestivum
  unsure (1)..(7301): unsure at all n locations
  Clone ID: TRIAE-23APR03-CLUSTER466_1
gaacactgcatctgcgctgtttgtccaaagggaggacgatgggatccacacatttgcccattgtcggccttaatgcctcgacaacaccatcgctatccactattcgcccggtaaattcagccggtgctgcattccaaccatctgccccttctagaacctccaagaagaaaagtcgtcgtgttcagtcattaagggatggaggcgatggaggcgtgtcagaccctaaccagtctattcgccaaggtcttgccggcatcattgacctcccaaaggagggcacatcagctccggaagtggatatttcacatgggtccgaagaacccaggggctcctaccaaatgaatgggatactgaatgaagcacataatgggaggcatgcttcgctgtctaaggttgtcccatttggaatggcgtgggccggcaaaacaccacatcaccgttgatgagttgcgaacaatgtaatgggagcagctaagtgcatgcgaaatgttcgagcaggggctaaaggaacatgcgaatcagggagggcctttcagttgaaaactatggctgctcccgaaggcatgaggagatgtgcagagcccattaaaaatgctgatcaatcttgcggagtaccgggtggttgatacaataaaaagtatgcaaatgtccaactcatagtggagatagcagtgagaaccggtgtttctgctgtttggcctggttggggtcatgcgtctaggaatactgaacttccagatgcactaaatgcaaacggaattgtttttcttgggccaccatcatcatcaatgaacgcactaggtgacaaggttggttcagctctcattgctcaagcagcaggggttccgactcttccttggagtggatcacaggtggaaattccattagaagtttgtttggactcgatacccgcggagatgtataggaaagcttgtgttagtactacggaggaagcacttgcgagttgtcagatgattgggtatcccgccatgattaaagcatcatggggtggtagaggtaaagggatccgttgggttaataatgacgattatgtaagaacactgtttgggcaagtgccatgagaagttcctggctccccaataattatcatgagacttgcgcctagaagtcggcatcttgaagttcagttgctttgtgatcaatatggcaatgtagctgcgcttcacagtcgtgactgcagtgtgcaacggcgacaccaaaagattattgaggaaggaccagttactgttgctcctcgcgagacagtgaaagagctagagcaagcagcaaggaggcttgctaaggctgtgggttatgttggtgctgctactgttgaatatctctacagcatggagactggtgaatactattttctggaacttaatccacggttgcaggttgagcatccagtcaccgagtggatagctgaagtaaacttgcctgcagctcaagttgcagttggaatgggtatacccctttggcaggttccagagatcagacgtttctatggaatggacaatggaggttgctatgacctttggaggataacagaggctcgcgctactgtctttctatgcgactagagaaaatggataccgcaaggggagcacagtttgttgatgaagtcaagaaggtacttacatgatcacgatgataagaatacctccgaaacagaatgtgaaagatattgttatctcttgacatatgtttatggctgtatcccagttaagtccggtggggccattgatgattttactcaaccacagtttggacatgcttttgcgtgtgcagtgtttatagcagaagccaaaaccaacatttctcttgcgctagaagagattcaaattcgtggagaatgtgattgatatgtttattacacggtttatctcttgagtgggtcagacttcggagataacaggattcatactggctggctggataactgaatagcaatgcgagtccaagctgagagaccttcgtggtatattttagtggttggaggagctctatataaaacaataatgagcaacacagacactgtttctgaatatgttagctatctcgtcaagggtcagattccaccgaagcatatatcccttgtccattcaactgtttctttgaatatagaggaaagcaaatatacaattgaaactataaggagcggacagggtagctacagattgcgaatgaatggatcagttattgaagcaaatgtccaaacattatgtgatggtggacttttaatgcagttggatggaaacagccatgtaatttatgctgaagaagaggccggtggtacacggcttctaattgatggaaagacatgcttgttacagaatgatcacgatccttcaaggttattagctgagacaccctgcaaacttcttcgtttcttggttgccgatggtgctcatgttgaagctgatgtaccatatgcggaagttgaggttatgaagatgtgcatgcccctcttgtcacctgctgctggtgtcattaatgttttgttgtctgagggccagcctatgcaggctggtgatcttatagcaagacttgatcttgatgacccttctgctgtgaagagagctgagccatttaacggatctttcccagaaatgagccttcctattgctgcttctggccaagttcacaaaagatgtgccacaagcttgaatgctgctcggatggtccttgcaggatatgatcacccgatcaacaaagttgtacaagatctggtatcctgtctagatgctcctgagcttcctttcctacaatgggaagagcttatgtctgttttagcaactagacttccaaggcttcttaagagcgagttggagggtaaatacagtgaatataagttaaatgttggccatgggaagagcaaggatttcccttccaagatgctaagagagataatcgaggaaaatcttgcacatggttctgagaaggaaattgctacaaatgagaggcttgttgagcctcttatgagcctactgaagtcatatgagggtggcagagaaagccatgcacactttattgtgaagtcccttttcgaggactatctctcggttgaggaactattcagtgatggcattcagtctgatgtgattgaacgcctgcgccaacaacatagtaaagatctccagaaggttgtagacattgtgttgtctcaccagggtgtgagaaacaaaactaagctgatactaacactcatggagaaactggtctatccaaaccctgctgtctacaaggatcagttgactcgcttttcctccctcaatcacaaaagatattataagttggcccttaaagctagcgagcttcttgaacaaaccaagcttagtgagctccgcacaagcattgcaaggagcctttcagaacttgagatgtttactgaagaaaggacggccattagtgagatcatgggagatttagtgactgccccactgccagttgaagatgcactggtttctttgtttgattgtagtgatcaaactcttcagcagagggtgatcgagacgtacatatctcgattataccagcctcatcttgtcaaggatagtatccagctgaaatatcaggaatctggtgttattgctttatgggaattcgctgaagcgcattcagagaagagattgggtgctatggttattgtgaagtcgttagaatctgtatcagcagcaattggagctgcactaaagggtacatcacgctatgcaagctctgagggtaacataatgcatattgctttattgggtgctgataatcaaatgcatggaactgaagacagtggtgataacgatcaagctcaagtcaggatagacaaactttctgcgacactggaacaaaatactgtcacagctgatctccgtgctgctggtgtgaaggttattagttgcattgttcaaagggatggagcactcatgcctatgcgccataccttcctcttgtcggatgaaaagctttgttatgaggaagagccggttctccggcatgtggagcctcctctttctgctcttcttgagttgggtaagttgaaagtgaaaggatacaatgaggtgaagtatacaccgtcacgtgatcgtcagtggaacatatacacacttagaaatacagagaaccccaaaatgttgcacagggtgtttttccgaactcttgtcaggcaacccggtgcttccaacaaattcacatcaggcaacatcagtgatgttgaagtgggaggagctgaggaatctctttcatttacatcgagcagcatattaagatcgctgatgactgctatagaagagttggagcttcacgcgattaggacaggtcactctcatatgtttttgtgcatattgaaagagcaaaagcttcttgatcttgttcccgtttcagggaacaaagttgtggatattggccaagatgaagctactgcatgcttgcttctgaaagaaatggctctacagatacatgaacttgtgggtgcaaggatgcatcatctttctgtatgccaatgggaggtgaaacttaagttggacagcgatgggcctgccagtggtacctggagagttgtaacaaccaatgttactagtcacacctgcactgtggatatctaccgtgaggtcgaagatacagaatcacagaaactagtgtaccactctgctccatcgtcatctggtcctttgcatggcgttgcactgaatactccatatcagcctttgagtgttattgatctgaaacgttgctccgctagaaataacagaactacatactgctatgattttccgttggcatttgaaactgcagtgcagaagtcatggtctaacatttctagtgacactaaccgatgttatgttaaagcgacggagctggtgtttgctcacaagaacgggtcatggggcactcctgtaattcctatggagcgtcctgctgggctcaatgacattggtatggtagcttggatcttggacatgtccactcctgaatatcccaatggcaggcagattgttgtcatcgcaaatgatattacttttagagctggatcgtttggtccaagggaagatgcattttttgaaactgttaccaacctagcttgtgagaggaagcttcctctcatctacttggcagcaaactctggtgctcggatcggcatagcagatgaagtaaaatcttgcttccgtgttggatggtctgatgatggcagccctgaacgtgggtttcagtacatttatctgactgaagaagaccatgctcgtattagcacttctgttatagcgcacaagatgcagcttgataatggtgaaattaggtgggttattgattctgttgtagggaaggaggatgggctaggtgtggagaacatacatggaagtgctgctattgccagtgcctattctagggcctatgaggagacatttacgcttacatttgtgactggaaggactgttggaataggagcatatcttgctcgacttggcatacggtgcatacagcgtactgaccagcccattatcctaactgggttctctgccttgaacaagcttcttggccgggaagtgtacagctcccacatgcagttgggtggccccaaaattatggcgacaaacggtgttgtccatctgacagtttcagatgaccttgaaggtgtatctaatatattgaggtggctcagctatgttcctgccaacattggtggacctcttcctattacaaaatctttggacccacctgacagacccgttgcttacatccctgagaatacatgtgatcctcgtgcagccatcagtggcattgatgatagccaagggaaatggttggggggcatgttcgacaaagacagttttgtggagacatttgaaggatgggcgaagtcagtagttactggcagagcgaaactcggagggattccggtgggtgttatagctgtggagacacagactatgatgcagctcatccctgctgatccaggccagcttgattcccatgagcggtctgttcctcgtgctgggcaagtctggtttccagattcagctactaagacagcgcaggcaatgctggacttcaaccgtgaaggattacctctgttcatccttgctaactggagaggcttctctggtgggcaaagagatctttttgaaggaatccttcaggctgggtcaacaattgttgagaaccttaggacatacaatcagcctgcctttgtatatatccccaaggctgcagagctacgtggaggggcttgggtcgtgattgatagcaagataaatccagatcgcattgagttctatgctgagaggactgcaaagggcaatgttcttgaacctcaagggttgattgaaatcaagttcaggtcagaggaactccaagagtgcatgggcaggcttgacccagaattgataaatctgaaggcaaaactcctgggagcaaagcatgaaaatggaagtctatctgagtcagaatcccttcagaagagcatagaagcccggaagaaacagttgttgcctttgtatactcaaattgcggtgcggttcgctgaattgcatgacacttcccttagaatggctgctaagggtgtgattaagaaggttgtagactggaaagattctaggtctttcttctacaagagattacggaggaggatatccgaggacgttcttgcaaaggaaattagaggtgtaagtggcaagcagttctctcaccaatcagcaatcgagctgatccagaaatggtacttggcttctaagggagctgaagcagcaagcactgaatgggatgatgacgatgcttttgttgcctggagggaaaaccctgaaaactaccaggagtatatcaaagaacttagggctcaaagggtatctcagttgctctcagatgttgcagactccagtccagatctagaagccttgccacagggtctttctatgctactagagaagatggatccctcaaggagagcacagtttgttgaggaagtcaagaaagtccttaaatgatcagatgataccaacgcatccaattcagaatgtgcatgatatcggtttctcttgaagtacatatatagaaggatactattcggctgtaaccgaccatagctgatctgagtcaaccattattttgtaaaacttttttgcggtcttctctgttattcgaggcaaaacttgttttcggacggctccgaatggttgatgagtgtagttggaaaaaaattcgaggcagaacttgctttcggacgcctccgaatggttgatgagtgtagttggatgtgttagttccgcttccnnnnnnnttgnnntgaatgccggtggtgcgtnnnngctgcc

SEQ ID NO: 4989 - DNA, 1547 bp, Triticum aestivum
  Clone ID: TRIAE-23APR03-CLUSTER4671_1
tccgacttgtggccgaccagttccttggtcggctccgcgacctctgcttagctcggtcacacacccccaccaactccgacggcgataatgctcctcgtcgacggcgagcccgtcccctgctcctcccccgaggggagcagcgggagggagctcgtggcggcgctcatggggaaccccggtctgcgcgccgcgtccgagcggctcagggccgcgccggagaggacagtcccgtcggggccggaggggcccaggcacgtgtacgtgttccagcgggagtacgccacggtcgatccggcgcgcgtcgagttagtgggcacagatgagatgactacatgtgtgggtgttgcaattcgcaacaacaagactggaatgacttccattagccatatggactttccaaagattgtagaaggagggttcaaacagatgctggaattacttggtgatgacgacgaaccatttgatgttcacctgattggtggcttcgatgatgcttctacaaaggtagtctattctgctggaggaaagcacagcatacaggaagggtactcccatccactttgtttcatgaaagttcaagtgctgcatcaatcccagcaacggtttcactccaggtctccctgtgtccttgggatcaacactatgactgattcctacgggaatgcacgacccatagttggtggatttgtgatgcaaacatcaccgggagttgttactcctgcaagctttgacatcacttcaaggtgtcctgatgaaatagtcagaagattccgtgtgagtgtttcttcttatgatccaaattggcgaggaaagttactggagacttacgacacacacgctgatattttccaaattgcccctgcctgctggatgccagattgggcagaaatggcatcctcacttaaccagctttcagactctgaagtcctgcttcaatgctccacctctccagctgcagaaccacctcattttgtggaaactgagagaaggatatggaaatacttgatcgagaacccagactgggaagacgcatttccaaagtacaagccccgggtcttccactggacgaatgatggcaggtggtcaaggcactcttagcatcatccttttcctgtcttgtcatccattggtgctctacaagcggaacagtgacagattatggtcacaccagcacttatatgatcccattcatttcctccatttccatacgcctttcatcttcagttatctcatgcattagccacgggtgattcaggattattcggttcttccgtaaatgtatgctgagaaaccggtctgaagttgatgcattaagcacggtttgtgtgttgtgtggtagattcattgttggttcatacctaacctctgaaattcgatttggtcggttaaatgtttgcatgcaacttacctgttgtggtcagaggcgttgtgtacactaaggatgggtgggtgattttattcggggtttgcaatgtgtgttctgctcgaaagattcaatggttgtttggtttcatgcccatcatgatgccccactaaaaaaaaaaaaa

SEQ ID NO: 4990 - DNA, 2508 bp, Triticum aestivum
  unsure (1)..(2508): unsure at all n locations
  Clone ID: TRIAE-23APR03-CLUSTER4674_1
aaacggcccattgggctcccccgtccgcccctccgtcttgtcaagctgcatcggcggccggcgctcgtggagacactctgctttcttccccccctctccccccaagatccactccttcggtggcccttcgccgcagctcctcgccgccagcaggatgcgccagcgcgtcctcggcgtcctcccccccttcgccttcttcttctccttctcgctccagcacgactgctacttccccttccggtggtcgtggttccacctgtcggagttctggttccccatcaagcaggacgcggtccgcctcccgccggcgctcgtcgccgacctgaacgccgacggcccgcgcgaggcgctgccccgcacgcacgacgccaagatccagctcctccagctcccggaccccgccgggctggcctccccccccgaccgcgtccacgtcggcgaggcgcgctggatgggcgagaccttcccgcccggcgcctgtgtgcgcgtccccgccggccccccctgcgcacgagtggctgtcggcgtcggagctatcgccagccagaacatcgaccaacgtaagctggccatcgtggacgatggcgaacgttgggctgccttgtcttgagacctcatctttgagaggctttgaccgaaagcaggtgatcattgcgggtggcaacccggaggccgtggtgatttctcctgatggtagcctactgacatccattgacctccccgcgcctccgacccacgcggtgatcctcgaggatttctccggcgacggtctgacggacatcatcctggtgacgtccgggggagtgtacgggttcgtgcagactaggcagcccggggccctcttcttcagcacgctcgtcggcttcttgattgtcgtgatcggggtgatctttgtctctctgcacctcaactcgtcgaacggcggtaagccgaggtcttcaaccagccacaggtgacgggtctacgatgacaatcggcgtgttctgtcgggaggatattgtgagcattccaaacccatcaagttgaggggttgtaacagtgtttattcagagaatcaattcttggcgtcatgcctcaccattgggataggagagaggatactttactacaacttgcacattttaggaagcataaaaggaaagaattaaagaaaacacaaggaaaaaacgttgttaataacgtgcacaagcctgttgaacacaatccactcggaaaggatgatactaatagaatatccaaagtgatcgggaaagctgcagatctggctggctcagctaaaggcaaaaagtctctgcacacagtttatattcctacaatcactaattatactcaagtttggtgggttcccaatgttgttgttgcacatgaaaaggaagggatagaggctattcatctagcttctggacgtacgctttgcaagcttcatttgacagaaggaggccttcatgcagatattaatggagatggagttcttgatcatgttcaggttgtcggtggaaatggtgctgagcaaactgttgttagcgggtccatggaggtgctgaaaccctgttgggcagttgctacatccggtgtaccagtgcgggagcaacttttcaatgtttctatctgccattacaaccatctcaacctgttccatcatggtgacttttcaagaagttttgggaggtcatttgatccatctggcttagaggtggcaaccccagttctgctcgagagagatgatggtcataaacacagaagaggaagtcatggcgatatcatctttctaacaagcaggggagaaaggtgacctcgtacaccccaggcctacttggtcacgatgcgatgtggagatggcagctatcgacaggcgcaacatggtccaaccttccatctccatcagggatgatggagaacgtcgtggttcctactctcaagaccttctccctgagagcctacgacccaaagcaggtgatcattgcgggcggagaccaggaggccgtggtgatttctcctgatggtagcctactgacatccattgatctccccgcgcctccgacccacgcgctgatccttgaggatttctccggcgacggtctgaccgatgtcatcctggtgacgtccgggggagtgtacgggtttgtgcagacgaggcagcccggggccctcttcttcagcacgcttgtcggcttcttgattgtcgtgatcggggtgatctttgtctctctgcacctcaactcgtcgaacggcggtaaaccgaggtcgaccggccaaagatgactgctacgatntcagccggattctgtcgggaggatcttgtgagcatccccagcacagcagtgaggagctgttacagtatttgaaccagactttttactatagttagctggagatgcttaacttgtgtaacctttgcagcttttgtatgtatttgtagtggtgaagttttgtttgttgtatgatacgacgaagctccttacatgacatgattatattatagctctattaccaaaaaaaaaaaaaaaa

SEQ ID NO: 4991 - DNA, 1238 bp, Triticum aestivum
  unsure (1)..(1238): unsure at all n locations
  Clone ID: TRIAE-23APR03-CLUSTER4678_3
atcgaaaaatgggcgcgccggggtaggcaggcggcgagataagacgccgcgaaagcagcgagcttgcgcttgtcgctgtcgctcctccggcctccgctctgcactctcgtcttcctccctcactccctccctccctctcgcgcgcttctgcgccacgttcgaccggccggcccatggagaaggcggcgtccttcctctcctccctcctcggcggcggcggcgggggggacgggccggcgggggagccggcggcgacggtggcgtccatcctcatttaccccatcaagtcctgcaggggcgtctccgtgccgcaggcccccgtcacctccaccgggttcaggtgggaccggcagtgggtggtggtgaacgccaagggcagggccctcacgcagcgggtggagcccaagatggcgctggtggagacggagttgccgccggcggccttcgacgaggactggcagcccacccccgactcctacttggttataagagcacccgggatggacacactgaaggtccctcttgctgcggaacacgtcacgcttgacgacgtctccgtctgggagtggtctggttctgcctatgatgaaggagctgaagcagctgaatggcttctcctcctatttcgggaagccaagtcgcctcgtgcggtttaaggaagagtccgaaatcaggccgactaatcctgagtatgctcaaggctacaagctcaccttcacggatgtcttcccgttcctgatagcatcccagggctcactggatgcactgaatgagcttcttaaggaacctgtaccaatcaatcgcttcagaccaaatattttagtggatggatgccacccgtactcggaggatctgtggaaaaccataaagataaacaagctgacatttgacggcgtgaagttatgcgaccgttgcaaggtgccaaccgttaatcaagagaacggaatacttggcaccgaaccagcagaaactatgctgacattccggtccggtgaagtgatccgtccgagccacaagaataaacacaaggtgtactttgggcaatatctggtctgcaaggaagcggtgtcagcaaagggaaaagggaggatcgtcaaggtcggcgacccggttcacgttctgcagacatacccttcttcggacgaagttccagcctgagcaagggcatggtagcacctaccatatactccctccgtgccaaaacaagngnctcaactttagtactaatgttactaaag

SEQ ID NO: 4992 - DNA, 2312 bp, Triticum aestivum
  Clone ID: TRIAE-23APR03-CLUSTER467_1
ccggctcaccgacctccagtgctgaggcgcgtgcacttacaagtgaggctagctgaccttgcggctatggtctcaaccggccttgttttccaccacctcgtgcgaccttggagcaatggagggcgtttcttcttctgcccaaaatctccaaacgcctgctccaccgtccgctaacggtccaggactcgctatctccccccacatccgcagccatggctcaatcttgggccttcctcatcccggtcctcgtcctcggctccttcataaccagccttttcacccccagctatatatcaaaccccctctgcggtacagcaatgtgtggcggcactttgttccactgcgcgccggctcccaagaaccatgacccaactcctgctggcagcaccatgtacaagaccgccttccacttccagtccgccaagaactggatgaacgatccatctggaccaatgtacttcaatggcatctaccatgaattctcccagtacaatctgaacggccccatttttggtgacatagtttggggccattcggtttcaacagaccttgtcaactggatcgggcttgaacccgcgttagtacgggataccccaagtgacatagacggttgctggaccggctcggtaaccattctgccaggtggtaaaccagtcatcatatacactggtggcgacaaagatcaacatcaggcacaaaacatcgcgttccccaaaaaccggtctgacccatacctgagggaatggatcaaagcagccaataacccggtgctccgaccggacgaaccagggatgaactcgatcgagttcagggatccgacaaccggttggatcggaccggacggactgtggaggatggcagttggtggtgagctgaacggctacagtgctgcacttttgtacaagagtgaagactttctgaactggacaaaagttgatcacccactgtattcataatggaaaggggctatgtgggagtgtccggatttctttgcggtattgccgggcaataacatgctgctggatctgtccgcagcgatcccacaaggcgccaagcatgccctcaaaatgagcgtggattcagttgacaagtacatgatcggggtgtatgatctccaacgtgatgcctttgtgccagataatgtcgtagatgaccgtcggctgtggctgagaatagattatggcactttctatgcttcaaaatcattctttgactcgaacaagaacaggaggatcatatggggttggtctagggagacagatagtccttcagatgaccttgaaaaaggttgggcaggactccatacaatccccaggaccatttggttagccgacgatggcaagcagttgttacaatggccagttgaggagattgagtcccttcgaacaaatgaaatcagccatcaaggaatagagctcaacaagggagatctatttgagatcaaggaagttgacgcttttcaggctgatgtagagataggttttgagctggcgtccatcgatgacgccgatccttttgatccttcctggcttttggaccccgagaagcattgtggggaagcgggtgcatcagttcctggtggtataggtccatttggacttgtcattctggcctccgacaacatggacgagcacactgaggtgtatttcagagtctacaagatcacaggaaaagtacatggtactcatgtgctctgatcgtaagaaggtcttccctcgagaccagatctggagaaaccagcctatggaggcttctttgaatttgatcttgaaaaggaaaggaagatatcactcagaactctgattgaccggtcggcggtggagagcttcggtggcggtggcagggtttgcatcacatccagagtttatccggcggtgctcgccgacgtcggcagggcccacatttacgcattcaacaatggaagtgccacggtcagggtgccacagctcagcgcatggaccatgaggaaggcacaagtgaatgtggagaagggttggagtgctatttaaaagagaggatcaaattgattttctcgattcttttactgtcattcatgagcattgcctggcagaaataaggacattcagcaggaaaaaatagcctatcatttctttgatctctagtattcatatattgtagttactacttagtatgcccttcccatctcagttacttgtatcaatttttatagaaacgcacactagtcatgaaattcacgggatgagtacttcagtcacaggcagaagaatctctggaaatgttttaaagtggttacaagactttgtgagcaaacaaaaaaaaaaaaaaaaaaa

SEQ ID NO: 4993 - DNA, 674 bp, Triticum aestivum
  Clone ID: TRIAE-23APR03-CLUSTER468065_1
aattctccgccggttgcgccggaggtcccttcatttatgcacaggggcttccgccagaggttccctaggagatcgtgacacccttaagggctgccaacgaggcgctgaactgcctgtgatcagtcttgaagtaggtggggctttctgcagatcccaacttcaaggtgctcgttggggagaaccatagccttgttgcgcaggtctcggagttggaggagcagctgggagctcttgagcagaagacctgtggcttgcagcgtgccagggatggcgcctcctgtaagtgaccattttgaattgaactcagcgtggtcctgccttttagtttgatttgtctggatgggggtattgtaatttcttccatgtgtagcccccggggatgctgcagccctccgtcaagaattggatgaggcctccaggagctagagataatgttgtcctccaaatcacatttggaggctacccttcaacaggagcaggatgtatgtcgcgccctttgtaatgactcagaggagaataaggaccgtcggggtttgatccagcgtgatctggaggccacggagaagaaattgacgcagcagggtgacgtggcctgggtggccgaatagaagctccgctgccagagatccagaacgatgatgcggaggcctggatccaagacgtcgcggcggtgg

SEQ ID NO: 4994 - DNA, 1221 bp, Triticum aestivum
  Clone ID: TRIAE-23APR03-CLUSTER46813_1
gcccccctctgccggccgccccccctatcctctccgagctgagtccgatctgctgctctgctcctcctgaaaacagaccaaacaaggctcatcactgaaagaggacttcaagtacatggcctttaagactctgcaagctccacccagtttagcaaggccagacagttgcagcttcagtccctccaactccaagtcttacttttatcagccaaaacctcactcaagaccgcaagcaagaatcgccaccaagaatcgccttcagagttcaccagtcctgaaatgcagagccaatccgcatggccgcgtcgacgaggttggccagtcccatcaggatcatcagactactgagatccccatactcctgtaccaatcggtcgttttccccggccagacgctgcagctgcagacggttgagttcagataccgcatcatgatgcagacactactactccaggaaggtcacagctttggtatcatctactccagcaggaaagatagtaggatggccgatgttggatgcatggtccatatcgttcagtgcgataagctcgtcgatgaccgcttcttcctgatgtcatgcgtcggcggtgacttccgtgtcctggaggtcgtcagaacaaagccctatgtcatcgcaagagtccaggccatactgaaaggagactcgcctgattcaagtaacctggggtgcctgatgcagcaggagggcacctgaaggacgtgacaatgctttcagacaagctcagctggaaactaatgggagacaaggctaggcagctcagcaggatgcattctccggagtctttctccttagtcgttgctcggttgtttgtcgaagatcgttcagagcagcaatggttgctcgggttagatgacacagcacagcgattggtgagagaaggaatgtatcttcaacagaggagcaagtacctggcagccgtagcagcgattagggacgcatttgggcaactgtcctgcaatgagaagcagtagcagacctggtgcattgcagctgccattctggtaataggagtatgtttgtgctagtgtgctgcattgtagtttgatacttactttgcttctgtcgtaatgtgtatgtatatattgtatatccttgaatgttcgtctttgtggtgaaacttcacaaatttctggatgtactctgttactcagtcatgtatatacacaccatcttcaaggttttcataaaaaaaaaaaaaa

SEQ ID NO: 4995 - DNA, 1456 bp, Triticum aestivum
  Clone ID: TRIAE-23APR03-CLUSTER46879_1
gaagaagttaaaacagaagaggcggcccggcccctggggatggtcctgcggcccctgtttatgctgaacattatcttttaatgctttggcggttcctctcactccacatgcttcaacgatctgtacttacttgacttgcaaactctggagtggtctcaacctgacactcaaggtgcacatataactcctaggagtggccatgctggtatgatgattgacgaagattggtacatagttggtggtggagataatgccagtggttccactgatacaatcgtaatgaacgcttccaagtttgtctggtctgtggtcactagtgtgtcagttcgagatccacttgcttgtgagggcctcactctttgttcaaccacagttgatggcgaaaagtttctaattgcctttggtggttacaatgggaagtacaacaatgagatctttgtgatgaaacccaaaccaagaaactttgtgcaacctcggcttttccaatctccagcagccgctgctgctgcagcttctgtgaaagctgcctatgctgcaataactgctactgatgagaaaactaaagatattgttgctactgatgatttggatgtgaagagagctgaacctggaagttcttccaaagaaatggttgccgaaattgatgcacttaatggggagaaaggagaactagagtctcgactggcagaagttcgcactgaaaactcaaagctaaaggataaactagatgtggtgaagttgtcccacaatgaattgacaaaggaacttagatcagttgagaatcagctagctgctgagggttcaagatgccagaaactggagtcccaaattgctgctgcgcataaaaggttggagtctgctagttctctggaaaatgaactggaagccttgcagcaacaaatatctcaggcggaacaaaccatgacgacttctcagagacggaaatcagggggcgtgtggaagtgggtgggaggaagtgcagaggtctccgacaatgaatagtaagtctgcgtgcaacatgcttgaatggaaaaatatctgatgtacttatgtgttactgtgctaagctattgtcagagcttcatggttatcattttgcgcaagaattttgtagaggttgatgtgatccctgctttcaaggatacaatgcatggttctagatcatatattatgtaagcaaatagttaatgcgtaatgtagaatgatttttgcacagcaaaaacatggtagtaatcatacatatgacaagtatacttaagattgtaccggtctggaaatataattggtttgggatgttaggtcttgttttttggtttttacctttctggagttggtatacaaatatgttcattggttcaggcgactgggtggaaaatacattgtttacagcgtaaatttacagactcgatcaggtgtttctggtccaggtgtgagcatgttatgtgccagtgcaatc

SEQ ID NO: 4996 - DNA, 1590 bp, Triticum aestivum
  Clone ID: TRIAE-23APR03-CLUSTER470_51
acgcaacatttttctctcgcccggtcgccccacccgctgttccaccagttactactactgacagacgcagccagcgcgggttccacaatccgatccccctcacaaccgcattttttttagcggcagcggaatttaactcgcctctcccgccgccgcccgtccgcagcccaatggacctccccgtggtggatctcgcgcccttcctgcaggccgccgccggcgacgccgcgccggccgaggcggaggaagcgctgcgcgcgctctgcgccacggtgagcgccagcctgcgggacacgggggcgctgctggtcaaggacccccgctgcaccgccgccgacaacgaccgcttcctcgacgtcgtcgagcgctacttcgcccgatccgacgactccaagcgcctccaggagcgcccccacctccactaccaggtcggcgtgacacctgaaggcgtggaggtgcctcgcagcctcgtcgacaaggagatgcaagacaggatcaagagtatgccagaggagtttcaaccagccacccctaagggaccagacccgaaatggcgctacatgtggagagtgggtcctcgcccgtcgaatacccgctttaaggagctgaacgcagaacctgttattcctgatggattaccggagtggaaagagacaatggattcctggggtgcaaaaatgatttctgcaattgaggttgttgctgagatggcagcaattggatttggcttgtcaaaggatgcatttacctctttgatgaaggagggaccgcacctcctagcaccaaccggaagtaatctgatgcgtcacggttctgagggcactgtgtttgctgggttccattatgatcttaatttcttgaccattcatggtcgtagtagatttccaggcctgaacatttggttaagtaatggtaaaaagatggaggtgaaggtccctgttggctgtcttctcattcagtcagggaaacagttggaatggcttactggtggcgaatgtttagctggaatgcatgaggtagtggtgaccaagagaacattagaggcaatagaactagctaaagagcagaaccgaagcttgtggaggatctcatcgacgctattctcgcacattgcttccgatgcgacactcaagccattgggccactttgctgaagcacccaatgctcatagttatccgcctatatgtgccggggagtatgttgagcaagagctctcggcgatcaatctgaaagggaaggttgcactctaggcgtacacagaccgccgattaatctggtgactcgttaatccgccttctgtggtcagaacgcgaattgcgataatccaagctgatacttgtatcttcattcaactttgttgacataccgaggttgcgccggtctatttccgacacaaccctatctatgtccatgctaagtatatgtccatttgatccccctgttaagttatagtggatgctcatgctctggtgtactgaactgatagcacctgtgaaaattaaataatagtggtactgttattctcgaaccgaagttgtacttgaactgatatcagggttgctgtctacgaaaatcatccttgcaaaaaaa

SEQ ID NO: 4997 - DNA, 2384 bp, Triticum aestivum
  Clone ID: TRIAE-23APR03-CLUSTER47238_1
gactaacttcggcttcgcattcccacaccaacacctcaccgcccgacgtcgccatggccaccacgtctcgctccggccgccacggctccgacgacgaggaagactctacgccggcgatgcgccgcctccgacgcctctccctccacctcctgcagcccgctcccgaggggggcgactctctggtccccgccgcgtgcgcgggcaagcggcgggcggggggcctggacgcggacgcggctgcgctcacggcgtacctccgggggcggcaccgcgcgatgcaggcgcgggtgtacgagttctacgtcgcgcggccggagctgcagacacccgtggagctgcccatggccgcccaccgcgacctctgcttccggcagatggcggcgctcgtccgggaggccggggtgcggccgctcagcctcatggcaggcgaccccgccgattacttcgccgtcatggtaggccgtgaggcttgtggctcgggaacttgtcgacgccttcgatgtcccagatcaaatcatccgcgccccaatcggcatgcaatcggaggcctatgctcagtatacacagggtgtcggcttctacagacaaccaacatagacctaccattctgctgcaagctcagaccgttaggcaagaagctatatggacaaacttatatcatatacccaacagagtgagtcaaaatcaagtgtacaataagttttatcccaaaaaagtgtataataaaaatgagatgtgtataagtgataatattgtgaataaattttgtcagactttgttttggcagcatggctgtgaataaagctcatatgtgagaaagtaagtagccaaataattgtcccaattcgggaccttgaaacccatgctgttcttcctggaattgagatcaatgattgtgggcacaagataggcctaaatggtgtagacaatggtgccctgagattccgttcagttaggataccccgtgacaaccttctgaaccgattcggtgatgtggcgcgagatggaaaatacacaagcagcctccccacgattaatagaagatttgcggcaacccttggtgagcttgttggggggcgagttggtcttgcgtatagttcggtgggagtactcaaagttgcggtaaccattgctgttagatatgctttactgcgccaacagtttggtccacctaaggagcctgaaatcagtgtgctggattaccagtctcaccagcacaaactaatgcctatgttggcatcagcgtatgcatttcattttgccagagcgtatctggtagatatgtactcggaaatgaagaaaaccaatgacgaggatgttaccgctgatgtccatgtactttcctctgggttgaaatcctacataacttcatacacggcaaaatctatcagcatatgccgagaatcgtgtggtggccatgggtatgctgctgtaaatcgctttggtggtctgcggaatgaccatgatatatttcaaacattcgaaggagacaacacagttctgctgcagcaggttgctggagatctcctgaagcaatatcagcaaaaattcaagggaggaacactctcggtcacctggaactacttgagagactccatgaacacctacttgtctcagcctaatcccgttactgctcggtgggaaggggaagatcatctcagggatcctaaatttcagctggatgcattcagataccgaacatctagactactgcatagtgttgctgctcgactccagaagcacatgaagacactcggaggtttcggtgcgtggaacagatgtttaaaccatctgctcacactcgcagagtcacacattgagtctgtcatcctcgcaaggtttatagaagcagtgaagagttgccccgacgaaaaaacacgagaagtactgaagctggtgtgtgacctttatgcacttgaaaggatctggaaagacatcgggacatatcggaatgtagactatgtggcgccaaacaaagccaaggctatccataaactggtagactacctcagttaccaggtgaggcttgtggctcgggaacttgtcgacgccttcgatgtcccagatcaaatcatccgcgccccaatcggcatgcaatcggaggcctacgctcagtatacacaaggtgtcggcttctacagacaaccaacatagacctaccattctacttcaggctcaccgttaggcaagaagctatatatagacaaacttatatcatatacccaacatagtaagtcaaaataagtgtatgataagatttatataaaaaaaggtgtataataagatgagtaatagacatcagatgtgtataagtgataatattgtgaataaattttgtcagactttgtttggcagcattgctgtaataaagctcatacgtggca

SEQ ID NO: 4998 - DNA, 1488 bp, Triticum aestivum
  Clone ID: TRIAE-23APR03-CLUSTER47425_1
tttttgtggcgccctttttcctagccggcgtgttcctcccccccccccttccggggttgtccgtttggcaccgcgggagtttccgcctttccgccccccccctcccgttcccatttcggggtgttcaacattctcttccccccgctcgtcccccaatccaggccgtccgggtggcggccggcgccgtccccccctcctcggcggcgctcgtggcggtcgggaggggccgggtgccgctgggcggcccggtggcccggtcgttgtccccccccccccccgggcaggcgcggtgttggtcgtgcccacagggcgggcggttcgccgcggcgtcccccccggggcgttctcccccctccccgcccccgggcgtcggtccgcccgcccccccccccccccccgctaatcccccggcgcgcaccctgcgcctattctttgcggacactcttaggcctgcttctgccagcaaccgctggacggtgttttttttttttttttgcaagcaagaacaccggccctctggtgttcataagacacacaatccttgttccatcaattttccgtttctcgtaaaaaaagccgagagccgtacacagatttctcatcacacaaagcgctacacccggtgggagcgctctctgctgaaaaatatttacagggtacagcgatggcacgaggcgtacagaaaacgaaaccaaaaggcaaatgcgaaaggcgaggggcataagagccctctgctaggatccatctaaattcctacgcgcacacggagaggccacacacggagctagcacatagccgggggcgacgcgacggggcgaatctctctcttctcttccctccactcgtccctaaatccaggccgtcagggtgggggccggcggcgaccacgactcgtcggcggcggtggtggcggccgggaggagccgggagcggcagagcgggcaggtggcgtggtcgtagtccagccaggtctcgaggcaggcgcggtggaagaggtggccacagggcaggcggttcaccacggcgtccgcctcgaagcgaacaaggcagacgcggcagtcgggcgtcggcgaggccgccgcgccccgcctccggccgaaccgcgcggggcggaacctgctcctgaacctctcggccaggctggggcccgccggggtggcggccgtgagctggtcggcgccgtcggcgtcctccccggccagcagcgagggcggcgcgggcaggccgaggaagacgagcgcggcgcggaggaggcccgccagggcggcgatcgagacgacggcgtggtagagcaggtagatcaggaggctctccttgggcgccggcatgctggagatgcccatcgcggcggcctggaggaggaatggggatcgatccggggacccgtctgcaatttgcgccttctttcggggtggtctgggcgagggagcggtgcggtgtgggtgtggtgggatggatacagtgagttttcgattaggatgttctagg

SEQ ID NO: 4999 - DNA, 1344 bp, Triticum aestivum
  Clone ID: TRIAE-23APR03-CLUSTER4756_1
cgaacccgcgtccctaccccggcaaagctgacgctagagcagagaggcagcccccgtgttcgccgctcgtctccatggaggcagtcgccagagcaagcatcgcggcaggctcgcacgcacgggtccccctgtgccggcgaccgcggccgcgccacgccgtgcgctgtctccggggacgaccctcggtggcctgcgcggccgccgccgacgccgatgtcgtccgtctcttcgacgccgccaagctcacggtcggacgagttggtgaaagagcggcatggtggtcgggggtcgggtccggcgccgcgtccgggctcgccgtcccagtacctccggacgcgcctccgcagaacctcggcaaccggctccggcgaggcaccctcaccggcattgtcggcatacaatcgtctgtgataaagccgggtgaggcgtcggaagcaacgagaaaggtccccaaattcattttgcttgccctaattgattttgctttcactgatgctgatgtaattgaagagggcacactcgctgctgtcatcgggcgcgggaaaactgaaagcgggcagccttctttcatacaagagaagggtattgttgaatcggctgacaaggttgcttttatcattgacaacgacaaatatgtgaatggcatcgagggatccattccagttttggtcaaaagtggaaactggatcgacaccgctgaagagattgatgatttgttcctaggcgacgcagaggtttggaggaggccatcaattggaactgccggtccatcgggaggcgatttccccgctggtaaccaaggagggccatcacatacttgatgttatcttcacaaccccaatccaggatcttggaaaggtagcagaagacttggagaaaatcgttggcgttgtggaccatgggataatttgcaacactatgccgtatgccgtaattgcgtcgaaaggggaagttcaggtcttggatcggaagtcatcggtgataccgaacacataaatctacaattgagttgcagagcaaccatttcccccgcatttcgacgggagaatctattgcgagttggctggtgaaaaaaaatgcaatgagtcaaacgtgcgatagctattttttgtaccgtccgacgtgtaaaattctgtgtggcatgtccaaggttttcccctacggatgtatgaatatgatcttcagatatgtgcagctactgactctgctagcactctgaagaatctgaatcactcgtttatataagttggtcatgtgatggcatctgccaaaaaaaaaaaaaaaaaaaaaaaaacccacgcgtccggacccacgcgtccgcggacgcgtgggcggacgcgtggg

SEQ ID NO: 5000 - DNA, 1392 bp, Triticum aestivum
  Clone ID: TRIAE-23APR03-CLUSTER4795_1
aaaactcgagctgcaccggacagaccgaacgagacgaaccctagactggtctgccgccgcccactcgtgcaggacctcgctagaccggtctgccgccgcccatccgtgcaggacctggagctgcgccgccgccgctcttccaggtccaggagggtcgccggctcgccgtctgccagcccagcgaccccgcccgtctggcgacaccgcgtcctcgcctgcccgctggtccggtgaccccgtccgcccgcccgcacgtcctggaggtctgccgccgctcgtctaggagagccaccgtcgctgactcaccgcggacgccgtctgcctgcccgcgtacgccagtccgcgatgagggtgaagaggcgatcgcggcaccgcaaggtggttaagttctactccacctgcttcggcttccgcgagccctacaaggtgctcatcgatggcaccttcgtgcaccacctcctcgtccaccaactcctccccgccgacgacgccctccgcgagctcctctccgcgtccagggcgcccccgctcttgacctccaagtgcgtcgtcgccgagctcaggcgcctcggcaagtcccactccgaggcgttcgacgctgcccaactcgtcgccaccgccagctgtgagcatgacaaagtggtcagtgcggtggactgtattctgtcacttgttggtgataagaatccggagcactactttgttgccacccaggattctgatctccgggcaaagctacgggaggttccttgtgttcctgtgatatatggtctgaagaactccctgtttattgagcaaccctctgtgcagcaacgtcagtttgctcagttggatgaggagaagcgtatacatatggaaaaatcagaatttaagaagctattaaaggcgtcatctgaaggaaagacatccgtctgtggaaacgctcccggagtggcagagaaaagcaagtttaaaagaaacagagcaaagggtccaaacccactctcttgcaagaaaaagaaaccaaagcctcaaccatcagctgctcaaaatcagggcccgaagactgatggcgaggcaaagcgaaagagggttcggaagcggaagagaagtgccaaaggcagtagtcaagcagagacatgaagctgatggacctatgaagaagttgcaaacagcggttggatggtgtttgatggacctacataatcgttaaaaagcttcataaatcatgcatgaccgcttagaggattgtggcttgaattttttgacaatgtaacacttaatagtttgtttgaccctgtttggacctgtatatcctgtcctagtgatttatataagtttagcttttccctgttgctaaaaagcccccaaaatccctattgtggtgtttggttctctcacctgcccgggcgg

SEQ ID NO: 5001 - DNA, 657 bp, Triticum aestivum
  Clone ID: TRIAE-23APR03-CLUSTER47_10
agcagcagcgagcgatctgcactactcacggtaagaaccacaaccaccacaagtgagtgaccatcggagcaaggaaagaccaggagagatggcaatgaggccgcttgtcgtcctggccctggccgtggcgctcgccggcgtggcactgggagggggcgcggcggagggggccggcgagtgcgggaggtcctcccccgaccggatggccctgcgcatggccccgtgcatctcggcggcggacgagccggactcggcgccgtcgagcagctgctgctcggcggtgcacaccatcggcaagagccccagctgcctgtgcgccgtcatgctgtccggcaccgccaagatggccgggatcaagcccgaggtcgccatcaccatccccaagcgctgcaacatggccgaccgccccgtcggctacaagtgcggagattacacgctgccttgatggcccggcaatgctgccgatgaagatgaatgctgtggaaggcgtcgtcgtgtgggaataagcgagtggtgcatgtgccacttatgtggggcactagtgacttcatggaggtgccatcatgtgatgtgtgcttgtgggaatatgtttctataagcatgtaatgtttcgtctgtgttaacgtcaacaaacgtctccgtgtgatttctattttc

SEQ ID NO: 5002 - DNA, 1983 bp, Triticum aestivum
  Clone ID: TRIAE-23APR03-CLUSTER4824_1
cgaaagatcactcgacacatcgacccttgactcgagtagacgcaacaacagcaccgacttgaccaaagtaacttccttctcggcatgagcggctcatcagccattgcccttgcaatccgcccaacctcgcatccctttccccgaggagtggcagagctcgcctccctcgcgtcgtcgtcctcgtcggcatgagcggtttcctcgctgtggccggcaagattgtcacgttcctgctgtgggtgctcttcctggtcctgcagacagccaccaaggttgtcgggggcctcctgcaggttgcaccgccagccgagccacaagaagagccgcaaccagaagcagcaccacgacccagatcgccgccggctgcgaggaaccgcgccggcggcggccccgcggatccatacggtccgcagtcacagctgtgggacccaccaccgcccccccacaccgctccggtgacggatgagtatcactcgtcctcgatctaccggcggcgggtgagcgccccgcaggccgctgaagatttggtggtttcctccagcagttactctcattcggccgtggcagcagcgccagcctctccggctcatgccgtctcagtgccaccagtgtcgcggacaattaagacaccggcagttgccagtaagcggcccaagctggagaggaagtactccaagattgtggaccagtaccgctccttggatgaggttattgaagcattagcgcaagctggcctcgagtcttccaatttaatcattggaattgatttcacgaaaagtaatgaatggacaggaaagagttcattcaatggtgtgagcctgcatcatattggtgatgcccccaatccttacgagcaggcaatctccatcattggacaaacactgtcagcttttgatgaggataacttaattccgtgctatggttttggagatgcatctacacatgaccaagatgtatttgccttcaaccctgacgaaagaccatgctatgggtttcaggaggctttggctcgatatagagaaattgttcctcatcttcgtctttccggtcctacatcattttctccaataattgaaatggccacaaccattgttgagcaaagcggtggccaataccatgttttagtaataattgccgatggacaagtcacacgaagtgttaacactgaatttggtcaattaagtacccaagagcagatgactgtagatgctattgtgcaagccagtgaatttcctttgtctataattctggtcggagttggagatggtccttgggacatgatgaatgaatttgatgacaacattcctgctagatcttttgacaatttccagtttgtcaacttcaccggaatcatgtcaaaaaagatcagtcaaagcaacaaggagacagagtttgctctttcagcactcatggaaatacctttgcagtacaaagcaacattacagcttggaatactggggcgtcgacttgcaaagtctccagagcgagttccacttcctcctccttttgcaagttataataccacctcaagagcagcaccatcttgggcaaataacttccgaagtgtgccttctaatcttagggaggaggcgactttagattcaacaatcacaccgtcagttacacccccaccagctgcagatgctagagcatcagaactccaattctgcccagtttgccttgccaaaccccgggacatggcatttggttgtggtcatcagacttgttcagggtgtggaccgcaggtcgtggattgccctatctgtcgaaggccaattgatacaagagtaaaactatactaacagcctcacatgcctgactaggtttgactgaagtacgctggagtgttgaaagtagaatccatggaaaagaaaaagaactccgtttgcactgtagcttgtaccataaagaaaatgaataacagttgtgtactgcacaaaaaaaaaaaaaaaaaagcttatcgatagaacgaccactactcaa

SEQ ID NO: 5003 - DNA, 1494 bp, Triticum aestivum
  unsure (1)..(1494): unsure at all n locations
  Clone ID: TRIAE-23APR03-CLUSTER4838_1
aaaaccactacaccgtagtgggcggcccagatcacccaaggcaagcccccacccgccacgggaaccccgagcccctcccgcccgcccccggccccggcggccccaagcccactcgacgccattctcctccgccacgccccgcgccgaaaccctagccagccccgccggccggcgccaccgccggtcccccccggtccacgctctcaaggccactccggccacccgaagccatggcgcagcggggggcgggcgcgcttctccaggcggcccctcgggctcgcggcggcgacggccgccgaggggcctgagcaccagcaccgcggcgcgcggccgcggcggcggcgggagaggccgcggctggccaaggcgaagaggagcaagaagaagaacctgttcgacgtggtgcagttcctgccggactggagcgacggccacaaggtagccaagaccacgtggcgcgacgtctcctaccagatcaccaagatcaacctctacaaggacggccgccacggggaaggcgtgggggattcggcacaaggccggtgtgcaagtggccgacgctccgataaaactcagcggagtgaacaagcgtggttggaagtacataaaggcatcgcagaagacggtgcaggatacccccgcagcagagacgccagccgctgccactgccaccgccactgcttaattcgttacaagctagaacatttagaaggcggcaaaacgtgttcctgtagaagcgtagcgtcgaactgttcagacggtcggttgatctgccgtcttccactctttcatagtttccatgctttccagggttttaggcatagttgaaagggccccgaattgccatgtccgccacgctgtcttgctaaagatgatgtcgccgtcgaaaacatttgttttgtattttctacatttttgcaatgccgcgtttccatgagaaggaacaagtgcgtcgcctcggcattagtttggttggggtgggtctcatgtaataaaagttcatccttgctctggtccaaaaaaaaaaaaaaaatcctagaatgcaaattatgatcccgtgtaagaagaggcgctgcctgcgggagatgaaaaaaaggcggcgtatcccgcggcggtgcccacggcgcccgcggctgccgccgcggctccggccgcggcccctcgtgggactgcgtcgtggcgcccctcgcccgcccgttacccaacttaatcgccttgcagcacatccccctttngccagctggcgtaatagcgaagaggcccgcaccgatcgccctttccaacagttgcgcaacctgaatggcgaatgggagatccaatttttaagggnataatggggttaaactactggattctaaattggtttggggattttangattcncagnccccaagnttatttnaggcccctcaatcctacaancctggtcatganccataatcagcctnncncatttganaggtttacttgntttaaaaacctcccccncccccn

SEQ ID NO: 5004 - DNA, 1557 bp, Triticum aestivum
  unsure (1)..(1557): unsure at all n locations
  Clone ID: TRIAE-23APR03-CLUSTER4851_1
cgcacgcacacatacatccaaagctagcttgcatttcatctgcagtgcactcagctagttacctggacgctcacgctcaccatgaagctcaagctgcaagtgcggctgaaggcgctcgaggagctccaggccgacgtcggcgacccagtaacgcgcgctcggctaaggtacgtcgtggtcgtccgcgtgcgggctgccctcctgcagcccggccgccatgcctccgcgcgcggcaacaccgtcgacgcccggcagcgccgcgcgcaggacggtgccctccggcgcggtcggggcctccgcgggcacctggggcttcctcagcaccgccgccgccctcagcatcagcgacagccgcgagagggcggcaacgacggggcaccattggcaactccaccctacgtggcggggcggcctgagcccgatcggttctggttctgcttgtgtgcccgttcccgccccgtcttcttgatcatcccgctgccgtgtccctcttcgtctgtcctgtcctgcccatgcgcacgcagcgacccagcccctactaccggccacgagatgttgcaggtatagaacggatcgtacacaagcgcgtttgtttgcatatgtgcacatgaactatgtgtgttgttaataagcatgctacccggttaacatgcctgtcttgtcattttttatttcttcagcccgttaattaagagtagcaatttccacattgtttacggcagtgccgggaaacggtgcctgctgtcgaggtcggtagccagggcgttccagctccctaagtgcagcgtactggaccttcctcagtccgtcggccaaggccgccgccgccggcgaaagacaacctgagtttcgtcgcaggtgacatgttcgagtccattccaccggcggatgctgtcctgctcaagaatgttttgcgtgactggggccacgacgactgcgtcaagatacttcaacgttgcaaggaagccatccccgcaaggggcgccggagggaaggtgataatcatagacatggtaagagggtctctgctcggcgacaagaagatcgccgagatggaagccttgcaggacatgttcgcgatgtgcaccaacggggtggagcgggacgagagcgagtggaagaggatcttttccgatgctggattcagccacgattacaagatcatgccggtgttgggccccttgtcagtgattgagatctacccatgaaaagctggcaactagaccgtactaatggacaccatatgttgcacgtatacctgaactacaacaggtttatttgtatgtgccgatgaactatttgtgttgttaataagcaggctgccttgttaaacatgcctgtattgtcattgttataccttctgttaaatgagcgtagctctttctagaatttggtgctgtatttcgtcaacctatatgtcatgttgaggttaatggttggattctatactcgagacacctcggccgcgaccacgcctttaatcnaattccccgcgggcccgccaatggcgggccggggagcatgcgaacgtcggggcccaattcncccctaatagng

SEQ ID NO: 5005 - DNA, 1544 bp, Triticum aestivum
  Clone ID: TRIAE-23APR03-CLUSTER49092_1
tatgtcttcccatgacgcgggaaaccaactgcaggccctttggattagcacattaatggacacaagtgccaactttggcttactctgctagctatggcaggggcgaaagaaggggccaaaagaatgaaactcactacaacattatttacacctagctaatctggtcatcttcgcccgttcaagaaagctctcgtattgagtcccattcaaagtattagaaacatcagtccaattatcaatatgatcacgcaatcgtttagtatggattttcacatgccgactggatagcttcatctttggcaatttcagaaaatccagcacatctgtgagcttagtgcgattgctgaccacatcctcgtagtacaggacaatactccggatcttcttgaaactcactaaaccatcagctgccaacttatcagacctctttagttcagcaatcaacgattttgtgtctattgttggcttatactgagcaagaacatcagcctggcctctgtgatgcacatgagctttgtgagttccatttagttgcttcgtatttctatcataatcgtttgccaatatggagacatatcgctgcagaaggtttcttcttaaaaggaaaattaaagacacaccccttcggttgaaatattcagctatctcttgatgatgtttcatcagaccctgattgagcatcccatttcaaccccacagcagccgtgcactcatttttagcggcactgctgacccagtcgagattgtacaatttatcgagtgtttgtgtgatggccgtgacattgctacgcctgtctttgacagagaaaatctctccattggagctaatattctcgtggctattcaacaaggtttcaaaccatccacttcccgacctctgcatcgacaagatagcaaagaatctaactggtgtgcatgcacattctttcctactataagtattgggtgtggggaagtgcaccgaagggatctcggtctccggaactccggggtggtggcaaggctgctcccgttctttctccatcgtggtgggccccctgagcccgaaaagcatcccattttgcttcagagataaggagaatatgtatacacctacaagggtggccagggccaatatggcaacccatgacgcgagcggataccttcttgtaggctttgtgctcacgctggttgtatccttggcggcgccgaaatcctccacgggcagcgccacggagctatcgtgctctctccctaccccctccatcgggcagcagcatcaaacatcaacgcaccgccggctcaaatacaaaccgagaaatcccacccaacctcggcggagtctcctccccaggccgaccaacaacggagaaatcaggctcggttggaggggggagggacccggaaggaacgcgagaggaggcggcacggcggtcgggcgggttatgaggaggaggcggcggggtgttcgcatctgggggagagaaaggaggaggggttaggcaccgtaccggtggaagagagaaggaagagccgagagcgagcacctagtgcgtgtccattct

SEQ ID NO: 5006 - DNA, 1152 bp, Triticum aestivum
  Clone ID: TRIAE-23APR03-CLUSTER4921_1
agcagccacaaccattcgccatcagctcccgaagccactactagtatgcccactagcttagctgcacacacctctgcccctctcttctcttcctcagacagcccagcccagtgtgcatatttaagcaggaatccgagatcaaaatgacgagacgctgctcgccgccgctcgctgctcttgtcctgcttctcctcctctgcttctcctagggcgtggcggccgctcggcccctccccgccaacactgctcctcacccagggatcggggtggtgagaggcaagacggaggatgcaggagcaacggacggccgagtggtgctcaaggaggaaaggggcaaggccggtaatggcggcgaggcggtgtcaccgtctgaggcgacggtggacgatgcgacggcagaggaggaggcgtgcgaggaggggaaggagggggaggagtgcatgcagaggaggctgctccacgacgcgcacctggactacatctacacgcagcacaagggcaggccatgagcgtggcatgggctagctcttccgtcgaggtcgagtagacgatgctgggcattaagttgacacaaggaatcatctgacgacgatcatggtgattttaatcatatcttatcgatctacctgctgctgttttggctacacccaccgtgccgtggcccgtccatctatgcgtatgtgggtgtgccacatcgtcgtttgtacatcgatccatcgatccctcgttcgctaatagtctaatactactagtatactactgtagtgctgtactccttcttcaagtatgtttgttttccttgttgctggcttgccacatacagtagctcctagtgctattgggacttccatgtggtggtaagctgacggtgatctagctcttgcttgctagcagcagcatgcaacgcaaggctgttttagttcctgatgactagtttaggattggttagtagactactacttagtactttattagtgttgatgattgattggcatggcatggcatggcatgatgtgaagctgtggacgagtgaacaagcgcgtatccgtacttttgttgtttagaaaaaaagagtagtactagtgccaaaaaaaaaaaaaaaaaaaaaaaaaaaaaaaaaaaaaagaaaaaaaaaaaaaaaaagggccccta

SEQ ID NO: 5007 - DNA, 1458 bp, Triticum aestivum
  Clone ID: TRIAE-23APR03-CLUSTER494_2
tctatggcaatggaacagtgctagcttggtgtgaataattttttatggagctgtaataattagttttctgaatgttaactaaccaaagttacatgtaccttgcgcgcaggcgtcgagtccatcggggtgtgctacggcatgagcgccaacaacctgccggcggcgagcaccgtcgtgagcatgttcaagtccaacggtatcaactccatgcggctatatgcccccgaccaggcggcgctgcaggccgttggcggtacgggcgtcaacgtcgtcgtcggggcgcctaacgacgtgctctccaacctcgccgccagcccggcggcggccgcctcgtgggtcaggagcaacatccaggcctacccgaaggtttcctttcggtacgtctgcgtcggcaacgaggtcgccggcggtgccacccagaacctcgtcccggccatgaaaaacgtgcagggcgcgctcgcctccgctgggctgggccacatcaaggtcaccacgtcggtgtcgcaggccatcctcggcgtgtacagcccgccctccgccgggtccttcaccggggaggcggacgcgttcatgggccccgtggtgcagttccttgcccgcaccggcgcgccgctcatggccaacatctacccgtacctggcctgggcctacaacccgagcgccatggacatgagctacgcgctcttcaccgcgtccggcaccgtggtccaggacggctcctacgggtaccagaacctgttcgacaccaccgtggacgccttctacacggccatggccaagcacggcggctccaacgtgaagctcgtggtgtcggagagcgggtggccctcaggcggcggcacggcggcgactccggccaacgcccggatctacaaccagtacctcatcaaccacgtcgggcgcggcaccccccgccacccgggcgccatcgagacctacgtcttctccatgttcaacgagaaccagaaggacagcggcgtggagcagaactggggactcttctaccccaacatgcagcacgtctaccccatcagcttctgatgagctagctgcgtatgcgtagctagtgtccgtatgtccgtccgtacgcgcgcgtacacgcgtataagagcgtgtatgccgtacgtatgtgcacattatgtattgtacagggcttgggttggggtgcgaccgctgaggcagctcagacgcgtacgcgatagtagtggtttgctatagtagtgtatgtgtatgatttacgatggaaggggggcagatgtaaacgctctcccttcgtcgattcatcatgcatttgatacgcacacacatgtgtgcgtaagtagaactatattgtagggttcaaaatttcgtcaaaacttgacgaaatttgtccaaaataatatgaaatatatcggcgagaccgaagtattcctataaaaaaaaaaaaaaaaaggagccgctcgcgatctagaactagtc

SEQ ID NO: 5008 - DNA, 1180 bp, Triticum aestivum
  unsure (1)..(1180): unsure at all n locations
  Clone ID: TRIAE-23APR03-CLUSTER4969_1
ccaatccctagcctcctcctcctcccgccccccccctctccccgccgccgccgacgccgccgccctgccagcccgagccacctcccgcgacccctccaacccccagcctcctcctcctctcgccgccgccgccgccgccgccgccatgtccgggaggaagaagacccgcgagcccaaggaggagaacgtgacgctcggccccgccgtccgcgagggggagcacgtcttcggcgtcgcgcacatcttcgcctccttcaacgacaccttcatccatgtcacggatctgtccggggagggagacgctcgtccgcatcacgcggaggccaaaagctgagacctcctcctcctctcgccgccgccgccgccgccatgtcagggaggaagaagacccgcgagcccaaggaggagaacgtgacgctcggccccgccgtccgcgagggggagcacgtcttcggcgtcgcgcacatcttcgcctccttcaacgacaccttcatccatgtcacggatctgtccgggagggagacgctcgtccgcatcaccggtggcatgaaggtcaaagctgatcgtgatgaatcatccccttatgcagctatgcttgcatctcaggatgttgctgtaagatgtaaggagcttggaattactgctctgcacattaagctccgtgctactggtggaaacaagacaaaaactccaggtcctggtgctcaagctgcgcttagagctcttgcacgttctggcatgaagattggacgcattgaggatgttaccccggtccccactgacagcacccgccggaagggtggtagaagaggaaggaggctgtaattccatgctcgttcaaggatggaacaataccaagctatcgatatcctgcgtcttgcaacttgttctgtactactccgtttatgatgttaagtcagatcttgtggatttatagattttgagagatattgtgttgcatgtttagaaaatgaccctttcccctcttttgaatcaagtggttgccatctattataaccctttctttgctatggatttttacttttgcgtctaaaaaaaaaatgtttcatgtgtctaaaattgacacacggttgtagctccaattcgccctatagngagtcgtattacaattcactggccgtcgntttacaacgtcgtgactgggaaaaccctgcgttcc

SEQ ID NO: 5009 - DNA, 1994 bp, Triticum aestivum
  Clone ID: TRIAE-23APR03-CLUSTER499_5
ggcacgagaatccatccacccgtcctcctccgcgacgcaagatcggccgatccaatccagtaacgaagatggcgtcggcggcggcgccattgatcgtgtctctgttgtgctgcacggcgttggcggtccacgcggcgcatgtcgtctacccggagctccagtcgttggaggccacggaggtggacaaggagctgcgcaccgggtaccacttccagccccccaagcattggatcaatgatccaaatgggccgatgtactacaaggggctgtaccatctcttctaccagtacaacccaaagggcgccgtgtgggggaacatcatctgggcgcactcggtgtcgacggacctcgtcgactgggtggcgttggagcccgggatctacccgtccaagccgttcgacatcaacggttgctggtcgggctccgccaccattctgcccaacggcgtcccggtcatcatgtacacaggcatcgaacccaaggaaacgccaagtgcagaacgtcgcgtacccggccaacctctccgacccttcctccgcaagtgggtcaagcccgactataaccccatcatcaaccccgaccacggcatcaacgccagcgccttccgtgatcccaccaccgcttggtacgggccagacggacactggaggctggtggtgggcagcaaggagaacatgagggggatcgcggtgttgtaccggagccgtgactttaggagatggatcaaggcacaccactcgctgcacgctgggctcacggggatgtgggagtgcccagacttttaccccgtggcggtggccggcggcagacgtcaccaccggagcggtgtggacaccagagagctgcatgacagcacagtcgctgcggaggtaaaatatgtgctcaaggtgagcctcgacgtaacgcgctacgagtactacaccattggctggtacgaccatgccaaggacaggtacaccccggacctcgacttcccagacaatgactacggtctccgatacgactacggcgacttctatgcatcgaagtcgttctatgacccggtcaagaagcgccgcgtgctctggggctgggccaatgaatccgacactgtccccgacgaccgcaacaagggttgggccggcatccaggcgataccgaggaagatcttcctgtcacggagcgggaggcagctaattcagtggccggtagaggagatcaagtcattgcgcgcgaagcacgtcaatgtcagcaacaaggccgtcaagggtggcgagtacttcaagatcgacggcttcaaatccgtgcagtcggacgtggaggcggcgttcgtgatcaagaaccttgagaaggcagagaagttcgacaccgcgtggcagacagacgcgcaagggctgtgcaagaagctcaactcacatgttaagggcggcgtcgggccgtttggtctctggttgctcgcctctgacgacctcaaggagagaacagctgttttcttcagggtattcaagaacaacgacactagctacgtcgtgcttatgtgcaacgaccctacaaggtcgtcgtacgagtcgctgatttacaggccgaccttcgccggcttcgtcaacgtggacataaccaagaccaagaagatcgccctcaggacattgatcgaccagtctgtcgtggaaagttttggcgccggcggcaagacgtgcatcctgacgagggtctacccgaggaaggccgtcggggacaacgcacacctatttgtcttcaacaatggcgagtcagacatcaagctcaccaacctgcgtgcatgggagatgaagacccccacgatgaacaagcgtctggggcagtagtagcaacagagcccggcctagtagatcgaagattcagagtagcctagactagccatagctagctagcttgttgatttagttgagattaattaggataggctccaggtttagtgatgagttgttagaaatgcaggaaatggtccgttttgtttaaaaaaaaaaaaaaaaaaa

SEQ ID NO: 5010 - DNA, 1990 bp, Triticum aestivum
  Clone ID: TRIAE-23APR03-CLUSTER5005_1
cgcgaccgcccctgacgccctgcccccgccccctccccctcacccccccctacccccccccccctccaccaccccccccccgggcccccccccccgccacacttctacctacccccggcggagccttctcgccagcccagcccccccctccggccccgccccccccaggccgccggggcgccgcccccaaaaaacaaaccaacaaaatacactccttgctagccccggcggagcggcgacgccagttgagtcgagccagccacgcggccggggcgagcagagcggcggcggttgcttccggcgggcggccaatggcggaggacggcgagaaggcggcggcggctgctgcggtgggaggtgttgcgggtggaggagggggagaggcggagcaggagcgggaggagcagagcgtgaagctgttcgtggggcaggtgcccaagcacatgacggaggcggagctcgccgccatgttcaaggaggtggccctcgtcgacgaggtcaccgtcatcaaggacaaggccaccaaggcctcccgagggtgctgcttccttatatgcccctccagggacgaggccgacaaggcggtgaatgcgtatcacaacaagcacacgctcccgggggcggcaagtcctttgcaagtaaaatatgctgatggagagttggagaggctggaacacaagcttttcattggaatgcttccaaaaaatgtagcagatactgaattgactgatttattttccaaatatggaaatatcaaggatttacaaattttgagaggttcacagcaaacaagtaaagctggatgcgccttcattaaatatgaaatgaaggagcaagcagtggcagctattgaggatctaaatgggaagcacaaagtagagggttctagtgtgccactggttgtcaaatgggctgatacagaaaaggaaaggcaggcccggaaagcacagaaagctcaactgcaatcacctaatatgccgaatggacgcccaatgccacaatcttcagtatttggagctttacagatgggatatatgcctcagtataatggatttagttatcagcctccagggacatatggacttatgcagtaccctttatctcctatgcaaaatcaaggcccctttcagaatatgggtcagcctgttaaccaagggaactcgatacgaggagtcaaccctgaactgtcccccaactcaggtcctagatcatttaacccaatgcatttaggcagcccgtatccagcagtacctggtatgcagtaccctggatcctaccctggtggtccgatgaacaatcgtccttttgggaatcctcacaatccccttaaagttccaagtgcaaatgtcaatcttatcgcatttagtccccgtagcaatggcggtggccaaacacaaacagaaggacctcctggagccaatctgtttatctaccatatcccacaagaatttggtgaccaggaactctccgatgccttccagaggtttgggagagtaataagtgccaaggtgttcgttgacaaagcaactggttccagcaaatgcttcggttttgtaagctatgacaaccctgtgtccgcgcagtcggccatcgccatgatgaacggtttccagctaggcggcaagaaactcaaagtacaactcaagagagacaacaacaagctcagtaaacctttttgacaaaaatcatctgtgatgcccatgcggtcttgttcccggtacatatttgtcagatagttgaccgtgacgctgattgtttccccacatggccctgcgtggcgcgccgcgccgcccaggggatctgccggggagcgccatgtatcttctaagttcagttgacaatcttaagaaaatttgttgcattgtgtaattttattatctcagcttagcgttagcgtcggaccccctgtatacatcagaagtcagattcattcaattatttactttgtctcatggcaaatggctctgaactttcttggtcaaaaaaaaaa

SEQ ID NO: 5011 - DNA, 2975 bp, Triticum aestivum
  unsure (1)..(2975): unsure at all n locations
  Clone ID: TRIAE-23APR03-CLUSTER501_24
gaagaggacagcaatgggggagactgctggagggcgcgccctgagccgcatccacagcgtgagggagcgcatcggtgattccctctctgcgcacaccaatgagctcgtcgccgtcttctcaaggcttgttaaccaaggaaaggggatgctgcagccccatcagatcactgctgagtacaatgccgcgatccctgaggccgagcgcgagaagctcaaggacaccgcctttgaggatctcctaaggggcgcacaggaggcaattgtcatccctccatgggttgctctcgccatccggccaaggcccggcgtctgggagtatgtgagggtcaatgtgagcgaacttggtgttgaagaattgaacgtcctgaattatttgcagttcaaggaacaactggcgaatggaagcatcgataacaactttgtgcttgagctggactttgagccattcaacgcctccttcccgcgcccatcgctgtcgaagtccattggcaacggtgtgcagttcctgaacaggcacttgtcatcgaagctgttccatgacaaggagagcatgtacccattgctcaacttccttcgcgcgcacaactacaaggggatgaccatgatgttgaacgacaggattcgcagtctcggtaccctccaaggtgcactcaggaaggcagagacacatctgtcaggccttccagctgacaccccttactcagagttccaccaccggttccaggaacttggtttggagaaaggttggggcgactgtgctcagcgtgcgagcgagactatccaccttctcttggaccttctcgaggcccctgatccatcctccttggagaagttcctcgggacaatcccaatggtgttcaatgtcgttatcctctctcctcatggttactttgctcaggccaatgtcttggggtaccctgatactggtggacaggttgtttacattttggaccaagtccgtgctatggagaatgagatgctgttgagaatcaagcagcaaggtcttgacattacaccaaagattctaatagtcaccaggttgctccctgatgcacatggcaccacctgtggccagcgccttgagaaggtccttggcaccgagcacacccacatcctgcgtgtgccattcaaaacagaagatggtattgttcgcaaatggatctcccgctttgaagtctggccttacctggaagcttacactgatgatgtggcacacgagatcgccggagagctgcaggccactcctgacctgatcattggaaactacagtgatggcaacctagtcgcgtgttcgttggctcacaagttgggagttactcattgtattgcgcatgcactcgagaaaaccaagtatcccaactccgacctttactggaagaaatttgaggatcactaccacttctcctgccagttcacagctgacctgattgcaatgaatcatgctgacttcatcatcaccagtactttccaagagattgccggaaacaaggacaccgtagggcagtacgagtcgcacatggcattcacaatgccaagcctctatcgtgttgtccatggtattgatgtcttcgaccccaagttcaacatcgtctcccctggtgctgacatgtccatctacttcccatacactgaacagcagaagaggcttacctccctccatactgagattgaggagctactcttcagtgatgttgagaatgctgagcacaaatttgtgctgaaggacaagaagaagccgatcatcttctcgatggctaggctggaccgtgtcaagaatatgactggcctggtagaaatgtatgggcggaatcctcgcctacaggagctggtaaacctggtggttgtttgtggtgaccatggaaaggtgtccaaggacaaggaggagcaggcagagttcaaaaagatgtttgatcttatcgaacagtacaacctgattggtcacatccgctggatctctgctcagatgaaccgtgtccgcaatggtgagctctaccgctacatctgcgacatgaagggagcctttgtgcagcctgctttctatgaggctttcggtcttaccgtgatagaggccatgacatgtggccttccaacattcgccactgcatatggtggtccagctgagatcattgtgcacggtgtgtccggctaccacatcgatccttaccagaatgacaaggcctccgcactgcttgtggacttctttgggaagtgccaggaagacccgagccactggaacaagatctcgcagggaggactccagcgcatcgaggagaagtacacctggaagctgtactctgagaggctgatgaccctttctggtgtctatcgtttctggaagtatgtctccaacctcgacaggcgcgagactcgtcgctaccttgaaatgctctacgccctcaagtaccgcaaaatggctgcaactgtcccattggctgttgagggcgagacctcgggcaaatgatttgtccttaccagagaaataaatggcgggcgagcgctccgctttaccgttcttgattcagtgatgaagcacagatcggagagtgttatgcctttgattgtcctttgttaccgttcttgattcagtatgaactttagttcctgttgaggccccggccgtgttgtcgcggtaggggaactggatggatgctgtgttgttggtactttctcatggatacagtatttgaatgaatgaataagatagtctttgttttaaaaaaaaaaaaaaaaaaaaaaaaanctcgagggggggcccggtacccaattcgccctatagtgagtcgtattacaattcactggccgtcgttttacaacgtcgtgactgggaaaaccctggcgttacccaacttaatcgccttgcagcacatccccctttcgccagctggcgtaatagcgaagaggcccgcaccgatcgcccttcccaacagttgcgcacctgaatggcgaatggcaaattgtaagcgttaatattttgt

SEQ ID NO: 5012 - DNA, 1576 bp, Triticum aestivum
  Clone ID: TRIAE-23APR03-CLUSTER5027_1
accgacccccccttcccccccccgccccgcccccaccgccctccgccccgcactaaaattacacttccgcccccggcctcgccgcgaccgacgagcgcctcgcctcggactagctcctcgggtttctctgcccaggccgcccctccccacacacagcccaccgccccctccaaccccacctcaaattacacttcagcccccccgcctcgccgcgaccgacgagcgcctaggagggacccctagggtttgtctgtctgagccgcccgtctcgtcggcggcgatggcgtcggagtccgccgccgcggcggcttcgtccccggcggcgcgggccgggggcgggaaggacgaggagctggccgatctggtgcggcgcatcgtcgacgtcctctcccgctactccgatcgcctccccttcgacctcgaccgccagaagcttcgctcgcttaccacacttgctgcaattgccatcacaattgtatttgcctggaaactgttgagagctcctccagagcaacctcggaggccacggagacgggatgctccatcatctagcaacacaagcagtagatcacagccaggtgctttggtcggaacgaatgcctgctcatcggtagattcaagagcacatgaagcgatcaatcagcttttccaaccagtaaatctgactcttgagcatcttgtcaagcataaacctgagcgaaggggcgaagggttacctgccggttacttggtgtgattttggaggaaacaactccagaggagctccagaatcatgtcacagtgagaccttctgtcttggaggttcttctagaaattgcaaaaatttgtgatgtctatctgatggagcatgttcttgatgatgaaagtgaggaaaaggtactgtctgccctaagtgaagctgggctttttaccggtggcggtttggtgagagataaggttctcttctgcagtacggaaattggccgcacctctttcgtccggcaactggaacctgactggcacattgactcgagtcctgaaatcgttcaccagttatctaggtttatcaagtatcagctgcacatttcgccacagcaaacggaaagggtgtcacccaatgttttcagctctgcaagcttggaacagttctttggaggccttgatcagagatgacaaagtgaggtcagactcaagtgagccgtggcatagtgagagcgcagaggaacatcattgttcaatttattttcttgaatggtgcaattcgtttttcttgtattgtgtgtaaaagtcttgttgtggctagtactaaacttgttctgcaatgccccataagctatggatagaaagacagtacctgtagattcatgtatcaacattgtccctgtataaccaaagtaaacagctgtcaagataaaaaaaaaaaaaaaagtattttcacaacctgcactgcccctgttccgctgggccccatgaccgcgcctgtggatgcctgcgcctgcagtgtcccggtataaccaaagtaaacagctgtcaagatcctcgtgccgaattcggcacgagggccaccccagcacttctctgctcctcccctccctcg

SEQ ID NO: 5013 - DNA, 1837 bp, Triticum aestivum
  Clone ID: TRIAE-23APR03-CLUSTER504_1
cctgcacctggggtgtgctcgccctcgcgttctcgctccctccctcaccccagccggccgccaaccatagcggcagcggccctttccttttataaatctcccccccccgcccccacaacgacgagagagccaggataaagtcaatcaccagctcaccccagacccgttgcgtgggcgttccggcgggttgccttgcctggttcctttgactggttgttcgagggctttttgggagtggccggattcgacgtcgccccgtttcctccgctcctccaccagagtcgcgagccgggctaaagtcaatcatcagctaagcctcatcccgttgcgcgtgcgtgcctgcgtcttgcctccctcctgggactgggttttgagagtttcgtggccgtgtttgagaatggacggcgctcgggtggccgagttccggccgacgatgacgcacgccggccgcttcctcctctacaacatattcggcaaccagttcgagatcacggccaagtaccagccgccgatcatgcccatcggccgcggcgcctacgggatcgtctgctcggtgatgaacttcgagacgagggagatggtggcaatcaagaagatcgcaaacgctttcgacaacaacatggacgccaagcgcacgctccgggagatcaagctcctgaggcacctcgaccacgagaacatagtaggcctccgagatgtgatcccgccggcgaccccgcagtccttcaacgacgtctacatcgccaccgagctcatggacacggacctccaccacagcatccgttcccgcaaagcgctctcggaagaacactgccagtacttcctgggccccgggccgcggagccgcaggcacatctccacggcactcgtgcgccgccaccgacgtctggtccgccagctgcatcttcatgccgcccatcaaccgcgcgtcgctctccccggggagggaccacatgcaccagatgccgctatgcacgggggtgatctgcacccccgccgacagacgacccccgattcacccggaccgaggacgccaggaggtacatgaggcacctgccgcagttccctcgccggtccttcccagggccagttccccaaggtgcagcccgccgcgctggcacctcatcgagaggatattcacctgatacggcttatcacggatgtcatcggcacccccaccgacgacgacctgggtataatccggaacgaggacgccaggaggtacatgaggccacctgccgcagttccctcgccggtccttcccgggacagttccccaaggtgcagcccgccgcgctggacctcatcgagaggatgctcaccttcaacccgctgcagaggatcacagttgaagaggcgctggagcacccatacctagagcggcttcacgacgtcgccgacgagcccatctgcacggaccccttctccttcgacttcgaacagcacccactgacggaagaccagatgaagcagctcatattcaacgaagccctggagttgaaccccaacttccgatactagacgattcattcctagttacccccaatagtatgatttcgatgtaaactgtttgtaaataggagtaaggtcaaagaacatggtagattgcgcactgcatttgtttgtttgttctgtgtaagttgttgctgcttcttcagacctttgtccctcggctgtgcgaataaaaagtttggagcatgatttgagagcaaatcattctctagtttatgaagaaatggattttattaatcaggtggatgctcgcctgatattgagaatgcagtttatgtctatatatgaaaggcagcagtatttaggatccaaaaaaaaaaaaaaaa

SEQ ID NO: 5014 - DNA, 1768 bp, Triticum aestivum
  unsure (1)..(1768): unsure at all n locations
  Clone ID: TRIAE-23APR03-CLUSTER5057_1
aacgcacgcacgcacgcacgcacgcttcctcgatcccatccagcaagcaagcaggcagcaaggggtccgtcgccgcgccgtcttccccgtcgccgtccgtcaccgtcgtcgtcgccacggtccagccctccggtcggcgctggtcgtcgccggcagacaatgtggggcgagagggctcaccacaagcatgggcaccatcacgacaacgtgggttccagggaccggcagcccaagttcatagcagacaactacagctcagtggatgaggtcgttgctgcgttgagggaagctggccttgaatcatcaaatctgattctcggtattgacttcaccaaaagcaatgaatggtcaggtaggcattcctttggaagaaaatctctgcatgccattagtggcaccccaaatccatatgagcaagccatctctataattgggcgaacactatcaccttttgatgatgataacttgataccatgctttgggtttggtgatgcttctacacatgatcattcggtcttcagcttttaccaagaaaaccgtccttgtcgtggttttgaggaggttcttgacagataccgacaaattgttccacatttgaacctttcaggaccaacttcttttgcacctcttatctacgcggcgatgtcagttgtcgaaagcagtaactgccaatatcatgtcctcgtcatcatagctgatgggcaggtgaccacctcaaattcacgtgcaagattaagtccacaagaacaggcaactatacaagcaattgttgcgggccgatgctagcttctatcctcttgtgccgcgcgccgatcaatgtgggggtgtggcgatgggcctaaagatgatgcagccttctggaggtgaagagcaagaagtttggaaaggcaaggagatatctaaatgttcataaagctttactgtatgtgaagatggccatctgtgtttgcagtctgatggataatttccaccacctcctgtacagtttattactgtcatcttggcacgcacaaaacgccaaccctccgaggatccttccccctcccagcaaagttcttgaacgtgacaatattgtcgcagcttctcatactccagccgcaacctcgcagtcaaccgacgttggctacaccgtttcggatgaaaaggtatgtcccatctgcttaacgaatccaaaggctttctccttttatgtctgtcgcaagacatgcaaggaatgcgggccgacgctatcgacatgccccttgtgccgcgcgccaatcactgtccgtgtaaggctcttttcataaagatgatgcagacttctggaagtgaagaatcagccattcatgcaatatgttatcggcagtaatcaaggagcaagaagttgggcgggcaaggagatatgtacatgttcataaagctttactgtataacatgtccagcgccaactgtttcggctgtctgagtctgatgaataatttccatcacctcttgtgcagtttattcctgtcatcttgtaaaaaaagtagcagcagtagtcgtagttgaaaatcgtgttttcctgtaaaacctaaatgaatcaatacttcctccgtttttatttagttcgcgtattagctttagtcaaagtcaagctttgtaaactttgaccaattttataaacaaaaatattaacatatacgaaaactaaaaaaaaaaaaaaaatcaatactagcaaccgtcgtggttcaataaaatttgcatcttcgtcaaaccaaaaaannataaaaanaaaccctgccccgggcgg

SEQ ID NO: 5015 - DNA, 1419 bp, Triticum aestivum
  Clone ID: TRIAE-23APR03-CLUSTER505_1
atctagatccgcccttcccattccccaaaccctccccacacacaccaaacacactatccatggcgctccgcacgttggccgcgaagaaaaccctaggcctggcgctcggcggcgcgcggccgccggccgccgccaggggcgtggcgacgttcacgctccccgacctcccctacgactagagaaacttataaagaagatgaatgcagagggtgctgctttacaaggatctggatgggtgtggctagctttggataaagaggccaaaaggctttcagttgaaactactcctaatcaggaccctcttgtgaccaaagggtcaaacctgcatcctttgttgggaattgatgtctgggagcatgcgtactacctgcagtacaagaacgtgaggccggactacctgaccaagatcggggagatggtgaactgtaaatacgttggagaagcctttgatgaggtgctttggttcttttgaggatgttaaaaaggagataaatccagagggcgctgctttacatggctgtggatgggtgtgtgtacattcggttaaagaggccggcaggctttcagtggaaactattcctattcaggttgcctctagtgacacaaagggtcaaacccgcatacttgggccggtaccgatgtctgagctcgtgcgtgctacctgcggtgcaagaacgtgaggccggactacctgaccaacatctggaaggtggtgaactggaaatatgccggagaagagtatgagaaagtgcttgcatgatttgtccgagtagacagacagtacttcgctcgctcttgagtttcccgctgttggatctttgtatatgcagtaataaaagtgggcactattccactgtctggaccttctgtacatcgcatagaggcggggtaatgtccaacgcatagaacagtgcctgtccattttggtactttttactgtgcctgcgtgactaataaactcgttcgctagtgctgttgctgtccttgtgtgcacgtattggtatggatggatgagctttccgaaaaaaaaaaaaaaaaaaaaaaaaaaaaaaaaaaataaaaaaaaaaaaaaaaagtttatcgatccccggcctcctcgtggggggggccccggcccccccccccccccgggggggggggggggttatccgccgggttccctggcccgcccccccctcaaccatcgggggcgggggggggtcccccggcccccaccccaatttataccgcccttggaagaaaattcccccctttttgcccagggtgggggaattacccgaaaaagggcccccccctcgaaactccccctttccacaaaggttgggtcatccccggtatgggcccaaggggaaatttcgaaaccccaataattttttgttaaaaaatcccggcggaaaaatttttggatacaaaaccccg

SEQ ID NO: 5016 - DNA, 1135 bp, Triticum aestivum
  Clone ID: TRIAE-23APR03-CLUSTER5065_1
tccggccagaagaaggcagcagacgcagagcaaatccaacaagaacaccactagtgctgcattcgcagcgagcgaggaagaggaagagggtgagagagagggatggcgtgcctgcacgatcacgagtgtggggatcacaactgcgccgccgattggtcgctctacaatcacatcgacatccccaaggtggtggctctgaacgaatctgtggccgggagcgtcaaatcggtcttcaagtcgtgggaccagcgcctcgagacttccgggggttttctggagagcaatgagggtgaccctgagttacttgttttcatcccatttacctcagatgtgaagatcaagagcatcgctgttgttggtggtgctgatgggacaagcccttcaagaatgagagtatttatcaatagagaaggtattgacttttctgatgctcaaaacatgcagcctgtgcaggaatgggaactggcagagaatttgcagggagttcttgagtatcaaacaaggtattcaaggttccaaggtgtggccaacttaactctgcattttcctgataactttggtggtgatacgactaagatatattacattggtttgcgtggtgaagctactcagaacaaaagggatgttgtggccacaattgtgtatgaagtaatgcccaatccgtctgatcacaaaacaaaatccgagactggaggtggtttctcacatgttgagtaggcatgtcagtgacatgcttcctcggttggagagaaacttgacctctgatgagttctgtatgaataaaaccagtccagctcttagattcatagttttgagtgtaaaccagtgtatttgtcggttgtcaatggctcgatgatgtaacttaacttgccttgtggttgccggtggctcgatgaggtaacttaactatgtcgcccatgtcatcagagttgctaacaagttactgtgattctaccggtcttcaaaaaaaaaaaaaaaacgctttatcatatccgccacaccctcaggggggcccccggcccccctcgcccccccggggcccggtggcccggcttcccggcccccctggggcgcctgttttaaacacgcctggggaggggaaaaaaccgcgggggtaccccatattataatcccc

SEQ ID NO: 5017 - DNA, 1026 bp, Triticum aestivum
  unsure (1)..(1026): unsure at all n locations
  Clone ID: TRIAE-23APR03-CLUSTER5079_1
acaggcaagcttagtaaccagccatgaagaccatgaagagatgcattattcctagcatcctgctgatccatccacccgcggccgccctccccgtcgccgccggccccccttccccgccgaccggcgccgaaggtctagccgccacgctgctgtcgagaccatgcaactgccgcgacaaggccatttccaagcagtagttctcgccgctgcgaataaataacgggggaatgaggaagcgggtcacagcatgtgctgcgaccttggtctgtgcagccggacattcccagcggtgtgccgcgacatggaaaaggtcagagcagggggctccatggaacggctgctgctttcgctctgcgtacgaagtcattcccagcggctgtggcgacggcatggaaccagggcgacccagtgcgctgctacatgcgagaaatgccagccgggccacgtcggactcatcccgccgcgtctgcaacgactggtaccatggcttcccggggcccatgtgcacggaggctgttcgcaacagcgaagaaggagaaggcggaagaagaagagcaggccgtggaaatgctgtgacttggctctgtgcaccaggtcgtccccgccgatgtgccgctgcctggacaaggtcgagcagtgtgccgcaaactgcaagagctgcgatccggccgcgtcggactcgtcccgccgcgtctgcaacgactggtaccatggcttccccggcgccaagtgcaccgccgacggtaactagcatgcgcgttgatcacctgatcaacgccgtccagcctgagctttagtagctgcagcagcctgcagtgtctgtaagcaacaaaataaaatggaaagtcaggcaatcacgaataaaaatggaaagtcaggcaatgatgaataagacaagtcgtcgtgcgtgtgtactccgtgaaaatggagttcgtccccatgttttcacgaaataaacgcacttttgttattcttgagctcgagnctaacctgcccgggcggccgctngaaatcaatagtgaattc

SEQ ID NO: 5018 - DNA, 1678 bp, Triticum aestivum
  Clone ID: TRIAE-23APR03-CLUSTER5082_1
ggcttaaaccacgcgttccagaaagaagacgggaaaggaatccaccaaagcctccgccgtttccatagctctcgccagatctcggtggcggcggcggcatcacggaggcagatggccggccggcgcgagccgcccttgatgcgcaccggcttgggcagcgggcagccgccgtcccgcgggtcccgcatcgcggcggcggtggccgtcggcgttactctcggctgcgtctgcgcgttcttctaccccgacggcctcatctcccgctccaccgactccgccctccactggcgtcgccgggctgactcagttacttgtgagccatcggaggaagttgcctagctacagtgactcatggactcatgagacataaaaaaaactgaccaacctacagtcaccattgacatcactggagagaataaatgctgacttcaggaagcagatcaatgaactcttggtgaagcttcaaatggctgggcaaggaaaaaaccaggctttgtacagtgctggtccttttggtaccgtgaaggctcttagaacaaatccaacagtcatgcctgatgaatccaccaatcccagactgccgtggctattgctaacgggtgacggacggaaagaaatcgtcgttgcagtggcaaacgcgatcgaaaaacagatgactggggtgtggtttactaatatcaaaagagttggtatcacaaattacttggttgttgcattagatgacagcttcgagtacttctgcaagtccaaagatgtcccagtttatcggcgggatcctgatgaaggcattgacagcatagggaagacaggtggaaaccatgctgtttctgccctgaagttccgcattttgagggaattcttgcagcttgggtacagtgttctcctctccgatattgatatcatgttcttccaaaatccctttgatcatctttacagagattctgatatagagtccatgagtgatggccatgacaatatgacagcctatggtttcaatgatgtgtttgatgagccttcaatgggctgggcaagatacgcacacacgatgcgcatatgggtttttaattctggatttttcttcataaggccaacaatcccttcaattgagctcttggatagggtagctggtcgcctttctcgtgaacccaaatcatgggaccaggctgtttttaaccaggaactctttttcccctcccatcctggttatgaaggcctacatgcatccaatggagccatcctcatacgtcgctttccgctcggctacgtgttgttcaagactgtgaggaaaagtgctcaacttcggaagttgaagccagtgattgtgcatttgaactaccatcctgataaggaggcgcgcatgaaagcagtgattgaattttatgttaatggaaagcagaatgcacttgatcatttccctgatggatcagaatgataaaaccaaagcttattaggagcagccaatgacccttcttgttctcttgttgttatccattgttcttgaaactctggatggaagcccgtatcagtaactactgtaaacaatacatgatcattttggaacattgtgcttgagatgtcagactttcagtgagcatctaaccctgatagttctgtagttggtaatttaaatgtcgatcttgatactaccttctgtactttgttgggcttgaacaatttt

SEQ ID NO: 5019 - DNA, 876 bp, Triticum aestivum
  Clone ID: TRIAE-23APR03-CLUSTER510_24
ttcatcgatctcgagtcacctactagctaatcatggcatcttccaagagcagtcttgcaatgttcgcgctggccatagtcatggccgtggtggccggcgtctcggcgcagaacaccccgcaggacttcgtcaacctgcacaaccgcgcccgcgccgcggacggcgtcggcgcggtgacatgggacaacagcgtggccaggttcgcgcaggactacgcgaacaagcgcgccgccgactgccggctgcagcactccggcgggccgttcggcgagaacatcttctggggttccgggcagtcgtggacggccgcgaacgccgtgaagtcgtgggtggacgagaagcggaactaccacctcaacaccaacacctgcgacgccggcaaagtgtgcgggcactacacgcaggtggtgtggcgcaagtcgacccgcatcggctgcgcgcgcgtggtctgcgccgggaaccggggcgtcttcatcatctgcaactacaaccccccgggcaacttcaacggcgaccgcccgttcgcgttcctcacccttgacgccgaagccaagtagtatgtacgtgtgaatgtgatcatacatgcataggtgtgtgtgtttatgtgtgtggattttgaatatttacttctataaatatgttatacgtactgtacgtacgtaaataagcgcacattccggcctgcatgtatccatgcggctctgtggagcgtgtaagtgcaatcttttttttttaagaatgcgtgtaagtgtaatcatatacacctccatgcaaatgtctttccttttgttttcttgttcaaatcttggaaaataaatgacgataacaataatattgtgaacccctaaaaaaaaaaaaaaaaaagcttatcgatac

SEQ ID NO: 5020 - DNA, 1831 bp, Triticum aestivum
  Clone ID: TRIAE-23APR03-CLUSTER51148_1
gaaacagatgaatgaatactagtagtccactgaaatctctcgatctcacccatctttctaccccctctccctccctccctccctccccctctcacgggctgcacgctgcctcgctccgaccgaccgccacgccctcacatccccatctccatctctctccgcgttgctctgcctctgccaccgcttcacccgcgcgcggtcgggctcctagctagctgctgcctcttctccccttgatgtggcgccgggcgccgagctgctgctgctcgcgcaccagaggcgccggaggcgagctccccggacgcctggcggcctagcctcctcgcgctcctacaagagggagatccgggctttcttgcgtttggtggggccgtgtgaccccacgggacccaaagtggatccactctggcggaaatggagtcggggagcacgttctatgcgggtgaaggtcttcacattgatcccagctggctcatcgacccaaagcttctctttgttgggccacggatcggtgagggtggacatgcaaaggtctacgaggggaagtaagggaaccatgatgttgctacgaagtacaagaaccaaaatgttgctatcaagattgtgcacaaaggggacacccctgaagaggtcatcaagaggcagggtaggttcttgagagaggtgaccatgctgtcaagggtgcagcacaagaaccttgtcaagtttattggagcttgcctagagcctgtcatggtggtggtgactgagctattagtggggggctctttgcggaagtatttggtcagcttacggcctaggaacctggagcctcgtgttgcagttggatttgcattggacatcgcccgagccatggaatgtttgcatgcacatgggatcattcatcgtgatcttaaacctgagaatctgctgcttacagcggaccagagaacagttaagctcgtcgaccttggtttagcaagagaagagacgttaacagagatgatgaccgcagaaacaggaacatatcgttggatggctcccgagttgtacagcacagtcacattaaggcacggagaaaagaaacattacaaccacaaagtagatgtttacagctttgcgattgtgttatgggaactactacacaatagactaccctttgagggcatgtctaacctgcaagctgcatatgctgccgctttcaagaacatcagaccaagtgcagataatttgccggaggagctgtcagagatcctaacatcctgctggaaagaagacccaagcgacagaccaaacttcacccagatagttcaaatgcttctccattacctctcaaccctttcaccgccagaacatatggccccggctcgcacattcagttcggagaatgcaatcttacctcctgaatcgcctgggacgagctctctaatggcttctcgaggtgatatcacgcctaaaggcaatattgaagacaagccaaggggcttctttttctgcttcagccagtgttattagcctcacagatggaacaagggaactcccaagatgatgcaaaacatcaaaagaacacacccatagtccatacccaaagcatggcaggagtccctgaaaactgttgtttctgctcatcaggccaccccttcttctctgacatgtttgaacatatcggcagggtagatctgagtaaccttttggctcctgctagtaatggtgaaaatagttactatatcgtatattttccatgaaccttccatatcaaaattgcgcgcccatcgtatagtaataattggcattaatcatttactcacttggaaaggacactgttgacgacttcctttgttccaaaaaaaaa

SEQ ID NO: 5021 - DNA, 1686 bp, Triticum aestivum
  Clone ID: TRIAE-23APR03-CLUSTER51173_1
aattttaactcactggtataggcgctgcgctctcgtagcgggctgtgtatagctttgcgaaccattgctcgccgtgaagggtcgagttcttgaacagctttggcgatcgcgggcgtacgtgcgtgcatggctgtgctgtcgtctgcgaggcgcctcctcccgtggggccgcgccccggccggcggggtcagcggcggcctccgagctctactcgggacggacggaggcggcggccgctctcttctcccgtcccggtggaagtcgtcgcagccgcagctggaccccgtcgacaggtccgacgaggagggcggcggcgacatcgactgggacaacctcggcttcgggctcaccccgaccgactacatgtacgtcatgcggtgctcgcaggaggagggcggcttctcccgcggcgagctcgcccgctacggcaacatcgagctcagccccccctccggcgtgctcaactacgcggaggggctgttcgtggggctcaaggcgtaccggagggcggacgggcccgggtacatgctgttccggccggaggagaacgcgcggcggatgcagcacggcgccgggcgcatgtgcatgccggccccgtccgtcgagcagttcgtgcacgccgtcaagcagaccgtcctcgccaacaggcgctgggtgccgccgcagggaaagggggcgctgtacctcaggccgctgctcatcgggagcggggcgatcctcgggctggcgccggcgcccgagtataccttcatgatctacgcggcgcccgtgggcacatatttcaaggaaggcatggcggcgataaacctgctggtcgaggaggagatccaccgcgccatgccgggcggcaccggcggggtcaagaccatctccaactacgcgccggtgctcaaggcgcagatggacgcgaggagcaaggggttcgcggacgtgctgtacctggactcggtccacaagaggtacgtggaggaggcctcctcctgcaacctcttcgtcgtgaagggcggcgccgtcgcgacgccggcgacggaggggaccatcctgccgggggtcacgcgtcggagcatcatcgagctcgccagagacagcggctaccaggtcgaagagcgcctcgtctccatcgacgatctcgtcagtgccgacgaagtgttctgcacgggaacggccgtcggcgtcaccccggtgtccaccatcacctaccaagggacaaggtacgagttcaggaccggggaggacacgttgtcgaagaagctttacacggctctgacgtcgatccagatgggcctggcggaggacaagaagggatggacggtcgcggttgattgagtaggataacagcgtgggcgcatgcggcgccggaagcattcatcagcatttcttatcatgtcttgccaatgtgaataataatagtgatggtgatgatatctcggggatgtcacggcccgaagggtgatggtttctctgatgctactgatttcttgggaaatatggaaagagagaaatgcacgtgtgttccgtaacaacgcagttcccgtgggtgttcttgttgctcgaactaaaaaggaagcttctctgtggggtgacatttttatgtaatattatgctgagagtgaggcttgtaattcggcccctggcctagaccctaaaaagattttttttatacaacgaaaatggtaagaaaaaagc

SEQ ID NO: 5022 - DNA, 1957 bp, Triticum aestivum
  unsure (1)..(1957): unsure at all n locations
  Clone ID: TRIAE-23APR03-CLUSTER51202_1
agcactcactttcacacggtcccgtcccggcaagccacaggcgacggaccccacccactcccgcccgacggcaggaggaggcgcggcgcctgcccaccagcgcggcgccggctggcgaatcgaccccaggccccgacgacgtctctcagccaagaaacgacactcgcaaccacagcactcgtcgtcggacctccggctggcaatggccgccccggtgctcagcctgctcccggcgtacgcgcaccgtgcccgctgcgccgcagtgtgcccccgctgcgcgtgcggctgccaggcggctccagcccccgccactgccgctgatcgcactgccgcatggcaccctttacagtctcatgtacgacgtatcccttcggctgccatgactgtggcttccgaggttacgcgatcgtctgtggcagctggctcgtcttctcacgtgcccacgggtgcttcctggtcggccccttctccagggccaccgtggcgctccctgctctctccagcgtccgactccggcctccaaatgcagtcgctaagtggtcagaggatgccggtcaaaagttgctgacccttacaccacatggatgcatatcaatacggaaaagctgcacataagtaagctactcctgtgctcgccaaaccttgttgctgcactggttggcattggacacaccagccagattctaatgtgccagccaggggcctcgtcgtggtcagtgcgtgcttatgatcagtgtaaggggttcgaagacatggcattctaccagggaaagctctacgccattgccaatgacgagaacctccttgtggtgaacatcagccaggaccatagcaccggcgatccacaggtttctcggattggacaaatcatcaagggtgagtctcctccatggtatccagctgtgtttgaggacgacactatgtgctgcaagaagctttacctggttgaatcgcatggggtgttgctgatggcacgaaggacaatcatgtgccaggtacctggacctggagcggtgcctattgaagttattgctggaatgaacgagtttgaggtttccaaggctgactttgagcgttcacggtgggtcaaggtatcgaccgtgggggatgaccaagtgctgtttctagggcgaaagtgctcgaggtccatgtctgtgtcgcagtacgggttgccgggcgatcacatcttcttcttggatgatgatgagtatgcctatgatgaggagaccagttctttgggcgtctattccatgagattccgcagcatccgttccggtgatccaaatattgcctggaagcgctgcgctgagatgtatctggcagcatggctcttccccgaggaccgttgagatcaggaccgatgataggtacttatattgttagcccgttatcgctatgcaagctgctcccaggttatctgaccatgctattgatgttgtcgttatccggttattctgcaagctgtgttgtttggcttccctacctagtaaaatgaaattttatgaactttgttactttgttaagtcccgtgttccatcagtgcttgcctgaacttattgtggtggtcactactactctactagcgctatgaaagctgttagcgtccagctactgtgggttgttatgcctatgaatgatcttaaaactgtgtcgctgcattggtagaaattatctgaacttattgtggtggccactactagctgtactatgaaaacggtttgggtgcagctactgtggattgttgtgctagaaattatatgaacttatctttaagactgccactgctcatgtctgttatctttggcatggcggtctcttcttcctttttatgagaatgtcatgtcatggcatggtctttgttgtcnccatgtagcaagtaagtagctntggaagtttggttgtttcattgtgtgatcaacccaggaaaatgaaaaactgcagaaaaaaaaaaaaaaaa

SEQ ID NO: 5023 - DNA, 1135 bp, Triticum aestivum
  Clone ID: TRIAE-23APR03-CLUSTER5127_1
ccaccaaactccacagcgactccaagtttccctcggtaggcagcttccatctcatctccggcgatgtctgggcgcggcaagggcggcaacgggctcggcgagggcggcgccaaccgccaccggaaggtgctccgcgacaacatccagggcatcaccaagccggccgtgcgggggctggcgaggaggggcggcggggagcgcatctcggggctcatctacgaggagacccgcggcgtcctcaagatcttcctcgagaacgtcacccgcgacgccgtcacctacaccgagctcgactcaccaagctcaacagcgactcccattatcccctgttagactgcttccatctcatctccggcgatgtctgggcgtggcaagggcggcaaggggctcggcaagggcggcgccaagcgccaccggaaggtgctccgcgacaacatccagggcatcaccaagccggcgatccggaggctggcgaggaggggcggcgtgaagcgcatctcggggacctctaagctctcgtggtagacagcttccatctcatctccggcgatgtctgggcgtggcaagggcggcaaggggctcggcaagggcggcgccaagcgccaccggaaggtgctccgggacaacatccagggcatcaccaagccggcgatccggaggctggccaggaggggcggtgtgaagcgcatctcggggctcatctacgaggagacccgcggcgtcctcaagatcttcctcgagaacgtcatccgcgacgccgtcacctacaccgagcacgcccgccgcaagaccgtcaccgccatggacgtcgtgtacgccctcaagcgccagggccgcaccctctacggcttcggcggctgagcgccatcagcgcgctgccgctggctgacactgctgtttcctgctttgctctgtagtcttactcccccccgtcgtgaatccagtgcgctggctatgcttgtttctgtagtttgtctagtgagatccaacttctagttgtaactcctatcgtttcgtttcgctgcaatgaaaagttaattccaatctgagaaaaaaaaaaaaaaaaaaaaaatcgatacaaaaaaaaaaaaaaaaaaaaaaaaaaaaaggaaaaaaaaaaaaaaaaaggccccta

SEQ ID NO: 5024 - DNA, 2745 bp, Triticum aestivum
  Clone ID: TRIAE-23APR03-CLUSTER5128_1
ggaagagacacatgagagagagaggggcagaggaaaaaatcaacccacctccaccaccgggcagaggagagaggagcgacctccgccgcgctgccgcggtgttgacccctccccccacgctggatccccccacggcggcgggcgcgtccttcggcggcggcggcgcgttgttatgccgagaggcgcccaggtttcaacaccattcgcctctgggtttctagcattctcagaaaggatatggagcgcaccctctatgcaagttcccctgtatcccacgtctcgctgcttgagcaagttcttggctggagattttgtctttacggagacttccttgtcatctccttcgtcaattgcacctgaagaacacacctggcttagcgactaccgtgcctggtcccatgctactggacattagggtcgactagtgattgcggtgcacatctattcgagcatggtgcgtctcttctctggcaacattttcgtaatttttgccgtggcactggtcagccagcaaaagttaccatcagaacttctttggacacttgggatctaacccgtagatcctccttgtcggttacaagctctaggttctggttttctttgcttctgtcagctctcttctcccctatcactgcgagttttcagtttgtccggcttgatctttggtgtgtatagtgtgcactgttcttcatcaggcttcacttctgatggcgtaacgtgaggggcaaaggtgttccaagtttatttgtcacaaagtatgggtattgcttacagacgtttgaaaaaagcctgcagtgactttggctgatctactctccaaagacattccggcaatacgcgtaagcggaggaccatcgcatataggactgttcaaacataaggacagctttctactctagctaataaaatggagccgcatcacactactacggaagcgggtaaaggtcagcgggctccttccctggctgccgccgctaaggttggttgccaagttgtcgtaccctattgaattgaaaaaaaatatttttctcggcaggagtgcatcaatctccgtgaagtgaagtccctccgaaggatgaaccatccaaacattgtgaagctcaaggaggtcataagagagaatgacatgttgttctttgtttttgaatacatggaatgcaatctctatcagctgatgaagagcaagggcaagcctttttcggagactgagatccggaactggtgcttttcaagtatttcaagctcttagtcacatgcatcaacgtggatactttcatcgtgaccttaagcctgaaaatctgctagttacaaaggagctcatcaaggtagctgattttgggcttgctcgtgagattatttctgaaccaccatacacagaatatgtgtcaactcgctggtatcgtgccccagaggttctacttcaagcttctgtttacagctcagcagttgacatgtgggctatgggcgccattattgcagagcttttttcgcaccgacctcttttcccaggctcaagtgaagcggacgagatatacaaaatctgtagcattcttggcacaccaaatcagcatacttgggctggaggactgcagctggcagcatctatccattttcagtttcctcagtctggaagcataaatctttcagaagtggttcccacagcaagtgaagacgcgctgaaccttatttcgtggctttgctcatgggacccacgtaaaaggccaaccgcagtggaggttttgcagcatcccttctttcagccatgcttctatgtccccccttcacttcgtttcagatcgaccggatatgcaacaacaccaccatcagttggggctaaaggagctatggaccagaagaatgctaggagataccctgtggggactttatccaacgggagaccggcagtcaataactcgtacctgagcactaataacgccccagcaagagcagctggcgtgcaaaggaagctagagttggatcatcaggtgaaaccagtgggcaaccataagctgacgaaggagaacgccatgaaccagccttggtcccgactaccaccagcaccagtgaggaacaacgggaactacctcgctgcaaaggagcagatccctcgcggcggcgtgcctgacatagccgagaagctgtcccagctgtcagttacctccaccaccaaccgggcgccgaccatgtcttcggacaggtttgctgacctgaagggcactaccagagcccaccaaccggagcccgtgaggcggcccgtgcctctgggacccagggacacgtggcacgcccggaacgaccccttccggcgcacctacgagatgcccggcgagagggctctcctccagaggaagctcgtcagctgaggaccatcccaccaatgcccgcctgcctgcctgccgtccatctgcccccttcgcatcatcgacgccaccaccaccgccgaccacaataatccagcggcctccttcccgggtggtcgccgccgccaagtttatgtctctttcatcgttcgtgttgtgattgaaaataaaagccagtccccggccctcgcgtctgcttggaggcggcggggagactgaagagtagtgccgtgtttcctttgggctttcgagtttgagaaacgtggatgatgattacatgcttttgtgatttgtgtgcaaaaccaacgattgcttgcgtttgtgactttgtggagcctcttatgtgtcgtggttaaacttattgatgatttctttgcttgctcgc

SEQ ID NO: 5025 - DNA, 1629 bp, Triticum aestivum
  Clone ID: TRIAE-23APR03-CLUSTER512_1
acaactaccgaccacaagccccgcactccaccccctcctccgccttctctcgacggttcctgcttcccactccctccctccctccacacctcccatccgtctactccctccgcgccctcctctgcctattcagcttctgccggagcactaatcggcctgtccgccttctctgagcccgtctagcaaccccacctgctacgcttcgtgcacttccgggacgagtcgaagcatccggctctccttagctgtagaccaaggccaacaccggcccccaactcttcgaaacgacggacgagtagacctggaccggatacggcactcgtagcccgccggccgtcaggaggccccagctggggcgcgagcttggggctgccggagtgacgggcggcgctcgcggcgcgccggcagcgaaccccagctccggggctgcttggctggttgctggctcgggaaggccctggcgaacgatgatggcaggctcagctcatccgattggatttctgcatggactcccgtcttgcctcaaggtcagcctccgccaggacccagggagggacgggggggaagtcgccggctgggtggtggctcattgcgtgccaagcgcggagggagctccggcgggcgtctgaccggcgtctgcaccctgatcaagcccaccggtttcgttccccgcgctacgggtccacggaagcagattgctgatgtcatcccgacttttatctctgttggtttcgagattccaagcagcctttccgtaaccacttgtgggtcagcatcgtcctccaaaacggccccgatgaagtcccctggtgggccaccagcgtttaaagacgtgataagagggggtgcatgagggctgcttgctagcagcctccatcagaacaaaggctactactatggtgggcctgccaatggatcaggcattgggatgctgatgacgccgccaggggcgtcatttggcattccagatccgatgcagcaacatggggatctcgtggttggtggaaatggaataggtgctgcaactgcttcaatatttcaggggggcactggcgaggaaggagatgacggcatggggggcgtgatggggctccaatggcaaccacaggttggcaatggtggaggtggtggtgttgtatcaggaggcgtgcatcaccttgggactgggaacaatgtgacgatgggcaacagcaatatacacaacaacaacaataacaacagtggcggtgatgacaacaatggtgggtcatcgagggattgctactggatcaacaatggaggatcgaacccatggcagagcctcctcaacaacagctccctgatgtaagtgcaataagaaaatgggaaatggaggtcattgaattggagaagtgggtcaatcattttcttactagtttcatcgcttctttttttacttgcttgacttatttcgctccatcattttcatgtttcgtttaagtggggattgttttgtttatttgagtgaaaatccagaccaatgtgtgtcatttgcgatgcttgattaagtattgtttgtttcctgccattaataattgaaggatttatggttttaaaaaaaaaaaaaaaaaaaaaaaaaaaaaaaaaaaaaaaaaaaaaaaaaaaaaaaaa

SEQ ID NO: 5026 - DNA, 2053 bp, Triticum aestivum
  Clone ID: TRIAE-23APR03-CLUSTER51349_1
gcttcgctttagccacagatttccttccttccacctttcccctcctccggccgcctcctcctcctcgccggcccgccatggcgctgtaccgccgcgcggcctccgcgatccggcggcgcggggcaggggccctgccgctgcccctgctcccggcgcgggcgatggcgatggcgtcgtcgctcttcggccacgtcgagccggcgcccaaggaccccatcctcggcgtcaccgaggccttcctcgccgacccctcccccgacaaagtcaacgtcggcgtcggcgcctaccgggacgacgacggcaagcccgtcgtgctcgactgcgtgcgcgaggcggagcgccggatcgccggcaacctcaacatggagtaccttccgatgggagggaggatccacatgaatgaggaagtagctacagctggcgtatggcgtcgcctccgcagtccttcagcgataacaccgtggcagccgtggagacactttcaggagcggggccatgccggtcttttcgctgcgggcgatggcgtcgctcttcggccacgtcgagccggcgcccaaggaccccatcctcggcgtcaccgaggccttcctcgccgacccctcccccgacaaagtcaacgtcggcgtcggcgcctaccgggacgacaacggcaagcccgtggtgctcgactgcgtgcgcgaggcggagcgccggatcgccggcaacctcaacatggagtaccttccaatgggagggagtatgcacatgattgaggagtcactaaagctggcgtacggcgaggactccgagttcatcaaagataaaagaattgcagcggtgcaggcactttcaggaactggcgcatgccgtctcttcgctgatttccagaagcgtttcttgccggattcgcagatctacatacctacaccaacgtggtccaaccatcataatatttggagggatgctcaagtgccacagaggacattctcatattaccatccggaatcgagagggcttgactttgcaggattgatggatgatatcaagaatgctccaaatggttcgttctttttgcttcatgcatgtgcccataatcctactggagtagatcctactgaggaacaatggggagaaatatcggattagggcaaggcgaatcgtcatattccattttttgacatgctataccaaagatttgctagcgttgatccagagagagattccaaggctatccgtaaattgcttgaaaatggacaccaaattgggattgacacatgaatatgcaaagaacctgacatgttacatgggcatagacatggctggctgagtatgatctgcgatgacgcagatgcaggcaagttgcttttaagagttaactactgcattttgggagtccaaagtaaagcaacccacctgtttatggctgcgctggtagggttcaactctctattagggaacgcgagtgaagtagatttttatgtattaggaaaagtcgttgggtatggccaactcgtatcattggaacgcggaaggcactaagggagaagcttgcaagagttaggttcaccttcatcatgggagcatgtcaccaatcagattggaatgttttgctacagtggaatgacaccggaacaagttgaccgcttgactagtgaataccatatctacatgacacgcaacgggagaataagcatggccggcgtaacgacgggcaacgtcgcctacttggctaacgccattcatgatgttaccaagtgaaattgaggaccatcttcagcgaatggagggagagcgttttccctttgtttgtagggctattcgctttatactctcacatgctagagaaataaataagttctaggaagtaaacctgttgcggctgtccaacaacggaaaattctacctgtatgtatggaggagcagagacgtcctgacttattttttgcgagattatcctaaaaaaaaaaaaaaaatttttgattctagtcgcattcggatgtaacgccagtgtaacaagatgccggaggacttcaaactcgacgaaatcgaacatttggatgtgtgttgcagttct

SEQ ID NO: 5027 - DNA, 1452 bp, Triticum aestivum
  Clone ID: TRIAE-23APR03-CLUSTER51421_1
gaaatcccgcttaggcccttaaaattaccaacaatcagcatttatccaatggtcgccatcgccacctccttctccgccgccgccgccgtcgccgtcgcccgccggagctccccggctcacctccagctcgtcgctcgccgccgcctcccgttctgcacagccgcctcctcatccaccgtgccacctgccgctgcggcgggctttgggtgggccgacgccctccgagttgccagcgaattcggggtcggcgatgagtccgacctttcgggatacttccagaaggtcgacatctgcaaccgaggaatgggtaacaagggggagttcgtggagttcatggtggaggatcaagtggtgggatacatccacaaggggtttactgaacacctgagggacttccatgatgtttttaccattgtctcgggcagcaatggcaagaacagtgtggagcatgtgactctccactcatcgctcaggactccagaagatcgaacaatcgccatcggagatgtcataaaaggcctaggggaactcattcctggtatacgaaatgagctctatccagtaacctcatcttacggcatgcctgtgtacttctctctggaacgtgctgctgctccctactttggtataaaggcttatggtgttcatatgaatgggtacatcgagaagcatggtgaaaagtctctttggattggtaagagaagtgatgtgaagcaaacttaccctgggatgctagatcatcttgttgctggtggcctgccttacggaatctcctgtaaagagaatatcatcaaggaatgtgaagaggaagcaggaataccaagatccatgtcaaccaacgctacttctgttggagccatttcttacatggatatcaatgggtttagatacaaaagggatgttctgttctgctatgaccttagacttcctgtagatttcgttcctaataatgaagatggagaagttgatagcttcagactaatcccggtaccacatgctgcaaacattatacggaggacagattttttcaagccaaactgcaaccttgtgatcattgacttcctcttccgtcatgggtacataaacccagactgtaatgggtacctgaagctgctgacaagcttgaggagtggtgattgttcctagggcttgcagttcgctgttcaaacagaagaatcagattaccagcattaatcgttgattttttggagtaagctagatggctgtccatcaaaatcagaatattaactttaaagtacaaactgtacatgattttttttctttctctaaatgcatttctgttcgcacattatctttgactcttcagtgagtttagggaggtaaggaagttcaggaggaaaggggggcataataaaaggaacattagtatacatggtgctgaacatgatggcctgcttatttctgtagtcttttataaaaaaaaaaaaaaaa

SEQ ID NO: 5028 - DNA, 2110 bp, Triticum aestivum
  Clone ID: TRIAE-23APR03-CLUSTER514_1
gaaatagttttcgcagagccgttaagctcacctccttcgaggccggctgctccacctccacctccacctaatccccattcgcctcgcctccccgcccaccgccaccacccgtcgatggcggccatcaagccgccgccgcctgaccggccgccgcaggccgcgcggctgccgtccccttcctcttcctcctcggcggtggcggcggccaagcgaggcgccacaggctcccgcgggctgctcatggggcgctacgagctgggccgcgtcctgggcaaaggcaccttcgccaaggtgtaccacgcgcggcacgtgcagaccggcgagagcgtggccatcaaggtgctcgaccgggagaaggccgtgcggagcggcctcgtctcgcacatcaagcgcgagatcgccgtgctccgccgcgtgcgccaccccaacatcgtgcacctcttcgaggtcatggccaccaagaccaagatctacttcgtcatggagctcgtccgcggcggcgagctcttctcccgcgtctccaagggccgcctcaaggaggacattgcgcgccgctacttccagcacctcatctccgccgtcggcttctgccacacccgcggggtcttccaccgggacctcaagccggagaacctcctcgtcgacgaggcgggcaacctcaaggtgtccgacttcggcctctccgccgtcgccgagccgttccagccagagggtctcctccacaccttctgcggcacgccggcctacgtcgcgcccgaagtcctcgcccgccgtggatacgaaggcgccaaggccgacatatggtcctgcggtgtcatcctctttgttctcatggccggatacctccctttccatgaccagaacctcatggccatgtaccgtaaggtttacaagggagagttccgatgtccaaggtggttctccaaggaccttactagcttgatcatgcgttttcttgacacaaacccaagcaccaggatcaccttgccggaggtcatggagagccggtggttcaagaaaggtttccggccagtcaagttctatattgaagatgaccagctgtacaacgtcattgatgccgagaatgatatgctcgacttgggtctccctgaccctcttcctcaaccattgcttcctccaccttcatctccatctccgcaagaagttgatggagatgactcagggtcagaatccgacgcatcagtcgtgtcctgccctgccacatcgtcatttgaagagcgccacaggctccgcgggccactcccacgccccgcaagccttaacgcgtttgatatcatatcattctcaaggggattcaacttgtcggggctgtttgaggaaaaaggggacgaggtgagattcatctcgagtgaacctatgtcgggcattataacgaaattagaggagatcgcaaatgtgaagagcttcgcggtgcggaagaaggattggcgggtgagcctagagggcacaagggaaggggttaaggggccactaacaatctgcgcggagatatttgaactcacaccctcccttgtagtagtggaggtaaaaaagaaggcgggggataaggaagagtatgatgatttctgcaacaaggaattgaagccaggaatgcagcatcttgtgcaccagatggccccagttccaattacacctaccatttctgagtaggccgaaaggccttcaaggtaacaggcgccaccgcccctagagctaacggggatagggggagcgactctccaagctagaaagaaactggagtcgggtgcaactgacaggagcaagagttcttgtagtctcgggcactgacgatgatgagcgcggttacttggttaactctggagagcatacgtaatgttatccgagacgggagctagattgtggctgtatatggtgtcaccctagctgctgtttaaatgtttgtacttttctctacttaatttgctgatgatgattgtgtatgtactcccgctgttggtttatcagcagaaccgaataattttgggcaatcgttaattcaaggaccaaactgattgaggaataaattgggtgcaacatgcattgcatgcaccctttggccaccaggcacatgcagacgtgcttggattcc

SEQ ID NO: 5029 - DNA, 3011 bp, Triticum aestivum
  Clone ID: TRIAE-23APR03-CLUSTER5166_1
cgtccgctctccctcacccccctcccctgctccgtctcactcactcactcgcctcgccatccatggatgtggatccttgtcccggggcaatcatttcgctcccctgctgattctataaaaacgccggcacgatctaccccgcactcccattcacaaggtgacacctccggctgcagagcctcttctcacgatgtggtgccatggcaggagatctgcgctcttcgccgtggccgtggccgcggccatcgtggcggcggcggcggcgggggaggtcgtgcacgatggccggcggcattcacaaggtgacacctccggttctagagcctctcacgatgcggtgccatggcaggagatctgcgctcttcgccgtggccgtggccgcggccatcgtggcggcggcggctgcggcggaggtcgtgcacgatggccggcggacgtacatcgtgcactgctcgcacgccgccatgcccagcgagttcgcggcgcacggcgactggtacgcctcgtcgctgcagtccgtgtccggcggcgccgccgaggtgatctacacctacgacaccctgctccacggctactcggcgcggctcacccgcgcggaggcccgggcgctggaggcgcagcccggcgtgctgctcgtcaacccggagacgcggtacgagctgcacaccacccggaccccggagttcctcgggctggaccgggcggaggcgctcttccccgagtccaacaccgccagcgacgtcatcgtcggcgtgctggacaccggcgtgtggccggagcggccgcccagctacgacgacgcgggcttcggccccgtgccggcgggctggaagggcaagtgcgagggcgggagcgacttcaactcctccgcgtgcaaccggaagctcatcggcgccaggtacttcctggcgggctacgaggcgtccaagggccccgtggacacgaccaaggagtcgcgctcgcccagggacaacgacggccacggcacgcacacctccagcacggcggcgggctccgccgtgcgcggcgccgacctgctgggctacgcttctggcacggccaagggcatggcgccgcgcgcgcgcgtggccacgtacaaggtgtgctgggtcggcggctgcttcagctccgacatcctcaagggaatggaggtggccgtcgccgacggcgtggacgtgctctccctgtccctcggcggcggcacgtctgactactaccgcgacagcatcgccgtgggcgcgtacagcgccatggaaaggggaatatttgtgtcctgctcggcggggaatgccgggccgggcgcggcgtcgctgacgaacggcgcgccatggatcaccaccgtgggcgcggggacactcgaccgcgacttccccgcctacgtcaccctcggcaacggtaacaagtacaacggcgtctccctctacaacggcaagcaattgcccaccacgccggtgccgttcatctacgcagggaacgcgtcgaacagcagcatgggcgcgctctgcatgacgggcaccctcatccctgccaaggtcgccggcaagatcgtcctctgcgaccgcggcaccaacgccagggtccagaagggattcgtcgtcagagacgccggtggtgccggcatggtgctcgccaacaccgccgccaacggcgaggagctggtcgccgacgcgcacattctcccgggcgccggcgtcggagagagggccggcaacgccatgagaacctacgcgtcgtcggatccaaagccgacggccaacatagtgttcgcgggcacgaaggttgggatccagccgtcgcccgtcgtggccgccttctcgtcgagggggccgaacaccgtgacgcccggcatcctcaagccggacctgatcgcgccgggggtgaacatcctcgcggcgtggtccggatccgtcggcccatcagggatcgccggcgacgaccggcgcaccagcttcaacatcatatcgggcacgtccatgtcgtgcccgcacgtgagcgggctggcggcgctgctccggtcggcgcaccaggactggagcccggcggccatccggtcggcgctgatgacgacggcgtacgcggcgtaccccaacggcgacggcctgctcgacgtggccaccgagcgcgcggccacgccgctggacatgggggccggccacgtcgaccccagcaaggcggtggacccggggctggtgtacgacctcgccgccgccgactacctggacttcctctgcgccatcgagtacgagccggcgcagatcgccgcgctcaccaagcactcgtcggaccactgcagccccaaccgcacgtactccgtggcggcgctcaactacccgtcgttctcggccacgttccccgcggcgggcggcacggagaagcacgcccgcacgctgacgaacgttgggaagcccggcacgtacaaggtgacggcggccgcggcggcgggcggcacggcgatcaaggtgtcggtggagccgccgacgctgagcttcagcaaggtgggcgagaagaagagctacaccgtgagcttcgcggcgggcgggaagccgtcgggcaccaacgggttcggccggctggtctggtccagcgagcaccacgtggtggccagcccgatcctggcgacgtggacctgagcggaccaccagccggcggtagctgctgctaattagcaatgccgtggaggcgcagaacgcggcggggcagcaatggcgccgccgttctcgatcggaaggaagcaagatggatgcgtgcgtgcgtgtgtgtcgatttgtcgtggtgatttactgatttgatttgccgcctcattttcttgctgccgcttgccggtgcagccgtgttagtagtcgtggcaatgtgtcaagtgggcatacatttgattgaatggcgagaaagtgagtgattgatcaagttgggtgtagtcctaaacagagacagatcgatggataatggaccagcaaatcaaatggtatccgcaatccatctgttcatcattttaaaaaaaaaaaaaaaaaagc

SEQ ID NO: 5030 - DNA, 1666 bp, Triticum aestivum
  Clone ID: TRIAE-23APR03-CLUSTER51676_1
cacccttgcctaactaggcccctctagccttacacatcctcctcctctcggccgacccccccatcggaacacatccttacctgtagttttcctcactcccttgacccccgcccgtccctaactaaagccactagcggtagtaatccttgtcaagccgggtgacaccgcggagggagcggagcatggaggccatggacgtcaagtaccggccggccctctaccccaacggctccgtcaagaagctccggcaggcggccgcgccgccgccgccgccggtggaggccgtgcccacgtacaaggagtgcctcaagaaccacgcggcggccatcggcgcgcacgccgtcgacggctgcggcgagtggatgcccgtggtggagctcaacaccgccgacccggcctcgtataagtgcgcggcctgcggctgccaccgcaacttccaccgcctcgtgatggtggagggctcgccgccgcccccgcccccgcccccgccggccctgctgccggcgccgcccgtgcccatgcccatgccggccaccgtgctccatggcctgcggcagcgcgcgcacgggcatgagacgccggaggaccggctcccgggcgtcgacggcgacgactctgactccgactcggatggctccgagtacgacgacgagcgctccgtctccccgccccagcaccctccgcccgcgcacctcccggccccggtggcgcagcagccgccgccgtacatctcttccgcgccacacccgcacatgctgctctctctcaactccagcgcgccgggggcgccgcagggccagagcaggctccccgcccagctctcgccggcgacggcgccgccgccccacgggatgatgccggccaggaagcggttccgcaccaagttcaccgcggagcagaagcagcggatgcaggagctgtcggagcggctggggtggcggctgcagaagcgcgacgagggcgtggtcgacgagtggtgccgcgacatcggcgtcagcaagggcgtcttcaaggtctggatgcacaacaacaagcacaactacctcggcggccacagcgcccgccgcagcgcctcagccgcggcctcctccgccgcgaccacccccaccgcccctgccgccggcgggccattccgtctcgccccggccagccccgcaccaggagcgccattcaacccctccgccagccacagctccccggcccccacgggcacgggcttcaacatgaacggtaccgcctcctccgcctccaccgccaccaccaccgccacgcccacccccatcttcgccgccggccgcaagctgaacggagcctcatcgccgcagtcggcgtgagctagggagagcagaggcagagaagaaggagagggaaggagaaaggcaaagacatttagctttcatttcagttatcattgcattacttttctttctttctgtagtttggatcgatcgttggttctactaagaaattaaccccaagaaagggtgccgtctggaaaaaaaaaaaaaaaactttatctgttcttgggatccgatggaagctcgcgatttaggattaattagattatctgatctcaaaagtggcacctttcttggtctgttcttgtccctgtaactgtaagttgagcatccgcccgtccgtccgtaatagaagaagtttatttcct

SEQ ID NO: 5031 - DNA, 881 bp, Triticum aestivum
  unsure (1)..(881): unsure at all n locations
  Clone ID: TRIAE-23APR03-CLUSTER516_11
cttcaccagctacctacactgcaagaggaagcaaagcaatttccaaaccaaatcagtttttcacagcagagttctgcagctagccgatcggcaatggcgaccaagatctacatcgtgtactactcgacatggggacacgtcgccacgctcgcggaggagatcaagaaaggcgccgacaccgtccccggtgtcgaggtcaccgtctggcgggtgccggagacgctgccggaggaggtgctggggaagatgcacgcggcgccgggtcgcgaggaccaccccgtcataacggcgtcccagctggccgaggccgacggcatcctgttcggcttcccgacgcggttcggcatgatggcggcgcagatgaaagccttctttgactccaccggcggcctctggcaggagggctccctcgccggcaagcccgcgggcatcttcctcgccacaggtacgcagggtggcggccaggagaccacggccctcacggccatcacgcagctgacgcaccacggcatgctcttcgtgcccgtcggctacacgcacggtgccggcatgttcgccatagacgaggtcaagggcggcagcccgtacggatccggcaccttcgccggcaaagatggcggnaggacgcccagcgacgccgagctcgccttggcggngcaccaggggaagtacttcgccggcatcgccaagaagcttaacgccgtctgaacttgaactgctcgggattgcacaacgtgtgtggatgatttncagntgcacaatttgtttatttagcaattactacacttttactggcttttatattttgttnngaaagaataataatgnacatgggtgaaaaaaaaaaaaaataaaaaaaagaagaanaaaaagttggttag

SEQ ID NO: 5032 - DNA, 890 bp, Triticum aestivum
  Clone ID: TRIAE-23APR03-CLUSTER516_18
gccatacagcgacaacaaggagagcaaattagaaacacagatcaaggggaagagaactccgcagctgatcagcaatggcgaccaagatctacatagtgtactactcgacctggggacacgtcgctacgctggcggaggagatgaagaagggcgccgactccgtccccggcgtggaggtcaccgtctggcgggtgccggagacactgccagaggaggtgctcgggaagatgcacgcggcgccggggcgtgaggaccaccccgtcatcacggcgagccagctggccgaggccgacggcatcctgttcggcttcccgacgcggttcggcatgatggcggcgcagatgaaggccttcttcgactccaccggcggcctctggcaggcgcagagcctctcgggcaagcctgcgggcgtcttcttcgcgacgggcacccagggcggtgggcaggagaccacggctctcacggccgtgacgcagctgacgcaccacggcatgctgttcgtgccggtcgggtacacgcacggcgccggcatgttcgccatggacgaggtcaagggcggcagcccgtacggtgccggcatcttcgctggagccgatggcagcagggtgcccagcgatgctgagctcgccctcgcggcgcaccagggcaagtactttgccggcatcgccaagaagctcaaagccgtctgaactcagatcacgagccgtgtcccatgattcatatcaagtactcaatcagtacaggatgatttgacacatcattttcagtggagcagatttacacaattctagacaatttaactgtactgcattttaatttcttgtttggacaaataatacaatttcttgttctgagtggagcaaaaaaaaaaaaaaaaaaaaaaaaaaaaa

SEQ ID NO: 5033 - DNA, 1785 bp, Triticum aestivum
  Clone ID: TRIAE-23APR03-CLUSTER516_23
gaattcggcacgagcaatcccctcatcgcctccgctcccacgccgccgaatccgagacctgatctcggattcaccgcagcgacgcagaccaaaccctcaggcgatccccggcacctcctccccttcggttcagccatggcaggaatggcaccggaaggttcccagtttgacgctaagaactatgattctaagatgcaggagctgctgagccaaggtgagactgaggagttcttcacctcctatgatgaagttcatgagagctttgatgacatgggtctccaagagaacctcctcagaggaatttatgcttatggttttgagaagccttctgccatccagcaaaggggaatcgttcctttctgcaaggggcttgatgttatccagcaagcacaatctggaacaggaaagactgctactttctgttctggaatccttcaacagcttgactatggtttggttgagtgccaggccttggtccttgctcccacacgtgagcttgcacagcaaattgagaaggtcatgcgtgcacttggtgactacttgggtgtgaaggttcatgcatgtgttggaggaacctcagttcgtgaggaccaaaggattcttgcaagtggagtgcatgtcgttgttggtactcctggtcgtgtgtttgacatcgtccgcaggcagtctctgcgccctgacaacatcaagatgtttgtcctcgatgaagctgatgagatgctttcccgtggtttcaaggatcagatttatgacatcttccagcttctcccagggaagattcaagttggtgtcttctctgccaccatgccccctgaagcccttgagattacccgcaagttcatgaacaagccagtgaggatccttgtcaagagggatgagctcacccttgagggtatcaagcagttctatgtcaatgtggagaaggaagagtggaagctcgacacactgtgtgacctgtacgagactcttgccatcacccagagtgtcatctttgtgaacacccgccgcaaggtggactggctcaccgacaagatgaggggcagggaccacaccgtctccgccactcacggagacatggaccagaacactagggacatcatcatgagggagttcagatcaggttcttcacgtgtgctcatcaccactgacctgcttgctcgtggtattgatgtccagcaagtgtcccttgtcatcaactatgacctcccaacccagccagagaactaccagcatcgcatcgggcgtagtggtcggttcgggaggaagggtgtggccatcaactttgtgacccgtgaagatgagaggatgctgtttgacatccagaagttctacaacgtggtgattgaagagctcccagccaacgttgccgaccttctgtgatcgggcgggctgtcgagaacatatggtaagggggtcctgacagggctttgtttttgttgaagtatcaccaaactttcttgtctgtgggtgggggggttcaagtgataaatggtctggggttctactttaaagtcgtggtcgtggacaatttgggatttattaagccatgttttgggaatttttgtagttgctaggctgtggttctatgtgctgaggagggaggcgctgctgctcatgttgctgttgctggagtcctcactttatttgttaagactatgtaatgaccgaatgatgttatttgtttgtgtcatccttgactctttacctaccgcatgtaatcctgcaatcggtactagtaatgttatcgttattaaaaactgtttactctttttttagcaaaaaaaa

SEQ ID NO: 5034 - DNA, 2362 bp, Triticum aestivum
  unsure (1)..(2362): unsure at all n locations
  Clone ID: TRIAE-23APR03-CLUSTER5171_1
ggccgtcgtacctcggagccccccccatctttctcttctcggcacgcacactacttccccgctttcttccccgcctcgcctcacccgacatggcgatccccggcggcccgcgcggccgcctcctgctcctccccctcttcctcgtcgccgccgccgtttgcctcgtctccacccccgcccgcggccttctacctccccggcgtcgccccccgcgacttccagaaggatgatgatctccaggtgaaggtcaacaagctgtcatctataaagttacaattttcatatgactattatttcctggactactgcaaacctgagaagattaagaacagtgctgagaacttaggggaagtccttcgtggggaccgaattgaaaactctgtctataatttcaagatgaggagggatgggagtttcaaagttgtttgtcgaacaaagctggctgctgtggagacaaagattatctgagaaaagtccaaataagtttaccgagtgcatatgaagtaggttcctgaccaagttttcgtcccaaatcaaacatggtgctggtgcaaaccgatctttgaaaacaggtaggagataggctataatttcaatggtgtcgaatatgtttttaacaatcgctggtagattcacaggcttttcacatgtatacagaaacgaccttgagactcgtattgtaggcttccatgtggttcaaatctgcatatatcatgagtacctgtcctggtacgacaagagtcctacagtgcaaacctgcaacgctaacacgaagataactcctggtagtcacacacctcaagaggtggcccctgatgcatatgttgtgttctcttacgacgttacctttgagtctagtgagatcatatgggcatctcgctgggatgtctaccttctttccagtgacagccaaatccactggttctcgatcattaactccttgatgattgtccttttcctttctggcatgatagccatgattatgatgaggaccctttacaaggacatagcaaactataatcagcttgacaatcaggaggaggcccaggaagaaactggatggaagttagtgcatggtgatgccttcaggcctcctgttcattcaggccttctttgcgtttatgttggaactggtgtgcagttctttggcatgacagtggtaaccatgatgtttgcactacttggattcttatcccctgcgaaccgtggaggactcatgactgctatggtccttttgtgggttttcatgggtgtattggcgggttacacgtcgtctcgcctctacaagatgttcaagggcaccgagtggaagaagataaccctcaaaactgccttcatgtttcctggtataatctttggggtctttttcgtcctgaatgcccttatctggggtgagaaatcatctggtgcagttccttttgggacaatgtttgctctggtccttctctggtttggcatctccgtgccactggtctttgttggaagtttcttgggattcaagcagccagccattgaggacccagtcaagacaaacaagattcccaggcaaattcccgagcaagcatggtacctgcagccagctttctcgatacttgctggtggcattttgccatttggtgctgtcttcattgagctcttcttcatcctcacatctatctggctgaaccagttctactacatctttggcttcctcttcatagtcttcgtcattctcctggtaacctgtgctgagatcacaattgtgctctgctacttccagctatgcagcgaggactaccactggtggtggagagcctacctgaccgcaggctcttcagctctatatcttttcgcttatgctatcttctacttcttcaacaagttggagatcacaaagcttgtttcaggcattctctactttggttacatgctgatcatttcttatgccttctttgtcctgactggcaccattggcttctatgcttgcttctggtttgtgaggaagatctatgcttctgtgaagatcgactgatgtagcaacttccaagataagtttcctgtctgcttctagagactctcccggacaaggttttcttgcaatatcatacatgctgctgttcaagtgacatatatgaaggaaactgggatttgagatgggattccatggttttggtagaatatgtagcctggtaggattaagaatcaccggatattcacggatgttgaagagagaatttgatactcgttgcagattagcatgtcttgtaattctaaagatattgagtgctcctgtactgtttcggatctcaattgaccatgtctgttccatttgtgttttatgtcttacacgcagtacgntggacatggcactatttcttagtgc

SEQ ID NO: 5035 - DNA, 1913 bp, Triticum aestivum
  Clone ID: TRIAE-23APR03-CLUSTER51757_1
aggtgtccccatgtgtaaaaagagaagtgcaagtctggtcggagaggagcagcagagatggccggagccggggaagacgacgcagctcctcctcccccttctccagatcgacagcagcccatggaagaggcggcggcggcggccaagcggagccggtcggagaaccaccatggcctcgccgacgggccgtccttccggatggaggaccttccggcggaggttcagccggttataatctcactgctcccactgaaagaggccgtgaggacgagcattgtttcaagaagttggacaacgctctggagattccactgcgacctatgttttgatgtggattctaacaccgatgacaattccgctcatcaggtcaatggcactggcaccaatgaccaatccactaatcggtataataccaaaataacacgggcaaagttcatggagactgtaaattccgttattcaacggcatagtgggataggaatcaataagttcagtatcagctgtgacctgcacaaagaggactctcatcatcttgacaagtggattcggtttgccgcttcatcaaaggcaaaaataatagattttcatcggaagatatctgattaccgagttgaagaagctccccactttcctcttgaggccttagatgctcaaggtagctcatttgtgcagtccttgtctctcgccagtgtttctataaagccacgctcaggaatatgccgctttacaatactcagaaggcttgttttgagctctgttcagatatttggagattttccaggcttgcttgcaaaatgttcaagacttgaggacttagagatcaaatggtgttctggtgtggatgacttaatcgtaccacacacactcgataaacttcaacatttgctgattgccggaatggacgtccagatggttgagtttcatgctactgatcttgctcactttgagtacaaaggccgagtaacccctatagtgcttcatggttgcttaaaactagagaaggcaacaattgcgtttgaggcctctaatgtactgccccatgcattcaatgtaattccaagcatttccccagtgaagatattaattgtgcgagcttttatatcaaaatatggacagtccctggagctgccattaagaccacagggcatgtttatgcatctgaggcatatgacttgtaaaattatcgtccttgctagagatgtaaatgactataatggagttcttcaactggcccattggttggacagtgcaccgcgactggagacattggacttgcatatgtcctatctgaggtccggtgctttcgtaagtgccgaggtggcgggagtggaagctccctgtatgcgtcgccatgatcatctcaagacggtcttcatgagtgggtttcagtgttacaagtctcagattgagctggcgtgctgtatcctgggaaatgcttctgttcttgagcagctgacagtagaagcaatatggggtgatgatgattacaggcggatctgtgaatgggcagaggtaacctcgaagcgctttggtaaggtgatcactgtcttagatgccccccttaacagtgagtaaaccaatccttttcgcatgtacacgctgtcaattaatctcgtgtagtctgcagtatgcagcattcagtgtagctgggagaatgcccctctagactgtactgactgttttggtgtctacaaatggaatctgtagggcttttgcccctcttaataaaaaacaagtaatctctggttcatcgtaccaaaaaaaaaaaaaaaaccgcttgtcgcccaacaataggcggggaaaaaccaggggtgggccgagaaaccccccaaaaatataggaaagggggtatgcccattttgcgctaaatccttggtaccgtgtggtcggggttggccaaaccgggggtgttc

SEQ ID NO: 5036 - DNA, 812 bp, Triticum aestivum
  Clone ID: TRIAE-23APR03-CLUSTER5190_4
aagcgcacaagcaagctcagtaagcacgccatggggatgaagcgatgcatcgttcctagcatcttgctgatgctttcactggaggcggccctcctcatcgccgaccgcccctctgtagacgacgaggtgggtaccattctcctgccgagccaaggccaagaccagcaagcagccatggcggcgccgaggccgtggaagtgctgtgaccggccgcggtgtaccaggtccatcccgccgatctgcacctgcgtggacgaggcgttcgagtgcgcctccacctgcaaggcatgcgtgccgtcgacgcggaacccgtccctccaggtctgccaagaccagtacgtcggcgaccccgggcctatatgccggccgtgggagtgctgcgactcggcggcgtgcaccaagacagacccgccgacgtgccgctgcggggacgaggtcgagcagtgcgctcccacctgcaagagctgcgaagcgtccacgtcgaacccgtccctcaacgtctgcaaggacgcgttcaccggggccatcccgcccacatgcacgccgccagaggctcttgccgccggcggtaactagcacgcgcacgcgttggtgtgcaccatgatcgagtcgctacgtccctactccttccttgctgctgcagcagcctgcagtttgtgattatacataaaataaaaaatggataagcaatcatgtactccctcgatcccaaataagagcatctacagccggacttggcaaattcaggccctcaaacgcccgcggacacgtgacgtctcgacgtgtccgcggacaatgaccgggcacccctt

SEQ ID NO: 5037 - DNA, 1665 bp, Triticum aestivum
  Clone ID: TRIAE-23APR03-CLUSTER5193_1
aaccattcaaagaactcggcctccgctctgctctctgccccgcccgccggctcatccgcagaggcagcggcgcagcgagcacacaccaccctccatccctccccccctcctccccccccctgccgctcccctcccgtacccgccggctcgtgttgggatggtggggacggccgccgcccgggcggttgcgaggctcgcggcgcgtcttggtctgctgttgtccctggccctcgcaggcggcggcgcagaagtacaatgcggtgtacaggttccggggcccggtccccggaccgagggacccgggcaaccaagggccggccctcggcgtccccctcgagcagccgcccgtacggggcgaactccacctcgaggagccccaccccgccgctgcccccagcgccccgcgccagtcgaccacctcctgcaccccaggaaaggccccccccccttcctgcccccctccaagtccacctccgccgtcctccaaaaagggcgccacgacggccacgacgggctccaccaccatggccacccccttctcgacgcttccttgccaccgtgctgaggcaacggggaacaatgggaccaataggttaacactccaaggagtcgagtgcaggacctcctccctcgtgcttaccaggtcaaccggctcaattggcagggcagctctctcacctcgggtgagtgcggggtgaacggctacggccggcgacgcggttcggcaacgacaccaccggaccaggcgagcacgtacgagccgcagatcgtggacaccatcggcgccggcgtggagaagctggtcgcgatgggggccgtggacgtggtggtgccgggggtgctccccatcggctgcttccccatctacctcaccatctacggcacctccagcgccgccgactacgacgccctcggctgcctcaagaagttcaacgacctctccacgtaccacaacagcctgctgcaggccaaggtgtccgccctccaggccaagtacaagtcggcgcgcatcatgtacgccgacttctacgccggggtctacgacatggtccggagccccagcaaatacgggttcagctcggtgtttgaggcgtgctgcgggtcggggggaggcaagtacaactacgccaacagcgcgcggtgcggcatgtccggcgcctccgcctgcgccagcccggcgtcccacctcagctgggacggcatccacctcaccgaggccgcctacaagcagatcaccgacggctggctcaacggcgccttctgccacccaggcatcacccactagccagtcactcccactggtcgatcaatcagcttatgcatcgtcgtccatggatccatcattaatcaatcaatcgattatattattattattattattattatttatacggacgggttaattataaggaaacgtttgtggggactggctaaggccgggttcccggtctgatctgggtgcgtgtgtggtgatgaaggaaggggaaagaatgacggcaactgtcgtggaatagtagtgcatctgttgctgtgaacctgtaataatgtgataattgttttgttccgttccatgggaaaaagaagtggtacagttgagtgaaaacgaaagaaataaacccgatataataaaaaaaaaaaaaaaaaaaaagaaaaaaaaaaaaaaaa

SEQ ID NO: 5038 - DNA, 1008 bp, Triticum aestivum
  Clone ID: TRIAE-23APR03-CLUSTER51_20
gtcgatcgaaattccaattccaaggagagagaaaaaaagagcgactgagagcaacggtgcgtgcgtgcgtgcgagcgagggaacccaggcgaggtagcggatcccccggacgggccgggtggttctagggttagggtttgcggcagcggcggcggcggcggggctggggaccgtgcgtgcgcctccttcgacggtgagccgggatgctatgctgctaggctgcgggtcgctctcctcgtgggtgcgccgcctcgtcgcctgcgtgggagcagaaattgttttggatgtgcgaagtctactcctataacagctgttgatgagccttctaaaggtttaaggattcaagggcgctcgataaaacatcgtagtttgtctgaagatttttggagtacaagtccacgtgaaatggagaacagtgccttgcagtcacaccgtagtatgtcttccatcagcacagcagcacaatctagtgagcagcatggagctggaagtagcagcaacccaaatgagtttgtaaatcaaggtcttctactctggaaccagactagacagcagtgggttggaaacagaaggcttaattctcagcgtcaaaagacccgggagccaaaaataggttggaatgctacgtatgagagcctgctaggaagcaccaagacatttgcacagccgatccctcttggtgaaatggtagaatttcctcgtggacggctgggagcaggaggggctatatgattagctgcttaattaaagcgtgttggtattgtctggggtctcgttgttaatcgctggaatgtactcaactttggtttatcaaagcgtgtgggtgatgaatgtggattatcctcgtgacaggatggcatccctttttcttttaaagtaaatgtaacatatttttatcctactatttttttttacatttagcaaaaaaaaaaaaaaaaaaaaaagaaaaaaaagaaaaaaaaaaaaaaaaaaaaaaaaaaagaaaaaaaaaaaaaaaaaaggccccta

SEQ ID NO: 5039 - DNA, 1819 bp, Triticum aestivum
  Clone ID: TRIAE-23APR03-CLUSTER5205_1
atcatctcaaccaccccgcgctccccccagcctccccaaacaggccgccccggccaccacagccccagcgcacccacgggcgggctacacccagaagacgacgacggacgccgccagagcagacgggggcaggacaccggcaagggccggcgccgggggcgggtcgtccgaccgggggcccccggacctgccgcgccgcgacgccgggggcgtgtcgggcgacacgaaggccccgcgcccgggcgccgccccgcggcccccgggcgccccggcgccgcgggcgcccacggccgcagcccggcgcggaggggcccgcgccccctcgtggaacaacttggcccaggccaacgacgcggcggatcaccgtcggcctcgccgccagcccgcgcagtcgcctactccgcggcccacgaggtccccctcgtccccgggactgttcggtacctgcgaaccacatatttcgcctcctccaagggcatgttgagaacattgacaacctgatgcaacactatggtctgagcaagacagcaaatgacgctaccatcctgattgaggcctacagaaccctccggccaccaggggcccgcgcccatggccagccaggtcgtgaagagatctcagtggtcaggttctcttttgatccttatacgacaccgtgtcgaaatccacctgcgacgctgctgatgctgatggcagtatccccttcttctggggcgtcgactctgaagacccccttgtgttctatgacgacaatgagcttctcaaggcaggctgtcggaaactcatttgcgccattccccaaaggctgcttctacaccacatctggagggctgcagagctttcgagcacccgctgaacggagcattgaaggcacgtgccacgtgtgtgacagccagggccagatgtgcggctccaccttcaaggtcgacagcgagggccaagaaggactcggggatccctcgcgtcggtagtgctgctgattggtctaaccactactagcttgatgacccttgttgtaaactgccaatcttgacactgaatcgctgagacaccgcactgcatctgcattttatttttgagcagtttacgacgctctagacaatgctgtttcaataaatgtactgtctgatgggtaatgatactgctgtaagtttaccgatactcgaacaaactctgatgccaccacctggtggtagaggtttatcagccaccctatatatgtctcgataaataaagttcagtgaaggcttagtttgtttgtcaaaaagcaaaaaacaaagaaataaaaaaaaaaaacaaggaaaaaaaaaaaaaaaaatggttccttaagagcgaggagggcggagtctgcgtggcggaaggtgacgaatccgtagcccttggagcggccggtggtcttgtcgctgatgaccacggcctcctcgaggtcgccgtaggcggagaagatggcgcggagcgagtcggagttggtctcccagccgaggccccggacgaagagcttgcgcagggccgggtcgcggtcggcggcggcgcgcacggcatcgagcgcgaccccggaggcgagcgccgcggcggcggcgatgtcggcgagctggtcgcgggacagcgggtcgaggagacgcaggacgtcatcgcgcgtgagcccgagcgcggcagcaccggcggcgggggagacggcgaccgcgccgttctcgtccggcttgcgcttcttcgagaagggatccatgggcgggggcgggggcgggggcggcgggggaggaaaagggcaaaaccctagatcggtgtggggtgggtgggtaggaagggttcgacgcgactt

SEQ ID NO: 5040 - DNA, 1348 bp, Triticum aestivum
  unsure (1)..(1348): unsure at all n locations
  Clone ID: TRIAE-23APR03-CLUSTER52075_1
attttatttctgcatgaccggcagttaacagagcttcgcaactcctcatccatggcatcaaccatgccgttctccgctggcctcgtttctcttgggtctccgccgccgcagcgccacagctgcaggttccagcgatatcatcgaccgggcactctcatttcatcagctataaggcatggtcaggttaaagctatggctggagtgagcatggatggcttggcacagcctcaagccccagttgcagtggttaccggagcatcgagggggattgggcgagcgatagctgtggctcttggcaaagcagggtgcaaggtagttgtgaactatgccaagtcaggcatggaagctgaagaagtgtgcagagagatcatggagtccggtggcactgccatctccttttcagccgatgtctccattgaagccgaggttgaaaccatgatgagagcggtaattgatacttggggaacgctggacgtgatggtgaacaatgcagggatcacgcgagatgctctgctaatgcggatgaagaaggcgcagtggcaggaagtagtggacgtaaaccttaccggtgtttacctctgcgcccaagctgcggcggcagtgatgatgaagaggaagaagggaaggatcatcaacatcgcctcagttgccgggatgattggcaacattggccaggccaactactgcgccgccaaggccggggtgattggattgaccaaggccatggcccgggagtacggtggcagaaacataaatgtgaatgcagtttccccgggctgggtcgcgtctgacatgaccgcaaaactaggcgatgacatcgaacgaaaggcgctcgagacaataccactaggacgattcggcaagccagaggagattgctggactggtggagttcttggctgttcatccggctgcaagctacatgaccgggcaggtgctcccagttgatggtggcctgtccatttgagtgttactgaaaccgaacctaagcgagatgtggaaacgtaaattttccaatgagaaacaaggttgtgtcacacaaaattaagcacaagagggctccatgcctttgcgtcaggcttgtggcgtacggagtgccnactcatgtgttctttactgggaggttggagaaagttatagtctggatggaaattcagtagtatgtattgcccatagcgtatactcgatcatttgattccaacgnaagtaccagaaaaataaccaaagttnacgaatgtatatccaanatgtattgtacaagtccgccaaatgtaatgttttggctgtccttcgtcttcgacatttttattttgcatcaaagagtanttgaatcaaaaaaaaaaaaaaaa

SEQ ID NO: 5041 - DNA, 1764 bp, Triticum aestivum
  Clone ID: TRIAE-23APR03-CLUSTER52358_1
gcagccccgggccactcggtcgccccgtcgcgccccgccaccgcatcccacatgccccgagggagcgctgccacgaggcgcgcaccggctactccctcaccaccacgaccgcctaccccgccagcgccaacgtaccatggccacgccgcacggcgcacccgcccggtgcggacgacgcctccccggcgtcgtggttcaagcgccggacgtactccggcgctgcacgcgtgcggccgtggctacgcagagcggccaacggacgcgggctgcagatggacggcgagggcggcgtgggccgccgtcgcgggtgctgggacggatgcggcggctggctgtggctggcgtggcggttgccaaagcgggtgtacttgtctgtttgtgctgactttgtcatcaactagtctcaactagtcatccaatggttcattcggactattactagcggccaccagggatttataaggactctttcccgtacgatccacttgtcttgaagttctttagttaagttcttcggcaagcagggagtaggagttatgatgcctgggcagggggcactagaagaagactgagcacatggcgacttcgccttgctgattgggggctgcggcgagccccccgctctcccgctccccctcgccaaccccctgcccatccggcggcgccctgcccttcgttccgtccaggccgtacttcaaggaacggcacctccgccgcgataacctcgctcgctgcgccttcccgacggacgtgctggggatcaccaacgccaccttcgtcgacatccggttcaaccggttctaccgcgaggtgccggcggggctcttctgctcattcccgatcgtggaggccatcttcgtcaacaacaaccagttctcgggcaagatcccgagcaacctcggcgactcgcccgtgaactacctcgcgctcgccaacaaccagttcacggggcccatcccgtcgtccatcggccgcgccgccaacacgctgctggaggtgctcttcctcaacaacaagctcagcggctgcctcccctacgagctcggcctgctcgccaaggccaccgtcatcgacgccggcacgaaccagctcacgggcaccattccggcctcgtacgcgtgcctgcggaaggtggagcagctcaacctggcggacaatctcctctacggcgaggtgcccgacgcgctctgccggctcgcgtacccgtcgtccggcggccacctcgccaacctcacgctctcggacaactacttcacgtcgctggggtcgtgctgctgggcgctgatcaagcaggggaagctcaacgtcgcccgcaactgcatcccctatgcgcccaaccagcggtcgcacgaggagtgcgccggcttcttccacaggaccaagacctattgccccgtcagcacctacgtgccatgccaccaccccaaggactacggcgccggtaaggaggaagcctcggcggcggagtacaagtaccggacgtactcggcgctgcacccgtgagtccgtgactcccagcagtcagcacggccggcgagggcaggcgtacacgtgctggaagacaatggggaatgtgctgtgcgtctcgtcgcggctgcttgggtcgttgcgatggctggtttgtgttgacattgtttgcaaatcgtgtgtactacttttctatttgagaaaaattcctgtacctcactaaagttgagccgggtaacatttggtaccactacttcaatataccctaactacggtccaaaaaaaaaaaaaaaaaaa

SEQ ID NO: 5042 - DNA, 975 bp, Triticum aestivum
  Clone ID: TRIAE-23APR03-CLUSTER5260_1
aagatcgcaatgtctggtgctgctgacacagctgcggccgcggccgtcgccgccgtcgccggctcgtcgggtgcgttgccgctcagcggacgcgtggccatcgtgaccggcgcgtcgcgcggcatcgggcgagccatcgcggcccacctctcctccctcggcgcgagcgtcgtcctgggctacgcggccagcgcggccgaggccgacgcgctcgccgcggagctcccgcgcgccgtcgccgtaagggccgacgtgtccgaggaagccggcgtgcgcggcctcttcgacgccgcccagtcggccttcggctgcgcggcgccgcacatcctggtcgccaacgccggcgtgctcggcgacaagtacccgcccctcgccggcaccgccacggcggacttcgaccgcgtgttcgccgtcaacacacgcggcgcgttcctgtgcctccgcgaggccgccaaccggctgccccgcggcggcggcggccggatcgtggccgtgacgtcgtccgtggtcgggtcgaacccgacggggtactccgcctacacggcgtccaaggcggccgtggaggcgatggtgcggacgatggccaaggagctcaagggcacgcgcgtgacggccaactgcgtggctccgggggccacggccacggacatgttcttcgccgggaagagcgacgagacggtgaggcggaccgcggagacgaacccgatggagcggctcggggaggccggcgacatcgcaccggtggtcggcttcctctgcaccgactccgccgagtgggtcaacgggcaggtcatccgggtcaacggcgggtacgtctgatgataatctgttggctggcctgccatgctattagccattagccatcacggtgggagcgaaataatgcgtctggatgttgcagaaaactgaacaaataaatcttgtgggaatttgtgcttagcataattcaaaaaaaaaaaaaaaaaaaaaaaaaaa

SEQ ID NO: 5043 - DNA, 1607 bp, Triticum aestivum
  Clone ID: TRIAE-23APR03-CLUSTER52659_1
ccttttctcttgttttgggtccaagtacaggcatgtagacagattatttgttcaatatcacaaaagataatcataacgtacaatacagggttacagatgcatgatgtctgaacatctcttcaggaaattaacagattttgtgcaagccgacagtgcaatcataaacataggtgttaagtaatagtatgtcacggtatactaactgataaatgtaaactgaatgaatcatatgaacaaatggagagatcaaacggacagctggagtatatgatactgcaaagatatcttcatcttcattttaccatcgcgtacctaagagtaccgatatttattgcattgcaagttcagatccggttgccaccattggctaatgccatgggcatatttgaagtccagtgaagggctcacgtttacaatcaagtctgcagatggaagaaggtgcagcggttctgattcccatcctaatgccttgtaaaacaggtctccgattgagttttgggtcgcaagcttctcaataaatccagcaccgagatcctccatgttcctacgatgctggaagtacccaatgtactctgaacatacatggtctcctggattaacaaacagatatggcgtccatgatgacaaaatgttgaatgattcttccgcaacagacctctgattgttcccctcggtttttgctttcattgcaatagttagtcccgcggtaataacacttcttgcaatgcggaaaccatgctttaccctctcatccctgattccctctatcggagcagcgacaaacggtggattgaagagaaaactatccaaaagagcgcccttcttaaccatgtttctgccagtaaggatggccgtacctgcacccagtgaatgaccagctagccaaattggggatccagggaaagctgaggctacattttgaacagcttgcatcgcaattgcaaatcttgaggtcttatggagaccattttgaacgagctggaggtcaagggaaagatctctagaaatagtttccttctcagttatggtgcctctgaaggcaatgataaatctaggggcatcctgggcagaagcttctttacttgaaggagggttgaattcaaatattgcaccgaatatagacaagtcaacatcatcgacaagcttgcggatcatctcaaaatggaagaactcccaccaaggaggtgctgcggcgtcaacagattgacggtttagttgccggtctctctccaaaacatacacagcctgaactaaacatgcagccacagatctcctattattctcgcagttccaattaacaggattaagatatgtcggccctgagataccaaagatgtctctctccacagccatcaggctatacaaagctgctcttcagttgattggctttgatagtgaagaaaaacatagcacttgacgaacagcgatgaggacgggaccggagtgggaggggacgagagccgaaactgagggcgggggcgcagacaagatctcacggcaacagcgtctctcccccaaaccacctccttgaatgcctcgtcccccccccccccgctaatcggttggtgggacttctacacgaattccccttcaacttgccctgttga

SEQ ID NO: 5044 - DNA, 1121 bp, Triticum aestivum
  Clone ID: TRIAE-23APR03-CLUSTER527_112
cctttaaaccccacaaaaccctagacttcgcagcgagcagccgtcgtcggatccccagagaaacaccaaagcccgagccatgtcgtcggcgtccctcggcgccaggctcctccgccgcgccgcctcttcgtcgcggctctccaccctatcccgacgctgcgcccactcctccgcgatgtcccgcgcgcccgtttcgcttgcccgtttccaccccgccgccgccgccgccgccgcctccccttcagggaccactgcccgccgcttcctctcgtcgcagtccccggcgtcttcctccaagatctccccggacgagaacctgaggcgggtcatcgactctgagatcgagtgcgtcgtcgaatcggaggagggctccgcgcagcaaattgatccaccagaagacttcccctttgagataattgataaccctggtgatcagtccatcgttctcaaaagagagcttgcaggagagactattaaagctactgtatacacaaattttgatactgaggaagatttgaacaatgaggattctgatgctgagaatgatgatgactcatttaagccagcacttcagatgggttgtcactgttgagaaaccaggaaacgcagtcctggaatttgagtgcaactttaatgatgatgaactggcaattgaaaatatgaggttgctgaatcgcgatgccatctctactgagaatgcatatgaggggccacaattctctgatctggacgagagcttgcagaagtcctttcacaggtatcttgaggtgagggggatcaagcactcgctgcatgactggctgcacgagtacatgatgagcaaggatgagaaggagtacgtggtttggttgaagaacatgagagagttcatcgagaaatgagtgccactgcccgtcattctcttttaatagaaagaacatgcctggtgctctatgtcaaacctgtctgatcataaatgtgcattgctttctggcacgccaagtcttggtgaacgccgagctgaatttacattttgctggacctgttagctgtagaagagcttcggcatcttatcttttgatgtttaacctgtgatccattcaggtatgatccgttaatgtattttcagctgcgagtatatt

SEQ ID NO: 5045 - DNA, 2023 bp, Triticum aestivum
  unsure (1)..(2023): unsure at all n locations
  Clone ID: TRIAE-23APR03-CLUSTER527_113
atcgaaataccgcagaaagccgttccctgaaaaaaaaacagtgcccacctcgcctcctcccacctccacctccgcgcagatcccatctaaccatggcggccccctcccgcacctcctgggccgacgttgccgacgctgaaccggcccctcctgctcccgttccagcggcggcgcctgccacatccaacggccccgcgcgtgccgaccgctcctcttacgtccctccccacctccgcaatcgctcctccaacgcgcctccggtgtcctccgctccacccccgcgcgccgcgcccggcctcctcggccgccccaccggcggcgtcggtgggaggttcgggggaggcggggccccacctcgtaggtgggaccgggagcccaaccctttcggggacgaggaggaggtgccggcggagcccgtgcctttcgacgagcaccagaacacggggatcaactttgaagcgtacgaggacatccccgtcgagaccagcggccgggaggttccgcccgccgtgggcacgttcgcggagatcgacctcggcgccgcgctgaacgacaacattcgccggtgcaagtacgtgcggcccacgcccgtgcagcgccatgccatcccgatctcgctggctgggcgagatctcatggcttgcgcgcagactggatcggggaaaacggccgccttctgcttccccatcatcagcggcatcatgcggggcccgcccatgcagcggtcacagctggggcgggagtaggaccgcctgccctcttgccctcatcttgtcgcccacaagagagctgtcaatgcagattcatgaagaggcgagaaaattttcatatcagactggtgtcagggtagtggttgcatatggcggggcccctattacccagcagttgagagatcttgagaggggtgttgacattcttgtggctactcctggtcgtttggttgatttactggaaagggcaagagtatccttacagtcaattagataccttgcccttgatgaggcggatagaatgctggatatggggtttgagccgcaagttaggagaattgttgagcaaatggacatgcctccacgaggtgtaaggcagacgttattgtccagcgctacattcccgggagaaatacagagaatggcatcntgactttctggagaactacatattcctggctgttggaagggtcggatcaagtactgagttgattgcccagagagttgagtttgtacaggaggcagataaaagaagtcacttgatggatctgctccatgcgcaaagagacagttcagaacaagggaagcaagctctcacacttgtctttgtggagaccaaaaggggtgctgactcactggagaactggttgtgtacgaatggatttccagcgacttctattcatggtgatagaaaccagcaggaaagagaatatgctttgagatccttcaagagtggtcaaactccaattctagttgcaactgatgtggcagcccggggcctcgacattcctcatgttgctcatgttgtgaactttgatctccccaatgatattgatgactacgtacacaggattggtcgtacagggagggcaggaaaaagtggaattgcgactgctttctttaatgacaacaactcttcgatggcaaagtctctagctgacctaatgcaagaatctaatcaggaggtacctgcatggcttactcgctatgcagctcgcccaagaccctgtccaaggccagggaccccaagtaccccaggatcagcacccctggcaggaacaagttagaccagtaccagatactcaagtacccgcttaccactgagtctgcgatgaagaagattgaagacaacaacacccttgtcttcatcgtcgacctgaaggcagacaaaaaaaaagatcaaggctgccgtgaaaaagatgtacgacatccaggccaagaaggttaacaccctgatcaggcctgatggcaagaagaaggcgtacgtgaagctgacaccagactatgatgctcttgacgtggcaacaagatcg

SEQ ID NO: 5046 - DNA, 1197 bp, Triticum aestivum
  Clone ID: TRIAE-23APR03-CLUSTER527_133
attcggcctccagccctttaaaccccacaaaaccctagacttcgcagcgagcagccgtcgtccgatccccacagaaacaccaaagcccgagccatgtcgtcggcgtccctcgccgccaggctcctccgccgcgccgcctcttcgtcgcgggcctccaccctatcccgacgctgcgcccactcctccgcgacgtcccgcgcgcccgtttcgcttgcccgtttccaccccgccgccgcctccccttcagggaccactgcccgccgcttcctgtcgtcgcagtccccggcgtcttcctccaagatctccccggacgagaacctgaggcgggtcatcgactccgagatcgagtgcgtcgtcgaatcggaggagggctccgcgcagcaaattgatccaccagaagacttcccctttgagataattgataaccctggtgatcagtccatcgttctcaaaagagagcttgcaggagagactattaaagctactgtctacacaaattttgatactgaggaagatttgaacaatgaggactctggtgctgagaatgatgatgactcatttaagccagcacttcagatggttgtcactgttgagaaaccaggaggctcaatcctggaatttgagtgcaactttaatgatgatgaactggcaattgaaaatatgaggttgctgaatcgcgatgccaagtttactgagaatgcatatgaggggccacaattctctgatctggacgagagcttgcagaagtcctttcacaggtatcttgaggtgagggggatcaagcactcgctgcatgactggctgcacgagtacatgatgagcaaggatgagaaggagtacgtggtttggttgaagaacatgagagagttcatcgagaaatgagtgccactgcccgtcattctcttttaatagaaagaacatgcctggtgctctatgtcaaacctgtctgatcataattgtgccttgctttctggcacaccaagtctcggtggacgctgagctggatttatattttgctggacctgtttagctgtagaaaagtttcggcatcttatctttcgatgtttaacctgtgatccgttcagatatgatcagttcatgtattttcagccgtgagtatattgctacgtacgttctagaaccatgaggggatgatttgagatataattgtctgtggacgaaaaaaaaaaaaaaaaa

SEQ ID NO: 5047 - DNA, 2403 bp, Triticum aestivum
  Clone ID: TRIAE-23APR03-CLUSTER527_145
cgacccacgcgtccgcaccactccgactccaaattccttctcccaccccaactccctccctgaagactagccggtgctcgtgccgtgcccttcactgtttccggttggactttggaccctgcgtatccagatctacaagtttccctccctccatatattcagcttccgagcagagtatcccagccccaacccgccgttctctcgcgcgccgatcggaccggaggctcgccgttccaccatggcagaggccggcgaccccaccctggagcaggggctcctcgctgacccggaggaatcgaaccaacttacatacactggagatggatccgtcgacttttctggaaaccctgtcgtgaaggagaaaactggtagatggaaggcatgcccgttcatcttaggtaatgaatgctgcgagcggttggcctattatggcatctcgacaaaccttgtgacttatttgacgaaaaaactgcatgatggtaactcctctgctgctagaaacgtgactacatggcagggaacttgctatttgactccccttattggagctattctggctgatgcctactgggggaggtattggacgatcgcaacgttctccacaatatacttcattgggatgtcagtactgactctttcagcatcagttcctatgctcatgcctccatcttgtgaaggagtcatttgcccagaagccagtcctttgcagtataccgtattttttcttggtctttacctgattgcgctcggtactggtggaatcaagccatgtgtctcatcttttggagcggatcaatttgatgacacagatccggctgagcgaatccagaagggatctttcttcaattggttctatttttcaataaacattggtgctcttatatcaagcagttttctggtttgggtgcaagacaatttaggatggggattaggctttggcattccgacagttttcatgggtcttgccatcataagcttcttcgccggcacgtcactttatagattccaaaagccaggtggcagtcctatcacacgagtatgccaggtagttgctgccactttgcgcaagtggaatgcacatgttccagaggacagctctctcttgtatgagctaccagatggggtttcagcaatcgaagggagtcggcaattggagcacactgatgaactcagatgtctggacagggcagctacaattactgatcttgatgtgaaagaagatagcttcaacaacccatggcgggtatgcactgtcacccaggtggaagaactgaagatattggttaggatgttccctgtctgggcaacgacaattgtcttctcggctgtctacgctcagatgtccaccatgtttgtggaacaagggatggtgcttgatccaacaatcggctcattcaagatccctccagcatctctatccacctttgacgtggttagtgtcattatatgggttcctatctacgacagcatcctggtcccgatagccaggaggttcaccggcaaggagaggggcttttcagagctgcagcggatgggcatcggcctggtaatctccatcctagcaatgtcagcagccgcggtcctcgagataaagaggctggccatcgccagggaggcgcacctggtggaccagaacgtcccggttccgctgagcatcctgtggcaaatccctcagtacttcctggtcggcgcctcggaggtgttcaccttcatcggggcgcccgagttcttctacgaccagtcgccggacgccatgaggagcctctgcagcgcgctgcagctcatcaccaccgcgctcgggaactacctcagcgccttcatcctcacgatggtcgcctacttcacgaccaggggagggagacccgggtggatccccgacaacctgaacgaggggcgtctcgattacttcttctggctgctcgcggggctcagctttctcaactttttggtgtacgtgctgtgcgccaacaggttcaagagcaagaaagcggcttgagctttgatggtcagaaaagttcgatggcgtcaaggcagcttgcctgaaggtctaaaagacttgggtggtgtcatcgtgtacatgtatacttcgaaatctgtatatacgtttctcagtacatgatccctctgtttaactacgtgtttacttttttaacaagctgtaattctctctattagaagaggatccagtgcgggtcatggatctcctttcatgtacatatattttattcacttgaagttggcaagttcagcccatcacggagctgcagtctcctgtttagcattcagtttttatgtyttcttattaagatgtgtactgatatgttaatctttcgactcatgcataacgttggatcagcatgcatgttggagcaaaaaaaaaaaaaaaaaaaaactcgagactag

SEQ ID NO: 5048 - DNA, 1447 bp, Triticum aestivum
  Clone ID: TRIAE-23APR03-CLUSTER527_154
ccctctggaagaagggggcgtcggggggcccccccacatataaggggggaggtgcgccccccctttgggccgccccgcgggtttttcccttttttttttcggcgttatattttggggggaaaatgggggggaataacaattttccccccgggaaccggtttttcccagttttccccaagggcgcatttaaccccctttaagggacaaaaagtgggggtcccccccgggggggccgcttttaaatttagggttccccgggtgcggaattccccgggcccattcttaaccttcttatggaaaaataaacccgaacgaaatcgccaactaacccaaaagccgcaagcgagagagaggaaggaagaagagagagaaaaaaaatggcatcgtcggcccgcgccgccgcctccgccgcgagatcggccctccgccgggcgcccctcgccgcctcgtcctcctcttccgccgccggagtcctccgcaggtcggcggcggcgggtctggagacgcggatgcccctccacagcgcggcgtcggcggcgcgcctcggatcctgcatcacccgagatggcaacaatgctttctcatggaactccaggcgcatgttcagttcaaatgagaaacatctgcctgcaatatctgacccgaaaattgagactgcatttaaggatttgatggctgctagctggaatgagcttccaggttctcttgtggaggaagcaaagaaagcagtatctatggctactgatgataaggctggtcaagaagctttggaaaatgtatttcgtgcagctgaagcatgtgaagagtttagtggagttttagttaccctaagaatggctcttgatgatctttgtggtctaacgggcgagaatgtgggccccttgcctggttacttagaagaagctgtgaaatccgcctatagccgatacatgacatatctggaatcttttggtcctgaagagcactatctacggaaaaaggtggagagcgagttggggacaaaaatgattcacctgaaaatgagatgcagtggcatagggtctgagtggggaaagatcaccctgatcggcacctcaggtatctcagggtcctacgttgagatgagggcatgatggaactctctcgtatcagaaccgtggcgtaacaccggtggtctgacgggaagctgcgtatcaatatcagaaccaggtgttctgtttccttttatctttcctctgtagctaccatgccaataacaaggcgatcgtcaaaacagatgtgcactcacttaaagtagctctttgcactccagattttcctgctgtaataagaacatgtgcgttgattttgttttgatgctcaaaccatgatggatggtctttattggtctttctgggtctctctcgcatgttgagacacaaaatacttgaataggatctgtctgttttgtacaaaaaaaaaaaaaaaa

SEQ ID NO: 5049 - DNA, 1196 bp, Triticum aestivum
  Clone ID: TRIAE-23APR03-CLUSTER527_155
tatgggatccccccggggctccaaggattcgccacgggcccaattaccttagaccctcctattcgaaaaacggacgggctttacccttccccctaaaaaaacaattgttcacgatcgtccccatctcgctgcaatctccaccgggtccagacaccggcgatggccaccgccctccgctcctcttccgctgccgccgtgcaccgcttcctccgcatctcccggtccaccttgtcaacgctcccgtacgcctcacgtcctgctacggtgccgcctttctctccctcgatcaccgccatctcaggtggctacaatgctttctcatggaacttcaggcgcttgctcagttcaaatgaaaaacatatgcctgcaatgtctgacccacaaattgaatctgctcttaaggatttgatggctgcgagctggagtgaacttccacattctcttgtagaggaagcaaagaaaacagtatccaaatccactgatgatgcagcaggtcaagaggctttgaaaaatgtatttcgtgcagctgaggcatgtgaagaatttggtggagttttagttaccctaagaatggccctggatgatctttgtggtctaacaggcgagaacgtgggccctttgcctggttatgtagaagatgctgttaagtccacatataataggtacatgacatatctggaatcctttgggcctgatgaacattttctacgaaagaaggtggaaaatgagttgggtaccaaaatgattcaccttaaaatgagatgcagtggcataggatccgagtggggaaagatcaccctgataggtacctcagggatctctgggtcctatgttgagctaagggcgtgagggaagtccgcaaattagagcagtggcagaacatggatggattgaagcaaagctgcttcatcagaatgaggtgttgaatatcgtttccatttcctttgtagctagcgtgccaataacgatgaaatcatcacacgtacatgtcaacctgcattaaatctttgtgcgccaagctgctgtaataatagcaagtccctggttcatgttaattttgtttcactcctggatgctttatggtgcgtgtgaaacatgatgcttctcttcatttatacttcatggatagaaaatgtgattttttttatgtattgaatttgttaaaaagtactccctccatcccataatgtaagacc

SEQ ID NO: 5050 - DNA, 2280 bp, Triticum aestivum
  Clone ID: TRIAE-23APR03-CLUSTER527_156
gagacacccccctccaaaactttccccaatccaatctcccaatccaatcttccctctcctctcctggaaccctaagcctcctcaggtacatgacccacccttcctcgtcctcctcctccgccccggcggccgcgccggatgacccgacctcccttgccccgggcttccgcttccacccaacagacgaggagctcgtctcctactacctcaagcgcaaggtgctcggtcgcccgctcaaggtcgacgccatcgctgaggtagacctctacaaggtcgagccatgggacctcccggcaaggtcgcgcctccgcagccgcgattcccagtggtacttcttcagccgcctcgaccgcaagcacgccaaccgcgcgcgcaccaaccgcgccactgcaggaggctactggaagaccaccggcaaggacagggaggtccgccatggagctagggttgtcgggatgaagaagacgctcgtcttccacgctggccgcgccgcccaagggcgagcgcaccaactgggtcatgcacgagtatcgccttgagggcgatggcgcagccgggatcccacaggattcatttgtagtgtgccgaatcttccagaaggctgggcctggtcctcaaaacggggcacagtatggagctcccttcgtcgaggaggagtgggaggcggatgaggatgatgattttggtcctatgccagtgcagagggacgtttttggtgagcatgaggctcctggtgctatggagaaaggatatcttcagatgaatgatctcattcaggacttggctggtcaaaatgagaatggcagtgttgttttgccagtttctgacacttcaaacaccagcagccattctgaagacgtagaaggaaattcaggggacattttgaatgacccaagtcttggttctaattttcttcagtatattcatcctggagaacaaaatagcccaatgcttaatgaaaatatgttatctaatgccaatgttggagattttcttaatagttctagccccaatgatgaattcctagagctgaaggatttggagttacctctaggcaatgattccactatctggccttctgatggttgggcctggaaaacagctttccccttggatgctgtaaacaggtccaacaatgaggttcctctgatcactggtgatcagcctttccagccagatgagttggcccagttgttgcagacactacaagatgactcctcccagttgggctcaactatgaccgatctcccacactcttctattacaaattcagtcaagccagaagatgattctcttgtgtattttgatgcaccctttgataactcaatgttcagtgatggatttagacagacgaatgaattccttggctccccagcaaccattctatctggtatcgagacactggatgatggtattccatactatgatgcaatggacgataacttatttaatgatatgatgtgctctgtacagcagtcggctgggagcagctcccatgtctttaatgggccagttcttactcaagaggtcaacaatcccagctatacatatagtccaactcaaaaggttgtagaacctaattttgtagttggggccccgtcgtccgctaggttatctgaagctggtggccagttaaattgtgttgttttaccagattctcaggctaagaatggctccatgggaaagcgttttgtaaagatgctggattcaatctcggctccccctgcttttgcagcagagttcccaggcaaatccttgtctggtgtgcaccctaacaccatcagcgtgtctaccgaagtaatcagcataggaagcttaactgttgcttctcgacaaggcaagtggtcgttccagaaggatgaagacatggagcttgtcttctccacaggtttccagcctgataaccgcatacactgtggtggctgcaacacagtgactgcggtgctgcgcggcggcttctgtctctttttcctgtcagcaataatgctcctggtgagctacgaggtgggcctgtgcatctacggcaagtaacctggcctgcccgcccggtattgggtataaaaatattattatgacgttaggtaattgtatgtgtgttgaggcgagaaccggggacctcctgatggcctaaatgtatggcattgcatgacatgacctcgtgcgtctgttaaattcgacagcattagcggtgccgttttgcagcccgcgagttagtgctgtatcaatgaattcctccagtgatattagtattttagaactgcttaaaaaaaaaaaaaaaaa

SEQ ID NO: 5051 - DNA, 1451 bp, Triticum aestivum
  unsure (1)..(1451): unsure at all n locations
  Clone ID: TRIAE-23APR03-CLUSTER527_163
ttttttttttaaacaaacggccccagctttattatcatgtgtggagcaacttctttggaggaacacaattacaccagcaaaccaacaatcggtacagaacaggtgatcccagtcgcaggaacaagctaggataagttcatgcctccattggcaacacgcgggtttagcagaaaatccatacctaaaggggcaaatccatgcagtctactgaagagttcctncccacagtggggctaaaccaccatacatctcttaagcttacagtttgacgatacataacaagtgactgacactagtaaggcgcccctgctcccagccacgacaggagccgtcctagatttcgccgtcccagagctcatcgtgggtcttgtaaacgctgtctttgttgacgatgaagttgcccatgagaagcctggcctgcttaatctcagagaactttgcaagcaagtcttctggaatagaccagtcataaacagcaaggttctgctttatccgttcttcactcacgctctttggcagtacactgtgacccatctgaatgttccagcgcaacgccacttgtgcaggagttttgccaagcttctctgcaattgagaggacgacgggttctttgaggacattaccattcatccatgttgaaccaggcgaacctagtggtgagtacgcagagaggtgaacaccggccgactgacaaaaggtatggagtttagattgctgccaaccaggatggcactccacctggtcaacagccggaggtatgcgagctacagcaagcaagtcacccaatttcttcgacgcgaagttactcacaccaattgcacgagctttgccagcatcatgtaacttctccattgctccccatgtagctgggatgtcaggtggtaagaagttttcagggttgccaatgcttgttcccttcttgattttaaatggccagtggataaggtaaagatccaagtagtcaagctgcaagtcatcgagagaatccccaagtgcctcaggcacatcttctggggcatgatgaccacaccatagcttagaggtgataaacagatcctcacgcttgactacactctcttcaaacagcttcttcagagccaaacccacctccttctcgttgttgtaggccctggcgcagtcgatgtgccggtaccccgccttgacggcggcgtagacggcctcgccgacgatgccggggtcggactgccaggtgccgagccccacggaggggatcttagcgccggtgttgagcacgaagtgcgtcgccatccccgctcccactcactcgcacgcacacggaggcagtcacttgcagtctctcgcagaggacgctcgaaggaaggggacggggacggggacggcgagcaatgggtggtgcgcggcgagtttatactcactcactttgtaggcagcggagcgggtgcgggctgtctcggcacggccacagctgt

SEQ ID NO: 5052 - DNA, 1512 bp, Triticum aestivum
  Clone ID: TRIAE-23APR03-CLUSTER528_118
acccgcttcccttgtcgcccccctcccctcccacgttccctcgcccccccgctccacaaaccaacccaagaacagccacccggcgacgcgacgcaatccgatcgacgcaagatgagggagatcctgcacatccagggcgggcaatgcggcaaccagatcggcgccaagttctgggaggtgatctgcggggagcacggtgtcgaccccaccggccagtacaccggcagcgcccccgagcagctcgagcgcatggacgtctacttcaacgaggccggcggcaaccgctacgtgccccgcgccgtcctcatggacctcgagcccggcaccatggactcgctccgctccggccccatcggcgccatcttccgcccggacaacttcgtctacggccagtccggcgccggcaacaactgggccaaggggcactacaccgagggggccgagctcatcgactccgtcctcgacgtcgtgcgcaaggaggccgagaactccgactgcctccaaggtttccaagtatgccactctcttggcggaggcactggttccgggatggacacgctgctcatctccaagatccgggaggagtaccctgaccgcatgatgctcaccttctccgtgttcccgtcgcccaaggtgtccgacacggtggtggagccctacaacgcgacgctgtcggtgcaccagctcgtcgagaacgccgacgagtgcatggtcctcgacaacgaggccctctacgacatttgcttccgcaccctcaagctcaccaacccttccttcggtgacctgaaccacctcatctcggcgacgatgagcggcgtcacgtgctgcctgcggtttccagggcagctcaactcggacctccggaagctggcagtgaacctgatcccgttccccaggttgcacttcttcatggtcgggtttgcgccgctcacgtccaggggatcgcagcagtaccgcgcgctcacggtgccggagctgacgcagcagatgtgggacgccaagaacatgatgtgcgcggccgacccgcgccacggccgctacctcacggcgtccgccatgttcagaggcaagatgagcaccaaggaggtggacgagcagatgatgaacgtgcagaacaagaactcctcctacttcgtcgagtggatccccaacaacgtcaagtccagcgtctgcgacatcccgcccgtggggctcgccatgtcctccaccttcgtcggcaactccacctccatccaggagatgttccgcagggtcagcgaacagttcaccgccatgttccgccgcaaggccttcctccactggtacaccagcgagggcatggacgagatggagttcaccgaggccgagagcaacatgaacgacctcgtcgcagagtaccagcagtaccaggacgccaccgccgaggaggactacgaggaggaggaggagccagccgccgaccaaccatgatcatcccttctcttcgttcgtctccctttccatgcgtgcgtacgtcggtttgattggtgcagg

SEQ ID NO: 5053 - DNA, 1321 bp, Triticum aestivum
  Clone ID: TRIAE-23APR03-CLUSTER528_126
gaatcgctcctcccttcacgccgtcacgccgccactcacctgccgccgacagcccgccactcgcctcgacggccgtcgcccgtcgcgggtccccgaccgtactccccgccgccccctctccccctcctacatcgtcgccgccgtttcctcagttgctccccccgaccccccacacccccaaagccccctctgtactaccccgcccctcctctccattccttcgggtagcccaacgccgacccatgggtttcgcgcagctcgtcatcggccccgccggcagcggcaagtcgacctactgctctggtctgtatcaacattgcgagacggtgggcaggaggattcatatggtcaacctggatccagctgcagagcacttcagctatcccgtatctactgacattagagagctcatatcactggatgatgtcatggaggagcttgggatgggaccaaatggcggcctcatctattgcatggagcaccttgaagacaatttggatgattggttggatgaacaattggagaactacttggatgatgactatcttgtgtttgattgtccaggccagattgaactcttcactcatgttccagttctgcgtaactttgttgagtatctgaaacggaaaaatttcactgtttgcgctgtgtaccttttggattcgcagtttgtcagtgatgtcacaaaatacattagcggttgcatggcttctctttctgctatgattcaacttgagcttcctcatatcaacatcctttcaaagatggacctggtttccaataaaaaagatgtagaagattatctgaaccccgaggcacaggttcttctgtcacagctgaatcggcagatggcacctcggtttcacaagttaaacaaggctttagctgaactggttgatgattacaacatggtgaatttcataccacttgatttgaggaaggagagcagcattcagtatgtgctgtcaaacatcgacaactgcatccagtacggggaagacgccgatgtgaaggttagggacttcattcccgaggaggatggttaaccattttgatcgagcagaagcaacaaattagtcagtatcatgtagaatgggtccatgggaggaggaattcaccgcagaagcgctatttatctgtttcaattgttagtcgaaaaaacaaggcagaatgcatctgtgaagagtgtgtgggtcaccttatgcgtgtggttgactagcaagtgcttgtgtaaacaaatcatcctcctcttccagagttcttgaatcgcatcagacatgagcgtaatacgtaccaacaaaaaaaaagaaaaagaattcga

SEQ ID NO: 5054 - DNA, 864 bp, Triticum aestivum
  Clone ID: TRIAE-23APR03-CLUSTER528_135
ggaaaagtggacagcactccgccgagcgccgggcgagatggggttcatcggcgaccaggtggagtcgatccgctcgatgcaggtccggccaggtgctcgcgcagatcatcagcctcggtatgattgttacgtcggcattgatcatatggaaggggttgatagttgcgactgggagtgagtccccggtggtcgtggttctttctggtagcatggagcctggattcaaaaggggtgatatcctgtttttgcgcatgagcaaagaacccatccgtactggcgaaatagttgtttttaatgttgatggccgtgaaattccaattgttcaccgtgtgattaaggttcatgaacgccaggaaagtgctgaagttgacatcctcacaaaaggtgacaacaattttgaggatgaccgactgctgtacgcacacggtgagctgtggcttcagcagcatcacatcatggggcgggctgtaggctatcttccatacgtcgggtgggttaccattgtgatgactgagaagccaatcatcaagtaccttctgattggcgcgctgggcctgctggtgataatgtcgaaagactgaagattctaccttgtcacagggtcgtaatttggtcttgtagtagcgcagaagtaaccgagagctgaagatgttgcatcgtgtgttgaatggaagttttcatgtgtctgaatatgtatctggcccgccgaacaaggtgttacgcaacactcatcttctgatagtcctaatcctaactaatgatgtcaatctggttattgcattgaataaaagtaagctttagttgcatttcggaaaataaattctctatacgactcagaagcgaaaaaaaaaaaaaaaaaaaaaa

SEQ ID NO: 5055 - DNA, 1806 bp, Triticum aestivum
  Clone ID: TRIAE-23APR03-CLUSTER528_166
actaacgccatccccctcttgctccaattccccaaccccccaccccccaccggcgccgccgcaccgcacctcgccgccgtccgtcctccgaagggaagggaagggaagggaaggaaaggggagatgagggagatcctgcacatccagggcgggcagtgcgggaaccagatcggggccaagttctgggaggtggtgtgcgcggagcacgggatcgaccccaccggccgctacgccggcgacaccgacctgcagctcgagcgccgtcaacgtctactacaacgaggcctcctgcggccgcttcgtgccccgcgccgtgctcatggacctcgagcccggcaccatggactccgtccgctccggcccctacggcggcatcttccgccccgacaacttcgtcttcggccagtccggcgccggcaacaactgggccaagggccactacaccgagggcgccgagctcatcgactccgtcctcgacgtcgtccgcaaggaggccgagaactgcgactgcctccaaggtttccaggtgtgccactcgctgggaggaggcactggctccggaatgggtaccctgctcatctccaagatcagggaggagtaccctgaccggatgatgatgacattctcggtgttcccatcgcccaaggtgtctgatactgttgtggagccatacaatgctaccctctctgtgcaccagcttgttgagaatgcggatgagtgcatggttcttgataacgaggctctctacgacatctgcttccggacgctcaagcttaccactcccaccttcggtggatctgaaccaccttatctctgcaaccatgagtggtgttacctgctgtctccgcttccctggtcagctgaattcagacctccggaagcttgctgtgaaacctgatcccattcccacgtctgcactttttcatggttggattcgcaccgctaacctcgcggggttcacagatgtaccgtgccctcactgtgcccgagctcacccagcagatgtgggactcaaagaacatgatgtgcgccgctgacccaaggcacggccgctacctcaccgcctcagccatgttccgtgggaagatgagcaccaaggaggtggacgagcagatgctgaacgtgcagaacaagaactcatcatacttcgttgagtggatccccaacaacgtcaagtcgagtgtctgcgacatcccgcccactggcctgaagatgtcttccacatttgtcggcaactccacatcgatccaggagatgttccggcgcgtcagcgagcagttcaccgccatgttcaggaggaaggccttcttgcactggtacacgggcgagggcatggacgagatggagttcaccgaggccgagagcaacatgaacgacctggtggccgagtaccagcagtaccaggacgcgacggtccgaggaggaagaggactatgaggatgagcaggaggacgaggaggccgcctaagccatatctcctcccattcttcctatggatatgccttatatcgctcgtgctcgtggtgctgttagctgatgatagctagatgctattttttttttccattctgaatgtccgtcgtgttgcctagacagacttattttttcgttatgtggacctgtggtcgtcgtgtatgctcatgtcgtgatgagcatttggtgtaaggtttgactgtgactgcttggtgtgttattcagtagtgctactagattgaaaacctctattctgtgtccagtatttttgggtcaagttgccaaatatgcttctgtcaaaaaaaaaaaaaaaaaaaaactcgagactagttc

SEQ ID NO: 5056 - DNA, 1689 bp, Triticum aestivum
  Clone ID: TRIAE-23APR03-CLUSTER528_168
actccccctcccccttcctcctcccctccaaaacctcgccggaaccctacccctcccccgtcgccgccatgagggaaatcctccacatccagggcggccagtgcggcaaccagatcggggccaagttctgggaggtgatctgcgacgagcacggcatcgaccagaccggcaagtacgccggcgactccgacctccagctcgagcgcatcaacgtctactacaacgaggccagcggcggtcgcttcgtgccccgcgccgtcctcatggacctcgagccggggaccatggactccctccgctcggggccctacgggcagatcttccgccccgacaacttcgtcttcggccagtccggagccgggaaccaactgggccaaggggcactacacggagggggccgagctcatcgactccgtcctcgacgtcgtccgcaaggaggccgagaactgtgactgcctgcaaggatttcaagtttgccactctctgggaggaggaactggttctggtatgggtacactgctcatctccaagatcagggaggagtacccagataggatgatgttgacattctcagtcttcccatcaccgaaggtgtctgacactgtggtggaaccttacaatgctacgctctctgtacaccaacttgttgagaatgctgatgagtgcatggtgcttgacaatgaggctctctacgacatctgcttccgcactctgaagcttgctacacccacatttggtgatctgaaccatcttatatctgcaacaatgagcggtgtcacttgctgcctccgcttccccggtcagctgaactccgacctccggaaactcgcagtcaacttgatcccgttccctcgcctccatttcttcatggttggctttgcaccactgacctcaaggggttctcagcagtaccgtgccctcactgttcctgagttgacccagcagatgtgggactcaaagaacatgatgtgtgctgctgacccgcggcacggccgctacctcacagcctctgccatgttccgtgggaagatgagcaccaaggaggttgacgagcagatgctgaacgtccagaacaagaactcatcatactttgtggagtggatacccaacaatgtgaagtcaagcgtgtgtgacatccctcccacaggcctgtcaatgtcgtccacctttgtcggcaactccacctccatccaggagatgttccgccgtgtgagcgagcagttcactgccatgttcaggaggaaggctttcttgcactggtacaccggggagggcatggatgagatggagttcaccgaggcggagagcaacatgaacgatctggtcgctgagtaccagcagtaccaggatgccacagccgacgaggaggaagagtatgacgaggaggaggaagaggaggctgcctaagccacctgacctcatatggtcatcctgctgtctgttagatatgccttgtgtttactattgctgtcgatttggtggtgcttgtggtgcggatagatctttaggtggttggtaacacttatagatgcttttgctgcttcggcgaatcgatattttttgaactgttttttttttgtatgttgatggtggttttatgcgaactgtgatattagcgtaactgtgggcttgatacccgtaaatttgccaactatattttgtgtctaaaaaaaaaaaaaaaaaaaaaaa

SEQ ID NO: 5057 - DNA, 1642 bp, Triticum aestivum
  unsure (1)..(1642): unsure at all n locations
  Clone ID: TRIAE-23APR03-CLUSTER528_170
aaatcccgatttctcatcccacccccatctgcttcgactccccccggagccgaggtcgtcgccttcccactccgcggctcgccccaccagccccaatggcgaccgcctgcccgcccctctcgctgccgtccacttccctcctccgcaagacaacccgcgccggccccgcccgccagccgctcccctccgtccgctgcagcgccgtcggagaggctgtcgcggaggcggctgtggccgggacggcggaggaaccgctgctggtgagcgcaatcaaggggaagaaggtggagaggccgcctgtctggctcatgaggcaggccgggaggtacatgaagagctatcaaaatctctgcgagaaatatcctttgttccgtgaaagatcagaaaatgttgaccttgttgttgagatctctctgcagccatggaaggttttcaagcctgatggagttatcttgttctcagatatccttactccacttcctgggatgaatataccttttgacattgtgaaaggaaaaggtccagtgatatatgatcccnttaagaacagcagcggctgtgaacgaagtcagggaatttcgttccagaggagtgggtcccttatgtaggacaggctttaaatttgctgcgaggagaggttaagaatgaagctgctgtgcttggttttgttggagccccctttaccttggcatcttattgcgtggagggaggttcatccaagaatttctcgaagattaagagaatggccttcgcagaaccagcgattctacataatttgctacagaagtttacaacttccatggctagctacattaaataccaagctgacaatggcgcccaggctgtccaatttttgactcgtgggctacagaactcagtccagttgattttgaggaattcagcttgccatatcttaagcaaatcgtggattctgttaaggaaacacatcctgacttacctctgatattatatgcaagcggatctggtggattgctggaaaggcttccgttgacaggtgttgatgttgttagtttggactggacggttgatatggccgagggtaggaaacgattgggatccaacatagcagttcaaggaaatgtggaccctggtgttctttttggatccaaagagttcataaccaagcggatttacgacaccgtgcagaaggctggtagtgaaggacatgtgttgaaccttggtcatggcattaaggtggggactcccgaggaaaatgttgcccatttctttgaggtcgcaaaggggatcagatactgaaagaccttggttgttgaatttgttcctttctcccagccggcagaaattgtagattccactgcttgaggatagatgcaggaagccacatgtctagcataggatacctgacgaacacatccttttgtgattgcttatgtgttctgcatttcggtttccatttcattgtaatactgtaagcacatactaattgggggtgtaagaaagtgtctacttgtttatatcatgtatactacttgaatcttatccacctagtcgagaatatcgatttatatttgtatgaaaataatactgtggtcaaaatatgtaagctgtaagttggatttatttttctgataccgttcttaagcctaaaaaaaaaaaaaaa

SEQ ID NO: 5058 - DNA, 1786 bp, Triticum aestivum
  Clone ID: TRIAE-23APR03-CLUSTER528_176
actaacgccatcccccaattccccaccccaccaccggcgccgccgcaccgcacctcgccgccgttcgcccgcccgtcctccgaaacgaagggaagatgagggagatcctgcacatccagggcgggcagtgcgggaaccagatcggggccaagttctgggaggtggtgtgcgcggagcacgggatcgaccccaccggccgctacgccggcgacaccgacctccagctcgagcgcgtcaacgtctactacaacgaggcctcctgcggccgcttcgtgccccgcgccgtcctcatggacctcgagccggggaccatggactccgtccgctccggcccctacggcggcatcttccgccccgacaacttcgtcttcggccagtccggcgccggcaacaactgggccaagggccactacaccgagggcgccgagctcatcgactccgtcctcgacgtcgtccgcaaggaggccgagaactgcgactgcctccaaggtttccaggtgtgccactcgctgggcggcggcaccggctccggcatgggcacgctgctcatctccaagatccgggaggagtacccggaccgcatgatgctcaccttctccgtcttcccctcgcccaaggtctccgacaccgtcgtcgagccctacaacgccaccctctccgtgcaccagctcgtcgagaacgccgacgagtgcatggtgctcgacaacgaggcgctctacgacatctgcttccgcaccctcaagctcaccaccccgagcttcggcgacctgaaccacctcatctcggccaccatgagcggggtcacctgctgcctgcgcttcccggggcagctcaactcggacctgcgcaagctggccgtgaacctcatcccgttcccgcggctgcacttcttcatggtgggcttcgcgccgctcacctcggcgcggcagccagcagtaccgcgcgctcaccgtgccggagctcacccagcagatgtgggacgccaagaacatgatgtgcgcggccgacccgcgccacgggcgctacctgacggcctcggccatgttccggggcaagatgagcaccaaggaggtggacgagcagatgctgaacgtgcagaacaagaactcgagctacttcgtggagtggatccccaacaacgtcaagtcgacggtgtgcgacatcccgcccacaggcctcaagatggcctccaccttcatcggcaactcgacgtccatccaggagatgttccggcgcgtgagcgagcagttcacggccatgttccggcgcaaggccttcctgcactggtacacgggggagggcatggacgagatggagttcaccgaggccgagagcaacatgaacgacctcgtgtccgagtaccagcagtaccaggacgccaccgccgacgaggagggcgagtacgaggacgaggaggacgatgccgacctccaggactagagatcaaccgagtaccgcgtatgattattggttttcttatgttaatttgatgattgttttaggcttgtgtagtgctgtttctgtctttcttggtgggtgctgttgttgaggaacagaaaactcatggaagggtggttgttggtgagatagcttggtataacctctggcacaattgctgtgtgcaagcaacgccctgttgcgttctactggtagtggtgtgtgttgtctggtgtccattgtctaactatcatgtccaaatctaatgtaatttgaagttgcttgtgtctaaaaaaaaaaaaaaaaaaaaaaaaaaaaaaaaaaaaagggaaactccacaagactcaaa

SEQ ID NO: 5059 - DNA, 1595 bp, Triticum aestivum
  unsure (1)..(1595): unsure at all n locations
  Clone ID: TRIAE-23APR03-CLUSTER528_189
ttttttcgaaatccgaattcccgaatcccccacctccaccccctcccccgcaaccaccaccaccggaccaccgtccaccggcggcgaaggcacgatgagggagatcctgcacatacagggcgggcagtgcgggaaccagatcggggccaagttctgggaggtgatctgcgacgagcacgggatcgacgggacggggcgctacgcgggggactcggacctgcagctggagcggatcaacgtctactacaacgaggcgagcgggggccggttcgtgccccgcgccgtgctcatggacctcgagccggggaccatggactcggtgcgctccggccccttcggccagatcttccgccccgacaacttcgtcttcggccagtccggcgccggcaacaactgggccaagggacactacaccgagggcgccgagctcatcgattccgtcctcgacgtcgtccgcaaaggaggccgagaactgcgactgcctccagggattccaagtttgccattccttgggaggaggcactggatctgggatgggcacccttcttatttctaagattagggaggagtaccctgaccgaatgatgctgacattctctgtcttcccatcaccaaaggtctccgacaccgttgttgagccatacaatgctacactttctgttcaccaacttgttgagaacgctgatgagtgtatggtgcttgacaatgaagctctatacgacatatgcttccgcacactaaagcttgccaccccttcctttggtgacctgaaccatcttatctctgctaccatgagcggtgtcacatgctgcctgaggttccctggacaactcaactccgatcttcgcaagcttgctgtgaatctcatcccattcccccgcctccacttcttcatggttggcttcgcaccactgacgtcgcgtgggtcacaaatgtaccgtgctctcacagtccctgagctgacccagcaaatgtgggatgccaagaacatgatgtgcgccgcagacccccgccatggccgctacctcaccgcctcggcctgcttccgagggaagatgagcaccaaggaggtggacgagcagatgctcaacgtccagaacaagaactcgtcgtactttgtggagtgggatccccaacaacgtcaagtcgagcgtgtgcgaacatgccgcccagggggcctgaagatggcgggcaccttcgtcggcaactccacgtccatccaggagatgttccgcagggtgagcgagcagttcacggccatgttcaggaggaaggccttcctgcactgggtacacgggcgagggcatggacgagatggagttcaccgaggccgagagcaacatgaacgacctcgtcgccgagtaccaacaataccaaggacgcgaccgccgacgaggagtacgacgaggaggaggaagaggaacgcgacgcggagtagtggcgccgtgccttgctccaccccagtatatgtcccccggttaagtctgtcgccatgtcaagtccgtttctccggtgaagggtttgtggttcctctgttgcntggataatcaggttcgtctgtccccgtttgtatttcacgcnatangcttcatcgt

SEQ ID NO: 5060 - DNA, 1753 bp, Triticum aestivum
  Clone ID: TRIAE-23APR03-CLUSTER528_194
acagatccgcgcctccactcccccctctcccccccctcctcccccctccaaaacctcgccggaaccctacccctcccccgccgccgccatgagggagatcctccacatccagggcggccagtgcggcaaccagatcggggccaagttctgggaggtgatctgcgacgaacacggcatcgaccagaccggcaagtacgccggcgactccgacctccagctcgagcgcatcaacgtctactacaacgaggccagcggcggccgcttcgtgccccgcgccgtcctcatggacctcgagccgggcaccatggactccctccgctcggggccctacggccagatcttccgccccgacaacttcgtcttcggccagtccggcgccggcaacaactgggccaagggccactacaccgagggcgccgagctcatcgactccgtcctcgacgtcgtccgcaaggaggccgagaactgcgactgcctgcaaggattccaagtctgccactctctgggaggaggaactggttctggtatgggtacactgctcatctccaagatcagggaggagtacccagataggatgatgttgacattctcagtctttccatcaccaaaggtgtccgacactgtggtggaaccttacaatgctacactttctgtacaccaacttgttgagaacgctgatgagtgcatggtacttgacaatgaggctctctatgacatctgcttccgcactctgaagcttgctacacccacatttggtgatctgaaccatcttatatctgcaactatgagtggtgtcacttgctgcctccgcttccccggtcagctgaactccgacctccggaaactcgcagtcaacttgatcccgttccctcgcctccatttcttcatggttggcttcgcaccactgacctcgaggggttctcagcagtaccgtgccctcactgttcctgagttgacccagcagatgtgggactcaaagaacatgatgtgtgctgctgacccgcgtcacggccggtacctcacagcctctgccatgttccgtgggaagatgagcacaaaggaagttgatgagcagatgctgaacgtccagaacaagaactcgtcatactttgttgagtggatacccaacaatgtgaagtcaagcgtgtgtgacatccctcccacaggcctgtcaatgtcgtccacctttgttggcaactccacctccatccaggagatgttccgccgtgtgagcgagcagttcactgccatgttcaggaggaaggctttcttgcactggtacaccggtgagggcatggatgagatggagttcaccgaggccgagagcaacatgaacgatctggtcgctgagtaccagcagtaccaggatgccacagccgacgaagaggaagagtatgacgaggaggaggaagaggaggctgcctaagccaccagacctcatacggtcgtcctgctgtctgctagatatgccttgtgtttactattgctgtcgatttggtggtgcttgtggtgcggatagatctttaggtggttgataacacttatagatgcttttgctgcttcggcgaatcgatattttttgaactgttttttggatgctgatggtggttttatgcgaattgtgatattagcgtaactgtgggcggacttgatactcgtaaattcggtaactatattttgtgtctgtttactgtgcgttttcgctcacgatttctgaaatttggtctattgttgctccaacaaaaaaaaaaaa

SEQ ID NO: 5061 - DNA, 1832 bp, Triticum aestivum
  Clone ID: TRIAE-23APR03-CLUSTER528_195
acagatccgcgcctccactcccccctccccccttcctcctcccctccaaaacctcgccggaaccctacccctcccccgccgccgccatgagggaaatcctccacatccagggcggccagtgcggcaaccagatcggggccaagttctgggaggtgatctgcgacgagcacggcatcgaccagaccggcaagtacgccggcgactccgacctccagctcgagcgcatcaacgtctactacaacgaggccagcggcggccgcttcgtgccccgcgctgtcctcatggacctcgagccggggaccatggactccctccgatccggcccctacggccagatcttccgccccgacaacttcgtcttcggccagtccggcgctggcaacaactgggccaagggtcactacaccgagggcgccgagctcatcgactccgtcctcgacgtcgtccgcaaggaggccgagaactgcgactgcctgcaaggatttcaagtctgccactctctgggaggaggaactggttctggtatgggtacactgctcatctccaagatcagggaggagtacccagataggatgatgttgacattctcagtcttcccatcaccgaaggtgtctgacactgtggtggagccttacaatgctacactttctgtacaccaacttgtcgagaatgctgatgagtgcatggtgcttgacaatgaggctctctatgacatctgcttccgcactctgaagcttgctacacccacatttggtgatctgaaccatcttatatctgcaaccatgagtggcgtcacttgttgcctccgcttccccgggccagctgaactctgacctccggaaactcgcagtcaacttgatcccgttccctcgcctccatttcttcatggttggctttgcaccactgacctcaaggggttctcagcagtaccgtgccctcactgttcctgagttgacccagcagatgtgggactcaaagaacatgatgtgtgctgctgacccgcggcacggccggtacctcacagcctctgccatgttccgtgggaagatgagcacaaaggaggttgatgagcagatgctgaacgtccagaacaagaactcgtcgtacttcgttgagtggatacccaacaatgtgaagtcaagcgtgtgtgacatccctcccacaggcctgtcaatgtcgtccacctttgttggcaactccacctccatccaggagatgttccgccgtgtgagtgagcagttcacggccatgttcaggaggaaggctttcttgcactggtacaccggtgagggcatggatgagatggagttcaccgaggcagaaagcaacatgaacgatcttgtcgctgagtaccagcagtaccaggatgccactgccgatgaggaggaagagtatgacgaggaggaggaagaggatgcctaagccacctgacctcatccggtcgtcctgctgtctgctagatatgccttgtgtttactattgctgtcgatttggtggtgcttgtggtgcggatagatctttaggtggttgataacacttatagatgcttttgctgcttcggcgaatcgatattttttgaactgtcttttgtatgttgatggtggttttatgcgaattgtgatattagcgtaactgtggacttgatactcgtaaattctggaattatattttgtgtctttttactgtgcattgtggttagctcacgattgttctttctgcatcaactcctgtgttgtatcgtgctctgaaatttggtctattgttgctgcaagttttcgcagctatatgctccaacatttcaagaaaagaagctgtatggtttaaaaaaaaaa

SEQ ID NO: 5062 - DNA, 1891 bp, Triticum aestivum
  Clone ID: TRIAE-23APR03-CLUSTER528_196
tttttttttcgaaatccgaattcccgaatcccccacctccaccccctcccccgcaaccaccaccaccaccgtccaccggaccaccgtcaccggcggcggcgaaggcacgatgagggagatcctgcacatccagggcgggcagtgcgggaaccagatcggggccaagttctgggaggtgatctgcgacgagcacgggatcgacgggacggggcgctacgcgggggactcggacctgcagctggagcggatcaacgtctactacaacgaggccagcgggggccggttcgtgccccgcgccgtgctcatggacctcgagcccggcaccatggactcggtgcgctccggccccttcggccagatcttccgccccgacaacttcgtcttcggccagtccggcgccggcaacaactgggccaagggtcactacaccgagggcgccgagctcatcgactccgtcctcgacgtcgtccgcaaggaggccgagaactgcgactgcctccagggattccaagtttgccattctttgggaggaggcactggatctgggatgggcacccttcttatttctaagattagggaggagtaccctgaccgaatgatgctgaccttctctgtcttcccatcaccaaaggtctcagacaccgtcgttgagccatacaatgctacactttccgttcaccaactcgttgagaacgctgatgagtgtatggtgcttgacaatgaagctctatacgacatatgtttccgcacgctaaagcttgccaccccttcctttggtgaactgaaccatcttatctctgctaccatgagcggtgtcacatgctgcctgaggttccctggacaactcaactccgatcttcgcaagcttgctgtcaatctcatcccattcccccgtctccacttcttcatggttggcttcgcgccgctgacgtcacgtgggtcacaaatgtaccgtgctctcacagtccctgagctgactcagcaaatgtgggatgccaagaacatgatgtgtgccgcagacccccgccacggccgctacctcaccgcctcggcctgcttccgagggaagatgagcaccaaggaggtggacgagcagatgctcaacgtccagaacaagaactcgtcgtactttgtggagtggatccccaacaacgtcaagtcgagcgtgtgcgacatgccgcccagggggctgaagatggcgggcaccttcgtcggcaactccacgtccatccaggagatgttccgcagggtgagcgagcagttcacggccatgttcaggaggaaggccttcctgcactggtacacgggcgagggcatggacgagatggagttcaccgaggccgagagcaacatgaacgacctcgtcgccgagtaccagcagtaccaggacgcgaccgccgacgaggagtacgacgaggaggaggaagaggaacgcgacgcggagtagtggcgccgtgccctgctccaccccagctatatgtcccccggttcaggtctgtcgccatgtccaggtcgcgtttcctccggtgagggtttgtgtggtttcctcctgtggcttggatgagtcgaggttgcgtcttgtgctccgttttgtaatttgctacggctagtagtgcgttgcagtctgtcgtgttcagcatcatttggtcagtcggtccatagctgacgatggcctgaactgtcgagtgctctccttgagctagtcgtcgccttgtaagttctgacaagtattattgttagtcgttcgcttcagcaaccaaaaaatgagtattggtagtggtttctcattatctttgtgaatattgtacttatgtcggaatgtttttgccttgttatttgtgtatatttcgtatcttgtgttcttggtacccaaaaaaaaaaaaaaaaaaaa

SEQ ID NO: 5063 - DNA, 1735 bp, Triticum aestivum
  Clone ID: TRIAE-23APR03-CLUSTER528_202
aaagaacacacacgctctctccccccaacccaatccccatcccccctcatccccccacgcgcgacgcgaactcttcaatcctctcctcagggagcgtagggaggcgaagatgagggagatcctgcacatccagggcgggcagtgcgggaaccagatcgggtccaagttctgggaggtggtgtgcgacgagcacggcatcgaccccacggggaggtacgtcggcacctccgacctgcagctggagcgcgtcaacgtctactacaacgaggcctcgtgcggccgcttcgtgccgcgcgccgtgctcatggatctcgagcccggcaccatggactccgtgcgcacggggccctacggccagatcttccgccccgacaacttcgtcttcggccagtccggcgccggcaacaactgggccaagggtcactacaccgagggcgcggagctcatcgactccgtcctcgacgtcgtccgcaaggaggccgagaactgcgactgcctccaaggcttccaggtgtgccactccctcggcgggggcaccggttccggcatgggcacgctgctgatttccaagatcagggaggagtacccggaccggatgatgctcaccttctccgtgttcccatcccccaaggtgtctgacaccgtggtcgagccctacaacgccaccctctcggttcaccagctggtggagaacgccgacgagtgcatggtgctggacaacgaggcgctctacgacatctgcttccgcaccctcaagctgaccacacctagctttggtgacctgaaccacttgatcagtgccaccatgagcggtgtcacctgctgccttcgcttcccaggacagctgaactcagacctccgcaagctcgccgtcaacctgatccccttcccgcgcctccacttcttcatggtgggctttgcgccgctcacatctcgtgggtcacagatgtaccgccccctcactgtccctgagctcacacagcagatgtgggactcgaagaacatgatgtgtgctgctgacccgcgccatggccgctacctcacagcctcggccatgttccgtggcaagatgagcaccaaggaggttgacgagcagatgatcaacgtgcagaacaagaactcctcctacttcgtggagtggatcccgaacaacgtcaagtcaagcgtgtgtgacatcccaccacgcggcctctccatggcgtccaccttcattggcaactccacctccatccaggagatgttcaggcgtgtgagcgagcagttcacggccatgttcaggaggaaggctttcttgcattggtacactggcgaggggatggacgagatggagttcactgaggccgagagcaacatgaacgaccttgtctccgagtaccagcagtaccaggacgccactgccgacgaggagggcgagtacgaggaagaggaagagctggagcaggagtaagatcggtgacgattgcatctctccgtttatgtggtattgtggttttcgtacaactggagcttgttactagtagagactagagggtaccatggctacaactctgctgcttgcttgcgtgtcttggcatgtattggatttgtactgcgttcgtttgtaggcatgttcactcgatgctatgtttctttgcgtgaattatttattctatgtgaggtttcaagcaagtggatttgaaatacagtagaatgctttgtagtttgaacaatgatatgctcattctgcatgttgtcc

SEQ ID NO: 5064 - DNA, 2149 bp, Triticum aestivum
  unsure (1)..(2149): unsure at all n locations
  Clone ID: TRIAE-23APR03-CLUSTER528_205
ctcgagttttttttttttttttttttttttttttttttttttttttttatgcaaatgaaatctactttggtcacatcgtctgcttanatgtgatggcgaacggtcaaacttatgccacatcacacgaagtatatcgcagcaaacctccccagtaacagtcaagtattaacctaaacccttaacgactgtatgtatttcgagtccattggtatccagtgccaaaattgaacatacacctcgagtaggatgaccacggatgtatgtattacactctttcatccacaacaggcaagcacggacgccgccttggcctgcttgtgttgctggcgatggcgagaggcccgtcgagagaagactcacttcttctccgctgctttatggtctggattcttcagtatgccaccgtcgatgagcagctgcacctcggatttcgcaagatccttcaccttggaatcccgagattccagataggcagccaccaccttggagctgaatccatctgcaaatgacttgcacttccctttgagggcttttttccatagggtagcggcaaactcagggcaatcaagtatcatctttctgattacgcggctcgagtggtagttatcaaaggcgtgctcaacatcttctgtcctcgggcgtgctgcgtcagaagctatagcattgtgaagcacgtggaccctgtcggtgaccccctccaagacattattttttccacctacagcaacctcgtataatacatctttgccgaagtttgttctaagtaactctccaacattttcaatgcaagtctcgatgagaacctcaaaaagctcgcttttcaccaacagttcttgccgccgtttaaacgggtccttcttgctatcagatgcaaccagtgtgtcttctgaacccccatgttctttgtcagctacatcatccaacttactatccaagttaactttagtagcactctctgatgcctcatcctttgaaacaagggaaggcacactgtacttcagacaattcaaatcagtcggagtcagataacgtgagcaaagtgggtgaagtagctgcagcaatgggcgtctcccgttcttgtcaaatatgagttcctttaaatgatttgtcagctcatcaattacaaccttagtaacaagttttgtgtcatcaacaatggagagaagacaagcaaggaaaaggcatccataatcaccaagagcaagcttcatattctgccccttcaagcttttgataattttcttcctatcctccgcaaggccatgcttgaggcaagcaagccctaattttaatccttccttcgtctgcatgatctgaatgagaagtggttttgaagatcttttcttctccacttctggtttccctagtaatctggcgacacctgatagttcatctaaggcgtatgtccgttcagtaagatgggggattaattgacgaatcacgtccaaggctgatgtcttatctgcaattgttaagtacaaacacagatcataccgaaggaaaaatatgctctggtcgggaagcagagtcctggacaaaagtgaagttcacaaaagacaatcatacataggccattgttttaactcgtagtttaggccttgccagactcctcgcaacccggtggcctgaatgcgatgaagctgacgcactgcacctggcgcaggttgtcgaagccgatgacgcggacataggcgtcagggtactccttcttgacctcctccacctcgttgagcacctgcgtggcgtcggtgcacccgaacataggcagcttccacattgtccagtatcgaccgtcgtagtacccggaggagctgttgtgctcacggaagacgaagccaaccttgctgaactcgaggcagggcacccacttggagcggatcaggtagtcgacctgcttcaggagggcctccgtggagaggggtggcaagtaagacagggtctcgaacttcttgatgccctcaatcggccacacctgcatgcacctgatccttccgccattgctgacgcggccgaggctgccgctggagcggcggctgacggggagaccggctgtggacttgagcccctggaagggtgcgacggtggtagccgacgaagccatcacggcgggggccatggtattgtattatcggaggagaggaggatgccg

SEQ ID NO: 5065 - DNA, 2377 bp, Triticum aestivum
  unsure (1)..(2377): unsure at all n locations
  Clone ID: TRIAE-23APR03-CLUSTER528_211
ggcatgccaatatgcaaatgaaatctactttggtcacatcgtctgcttanatgtgatggcgaacggtcaaacttatgccacatcacacgaatatatcgcagcaaacctccccagtaacagtcaagtattaacctaaacccttaacgactgtatgtatttcgagtccattggtatccagtgccaaaattgaacatacacctccagtaggatgaccgcggatgtatgtattacactctttcatctaacacgcaagcacggtcgccgcctcggcctgctttgtgttgctggcgatggtgagaggcccgttgagagaagactcacttcttctccgctgctttatggtctggaatcttcagtatgccaccgtcgatgagcggctgcacctcggatttcgcaagatccttcaccttggaatccgaagattccagataggcagccaccaccttggagctgaatccatctgcaaatgacttgcacttccctttgagggcttttttccatagggtagcagcaaacgcaggacaatcaagtatcatctttctgattacgcggctcgagtggtagttatcaaaggcatgctcaacatcttctgtcctcgggcgttctgcgtcagaagctatagcattgtgaagcacgtggatcctgtcggtgaccccctccaagacattattttttccacctacagcaacctcgtataatacatctttgccgaagtttgttcgaagtaactctccaacattttcaatgcaagtctcaatgagaacctcaaaaagctcacttttcaccaacagttcttgccgccgtttaaacgggtcctccttgctatcagatgcaatcagtgtgtcttctgaacccccaggttctttgtcagctacatcatccaacttactatccaagttaactttagtagcactctctgatgcctcatcctttgaaacaagggaaggcacgttgtacttcagacaaaacaaatcacccagagtcagataacgtgagcaaagtgggtgaaagagctgcagcaatgggcgtctcccgttcttgtcaaatatgagttcctttaaatgatttttcagctcatcaattacaaccttagtaacaagttttgtgtcatcaacaatggagagaagacaagcaaggaaaaggcatccataatcaccaagagcaagcttcatattctgccccttcaagcttttgataattttcttcctatccttcgcactgccatgcttgaggcaagcaagtcctatttttaaaccttccctcgtctgcatgatccgaatgagaagtggttctgaagatcttttcttcttagcttttgatttcgttggtacttcagcgacccctgatagttcatctccatctacgacagatgacccttgggtaagatgggggattaactgacgaatcacgtccgaggctgatgtcttatccgcaattgttaagtactccaatatgaccgtgtgaactatggaatactcaacaatacccttctccaaaagtggctggataacagtagtcatatactgcaggacagatgatttctgtagtccaagcttggaaattgtttctaacaaactgcatgatttttgttcagtcaagtctttgaacagctgaagctcagtggagtacaattccaacaacaaacttcttttctgaggcggcgtcgcctgatgaaaggcgcaatcaacaactgcggctcctattgtgtgacgaagtagagaagcgacatgaccatgaagggaagagatgaacaaggcaagctgttttttagtggcaagttttatgagcttcttcacaaggaaaacagcgtatttcttgcgagaaagatggagcaaatgtggctgcagggcaacaaaaacagcatccctctctggctgtgagcaccacttgacacatgtttgaagaacacgtgcggttacatgggatccagcaatttcgaaatatttgccatccattttacggagagcctcggttactagcttggatctattctccttgctcacatcacgacatctcatcttttcccatagtactgcgagttccttctcgaggttgtaattgggcttccgcttcatcttcctggactcggacatttccttggctgcgacccgcttttccttggcggtgacgggctgcggcttgggcttggcggcgggggcgtcgtaggtcttcttccgcttggcggcgtcgccggggccggggccaggccccttggacggcgccttgggcctccccgcggcctcgcgcttccgcttgttggcgcccgggtggtcgccgccgccggccatggctgcgggaggcggcgtcggcgaacggaagaggacggtgtcggcgagcgagggtttacctggtgagcgccggaggtagaggccgggac

SEQ ID NO: 5066 - DNA, 1762 bp, Triticum aestivum
  Clone ID: TRIAE-23APR03-CLUSTER528_219
aagaacaacacacacgctctctcccccaacccaacccaatccccgtcccccctcactcccccacgcgcgacgcgaccgcttcaatcctctcccaagggaggcgaagatgagggagatcctgcacatccagggcgggcagtgcgggaaccagatcgggtccaagttctgggaggtggtgtgcgacgagcacggcatcgaccccacggggaggtacgtcggcacctccgacctgcagctggagcgcgtcaacgtctactacaacgaggcctcgtgcggccgcttcgtgccgcgcgccgtgctcatggatctcgagcccggcaccatggactccgtgcgcacggggccatacggccagatcttccgccccgacaacttcgtcttcggccagtccggcgccggcaacaactgggcccaagggccactacaccgagggcgcggagctcatcgactccgtcctcgacgtcgtccgcaaggaggccgagaactgcgactgcctgcaaggcttccaggtgtgccactccctcggcgggggcaccggttccggcatgggcacgctgctgatttccaagatcagggaggagtacccggaccggatgatgctcaccttctccgtgttcccatcccccaaggtgtctgacaccgtggtcgagccctacaacgccaccctctcggttcaccagctggtggagaacgccgacgagtgcatggtgctggacaacgaggcgctctacgacatctgcttccgcaccctcaagctgaccacacctagctttggtgacctgaaccacttgatcagtgccaccatgagcggtgtcacctgctgcctccgcttcccgggacagctgaactcagacctccgcaagctcgccgtcaacctgatccccttcccgcgcctccacttcttcatggtgggctttgcgccgctcacatctcgtgggtcgcagatgtaccgctccctcactgtccctgagctcacacagcagatgtgggactcaaagaacatgatgtgtgctgctgacccacgccatggccgctacctcacagcctcggccatgttccgtggcaagatgagcaccaaggaggttgacgagcagatgatcaacgtgcagaacaagaactcttcctacttcgtggagtggatcccgaacaacgtcaagtcaagcgtgtgtgacatcccaccacgcggcctctccatggcgtccaccttcattggcaactccacctccatccaggagatgttccggcgtgtgagcgagcagttcaccgccatgttcaggaggaaggctttcttgcattggtacactggtgaggggatggacgagatggagttcactgaggccgagagcaacatgaacgaccttgtctctgagtaccagcagtaccaggacgccactgccgacgaggagggcgagtacgaggaagaggaagacctggagcaggagtaagatcggtgacaaattcatctctccgtttatgtggtattgtggttttcgtacaactggagcttgttactagtagagactagagagtaccatggctacaactctgctgcttgtttgcgtgtcttggcatgtattggatttgtactgcgttcgtatgtaggcatgttcactcgatgctatgtttctttgcttgaattatttattctatgtgaggtttcaagcaagtggatttgaaatacagtactactccctccgttccaaaaaaaaaaaaaaaaaataaaaaaaaaaaaaaaagaaaaaacaaaaaagaaaacaaaaag

SEQ ID NO: 5067 - DNA, 2096 bp, Triticum aestivum
  Clone ID: TRIAE-23APR03-CLUSTER528_223
tttttttttttttttttggattgaactgacacggctcgagtaattttccattttgctgtgcagtttacaggcaccaacagccagacaggtacatttgccacaggggtctcacaagtaccaagaaaaacagatcggcattacagtgcagttccaaaaattgaagaccagaggtgctgcacaaagcataggcaactgctctatcggatgaatagctcattttgggaagtacatcggttcgccagacaaggctgcatgaggcagagcagtaggggctgtgccatattgtgccatctgctgtgaagcttggtacaacatcggaggagcaccagagcttgatccgactgctggaaagtgcgggcctgggtttgccatcaataattgggtagggtacgaggttgatgcaggtgcaaacgcccctcgctgcatgttaggattccaggctggcacttgtccgatagaggtcgctcctgctgagcttccataaaaagcagcaggcgtggtgctttgccatgctgctccagttgtgcttagaccaggggcttgacctgcagcttgtacctgagcactaggatccgagacggtgtaatctctgcttctctcgtcatgtgcagtaaccaccatcatatatgcaatgtccctccagagcttgtttagcaactcctgctgttgttatatctggatactgaattagagcctgcattccaccattcttctcgaacattgcaatctttcggacagcaccaaaagaagagaacacagtgtgtagaacatccactcccacagcatactgcatgttctcgattgatgctaaaagtacattgctctctggctccttaatcttcccatcagagcctaatatgggctgtgcgattccctcgattgcagttggattaacaggaagataaggatttgtgtaatccctgctgcgatgtgattgaaatttaatattcaaatctttgtgcgcagaaaatgttatgcggaggtgacaaatgctgacgtgttcagccagtagatacctcggtatgcttcttccatctaacgaattttttgcctctagagcagttggagcatcagtatattggataagtgcctggaaaccagcggctttctcaaacgttgctatcttgtgaacaaacccaaaagcagaaaataccaaatggataacatctatgctaacatcattaggctggacaccttcaaaggtgacaagcaggacattgccagaagaatcaccagtgcctttattgtttgttatttcttgccgatttgaatactggatatatacagttttaccacgaacttgggcaggttctgaagatgaagcataatatgaaaccattgaaattgcctggttttgatctgcgaactccacgaaggcctggttgcggttggctccgacgttgcacatggtgttcacaaccctgccgaatggtttgcagagctcgacgagctcctcctcagagctctcccacggcatgttccgtaggtgcagcaccttggacggcgtctgtgtgtaccggaactgcgtagacccggacggcatcctcggtcgcccgccacggcggccgcgcgcgcgctgggtggggtaggggacgagctgctagggttagggtttggtaaattgggatgaggaggggagtcgactcggggctacggcttgagaggaaaattaaaaagcctgggccaaatgggggtttcaaaaaaggaaaaaccggcatatggaacccgaattttttcaaaaaaagggtttaagaaagggggtcccgggaaatctttcgagccccggggggaccctaaattttttaaagggcgcccccccccggggggaaccccccctttttttccctttattaagggggaaatataaggccgtggggggaaaaaaagggaaaaaaagattttccgggggggagaagattttttttccccctttcccccctccaaaaaaaaaaggggaaaaaaaaaataaaaaacccccccggggggcacaacaggggggaaaatcccccttttattataagggggggtacccccccccgttcctttttagaaaaaaaataacggggggccccccttttttaaaaatgtcccccgcc

SEQ ID NO: 5068 - DNA, 1826 bp, Triticum aestivum
  Clone ID: TRIAE-23APR03-CLUSTER528_231
ttacctaaaaaaaaactcgaccactccgccatccccgctccaaaacccccaccccaccccacctcgccggaaccctaaccctagccccgccgccgccccccgccccgccgccatgagggagatcctccacatccagggcggccagtgcggcaaccagatcggggccaagttctgggaggtgatctgcgacgagcacggcatcgaccagacgggcaagtacgcgggcgactccgacctccagctcgagcggatcaacgtctactacaacgaggccagcggcggccgctacgtgccccgcgccgtgctcatggacctcgagcccggcaccatggactcgctccgctccgggccctacggccagatcttccgccccgacaacttcgtcttcggccagtccggcgccggcaacaactgggccaagggccactacaccgagggcgccgagctcatcgactccgtcctcgacgtcgtccgcaaggaggccgagaactgcgactgcctccagggatttcaggtctgccactcgctgggaggaggcactggctccggaatgggcaccctgctcatctccaagatcagggaggagtacccggaccggatgatgatgacattctcggtgttcccatcgcccaaggtgtctgatactgttgtggagccatacaatgctacgctctctgtgcaccagcttgttgagaatgcggatgagtgcatggttcttgacaacgaggctctctacgacatctgcttccggacgctcaagcttaccacacccaccttcggtgatctgaaccaccttatctctgcaactatgagtggtgttacctgctgtctccgcttccctggacagctcaattcagacctccggaagcttgctgtgaacctgatcccgttcccaaggctgcacttcttcatggttggatttgctccgctaacctcgcggggttcacagatgtaccgtgccctcactgtgcccgagctcacccagcagatgtgggactccaagaacatgatgtgcgccgccgacccaaggcacggtcgctacctcaccgcctcagccatgttcccgtgggaagatgagcaccaaggaggtggatgagcagatgttgaacgtgcagaacaagaactcgtcctacttcgtcgagtggatccccaacaacgtcaagtcgagcgtgtgtgacatcccgcccactggcctgaagatgtcttcgacgttcgtcggcaactccacatcgatccaggagatgttccgccgtgtgagcgagcagttcaccgccatgttcaggaggaaggccttcttgcactggtacacgggcgagggcatggacgagatggagttcaccgaggccgagagcaacatgaacgacctggtggccgagtaccagcagtaccaggatgcgacggtcgaggaggaagaggactatgaggatgagcaggaggatgaggaggccgcctaagcgggcttccccctttcttcccagggatatgccttatatatcgctcgttatgtcgttggagtgctcgtggtgctgttaggtgatgatagctagatgctatttttttccgttctaaatgtcggtcgtgttgccttgacagacttattttttcgttatgtggacctgtggttgtcgtgtatgctcatgtcgtgatgagcgtttggtgtaaggtttgactgtgactgcttggtgtgttattcagtagtgttgctagactgcaaaatctctgtttcgtgtccagtatttttgggccaagttgccaaatatgcttctgtcatcttgggatcttggaatgcggttcaactggagttcatagtgctttggtcaaaaaaa

SEQ ID NO: 5069 - DNA, 1459 bp, Triticum aestivum
  Clone ID: TRIAE-23APR03-CLUSTER528_235
agtccacagtagagagcagtacgcccggccgccacagctttcatcaacataaaggcccacccccacgaacgggcggaggaagggcggaagggggcaaggcagcagaccaaggaagatgagcaagactgccctcctcaccccctacaagatgggaaggtttgatctttcccacagggtagttcttgcaccactgacaagggagcggtccttcggaaatgttcctcagcctcatgccatactgtattatcaacagagaacaaccaaaggaggccttttgattgctgaggccactggagtttcagacactgctcaagggtacaaagacactcctggcatttggacaaaggagcaagtagaagcatggaaaccgatcgtgaatggggttcacgcaaaaggaggaatatttttctgtcagatttggcatgtaggaagagtctccaatcacacttttcagcctaacgggcaggctccaatttcgagcactgataagccactcaaacctgtagttagagccaatggcatagatgtgcctacaatttcaactcctaggcggctacagactaatgagattcctttggtaatcaacgattttagggctgctgctagaaatgcaattgaagccggatttgatggtgttgaaatccatggagctcatggttatttgattgatcagttcttaaaggaccaagtcaatgatcgcactgacaaatatggtgggagcttagagaatcgctgccgctttgcattggaagtagttcaagctgtagttgatgaagttggagctgataaggttgggataaggctctctccgtttgcaaactattcagaggcatccgactcaaacccagaagctctaggcctatacatggcacatgcactaaacaaatttggaattctctattgtcacatggtggaaccacggatggtgaatattggtgagaagtttgaaactccccatagtcttcgccccataagggatgcttttaaaggaacatttattgtagctgggggatacgacagggatgatggaaataaagcaatcgccgatgactatgctgatttggtagcatatgggcgcttgtttttatccaatcctgacttgcctcggaggtttgaaataggtgctcctctcaacaagtacataagagatactttctacctctctgatccagttattggatacactgattacccatttctgccgtccgatgtctagatgggcctttcaggaatgaatccccaccccatcagatcatctacctcatgtatcagtactatgttaaaggaataaggtcattgatttcaatgctcatgtgtatcggcacggtatggataaaatatgtaatcatcattgcaatttaagaagtgcaagctggaaagcaaattaagaagtcaaaaaaaaaaaaaaaaaaaaaaaaaaacctgcccgggcggccgctcgaaatcacttagtgaattc

SEQ ID NO: 5070 - DNA, 1608 bp, Triticum aestivum
  Clone ID: TRIAE-23APR03-CLUSTER52941_1
gaccacctcaattgccgtttccttccgcttctgtcaccggatccaggcccgcctccccgtcgtcctaaccctgccctaaaataaaaatccgtcggtccagcctcgccgcaatcccgcccgccgctgtgccgtccggccccgcgcgccggaccatttccgggcgcgagacgctggtcccgtggggcggggtcgggtgcggcctcagcgccgccgcgctctagctccgcgggaggagcagcgggagggatgcggaggtgctgcgatcggtggggaggacgggcagcctgaaggatttgtctgctatcttggacactgcaagtaaagtcctgccacttgtagtggcagtttctgggcgagttagttcagatacaccacttatatgccagcaaagtggtatgagaggtgtaatagtcgaggaatacggcagagcaacacttcctgaagcacaatgatgctggatcctggattcaagattctgctgtgatgctttctgttagcaaagaggttccatggtacctggatgatggcactgggggtgtctatgttgttgccggtcgttctgcggcagggttaattttaactgttgccagtgaggtttttgaggagtcagggcgaacccttgcacgtggaactctagattatttacaaggactgaagatgctcggagtaaagcgaactggaagggttcttccaactggaacttcattgactgttgttggtgaggccattaaagatgatgttggaactattccggattcagcggccacacaaaggaccattttatgcgtctccaaaaagcatcgatcaacttatcttgaatctcgggaaatgggccaagttataccaacttgcttccatgggctttgcagcttttggtgtatttcttcttgctaagcgtgcacttgatcattttctacaaagaaagcgccagcgtgaatttcacaagaaggctcgtgctgctgcagcacaaaggcaggctagggacgctgaagggggcaatggaacatcagacggagagcctaagaaggatcaattggtattagaaatatgtgtcatatgccttgaacaggagtataatgcagtttttgtgccgtgtggccacatgtgttgctgtatgaactgctcttctcacgtaacaaactgtccactctgccgacgaagaattgaccaagctgtcagaacattccgtcactgatggcactacatgatgcaaaatcctgcgcctgataacaccaggtgaacctcatctttcgaaaccacctgatacttccagttccagtcgccgtggctgccagtgtgccgatatctggaacgcggaactgagctggagcttgtgaattggagttttgctttactgacgaaaacttcaagcaatggaggctcatagtttgcggtcgacgctgcgccagttgctgatcttccttgtactttacagttgtgtacagagtgttcttgtgtagcgccttgtttctaacagcgctctgattgacagcatggatgctagtatttactggtggatcaattgattctatccaaaggaactgctatgttgtttgacattgtaaaggataatcatttcttctgatatatatcggacaccgcctcctg

SEQ ID NO: 5071 - DNA, 2924 bp, Triticum aestivum
  unsure (1)..(2924): unsure at all n locations
  Clone ID: TRIAE-23APR03-CLUSTER52_1
gcccccgtcgacgaagatgctctgcctcaccgccccctcctgctcgccatctctcccgccgcgcccctcccgtcccgctgctgaccggcccggaccggggatctcgggcggcggcaatgtgcggctgagcgcggtgcccgcgccctcttcgctccgctggtcgtggccgcggaaggccaagagcaagttctctgttcccgtgtctgcgccaagagactacaccatggcaacagctgaagatggtgttggcgaccttccgatatacgatctggatccgaagtttgccggcttcaaggaacacttcagttataggatgaaaaagtaccttgaccagaaacattcgattgagaagcacgagggaggccttgaagagttctctaaaggctatttgaagtttgggatcaacacagaaaatgacgcaactgtgtaccgggaatgggcccctgcagcaatggatgcacaacttattggtgacttcaacaactggaatggctctgggcacaggatgacaaaggataattatggtgtttggtcaatcaggatttcccatgtcaatgggaaacctgccatcccccataattccaaggttaaatttcgatttcaccgtggagatggactatgggtcgatcgggttcctgcatggattcgttatgcaacttttgatgcctctaaatttggagctccatatgacggtgttcactgggatccaccttctggtgaaaggtatgtgtttaagcatcctcggcctcgaaagcctgacgctccacgtatttacgaggctcatgtggggatgagtggtgaaaagcctgaagtaagcacatacagagaatttgcagacaatgtgttaccgcgcataaaggcaaacaactacaacacagttcagctgatggcaatcatggaacattcatattatgcttcttttgggtaccatgtgacgaatttcttcgcagttagcagcagatcaggaacgccagaggacctcaaatatcttgttgacaaggcacatagtttagggttgcgtgttctgatggatgttgtccatagccatgcgagcagtaataagacagatggtcttaatggctatgatgttgggcaaaacacacaggagtcctatttccacacaggagaaaggggctatcataaactgtgggatagccgcctgttcaactatgccaattgggaggtcttacgatttcttctttctaatctgagatattggatggacgaattcatgtttgatggcttccgatttgatggggtaacatccatgctatataatcaccatggtatcaatatgtcattcgctggaagttacaaggaatattttggtttggatactgatgtagatgcagttgtttacctgatgcttgcgaaccatttaatgcacaaactcttgccagaagcaactgttgttgcagaagatgtttcaggcatgccagtgctttgtcggtcagttgatgaaggtggagtagggtttgactatcgcctggctatggctattcctgatagatggatcgactacttgaagaacaaagatgaccttgaatggtcaatgagtggaatagcacatactctgaccaacaggagatatacggaaaagtgcattgcatatgctgagagccatgatcagtctattgttggcgacaagactatggcatttctcttgatggacaaggaaatgtatactggcatgtcagacttgcagcctgcttcgcctacaattgatcgtggaattgcacttcaaaagatgattcacttcatcaccatggcccttggaggtgatggctacttgaattttatgggtaatgagtttggccacccagaatggattgactttccaagagaaggcaacaactggagttatgataaatgcagacgccagtggagcctcgcagacattgatcacctacgatacaagtacatgaacgcatttgatcaagcaatgaatgcgctcgacgacaaattttccttcctatcatcatcaaagcagattgtcagcgacatgaatgaggaaaagaagattattgtatttgaacgtggagatctggtcttcgtcttcaattttcatcccagtaaaacttatgatggttacaaagtcggatgtgacttgcctgggaagtacaaggtagctctggactctgatgctctgatgtttggtggacatggaagagtggcccatgacaacgatcactttacgtcacctgaaggagtaccaggagtacctgaaacaaacttcaacaaccgccctaactcattcaaaatcctgtctccatcccgcacttgtgtggcttactatcgcgtcgaggagaaagcggaaaagcccaaggatgaaggagctgcttcttgggggaaaactgctctcgggtacatcgatgttgaagccactggcgtcaaagacgcagcagatggtgaggcgacttctggttccgaaaaggcgtctacaggaggtgactccagcaagaagggaattaactttgtctttctgtcacccgacaaagacaacaaataagcaccatatcaacgcttgatcaggaccgtgtgccgacgtccttgtaatactcctgctattgctagtagtagcaatactgtcaaactgtgcagacttgagattctggcttggactttgctgaggttacctactatatagaaagataaataagcggtgatggtgcgggtcgagtccagctatatgtgccaaatatgcgccatcccgagtcctctgtcataaagaaagtttcgggcttccatcccagaataaaaacagttgtctgtttgcaaaaaaagtccggctatatgtgccaaatatgcgccatcccgagtcctctgtcataaaggaagtttcgggctttcagcccagaataaaaacagttgtctgtttgcaaaaaaaaaaaaaaaaaaaccaatncncctataatgatcctatn

SEQ ID NO: 5072 - DNA, 1827 bp, Triticum aestivum
  unsure (1)..(1827): unsure at all n locations
  Clone ID: TRIAE-23APR03-CLUSTER5313_1
aatacccttacgccgcacagctcccccgcccgcgctgcgctgtcgctgctgtggctgtgccgcttccggtcgatccccggcccgccaagccacctccgcctccaccatctccaccggcgggcgccatgaagcagccgaggtcgcggcaggagccgcgccggatgggcaactccgccatggtcgtcaccatgctgctctccctctgcgtcctcaccttcatcaaggcccgctactgctccaccccgtaccccaacaagccggcgccgctgctggacctggaggtggagagcggcgaggaccacgacagcagccggtgcaagatctccggccccatcggggaggaggagttcgaccccagccgccccacctgctacaacaccaggcaagccctcggaccggtgcgccgccgtgggcgacatccgggtccaccggcaaccatctccaaaattctacatcacgcccgctcggggaagggggtggcgaacgcgctccgcgcgctcccccgcaagcgccgtttctacctgaggcccccctacggcgtgcacaccctacggctgggacgccatcaagaccacctacctcgacaagcacgagcgtcaggctcgacctccccaagctgtcgcgcacgctgggttgcacgcgcgcagcctcctgccctcctcacgctgacactgagctctacttgcacctgcaagttcagtttctccatgctagattaggtcctcttcttcctcctctctctctctctctctctctcatgtttggttcacttcttgatttgttgttgttcttgtggtgccaaagattcactccgttcttcgcgcattttcttttgctccaccttcaaggggcccatgggcatcgacggcacccgctccccgggcggcgagaccgtggccgacttcaagcgcctgctccggcgcgccttccggctggaccgcgtggtggcgtcccacgacggggccgccagcctcggcaagccgcggcttctcatcatctcccgcaaggcgtcgcggcggttcctgaacgagcgcgccatggcgcacgcggcggcggcggcgcagttcgacgtgcgcatcgcggagccggacaaccacacggacatgcccaacttcgcgcggctggtgaactcggcggacgtgatgnaatgggggtgcacggcgccgggctgaccaacatggtgttcctcccgagccgcgccgcgcggcggcaggtggtgccgttcggcgggctggagtggctgtcccgggtgaccttcaaggacccggccaaggacttcgacgtgacctacatggagtacaacgtgtcgctggaggagagctcgctcaaggacctctaccccaaggaccatttctacctgaagcacccctacgacgtgcacaagaagggctggaacgccatcaagaccacctacctcgacaagcagagcgtcaggctcgacctcgacaagctcacgcgcacgctccagcacgcgcgcagcctcctgccctccccctccccctcctcgcactgacaccgagctctgcttgcacctgcaagttcagtttctccatgctagattaggtcctcttcttcttcctctctctctctctctctctctctctctctctctctctctctcatgtttggttcacttcttgatttgttgttgttcttgtggtgccaaatattcatttccttcttttctccttttctttttcattttggtaaaggaggagacgaacaagttcgtgtcaagcataggcaacaaagtgcccaaagtgttaatttacactctgtaagttcgatnattgtcccagcagccagcacacactgcagagaaaaatg

SEQ ID NO: 5073 - DNA, 1756 bp, Triticum aestivum
  unsure (1)..(1756): unsure at all n locations
  Clone ID: TRIAE-23APR03-CLUSTER5319_1
cccttccggggcccacgatcatcacccaacccccgcataaccctttgattccctccggatcggcgcccccctcgaagccatctcgtacggactccatagctcccacctccaagcacgatcaccagcgagctcccgaaccccatggcaggcggcggcgggaaggtggcgtgcgcggcgtggatccggcgccgggaggacaaggccacccgcgtcttcgcggtgcacggccggccctccccgccggccctggaggttctcggcttcgactccgggagctgctcgctctccgaggagcccctggcgaggattgtgctcggggacgatccagacgacgcgccgctcgccgtcgcggtgcaccccaccggcgacgagctcgtgtgcaccacggccaaggggtgcaggctatttaaactgatttttgaagagttcaccgttcgctttattgaaagtaaagctccagcgatcgaatctgttggactgcagaaatgtgttgccttcagcacagatggtgctaaatttgctatcggtggtgaggatgggcatctaagaatatttcattggccaagcatgaaggtgctcttagatgaacccaacgctcataaatccttcagagacatggatatcagcttagattcagagtttttagtttcatcgtctactgatggcactgcaagaatttggaagataaatgagggggtaccattggtcaacttgactcgatcttcggacgagaagattgagtgttgccgcttttctagggatggcatgaaaccgttcctgttttgcacagttgcaaaaggtagcaaagctgtgactgttgtttgcaacataagtgattggtctagaattgggtacaaaagactactgggaaaacctgcctccacactttcagttagcttggatgggaaatttctggctttaggaaaccaggatggtgatttttgtgttgtggatgtaaaggagatggagatttctcactggagcaagaaggtccatcttggttcccctatatgcggaattgaattttgtcctactgaaagagttgtaatctccacatcgccacagtggggagcagagctgacaagactgaatgtgcctgctgactggaaagaatggcaaatctggctcatactcttggcgctcttccttgcatcagccgtcctgttctacgtattctaccagaactccggttccttctggagcggaacgccccgacgggacgtcatcgacctaccaagccatgcagagttctgaacgagcctcctcggtctcgtgaaaaccaaaactcctggtgaaactgttcaccagtgtgattccctttcaagcaatccagcactgcagtgttatttatttcattcataccaagagctctttctttctttactagtgtagtcaatgttgtatcaatccagtggcgcgcctatctatctggcgacgtcagtatttatcggggggaacactgtaaaatgacactgtaaatgataatagttcgagaatgtcatcgagtgttaattgtttaaacacaataaagttggaacgggaggggggaaacgctcgttttcccgccggccacttggggtcgggtcatccctgctgatgatgcagcgccataatggctatccagtatatacccagttttaatgcctgtagcactttgaacccgtttaattctgatccttaagatcactgggctgtattggtacaagcctcngtggcngtantggacttctgattggtgccaactagtcatccatga

SEQ ID NO: 5074 - DNA, 1793 bp, Triticum aestivum
  Clone ID: TRIAE-23APR03-CLUSTER53225_1
ctgcgattgatttggttctggtcccgtggttcccctaccgtctcctgtctcatcttgctctctcctcccccaatcttgtctcccaccagattcgagcaaaccctaggattccctcctgccctctccagatgggtgagccgccgagccgagagggatcctattcctccttccccaactccgacgacgacgagccggagacctctggatcggaacgaggagcgggaggaggaggagaggatgctcatcgcccgctgcctctgcgccagcagctcgtgggggcctgccgcgccgacgaccgtctcaggcctctcctcaccctcaacgtctcatgctccgccgccgagaaccgcttcatttctcacctctctcagcacttcgaggtctcggaggtgggcatgctggcaaggtgtctctgcgttcccctcgtctcgctgcgcgtcggcaaggtcgaccaacacgggacccttctgtgagggacaaccatcagagggagagctcagccttggccttcattcgtcatcccgctttcacctcactttctcccctccccttggtcgacccccggaggtggctctgtcggacgatccctttaagccttccgatggcgggtgtccgccatgcccatcgtcactgcagtacagtgtaacccctctgcatatgccagttacatctgtagaaccatttccccagtcacctttgggcccgctggtatcaaatgaagtatcatctgtctcgtcattttctgcaaagttggatacaactaattcaccttcacttaatcttccatcgatactgcacgatccttcacttcacctccagcttcctacttcaattgttcccctgcatggttctatggtttcaacatatccgttacttcatctgccgtttcccacttcacctcttgttcctgtacatggttcgcaggttccaacattttccgttgcttcacctgccacttcctacttcaccatttgtttcattgcatagctcacaggttccaacatttacaccattgatgtctgatcctattgtgcatgtcccagtcattgatatgtgttcctccggtcaggcttatttggtgagttgtggtccttctataacttcacctgttcccctgctccctagcttgaagcctctgattccagaaaccgaatcgttggttgagaggagtgctagggaaacactaatgaggcttttagcttcgacaccaccatcaagcaacccccagctagtcaacattctccctgcagtccttactgatgtgcctgaaaatatttctcgatctcctaatgtgaacatgcatgttggtgtccatcgcaacgacctacttcttagctcatcttggggtgctaatgtgattggaagtgggatggcagccatggagctgcactcggaggatgaggtttccagtgggcatgatgctcatgctatggttgcgtttacggaatttgatgatatcaatggagaccgtgatcagccccatttccggaggatgtagtttgcacatggggttttcttgagctctttgttggtatgaaatgtctgaatattttgaacggcacttgtatctacatggtaataggctatctggttttggcaatacgatgatatatgcagcctggttcccatggcttccctgcccagctaaacggctgatgtggttgttaaatgtaattagttgtttgtacccgcccgggcggccgcgcgtcctagatcgtgctctccatcctccatgccatctttcgctcaacacctccgatgttctccatcgtacctcggccgcgaccacgcta

SEQ ID NO: 5075 - DNA, 1523 bp, Triticum aestivum
  Clone ID: TRIAE-23APR03-CLUSTER5322_1
ccctctcccctcccctccctctcttttgcgcgctggcccctgccgtttcggacccgccacgctccggtcccccgctccgccgccgccgccgtccgtccccgtcgccccacctcctccgccccgtcagaggaagctgcggactggcatgacctaggggggccatggaagaggcagacaaggaccgcaattcctgcaagcgcctgcgggcggtgggcggcggcggcgactcggcggatgcgtggcggagtttccgggtggcgcgcgcggcggcgggcggcaaggaccggcacagcaaggtggtgacctcgcgcggcctccgcgaccgccgcatccggctctcggtgcagacggccattcagttctatgacatccaggaccgcctgggtgtcgaccagcccagcaaggccatcgagtggctcatccaagccgccgccaccgccatcgatggtctcccgtcgttggactgctccttcgccttccctgtcgcctccccagcagcagaagacaccgcggaggtcagcacctcggagaccagcaagggctccgtgctctcgctcgccaacggccctgccgacaatgacaatgccgctcaccaagccagtgcatacaacgggggcagtgccaatggcacgtttgccgggctcctgcactgctccaacgccgccgacaagccaatgcagcatcagcatcagcagcagcagccgacgcttgcctactacgccgccccgggttcgcacatcgcgcccatgtccttcgagatgattccccagctcaccttctcccaggaccagcagcactgccaccaccaccaccaccaccaccatgcctctgtctccttcgacaggagcacacttcagtccaacaccgtctccacgcctcagtggcccccgtcccagcacccgttcctgatgcagaggttctctgctgctccagccgagccttcgcctatgtttcccttctttcttggaggcaacaacgctgctgctgcggctgctcctgcggcggccaatgcgccggagcggaggctgcagctctgggacttcaaggaggaaaggaagacatagtttcttcttgggagattcggcggtgtaccaaactaccaagtcatatgatccattcagcacagcaaaacccagaaggagagaagatgcaaggcaacgaaggagtcggcgccatggagccgcgtggaatgcaatcgctttgctggatctccgaatcttctccgcgcggttttcgttttgccgttgtcatcctctgacctatgtttttgtgatcggaaaccaaatgtttttgagctgcactctgttgctgtgccctctatctttctccttacgaaaaagatgtttttttttaactttctggcgaggaacagaatttcgcgcttgcatggatgctggtggcgtgtactgagtggcataagaaaaaaaaaaaaaaaagggggcattagcagatggtaatccaaacatgaatgattctttcatctgatgattatcagtcttatcacaaaaaaaaaaaaaaaaaaa

SEQ ID NO: 5076 - DNA, 1753 bp, Triticum aestivum
  Clone ID: TRIAE-23APR03-CLUSTER5337_1
ccgcccgctgccttctccgtcccgggcccttcactctcgtttccttctcctttcctttcccttcccctcctcccctaccttagcgtctcctcgccgctaccctcctaggtctcggcgccgccgccgacgccgccgagggtctccggcggccacggacgcggttcgctgttacccctgactgtccggcacgaatttgaagttggatataagaaatcaacctagcgtctgtcttgttctctgtgtagcgctttcctttggattgcagagaattttcaaacaaaccaacaacaacttgcatctgactgacttgaggtaactatgccaaaggacaggagctcccgttcagtctcgcatgagggctgccgatctcgtgtctcgccatacaagttgcggagtggttctcgcaggtcagaggaggctgctgctgccgccgctgcagcagcagcaaagcaggctgccgaatgggaggaagttcgctgtcctgtgtgcatggatcaccctcataatgctgttatgcttgtctgctcgtcacatgagaaaggctgccccctttcatttgcgacacaagctacagacactccaattgcctcgatcagtaccgcaaagcttccaaggagtcctctaaggattcaggggcagcagaatgcgctgagtgccagcagccagttaaactggcatgtccattatgccgtgggccagtcagccattggaccaaggattatgatgcacggaagttcatgaattctaaggatcgagcatgcaccatggagtcatgtgagttcaagggtgcatacaaccagttgaggaagcacgctagggaggatcatcctgcggtacgaccaacggaggtggaccccaatcgacagcgagactggcataggatggagcagcagcgtgatcttggggatttgttcagcatgctgcgttcggggatcagtggcagagaagatggggttggagtcagtgaaggtgacgagggcgtcagtgagagatccttgcacgccacgtccataacgatggtcttcattgtgcggtcaggcaggtccatcctacactacacagacggggaaatcccaggtcgtcgatcaagaacaattcttctagttggggagcctcgtggtgaagcctcccgaggaggaggatcaagcggcaatggtgatgctgaggccactactaccgacaatgaggaaactgacctggcaatgtcaacacaggcatctgctggttctcaggaagatgctggagaagctgatggcgatcctgcgcagtgatgctgcctaaggttagctcccttgctctcttggactgaaaagcctagcagcaagccatttatcgtggtttgccgggagtcgggtgcatattgggaagaaacatccgtgccagcttgtctcaggtgtagtcaggacattctgcctacaagcaagcaagaagaaatcacggggggaacgtggtggagctgagtagtgtcgtttacatcctgctggaatctgtcggcaaacataaacatttaatggtggcgttgtattattggaacatgtcccatgtttggtactccggtgaatcgtttcgctgcgttgtaattctctctagctcttctgctgaattccatttcgctgccttgtaattgcatctgaatagatcttttctgcattcgaaaaaaaaaaaaaaaagcgttcaggtttctagttccacttatgcctggaggaacctgagaaatcggaatatggtcgatgacaggtcgacgcggccgcga

SEQ ID NO: 5077 - DNA, 1787 bp, Triticum aestivum
  Clone ID: TRIAE-23APR03-CLUSTER5341_1
gcggcggacgcccccttttctttgatcggccaacgcgtgtccgacctctccagcaatttggcctagactagagtttatctcttgcatttccccgcgcgtagcagcaagcacaagaggagagatcgcgcatttatttacagagctgttgggagaatccaggaggaagacgaagtactccggtccgccgaagaaggaggagacaaaacgggggaggacagcgggccgccgagataggggaaaggacgagatggagacggacgggccggagatcgcgcaggcggagatggacctgcgggtggaggcccagtgggaggtggcgcagccggagctgctcccgtcggggaagctggactcctgcttcgaggacatccccgtcaccgacttcccgcgcatgctccacttacattcgatcgacatactttctgatgccagcgatcctgtaactattgagtaatagtccaagagcaccattttgagtggacccataagaaacgtcgattctccagaggatgctacttggatagacagatacatcggtattgagggaaatgctggtagtgaaatgtggttgctccatcagtctgatgcttcatgcgttgtaaaagctggttctgcggcacgaacagcgtgagtaagttgagcgtcttaatttggctaagtcagattacggaggaacgtcatctcgctggggatttattacaaggcgtcgttgcatcacccagaagcagcatcgtatgactaactatgtactatgaagtccaaaaaaatgtacatgatctttttgctcaacccaaatcttcgtcgatagctcgggttgggcttcctgttgcggcgcaattacctcgcccggcacgacttctgacacattcctcaggtaggctgcgtccttcgaataatagtacaaggatgaagagcctgcccgtggtagatataggggggaatcagattgagaatatcattacacaatcttccgttgtgcacatgcttgcagagtgtgttggactatcttggtttgaaagctggggaactaagaaactctgtgaactgggtcttcctctgatgaagccatacagacttgttaaggtaaatgaaggccagccagtcctaaaagccttccaactattgagggaaaagggggttggtggtgtgcctgttatggacacaaatggaacaaaagcaattggtaacattagcatcagagatgtccaatatcttcttagtgcccccaagatatacaaacaatacaggacaatctcagccaaggatttccttaccgcggtccggcaccatctccaggagcagcacgaagcgtcgccgttgctgcacgacgtgatcacatgcaaaagagacgacgtgatcaaggaaatcatactgaagctggactcgaccaagatccacaggatctacgtggtcgacgacaagggggataccgagggggtgatcacgctgagggacataatctccaagctggtgcacgagccacggcattactttggggatttcttcgacggcgtcgtccccctacccgcaaacagtaccgtatgacaaaactctgtgatagtatgtacaaaaaatgtacattatctttttgctcattccccatcttcttcttaagttgtggttgctgttgctgttgctgtggagagacctctgtggggagtactaatgaagaaccaatggggtggatgacagtgtgcgttgaataatctgagaattgcctgagctttgcgatgagaatgatgatgcctttcttctttcgaaaaaaaaaaaaaaaaaagcgggcgctc

SEQ ID NO: 5078 - DNA, 1573 bp, Triticum aestivum
  Clone ID: TRIAE-23APR03-CLUSTER5343_1
aactctagaatcttgtgcaggacaacgagatgttactgatgtagcagacgccatatctattgaaggaattggcaaaatagactgttctgaaatcgtctgcatcccagaagaactatgcagagatagcctgcggccagtaagctcccagcactgttttagcgtggtcgtggccgaggttacgatatgtggatttgaagctctgatcaggtcccctgtcggaggtgctttgtgaggggcatatacagtaggtataactgtagaagttttcatgcagtgtataatacccatttcacgtgccggaataaccctggccattttgattggcccgtgcgatttaagttttgtgcgtggggattagaactgagtattgatcgtcgaagtgtttattaattgctgcgtgattaattcttctgatgcatgacagcggaaggtacaacatacaattaacccagtcgtgaagcttatctagactagatgaggtttgggtatcctgtcacagccatgcctcttggacagctaaaatgcacagcagtctgaaggctttgcggatttttatataaagttggttttggagctctcagaattatgtgctgaacagaatttagaggtatggtatctggaggatgaattaatcagcccttgcctgttggaagaactaccgaatcaaggtgatcaaatagacgatctgaaaattctgtttgactgtatctgcgaagctctaacagagatccaggagagatattttagactctcttcttggttgtcgtttctcaaacacgacatacgggcacctccaatgggagaagacctcgtcgcagaagttgacaaatatgttgacgattacctccgacatagttttcaaagtacattagatcatacaataaaaaaggatttcgaagttcggacatggatggacattcggtcgaagactgaaggtatcgttgtggagatatgggagtttgtgttagaggaacttatcgatgaggctgttttcgatttgtggatttgaagctctgatcaggtcccctgtcggtggtgctttgtgaggggtatgtacactaggtataactgtagaggttttcatgctgacaataacaccattttacgtggcagaataacacgggctgttttgtttggcccgttcgagtaaagtaatgagagtgtgaacttcgacggcgttttgctcgtcgaagtgtgtataactgcagcggaagaaacttctctgatgcatgacagcggaagtttcgacctgcaaacctcccagccgtgcagcttgtctagactagatgaagtttgggtaactgtcacagccatgcctcttggacagctaaattgcacagcagtctgaaaggctttgcggattttcctcttgtacattgtgatcagaggtgatcacacatgtatattgtttttttccttttctttgtgtttgtgtgtacatgtgtaatagtttttcgagaatcacacatgtgtaacagttaccataatatatgacagatcaaatgctactaaaaaaaaaaaaaaaaaaaaaaaaaaaaaaaaaaaaaaaaaaaaaggaaaaaaaaaaaaaaaa

SEQ ID NO: 5079 - DNA, 1481 bp, Triticum aestivum
  Clone ID: TRIAE-23APR03-CLUSTER53558_1
accgagcttttccttcttcaagcaacataggagtagtcttcgctctgctcctcctctcccccaccagctctcgtgctcgccgccagccccggacagcgccgccccagctcaccgggagggcagcaagcaatggagcggagcctcccccccgtccccgtccccgcggcgcgcgtgtagcgttttgatccgcgaggatggcgatggcggcctacagcaaccaagcgcaggcgatgatgagggactacctgctcgccgacccgctcgtcccctacacctccgtgctcatcggcgttttcctctgcaagatggcttatgacctcacacggatattgagctcattctacttcaagggctattcttctttgacaaaaatacagcgtgttgaatggaacaacaggggtatgtccagtgcacatgcgatctttatcgcagcagtatcagtatatcttgttgcatctacagatcttttctctgatcgccttaatgggcctattacattccgcagttcgatcatctccacctctgcattaggggtttctgtgggttacttcatcactgatcttgcaatgatcttctggttgtttccttcccttggtggaatggaatatgtactccatcatactctttctctggttgcaatagcctacacaatgttgtcaggggaggggcagttttacacatacatgattcttatttcagaaacaaccacccctgaaatcaacatgagatggttccttgacaccgctggattgaagaagtcgagcgcctacctgattaatggtattttgatatttgttgtatggctggtggcaaggatatttttgttcctgtatgtattttaccacatctatttgcactacagccagataatgaagatgcacgcatttggttattacctgacactgaccgtgccgtcggtgctctttgtcatgaacgcaatgtggtttacgaagattttgaaaggggtaatgaaaacactgtcgaaatggtcgtaatcggagtaggctttgcggaccagaagtgcaacataactgggtgttcctgccgtgctgcactgcgtgtgacttgaatatgtaaagttatgaatatatgaattaggctttgcagaccggaagtacaacgccaacttggttggtgttcctgcagtgctgcttgagaccttgatgtgcaaagttatgaacatatcggcgtaactagggaaagtgaatatgtaaaatactagcaaacaagttagattaggctaaatcgcgctattttccatgagctgggatttcctggccagtttggcactgtactgaagttcctattccaatcctgcaatctgtgtataccaggccaggagataattccattgcatctcttattcatactaaatttgataatctaatttgagatattatatataagctgttgttattccaagaaaaaaaaaaaaaaaagagcttactccatagcgactacctcgagggggggcccggcac

SEQ ID NO: 5080 - DNA, 1061 bp, Triticum aestivum
  Clone ID: TRIAE-23APR03-CLUSTER53744_1
aaaaggagtggtctccgtttgccgcgtgccgacctcagcaacgatgggcacgggcacgggcacggcactagggccggccatggccgccgccgcctccagcacggcccaccggcctcggccgctgcctgccgcggcgaccgcgaatcgcagcgccagtcgccccaccgcctccgcgccgcccgggagaacgctggtctgctccgctccccggcagtcgaggccgccgcggcgcgccgtcgcgaccacggcccgggcggcggaggccggggcgccgtcgtccacctcgccggacgccgtcacctactcctccagcatcgacaccgacatgcccctctacgagcccctgggggtgtcgttcgacgagtacctccaggaccgcccccgcgtgttccgcgccatgttccccgacgagagccggagccagcagctcagcgatgaggagtggaggatccagatgctgccgctggagttcctcctcatcaccgtgcgccccgtcgtcgtgatgcagctgcgcaaccgcaacgccggcgggctcgacctccgaatcaccgagtgggagctgagggggctggacagcggctacacgccggcgagcttcgacctgggcgtgcgggggtcgctctacgcggacaggggacagcggcgcggcagccggctgaggggccacctggagatctccatcaccgtcgccctcccgccgcccctgcgcatcgtgccagaggccatcctccggggcgtcgccgagtcggtcctgtcgacgcttgccgagaggatgaagcgggacgtggacgtcggcctcgtcgccgacttccggaggttccggctggagaaggcggcctccagagcggcggtggcgagagcggacagcaaagcctgaaggctcgctcgtgttttcttgttggggattcgttccaaggattgtttttgcaagatcctgtgatgttgcgtgcgatacatacatatgcattcccgtgtatagagttcgattcgaagtacctgtaggccctttctctggtgtcaaaaaaacttgaaccaaagttcatgatcctttaaaaaaaaaa

SEQ ID NO: 5081 - DNA, 1805 bp, Triticum aestivum
  Clone ID: TRIAE-23APR03-CLUSTER5383_1
ccgcttcccagcggccgtccggccggcccgcggcggggatactagtcgctcgacctcatcgatggccgtccggtgtcacgccgctgctgccttggtctcgtcccgagcgcgcctgccttcctacctcccgcccctcctcccctccgcgcgaccccgacccggcacgacccgcggcggcggctacaggcggaccgccgttcgcgccatgggcgccgcgccgtcgtcgccttcgccgtccggacaggccccagggaaagcggataacgcatctctgagcgacgactgagttgaagaaccgccccaaggatcagctctatgccgccactcggcccgccgcagctcggtgggcgttcccgccggtgcactggaacacggagccccctggcctcggccgccccggcggctgtggcgccccccgcgtggagtcagccaccccctttgatagtggcactggatggccgtcatattaccagccggttggcgacaatgtgaaaagcaagcttgatatgtcgatcttcttcatgccccggaccgagtccctgtgcgccgtctgcgacgctcatctgggccacggtgtggaccgcgggcccccgccgccgcgcaggggacccggcttctgccctgcggctcgcgggcttgggccccggttgttcccgcagggaggggcgacctgcatcctcgagcgtcctccagcggtgccgggccgctggtatgatctgtggcccccccgggtccccgggctgtcccgccccgcgctgcgcctggaaactcctaattgccaaaaaaagaatactagtcgctggacctcatcgatggccgtccggtgtcacgctgctgctaccttggtctcgtcccgagcgcacctgtcctcgtacctcccgcccctcctcccctccgcgcgaccccgacccaggacgacccgcagcggcggcggcagctacaggcgggccgccgttcgcgccatgggcgccgcgccgtcttcgccctcgccgtccggacaagccccagggaaagcggataacgcgtctctgagtgatgaggagttgaagaagcgcctcacaaaagaacagtattacgtcactcggcagaagggaactgagagggcattcacaggggaatactggaacactaaaaccccaggcatctaccattgcatctgctgtgacacccctctgtttgagtcatcaaccaagtttgatagtggtactggatggccgtcctattaccagccggttggcgacaatgtgaaaagcaagcttgatatgtcgatcttcttcatgcctcggaccgagtccctgtgtgccgtctgcgacgctcacctggggcatgttttcgacgacgggccaccgccgactgggaagagatattgcatcaacagcgcgtctctgaagtttaagccccagtagtccctggaagaagaatcaagatgcaagcaccagtgcgtcccatgtaaattttggttttggtatgaactatttccagtgtagtagcctagtccgcccggtctgcgcatgtaaattgataatttccaggtttgtaatttgtaaagccatttgtccgaaacatctgcatgttcctccatgagcagtaccgtttggcccaaaaaaaaaaaaaaaactgcgcatcccgtccgctcgagatgtgccggcaccccctcccgtatatcactagattaacgctctagttggcatcatttacacaaggtgatgtgatacctcgattccccactaacgcgtgaagactccccttcctcagtgtataaacctagatcccggacgatggcctcccacatggcacctaattgg

SEQ ID NO: 5082 - DNA, 1293 bp, Triticum aestivum
  Clone ID: TRIAE-23APR03-CLUSTER53888_1
aaacccccgaaacaaccagatcccgcaacccgcgaaacaaaccaccagccaagccggcaagcaatccgcgcgcccccattgttctcctctccctctctctctcagcatccgctccgagtcagctccgacggcatggacgcgcccgcacctgccaagaggagacgcggcggcggtggcggaagcggggagaagaaggatctgttccacgtcgtccacaaggtgcccgccggcgacagcccctacgtccgggccaagcacctccagctcgtggagaaggacgcggaggcgtcgatcgtgtggttctggaaggcgatcaactccggggacagggtagacagcgcgctcaaggacatggccgtggtgatgaagcagcaggaccgcgccgaggaggcgatagaggccatcagatccttcaggcacctctgctccaggcaggcccaggagtccctcgacaacctgctcatcgacctctacaagaaatgcggaaaagtcgacgagcagatagagctgctgaaacagaagctcaagatgatatgcctcggcgaggccttcaacgggaagatcaccaagacggcgcgatcccacggcaagaagttccaggtctcgatccagcaggagatgtcacgcattctgggtaaccttggctgggcttacatgcagcagaacaactatgaagccgctgaattggtttatcgaaaggcccagactatcgtacctgatgccaacagggcgtgcaacctcgggctgtgcctcattaagcagagcagacatgaggaggcagtgcaagtgcttgaggatgtcctacttcgcagaatctccgggttggatgacgacaaggcggttgcccgagctgagcagctcctccgtgagctcggtccgacaacacacatttcatcgccctttgatattggcttgagtttcaccgaagagatcatggagagactagaccttgtgatgaatgattggacaccgttcaggtcgaggcggctgcccgtatttgaggagttagatgcattcagggaccaaatggcttgttgattcattacttcgttggtttttaaactttaacgtgcatttgcgtgtggtaaatagaagttgatgtgcatgtatgtaggaggttttgtggatgttacaggtgtgaatgagagatttgataggttgtagatatcataagcagctagggttgatgcaaagcgttcccttgcggaataatgtggtttcagttttgaatgcagttggtctttgcccaaaaaaaaaaaaaaaatgcttatcgatacgtcgacctccaggggg

SEQ ID NO: 5083 - DNA, 1938 bp, Triticum aestivum
  Clone ID: TRIAE-23APR03-CLUSTER538_1
aatagcgaatcgtcgaaacggatcagagttttgggaaaaaaagacagacagagaggaaatcgccgtcgcattccacgtcgcgggggatgcaacacgggagcgccgtctacgccgcccccgaccccgcgggccagtactaccctcaccactacgggccgcgggggccaccactcccctccccaggacgcggccccgcgatccccggcgcgtcccgccgccgccggcccctccaccccggggggctccccctacgagccgccccccgcccttccctgatacacccagcccaggacgcccggctcccaccccacaaacccacgccccacccccccgaacccgcgctagaaccctaccacaggttccccggagcccacgcaggggcccgcacggtcggaacccagcgcccacccggccgactccgggagcgcatacaagggcaccgccggcccccagcgagacgccgcgcaaggcttcagggacgccgtgtccgggggcgcgtggaacaagaatggcggaactggcctggcgcacttgcgcgcgtgcagcttaaggccgacgcgcccaggacccggcacgtgagacggccgcgtccggaggatgggaccctccttttgacggtcagggccccattactgcacagggggccggagcgtgggatgtcaaattaggctgttggagaaggctatttctttcccgagttctcaagacagaaataggggtgtggatccaacatgtcgatgtgtgtggcggtgtgggggtgcacgaggtacgggttatgctgttgccttggggagccgggagccctaccgatgtgctgtgccagactgaaatggatggaatccgcatgcttgatcccagcacaagcaggaccctaaggatttatccccttgatacactgacgaaatgggaggttttggattcaactgtatttgcgatttgggcaaagacttcagtagattttgaagcaaagcgaataaggctgaagtcaaacagctatacttctaatactttgctcgacactgtgacagcagcaacagtccagtttaaagagatcggtgaagatgcaagagccaaaggaacagtagatgctggtaaatcctcaatacaatcaaatgagaagaaaaaaggttttgattggatgtttgcgaaacctgttgatgaagtgaaagatcattgggttccagatgaggctgctaagaaatgccagtcttgtgctggtgatttcagtcatttcaaccgcaggcatcattgtaggaactgtggcgagatcttctgtgataaatgcagccaaggaagaattgctctgacagctgaagataatgctccacttgtccgagtttgcgatagatgcatggcagaggtttctcagagacttagtatggcacaggaagctgccaacagatctaccacagtgcaaagtcatggagatcttgcaagaaaactgaaggaggaactggagaggaatcgcaagtcttcagggacggcgtctggaggtgcatctggaacaagaatgcgagaagttgcgtgccctacctgcacagtccatcttcaggttgaagttccaatctctggctctgaaacagtcgaatgtggagtgtgccagcatgcttttctcgtcagcgccaattgatagggagacagagcgtgacctgtcaaattattctgttgataacactatttgtttccccagttctataccagaaataagcgtgtgtgttcaacttgtagatgtttgtgtggctgtgttggtaatcgaggtaggatgtatttatttttcttgtacatgtgtgttctgaacatgggaagttgttgccaaaaatgctggttgttcgtgaagaattccaacagaatactcgttggtccaaacagcgtgtacttctaatctgacagtttcttaagtcacgtactgaccgaagttctaactcgagggggggccgt

SEQ ID NO: 5084 - DNA, 1738 bp, Triticum aestivum
  Clone ID: TRIAE-23APR03-CLUSTER53914_1
ctcctttgggtttgtctcttcccctctctccgcccccttctccccacccaccccgccctgctctcccccctctgcgggtgtgttgtggaggggaggaggagcaagaaccacgagctgctgctgctgccgctgctgccaacgctgcacagcctgggctcgccgatcattgattgcgcatctattaccttcctcttctgtgctaaacaatcccatctatcccttatatatatcctcctggtccttgccaatcgctcctcacttctagatttcggggattgcccctccctaccgtagctttgctaagtagttgcttcttcttcttggtttcttttcttgattgctttgggtctccggttttttgggtcctcggtttcttggtcctcccctgaatcttgtagagtttgttcctttcgccgtcggtagccatggacgacaggattccgccgccgcctcacctgctgcagtactcgcagtcccctgtccattcttcgcctcatcacctccacctcaattccatgatttaatcagcctcgtctgctagactaaggtatatgggtatgttgctgactgagaggctgaaggtaggcacattggttcaagttcttcccttctgcaccaggctcttgaacccagagattaagagggtttgcgggttgcttcttagccatctaaccataattttgttgatgctgagagaattgagcatggtagcccgtcctggccacccggcgaactggtcaatcgtcgactctgggggcttggtggagggtcaggaaggcaagcagagcatatgggggttctgcaagcatcaccaatgagctggaatggtgctccagcacttggtggtactcctggtgtcttgtgacgcgtgaggctcctggggcctgtggacaagtatcctaacttcaactttgttggccgtctattggggccacgaggaaactccctgaaaagagttgaagctacgactcaatgcagagtttacattcgtgggcgtggatcagttaaagactctgtgaaggaagagaagctgagagataagcctggatatgagcacctcaatgaggcactgcacgtgcttgtggaagcagagttcccagcagacattattgatgtgcgtctaaaccaagctgtgaccatcctggaagatcttctcaaaccaatggatgagtccatggactactacaagaagcagcagctgagagagctggccatcctgaatggcactctgagggaggaaagccccagcccccaccttagcccgagcgtgtccccctttaactccgccgggatgaagcgtccgaaaacggggcggtgatctaaaaagacttggtctgtctgaatctgatgacaagggtggagatgattggtgttgcatttgccgggatgatgagtgctggcctatgcctgtcatgatctgcgtgctttaccaaccgtagatgggtccgtgggcgaatgatgatcctcggtgggcttgattgatgtttgacgctgttcctattatttattctttctgtgcaatctgactttggaaaaaatgacattgtttattggtttggggtaagttaacaaggccaggtggccatccaagtgtcggacaataatcagccaggtattgtgtgcctggaaaaaatagctgtaatatgatattgtcatgtgctggtgcttttgtgtgctagtagtggtagtactagacaggcaggcagacaggctctgttaatgattgatttgcattcat

SEQ ID NO: 5085 - DNA, 1851 bp, Triticum aestivum
  Clone ID: TRIAE-23APR03-CLUSTER53935_1
ataagaggagatattcttgtaggagatgagtcctcgaaccccggtcctcttcccattccatttccacaccacctcccttcgcgtggtccgggggcgggcatccatggactcttcctccgaggcgccgctgctgctcagcagggggagcgagcacaaggaggtgcccgatgaggcgggaggcaagcggccgtggtggagggaagcggcggaggagtccggccggctggccgcgctggctgcgccgatgatcgcggtggcgctgctgcagctgttgatgcagctcatctccaccgtcatggtggggcacctcggcgaggtcgcgctcgctggtgccgccatcgctaactccctcaccaacgtctccggcttcagcgtcctcataggactggcatgcgcattggaaactatttgtgggcaggcctatggagcagaacagtatcataagttatccttatatacctacaggtccatcattgtacttcttattgtgagtgtgcccatcgccattgtatgggttttcattccggaagtacttcctctcataggtcagcaaccagaaattgcaaatgaggctgggaaatatgcattgtggcttatccctggtttatttgccttcagtgttgctcaatgcttttcaaagtttctgcagtgtcagagcctcatctttcctatggttcttagctccatgatcacactcgctgtatttattcctctgtgttggttcctggtttataaagttggtatgggtaatgctggagctgctttatccgtcagcatctgcgattgggttgaagtgattgttcttggtctttacatcaagttctcaccttcttgtgagaaaacacgtgctccactcacgtgggaagcttttaaaggaattggcagtttcatgagtttggctgtaccgtcggctcttatgatttgccttgaatggtggtcttacgagctgcttgttctgctttctgggatcttaccaaatccagcacttgaaacttctgtgctttctatatgcatatctacagtggtgctgttgtacaatcttccttacggtattggaacagctgcaagtgtgcgcgtctcaaatgaactaggtgctggcaacccagaaggtgctcgcttggtggtaggtgttgctttgtcgattgtagtttgttcagcagtcctggtgagcacaactcttctagccctgcgccacttcattggaattgcattcagcaacgaggaggaggttgtagattatgtcaccagaatggtacccgtactttccatttcagtcattacagacagcttccaaggagtcctttcaggtgtttctcggggctgtggatggcagcatttaggcgcgtatgtcaacctgggtgcattctatcttgttgggatccccgttgcactcttttttggttttacaatgcaactacgaggaatgggattttggattgtagcgtggtcgcggccgaggtcacaggtcactctcctatctgtgataactgccactacaaaatgggacaagatggctgacaaggctaaggagagagtatttgaagacaggcttccaacacaataagacttgaagaactgccatgtcaaaattttgaagagctaaataatcagagaattctaattacctttaattactttgagaaaagcatcatcgatgttcttgtcacgtgcaaagaaaattttcacacaattggctcagtttggcatggtgtggtttcatggtggactggtggtgttttactgtttctttctttcttgataggttgttttattgttttgcgtggtgcctatcttcccttgtattggatttttttgcgggcaagctttgtacctgcccgggcggccgctcga

SEQ ID NO: 5086 - DNA, 1634 bp, Triticum aestivum
  Clone ID: TRIAE-23APR03-CLUSTER539_1
gaattccgcgttgattgcagattggggaattgagctgtctctgttgtttgatcctaagtgccccaaattggagtcccttgtggagaaaatcaaggagattgtggagagcaatgaagtgggaagattgcctattactcccaagggagcccgtgactttggggccgggcaaatggccataggcgagcgtgcgtattcaataattacaggtgtgtctaaggtggacggcggagccccacatcatagcccagtattctaatagaaggaaggatagctggacgagtatggtccagacaggaagttggcacctgtactaacagatcagagagggcagctttgttagttgagctatgatctgattggtccatttgcacgttatgatgccatgtattaaataagtgccatttagatgttgcaggtggtcaaagtctacaggtgtgataacttatcaaatgaatgaaagcgagaataagcgatgttggaagcaaacagcggatatggaaaaaatggtcaacggatggcatggaaaaatggcaaacgaaggacatgaataatggataaggtgcataatggcgattttgagataaaatggaattccagaaagatacctaacggaatgtgggaggtctgtctcttacatgcagcgatattaggaccagtatcctagatgaatgacgaacccaacaaactcaccttagaagagtagcagcaagtgcaacaggaagagccgcggctactagtaggcatgcatgaacatgttatcaaagtgttaagataaaaactgctggcttctgatccactaactacaaggaggcaggaaaagaccatatacgatgctctcgcactggacgttgtatcgattgaatatgatgtcgcttatttcccctgttctagaataagcaaaaggccttgacaggataagttttgatttaagccttgctagaggccttgattactacacaggtgtgatatatgaagctgtgttcaagggcgtcacacaggttggctctattgctgctggtggcaggtacgacaaacttgtgggcatgttcagcaacaagcaagtccctgctgttggcgtcagccttggaatagaaagagtctttgcaatcatggagcaacaggaaaaggaaaagaaccaggtgatccgggcgaccgagacggaggttttggtgtcgattctgggcaaggacctcatattggccgccgagcttgtgaacgagctgtggagtgctgggataaaggcagagttcaagctcaccaccagggtgcagaaccacataaagtatgcgacgcagacaggcatcccgtggatggtgctggtcggcgagtccgagttgagggacgggaaggtgaaactgaaggacattagggctaaccaggaagaggaggttccaaggaaagatttcgttgaggtgctgaagcagagattatctaacccttagagatgaaatctttgaaagatgtagaacgtgtgtgactgggcgatacatcgttgttggttttcctgtgcatccattttgctgatgctgagatgtgtacacaggacggtgcggctccttgatttaatactgatgatcacaaattgtttgaactgttgccttatatgttgagtgcttggtggaatgaaatccctg

SEQ ID NO: 5087 - DNA, 1512 bp, Triticum aestivum
  Clone ID: TRIAE-23APR03-CLUSTER54183_1
ttttttgtctctaaccctttttttttttttttttgcaagcagtaaaaagtttgtaatgattcgcttcatcggtctcgctctataattggaaggaaaaaagaaggaagcagatgacgacccatgtttgaaaccagaccaaaattctgtggcaagcaccagcccggccgagtgagagtccagtctaacccacccaactcaagttccatcttacgaataatactacaacaggaaacattttctgggcacactttaacgccctgggcttattgacaacatctttctttcacgctacaaggctcccgatgggccaccgaatcagtctttgttttcagcgtttccgcagtagccataggggttcttcttggcccagttccactggtccctgcacatctcctcgatcccgtacttggccctccagccgagctcctcttcggccttggcggtggacgcgtacacctgctccgaatcgcccggcctcctggggcacatcttcaccgggattttcttgccgtatgccttctcgaacgcgctcaccatctccagcaccgtcgtcccgcgccccgtccccaggttgtacgccacacagccgatgtcaggggtggcgaagagcttctcgagcgccgcgatgtggccgtcggcgaggtcgaccacgtggatgtagtccctgacggcggtgccgtcccgggtgcggtagtcgtggccgtagacgttgagctcggggcggcggccgacggccacctgctggatgtaggggagcaggttgttggggacgcccttggggtcctccccgatgtcgccgctctcgtgggcgccgatggggttgaagtagcgcagcaggatcgtcctccactccgggttcgcgtgctggtagtcgcgcagcatctcctccaggtacagcttggtcctgccgtacgggttgagggccttgaggggggagtcctcgaagcagggcaccttctccggctggccgtacacggtcgccgacgacgagaacaccaacttgttgcatccgtgcttcttcatgacgtcgtataggttgacggtgccgacgatgttgttgcggttgtacatctccgggtgcgccacgctctccgccaccgccttcagcccggcgaagtgtatcacggcgtcgtacctcttggcggcgaacaccttctcgaggtcatccttgatcgtcaggtccccgaagatgaattggaggcgggcggagagggcggggccgacgatgtggcggacgcggtcgagcgcctcggggacggagttgtggaagttatccaccacggtgacggcgtagcccttctccagcagctgcagcacggtgtgggtgccgatgaaccccgcgccgcccgtcaccagcacgctcctcccctgcgcctcggcgcccccagccccgcccccagcgccaacgccgccgatcgccatctgtcgcgctctctctgcccgatctcgcgctgtcagccctgtttcgttggggattttgcgctcccgtatgtattttgcgctcgcgtatgt

SEQ ID NO: 5088 - DNA, 2033 bp, Triticum aestivum
  Clone ID: TRIAE-23APR03-CLUSTER541_1
ttttcccctccctcactaacaaacctccgttcctgttttaagatccgatctccccttcccccctcccctcccctcccttcctcctgaccacccctcctcgcgctccagctaaatccacgccaccgatggcccgcacgggcctcgcggacgcaacggcgccggaagccgacgcaatgccggccgccagcaaggacgccgccgacgtccgcatgatctccaccaaggagctgcaggcgcacgccgccgcggacgacctctggatctccatctccggggacgtctacgacgtcacgccctgatctgcgccaccacccgggcggcgaggtcccgctcatcaccctcgccggccaggacgccaccgacgccttcatggcctaccacccgccctccgtgcgcccgctcctccgccgcttcttcgtcggccgcctcaccgactacactgtcgccccccgcctccgccgacttccgccgcctcctcgcgcagctctcctcccgcgggcctcttcgagcgcgtcggccacacccccaagttcctgctcgtcgcaatgtcggtgctcttctgcctcccactgtgctgcgtcctcgcctactcccgcaccgggggcaacatggttgccgggggcctccttggcttcatctggatccagtcgggccggcatggccatgactacggccaccagcaacctcccaggcatcctgcccacaacggcctgctggaggtgattttgcgtgaccttcgcacggaaccctgggctgcctgatggtaccgccacattctcggaggcaaatttaatgacatcgaacacgctaagggctgcagcattgcaggctaggcaagccactactggacctcctccaaagaatccggtctggggagctttgaccactagcgcatgacggggttcgaggactggaccaagatcttcttcaacgcgtcgagccttgcgtgcaagcagttattggattttgtctcgatagcgtagatattttgatccttctagctcttgaaatcgtattggattttgcgtgttgccaggttacaatttttggagttcactcgtgtgttcatgcttcagctgtggacggtgacaccacatttggattggtgggttcgcgttgccatggtaactgcatgattagtccttgaggtacatcaccaaatgcattgctgagcgatacatccttttctgcttgcttgctttgtgatcacaaaggagaccgaatggtttgttaggcaagcagcagtcctacttcatagcaagtgttccccgtggatggggtagttccaggttggactgcaaaaccaggtggaacattatttgtttcctcgcctgcctcgctgccactatagaatggtcgcaccaattgtgcgtgacctttgcaagaagcacgggctgtcttatggtgctgccacattctgggaggcaaatgtaatgacatggaagacgctacgggctgcagcattgcaggccagggaagccactactggggctgctccgaagaatttggtctgggaagctttgaacactcatggatgactggggatcaggactggagtatgagacaattgctagcgtcgagccttgcgtgcatgcagttatctgattgcttctcgattgcgtagagatattgatccttttagctgttggaatcgtgttggatttttcgtgttgccaggtgactatctttgcagttcaattgtggattcatgcttcagttgtgtacttgtacaccatatttagattgttgggttctccctatcatggtaactacatcaatagtacttgatttatatcattgaatcccgtggcttatctttacatccatttcattttgcttgcaagttcatgaaactgtaaactcaattgatggtttgtagcgtgtatatcccctgctgctatggcagcttgaactgcattttgggaacatgacgattccaataataaacgtttagacattttctgctgcatgtgtatgcccttcatggtttaatatatatttttcattcactgaagtgtcaaaaaaaaaaaaaa

SEQ ID NO: 5089 - DNA, 1605 bp, Triticum aestivum
  Clone ID: TRIAE-23APR03-CLUSTER543_27
actcggaactcggaaatagttctccatcccaagcttctcttctcccttctcttctcctctcgcgcgcgttgcctcgaaccggaaggaacagcgtccattccattacagtagagcttggtgtttgagagacgatcaatccgtcgtcgaccaatggatccatgggtcagcagccagccttcgctgagccttgacctgcacgtcggcctcccgccgatggggcacccgcacagccaccaccaggcggcgccgatggtcgcgctggccaagcccaagatcctcgtcgaggagaacttcatgcagctcaagaaggaccctgaggtaggcacacacgtccatacagaaacaaatcaagaacgccatgattttgattctgcttgcttgggtttatctgcgagcttgaactgaatgtttttgtcggtatataggttgcggttcttgagtcggagctacagcgggtcagcgaggagaaccggcggctgggcgagatgctcagggaggtggcctccaagtacgagaccctgcagggccagttcaccgacatggtcacggccggcgcccacgccggcggcaataaccactacaacaaccagccgtcctccgcgtcggagggcgggtcggtgtcgccgtcgaggaagcgcaagagcgaggagagcctcggcacgccgccgccctcgcaccagcagcactacgccgccggcctcgcgtacgcggcggcgccggaccaggcggagtgcacgtccggcgagccgtgcaagcgcatccgggaggagtgcaagcccgtcgtctccaagcgctacgtccacgcggaccccgccgacctcagccttgtcgtgaaggatgggtaccaatggcggaagtacgggcagaaggtgaccaaggacaacccgtgcccgagggcctacttccggtgctcgttcgcgccgtcgtgccaggtgaagaagaaggtgcagcgcagcgccgaggacaaggccgtcctagtcgccacgtacgagggcgagcacaaccacgcacagccaccgaagctgcaaggctctggcggcaggaagtccgccgacgcagccgccgtccatgcgtcgccagcgccgccgctcgcccagcaacagccgatgcagcaatcgacgacggaggcgggatcggccgcggataggaagaacctggcggagcagatggcggcgacgctgacgagggaccccgggttcaaggcggcgctcgtctccgcgctctccggccggatcctcgagctctcgccgtccgatagttgatcaagcgagcggcgtcggcttcgtcttggtttccatttaattagcatttgtagctgaaaagtttagatcatggtcattaattttgaatttctcgcctatgcagagattaattgtatataattacttcattagctctaccgaaaacatagtaccgaatttgtacaacattctagagtggatgcagcaaagatatacttccttcatcccaaaataattgtcgatgatttagtataattttcattagttcgtagatggaaaatgtgtacaagattatccgttttgtttttcaagacgaaagtagagttttccgatcaaaaaaaaaaaaaaaagggcgccgctcgcg

SEQ ID NO: 5090 - DNA, 3080 bp, Triticum aestivum
  Clone ID: TRIAE-23APR03-CLUSTER543_46
ctccatttcttttgtccctctctctctctcggtgttaaaacgcggccgccgtacgcgcattgcctccttccttccgagcagtcgctggctcgcttcgactcttctccttctctcctcttgccggggcgttcttggagggggactgtagctagcctagcagtgttcttggagctgctgccggtggaggtctgcaatggggaggagcggccatgcctgctccgttcttgggtcgctgctgctctgctcctgctgctgggcccggccgctgcgcagaagggctcgacctggaagacgctgagtggcgatgctccagcagtcatagctaagggtggtttctcgggcctatttcccgactccagtgaccctgcttattcgtttgctgtcagcaatcaggattcagcccagtggtgcgatgttcggttaaccaaggatggcgttggcatctgccttccagacataaaaatggataactgcacaaccatatccgatcttttcccaaagggaaagaagacctaccttgtcaacggtgtgtccacgacggggtggttctctgtggactataacagcattgacctgaccaatgtaactttgctgcgagcaatcttgtctcgtactaataggtttgatggaagcttcacgctagttcaagttgaagttgcactgtcgcaatataaggcccctgcttggttgaatgttcagcatgacagtttctacagccagtttaatctgagcatgagaagctatatcctgtctatgtcaaagcaatacacggttgactacatctcatcccctgaagtgagtttcctcaaaagtctagttggaagggttggcaggaagacaaagcttgtgttccgttttcttgatgaaggccttgtcgagccatctacaaatcagacatatggctcaatgctgaaaaatctatcatccatcaagacttttgcttctggaatacttgttcccaaacactatatctggcctgttacggcagataattatctgcaaccctctacttcagtcgtggatgatgctcataaggcaggcttagaaatttatgctgctgattttgccaacgactttgcactcagctacaactacagctatgatccgttagcagaatatcttcgcttcatcgacaatggtgccttctgtgttgatggtctcttgactgatttccctatcactccgttagaggccatcggctgcttcagtaacctgaacaacaccaaggcagatcatggggcacctctagttatctcccacaatggtgctagtggtgactaccctgactgcactgacctagcttatcaaaaggcagttgttgatggtgcagatgtcattgactgtgacgttcaagtgacaaaagatggcataccaatatgcatgagttccattgacctaatggatgtcactactgttgcatcctcacaatttgcttctcaagcgggtgtcataagtgacattaaggctgttgctggagtctataccttcaacctcacttgggaggacattgccaacaacctgaagcctatgatatcaaacccatttggccagattagcctatcaagaaatcccagaaacaggaacgccggaaaattcatgagattatcagacttcttggcttttgcaaaaggagaagatttgtcaggaatcatgattactgtggagcatgcttcattcatggcagagaaacttgggtttggtgtggtagatgcagtgatcaaagctgtcgatgattccggttacagcaaacagaccgccaagaaagtgatgatccagtcaacaaacagctcaactctggtgaagttcaagcagctggccaagtataaccttgtgtacaagatcgacgaagtcgtgaaagacgccgcgccttcctccctcgcagacatcaaaaagtttgcggatgctgtttctgtcagcaccaagtccgtttacccagagtcgagcaatttcctgataaaccagacgaaccctctcgtcaagtccctgcagtctgctggtcttccagtctatgtgtatctgctgaggaacgagttcttttctcaaccgtacgacttcttctcagacgccacgtcacagatcaacgcccttgtgcacaaagggggagagggaggcggagtggatggactcatcaccgatttccccgggacggctcacagatacaaattgaactcgtgcaggaacatggggacaagacgccctactacatgctgcctccccagcgcggcggcctccttggggtcatacaggataaagcagcattgccaccagcaatggccccagagccggtgttgactgtctccgacgtggcggagccgccccttcctcctgtgagcaacaccacagctccagcgccctcccacgccgccgtcgatgtctccgtctcgatcccgatcactgtggcggtgctagtgctatgcgcttctctgcttatctgaggaccactaagtcattcttttaatgccacccgttctattctatgtagcgagcgattcgtttttccttttgctttgggtctcatttggggtggtggatgttgaggttaaatgatgattcatgcctggatggtggcacttacttatgtccctagttaaaacaacattctggtaaatacgtactcctactctatgatggttaaaaaaaaaaaaaaaaaaaaaaaaaaaaaaaaaaaaaaaaaaaaaaaaaaaaaaaaaaaaaaaaaaaaaaaaaaaaaaaaaaaaaaaaaaaaaaaaaaaaaaaaaaggggcgggccattcaaaagaatcaaatcttatatacggatacttaaaatcaatacactgtttttaaattgtacaccaaagttaaataaaaaaaccgtggtttaacaaaattgaatcgggaaaaaccctgttcttccccaactaaatggttttaaagaaaaaacccctttaccaattggccttaaaaaaaaaacggccccccaaatgggcaatgccaaacgccttggaaccctaaattaaaaaggggagttgccctggatacgcccataaagaccgctccttttgccggttacccacacccggacccttaaacttcctaccctcctatccccccctcttttg

SEQ ID NO: 5091 - DNA, 1678 bp, Triticum aestivum
  Clone ID: TRIAE-23APR03-CLUSTER5473_1
gttgcttcctctccctttccatttccttccttgtcctttcctccaatcgaattggttccccaaatcttagggttagggtttcgtctattccgtaccttcctcccatattagcgcgtctggtccctgagcttgctttgcgcgtgggatgatgggcactgccgtggacctaggacggaggcagggcgacagccgcttctacgacgctgccagggctcgacgagggcaccatcacggccttcccaagtcgagacatatgatggacgacagtgatgaagatttccgtgattccagcagtgatggtagcagtgattatgaacatgtaagggccaaacactttgctcaggaaggcttctcaagggatgttggtgaatctggagttactcatggccgcttgctctttcagtacctcgagtttgattctccgttttgccgtgaacctttcactgttaagatttctagcctttacagctagatttgtaggatggaggtgctgtcggggttggggttgatcagcgcggccttggtcgtgcatagctatattagcattttagcgtatccctattggatcggcattaagacatgttgatgcctcattcctcgtcttgcataagcttccacatgacctgctaagcagagtctggtggtcgtcgtagttgactccaacctcgcctccatcatgtattggtttggcttccacattggtttaggaactcagtctcgcaataagctcgatctttcttggaaactggctgcctgctgaagttacgctgcctctgacttgccttcgagatagtggtgccagccatccagataaacagttctttgtctcccgtggtgcatacaaggggtagtgacaccaaatctgtgctttccgcagagctcatgaaagaatgtccgaagagtgtcttgtgaacatgattaagttctgagtgactgactggttgactgcttccaaatctcatgcatgttaccacaagatttgaagcttggatgcatacatccaaccgatgctggaaaaagaggtcgcggcagtttccccttctcctctcttccaccgccccttttgagagtcgctcatccccggctggcccgatctgatgcctcgtccgtcggcgacgctggctggcgatggctgctggaaaaagaggtcgcggcagtttccccttctcctctcttccaccgcccccttttgagagtcactcatccccggccggcccgatctggtgcctcgtccgtcggcgatgctggctggcgatggctgaggagaggtccctggttcttccatatgtatattagagtagcagtagacttagttagacttggctttatgccgtggtgtggcctcatgccagtcgggatacctgctgctagaccttgtgagcagagtctggtggtggctgtgattcacacttatatttgagcttaaagtctgagtgtataccgaattaggcttttccttcgatcggtttatgtcagagttcaccctacaacccaaaaaaaaaaaaaaaaaaaaaaaatgtagtttgagctgttcaacttatgtaatacaaatagtatggggacaaattttgatgaaaacacccctcatgtctgtacacatatcaagtgttggtcgtcgttgtctcctaccttgccttcatggtggaggggactggtggacattggatctggcagtatc

SEQ ID NO: 5092 - DNA, 1482 bp, Triticum aestivum
  Clone ID: TRIAE-23APR03-CLUSTER5473_3
agttgcttcctctccctttccatttccttccttccttgtcatttcctccaatcgaattggttccccaaatcttagggttagggtttcgtctattccgtaccttcctcccatattagcgcgtctggtccctgagcttgctttgcgcgtgggatgatgggcactgccgtggacctaggacggaggcagggcgacagccgcttctacgacgctgccagggctcgacgagggcaccatcacggccttcccaagtcgaggtgcgcagccgccgccgttacccaggagaaggcgccggaggagccctcccggttgccagcgtcccccgtaggagttgcaggcaacctcaagaggttcgtggcagccgttacgctgtccgtgccggcggagtacccctccgagagaggagagtggaggggttgcggcgtggatgccaaccgggagaggccctacttcgttcttgacgacctatgggaggcgtacaaggagtggagtgcgtatggtgccggggtgccgctcgttcttgacgggtgcgacggggtcgtgcagtactatgtgccttacttgtccgccatcgagctctatggagactcatcagtcctgcagtcatcgtccaacccaagacatgatggacgacagtgatgaagatttccatgattccagcagtgatggtagcagtgattatgaacatgcaagggtcaaacactttgctcaggaaggcttctcaagggatgttggtgaatctggagttactcatggccgcttgctctttcagtacctcgagtttgattctccgttttgccgtgaacctttgactgataagatttctagcctttcagcccgattttcaggattgaggacccttaggagttgtgatttatcagcgcgtagttggatgagcatcgcttggtacccaatttatcgtatccctactggaccaacattaaaagatttagatgcctgctttctcactttccatcagctttcaaattgcccgcaaggagataatctgtgggctcctgataatctgtgggctcctgatagcacaccaaacataccactcccagtttttggtttggcttcctacaagtttagcaactcagtctggtcctcaactgatggtgattggaaactggctagctgcttaaggcaagctgctgccgattggctgagagacagccgtgctggccatccagattatcagttcttcgtctcccgtggtgcatacaacaggtagtgacaccaaatctgtgctttccgcagagctcatgaaagaatgtccgaagagtgtcttgtgaacatgattaagttccaagtgactgactggttgactgcttccaaatctgatgcatgttaccccaagatttgaagcttggatggtgagaagtaacctgtcctgctttgtaaattgcactaataggtagatttcggccgtctatgtttttatacttgtagtcagttggtctgtgggaagctggtctgagaatg

SEQ ID NO: 5093 - DNA, 2972 bp, Triticum aestivum
  Clone ID: TRIAE-23APR03-CLUSTER54_54
cgccagcttccacccccgccgcacacgttgctcccccttctcatcgcttctcaattaatatctccatcactcgggttccgcgctgcatttcggccggcgggttgagtgagatctgggccactgaccgactcactcgctcgctgcgcggggatggcgacgttcgcggtgtccggcgcgaccctcggtgtggcgcggcccgccggcgccggcggcggactgctgccgcgatccggctcggagcggaggggcggggtggacctgccgtcgctgctcctcaggaagaaggactcctctcgcgccgtcctgagccgcgcggcctctccagggaaggtcctggtgcctgacggtgagagcgacgacttggcaagtccggcgcaacctgaagaattacagatacctgaagacatcgaggagcaaacggctgaagtaaacatgacaggggggactgcagaaaaacttgaatcttcagaaccgactcaaggcattgtggaaacaatcactgatggtgtaaccaaaggagttaaggaactagtcgtgggggagaaaccgcgagttgtcccaaaaccaggagatgggcagaaaatatacgagattgacccaacgctgaaagattttcggagccatcttgactaccgatacagcgaatacaggagaattcgtgctgctattgaccaacatgaaggtggattggaagcattttctcgtggttatgaaaagcttggatttacccgcagtgctgaaggtatcacttaccgagaatgggctcctggagcgcattctgcagcattagtaggtgacttcaacaattggaatccgaatgcagatactatgaccagagatgattatggtgtttgggagattttcctccctaacaatgctgatggatccccagctattcctcatggctcacgtgtaaagatacggatggatactccatctggtgtgaaggattcaatttctgcttggatcaagttctctgtgcaggctccaggtgaaataccattcaatggcatatattatgatccacctgaagaggagaagtatgtcttccaacatcctcaacctaaacgaccagagtcactgaggatttatgaatcacacattggaatgagcagcccagaaccgaagataaattcatatgctaattttagggatgaggtgctgccaagaattaaaaggcttggatacaatgcagtgcagataatggcaatccaggagcattcatactatgcgagctttgggtaccatgttactaatttttttgcaccaagtagccgttttggaactccagaggacttaaaatccctgatcgatagagcacatgagcttggtttgcttgttcttatggatattgttcatagtcattcatcaaataatacccttgacggcttgaatggtttcgatggcactgatacacattacttccacggtggtccacgtggccatcattggatgtgggattctcgtctattcaactatgggagttgggaagtattgagattcttactgtcaaacgcgagatggtggcttgaagaatataagtttgatggatttcgatttgatggggtgacctccatgatgtatactcaccatggattacaaatgacatttactgggaactatggcgagtattttggatttgctactgatgttgatgcggtagtttacttgatgctggtcaacgatctaattcatggacttcatcctgatgctgtatccattggtgaagatgtcagtggaatgcccacattttgcatccctgttccagatggtggtgttggtttggactatcgcttgcatatggctgtagcagataaatggattgaactcctcaagcaaagtgacgaatcttggaaaatgggtgatattgtgcacaccctaacaaatagaaggtggcttgagaagtgtgtaacttatgcagaaagtcatgatcaagcactagttggtgacaagactattgcattctggttgatggataaggatatgtatgatttcatggctctggataggccttcaactcctcgcattgatcgtggcatagcattacataaaatgatcaggcttgtcaccatgggtttaggtggtgaaggctatcttaacttcatgggaaatgagtttgggcatcctgaatggatagattttccaagaggtccgcaaactcttccaaccggcaaagttctccctggaaataacaatagttatgataaatgccgccgtagatttgatcttggagatgcagattttcttagatatcatggtatgcaagagttcgatcaggcaatgcagcatcttgaggaaaaatatgggtttatgacatctgagcaccagtatgtttcacggaaacatgaggaagataaggtgatcatcttcgaaagaggagatttggtatttgttttcaacttccactggagcaatagcttttttgactaccgtgttgggtgttccaggcctgggaagtacaaggtggccttagactccgacgatgcactctttggtggattcagcaggcttgatcatgatgtcgactacttcacaaccgaacatccgcatgacaacaggccgcgctctttctcggtgtacactccgagcagaactgcggtcgtgtatgcccttacagagtaagaaccagcagctgcttgttacaaggcaaagagagaactccagagagctcgtggatcgtgagcgaagcgacgggcaacggcgcgaggctgctctaagcgccatgactgggaggggatcgtgcctcttccccagatgccaggaggagcagatggataggtagcttgttggtgagcgctcgaaagaaaatggacgggcctgggtgtttgtcgtgctgcactaccctcctcctatcttgcacattcccggttgtttttgtacatataactaataattgcccgtgcgctccacgtgaacatataaatattctaataataggttatcccgtgatttacctgcctaaaaaaaaaaaa

SEQ ID NO: 5094 - DNA, 1193 bp, Triticum aestivum
  Clone ID: TRIAE-23APR03-CLUSTER54_76
cccacccccacccacgccctatttagccccatcaccagacttctataatcgcgagcacgctatacacgatacacaaaacagaaaaaagatcaggacgaccccgacgcaccaccacctgctcctcccggcggctgcctgctcgactcgattccccaaccgcagggtcaacgtgggaacctgtcgcgcgatgggcttaggactgagattgcccttctgtctactcctcttgctgctcgtcagcctcggaagcgcacaaggccggagcactgtttttcttgatatccaggaggaggctcgaggccctggtcaaatcatcaacgatcaactaactttgagcaaaattcccgtgcgtgttgagaggggcagcccactatgcccagcttgtgagaagtttacagatgaagctcttagctatcttagtcagaaacaatcacaagataagatgatggaggtccttcatgaagcttgttctcagacattctctttggaaaagaagtgtgytgagtttgtggactcctatgcaactctcttatttgccaagatcgctgagatcaagccagaagagttctgcaaacgaaatggcctctgcagggacaatgctcttctgtctggtgtgagaagtgagagcacatgtgtgttttgccaccacctcatggatgaagttttgtccaaactgaaggatcctgatgctgagtttgagataattcaaattctcctcaaggagtgcaagaagatcgaaggtcatgaacagcaatgcaaacgattggtcctgcaatacatccctctcatcctggtgaacggagagaagttcctcgagaagaacgatatatgtaccatcgtccaagcgtgcgatgctggcaaaaagacgatggtcgggccattctccgaggagggtttgttgcgcgatgcataaaggtagaaaggccacaccaggctgcgtaaacccagacgaacattatgcactagttcttccttgttgtacataggtgtccaaaaattcgtctggcttttgccttgtgctgctgctcctgcattctgtggatgctttgtattataaagggagcggcatgacgagcagtttattatgtcaacttgaagccgtgttgtacttattacttcgtcaatgtttaatttgtaatgacatttgaacaactgtagatactaaatcgagtttcagtctgtctgcaaaaaaa

SEQ ID NO: 5095 - DNA, 1410 bp, Triticum aestivum
  Clone ID: TRIAE-23APR03-CLUSTER54_78
acggaattcgttcctgcgcaccggacaccaaaccaattggcaccgccgccttcgtctcgagagcttcgttcggtagagtgtcgaccgatctagcgatggagtgccttgccgagatgccgcacgcgccgctcgaccgccgcccgcgcaagcgccagcgccttggctgggatgtcggccccgagatccctcagctaaaaaaactgtgtggggaagaagtcgcaaatgtgattagtgctatgacaatggggctatcttccggtggtattgttttctcccaggagacccaagggctttttcgttttgcgacccctcctctgagagaagatgacaaggatggacattatgtttttgctgtgggagacaacctcacatcacgctataggattaatgcaaaaatgggtgaaggtacctttggtcaggtgttggaatgttgggacagggaacggaaagaaatggttgctattaagatcatcagaggaattaagaagtacagggatgctgcaatgatagaaattggcatgctcgagcagctttgtaaatatgaaaaaagcagatccaggtttcatcccgttcaccgaaggagggatcctactacaaacgtgtgcccaagtccagttcaataaaggttattgattttggcagcacaacatatgatcagcaggaccagacctatgtagtttctactaggcattatcgggctccggaagttatcctgggacttggatggagttacccatgtgatatctggagcgttgggtgtatactagttgaactctgcacgggagaggcgctgtttcaaacccatgaaaatttggagcatcttgctatgatggagagggtgcttgggccgttgccatatcacatgctcaagaaggctgatcgacatggtgagaaatatgtgaggaagggccgtttaaactggcctgaaggatgtgcctcacgggaaagcatgaaagctgtcatgaagctgcctcggcttcagaatctggtgatgcaaaacgttgagcattctgctggggacttcatcaatcttttgcaagggctgctgagttatgatccagcaagccgcctaacggcccaggaggcccttgagcatccattcttgacggagcggagtgagcgaagaagatgatgtgcccaagatcctagcaaacttgtaacctgtatgtttgagccgtgacttccatttgtcgtgttcatggaatggcagagattccattctctcttccatggaatggaagaaataattaaatagataggattttagcagtagcttttctcgttgcattgcttgtgtaacgtgctcattatctgtacatatgttgacttatgtgtatgtaaccgggatgagattctctcaatgaatatattttgatggcaacactaaaaaaaaaaaaaaaaaaactcgag

SEQ ID NO: 5096 - DNA, 1542 bp, Triticum aestivum
  Clone ID: TRIAE-23APR03-CLUSTER54_79
agcctctccccctccccgccgccgccgccgccgccgtcgccatggctaccaccgcgcgcccgctcgtctccgtcaaggccctggacggggacatggccaccgacgcggccggcgtcccgatgccgcacgtcatgaaggcgccgatccgccccgacgtcatcaccttcgtccacaggctcctctcctgcaacagccgccagccctacgccgtctcccggaaggccggtcaccagacctcggccgartcctggggcacgggccgagccgtctcgcgtatcccgcgtgtcggcggcggcggcacccaccgcgccggccagggagccttcggcaacatgtgccgtggcgggcgcatgttcgcgcccacccggatctggcgcaagtggcaccgccgcgtcaacgtccgcctccgccgcgtcgccgtcgcctccgccctcgccgccaccgccgtccccgccatcgtcaccgcccgcggccaccgcatcgagtccgtccccgagttcccgctcgtcgtctccgactcggccgagggcatcgagaagaccgcccaggccatcaaggtcctcaagcagctgggcgcctacgccgacgccgagaaggccaaggagtccgtcggcatccgccccggcaagggtaagatgcgcaaccgcaggtacatcaaccgcaaggggcccctcatcgtctacggcaccgagggctccaagatcgtcaaggccttccgcaacctccccggtgtggatgttgccaacgtcgagcgcctcaacctgctcgaccttgcccctggtggccacctcggccggtttgtgatctggaccgagtctgccttcaagaagctggacgaggtgtacggctcctttgaggcgtcttcctcaaagaagaagggcttcgttctccccaggcccaagatgaccaatgctgaccttggccgcctcatcaactctgatgaggtccagtctgtggtgaagcccatcaacaaggaggtcaagcgcagggaggccaggaagaaccctctgaagaatgctgctgccgtgctcaagctcaacccctcctttggaactgcccgcaggatggcggttcttgctgaggcagcccgtgtcaaggccaggaaggaaaagatcaactccaagaggaccaagctcagcgcggaggaggcatctaagatcaaggctgcagggaaggcctggtaccagaccatgatctctgacagcgactacactgagttcgacgtcttctccaagtggctcggcgtcagccagtgatcgtctagttgaagtagtagcagtctatcgtcctaccttaagagaccctaaagtatgatcttgtgtcatgttatcgtttatccggagtctgagacatcttatgctgttttggcagctgtttatctcgagtgttttatctatggacgcattttgggagacatgttatatggcatgctttatcgtcgtcgagttcttagttcagattttgagtcgtgtttttcatatatactttgttatgaatgcgaaataatttttggcattgtgaagttttgtggttggcataccc

SEQ ID NO: 5097 - DNA, 1701 bp, Triticum aestivum
  Clone ID: TRIAE-23APR03-CLUSTER5513_1
gaattcgcaacatcctcacactgacgtcctcgcggtagacacaaatggcggcggtcgcgaccatcctctgcggcggcgccgtcgccggccaccagcggtcacgccgccgcgcagccccgtcgctccatgtcagaggcggctccgcctcggacgccgcccaccttgtctgcggtaggaagctccgcccggcgctgttccccgcttcctccttcggcgccctgcccctgtcttctccggggagtaggaagctcctccggacgtcggcttccgcggccaccccctcatccgactcccagggccaagcaaagcccatcgggtttttggagaggtacccggctcttgtcactggtttcttcttcttcatgtggtattttttgaatgtgatatttaacatcctcaacaagaagatctttgattacttcccctatccatactttgtgtcggtgacccatctttctgttggagtcttgtactgccttatcagctggagcaccggtctcctaaagcgtgcgccgatgaattcgacgcttctgaagctgctgctgccagttgcaatttgccatgccatcggtcatgtaacgagcactgtgtcttttgctgctgtatcggtctcatttgcccacaccattaaagctctcgagccgttcttcaatgccgctgcttcacagtttattctcgggcagcaagttcccttcacattgtggttatctctggctccagttgtgataggtgtatcaatcgcatctctcactgaactctcattcaactggactggtttcatcaatgccatgatttctaatatctcattcacctaccgtagcatttattcgaagaaagctatgactgacatggatagcaccaatctgtatgcctatatctctataattgctctcatcgtctgcattcctccagcactcattattgaaggacctcaactagtgcagcatggatttaaagatgcaattgccaaagttggattagcaaaattagtttccaatattttcttggcaggcttgttctatcacctttataaccaggttgcaacaaacacattgcagcgagtggcccctctaacacatgccgtcggcaacgtgttgaaacgtgtctttgtcatcggcttctcaatcatcattttcggcaacaagatcaccacacaaactggaattggcacagccattgctatttctggtgttgccctatactcagttatcaaggctaagattgaggagaaaaaggaaggtgtggcggcggcggctccttgaagatggaataaggtcctctccgcctagcccccgtcctgacagtgcgtcttgcgttgttggagggcatgtggatgtgtgtcttcggcggactgcttgggattcagtcggtattggtctttgctgaatctccgttgatccagtgtttgtccgtgtgtgtacaagttgtaccttccgatctgtggttctcttcatcgtcgatggttgatgttctggtgccttggtcgtgtggggtcttagcatagcatgatgacttcccgactatatttagtacaacaagttttgcccggcccgttgagggagaggcgatgacagaggtgtgctttcggctcactccagtgctttagtcggcgctaggttgtctatgaaactagatgtaatttttattatttttagtgttctttgtactgccatgatagataatgcatagatcccttttttt

SEQ ID NO: 5098 - DNA, 1069 bp, Triticum aestivum
  Clone ID: TRIAE-23APR03-CLUSTER55262_1
ggtatcgataagcttttttttttttttttttgttgaaattagtttccacttttaagcaaatcatgtagctacaataatctgtaatagtcttacagtcatatcatggtaaaacaccctaaaatgttatttacaaacagaaaaggtcatgtgtccaaaaaaagatcaaagacataggcatgtgatttgaccgttaaacgtggaactttcaactggttctgtctatgtggatacagataaatggtcgtgggtgctctcgacatcatcgtctaatacaagatctttttccagatttttcccaatttgagaatctgacaatctgttgccaatgagctcccgtagctcgaactcactaggaaacctctgctcagataattttgagaagaccagttgtccattgcagtaaacttcaaaggcgccagaactttgtagaagagactgagcaaaattgccaaacatccacactgatgccatggttccaaacctattagcacgcagtgaatagtaccacggaggtggtaccattccaaatctagggaaaatctgatcaccagccattaatgttgctattgctccaacttgaacaaaaggcaccattttgccgagggcgcgttttgggaagggtggagggtagttttccaagacgacatgaatcccaggaaatgaggtatccagcatgcgcttcatggtcatcgcatttcccttgtaggagcaggacgcgcagaacttcaactcgactgtggtgccggagccaggtccatccacctgcgcctccgccaactgcgcggaatcggcggcgtcgggggaggagtcgccaggctggaaggcgccggcggccggctgggggtggcggtggggcttgggggccgccggcggctgcggcgcgaagagcgtgacgacgtcggagcagaagaggaggatggggaggcccaggagcacgagctgcacgcggtccatggcggctgtgctcgctgcgtcgctctgctctgctccgtcctccgcggggaagaaggaaaggactctacgacgaccgccgcagggggctaggaattttattcgagacccggccggc

SEQ ID NO: 5099 - DNA, 1435 bp, Triticum aestivum
  Clone ID: TRIAE-23APR03-CLUSTER553_145
aaacaccaaaacctagctgcctttgcctattgctagcacagcacgcacgagctagagtgagagccatagcagtttcggccatggcgaggagcattgctctggtctgcttcctcgtcgtcggtctctgcctcgtcggcgccgtgtgcgcctcggcggcggcggtcggcggtaacggggcgcggctggtgaacgcggtgtacgtgttcggcgactcgctggtggacgtgggcaacaacgactacctgccggcgccggcgcccagagcgaaccggccctacggcatggacctccccggcaggcccaccggccgcttcaccaacggctacaacctcgccgacgtcatctcacaacgtatggggtttgagatgagccccaagccctacctctccatgctgccgcacgactagattctgctggggcctctgcaagatcggcgccaactacgcctccggtggatccggcatcctcgacactacgggaaaagggacgctcacgatgcggacacaagtagagtacttcaagaaggcggcggacaacatgatttgttacccaagcaaggaggagcacctggcacggtccctcttcctcctcagcggcggcggcaacgacttctcggccttcgacccctccaccgccagcccccaggcctacgtcgtcaagatggtcaccacctacatcgagcacatccaggcgctctacgacatgggagcacggatggtggggatcctcgacgtgccgccaatcgggtgcacgccggggcagaggatcgacatgcccaacggcgagtgcaacgagcaggccaactccctggcgcaagcattcaacggcctactcaggtccagtttcgcgaaggccgccgctgccaacatgaaggaactcaagtattccatcgccgccaactacaacatcctcaaagacatgatggccaactctttcgtagctgggctgaggcaggtaaagacggcgtgctgcggttcggggaagctcaacgcggaggtgatgtgcagccaccagggcacgacggcgtgccccgccgctgagcacgacgactacatgttctgggacatgctccaccccactcacgccactatccagcgcggtgtcgtcgccctcttctacggcaacggccccaagtacggcgagcccgtcaacttcggcacgctcgtcacgggccagaacgtatctcccgcgatcaagatggtcgtcgacgagcagtagacggcgacattcgtcggcatgcttgcccaattcgaaataatgatgatctaaaatttgcagcagctgctagctagctgagctagcacttactaatagaatgattttcccgttaattattccatgcgtacgtgctggtagctccatcttgtgttgtgttctgtccttggattattagtatgtggaactaataaagtggttaagtaaataaatattgtcc

SEQ ID NO: 5100 - DNA, 1671 bp, Triticum aestivum
  Clone ID: TRIAE-23APR03-CLUSTER553_167
ctctctctctcgctctctccgtaggttgtgtcgagtttgttccacttgactcgctctcccgagaagagaagggatcaaatccgcctcgaattccccgatccagcagcgcggccagccatccccacccgcatccccgcccagcgccagatccctccgtctccccgggcgcaacccagcttccagacccagcggcaccccatcaccacccccgccttcctgccagtagtagatcccttatgagctggttggctgcggtttcacttcagtttgggggctactaagatgggtcagcagctgggcagagacaagattggatcaaacctaacagctgatgacatagcgagcgccttctacttctcgctcctgctctcccctgttgtctccttctgggattgcatcttccgcaagataagatactccttcagacctgagtgggtgtagcagcatttgctccaaccgcttcagcactagtcggtccgggagtaaatcagcgggcccttacgaagaaagcatctagacaggagtccaataactatgaactttgcagattttggtttcccgtaattataactggtagaggagtttagctgagagatagtagtagtcaatagcaagaagtcacagtggtcatggagaaggctgcgggcaatcaggcagggaaagtcttgaagaagggaaagaagaagcaggcggcgaaggatgagctggaccgcccagaagcaggctgagaagaagaggcgccgggctggagaaagcgctcgcaaactctgctgccatcatctcgggagctggagaagaaagaagcagcagaagaaagaggagcaaggaaaggctggacgaagaaggcgcttcgatagcccgaagcggtcgcttcttcatgtccttcataggtgaggactcccgatgaatcccgccatctgggcgcttgaacaagcacagaagcatgcaacgactgggacccctcggccgggtctggatttcgctctggacagcgcaaggcgcagccgatatctactcccccggtgggctcatgtgcgccaatcaagcttatgccttccaaggggtcatcggtggatcgactgggggcaaccgcgcatccgcctgccaaccctggggggaagtgagggacctgaaagcgtcctaccaccaaggaacgttccaccagtcgacagtcgcctgcccgggcttcatggccgcccaggccgtctcgtcgctgcagatccgagaagactcgtcctctccgggccagggagtcgccgccgcgaccgtcgttaataggatgctcggcggcgccaacgggctcaacctttacagggagatgtgaaaaaggaagatatatatatacamccgacctcgtcgtcatagtggtgttgtacataatagtcacccgaaggtgtgctgactattttgcctgcgtgctggaagctgttccggccatcagattagaatctgatggcgcaacttgtttcgcccttttgttttcgtcggtcggtgtgataggatatgttttgcgtctgttgttattgttggtattgtaatgaaacaaatatgattttcgtttctcttgctcctagctgggttttctcttgaaagtctatatatatagttcttatttgtgtgtcctcgcgaaataaaaatgtgcttgtggaatgggcaaaaaaaaaaaaaaaa

SEQ ID NO: 5101 - DNA, 1571 bp, Triticum aestivum
  unsure (1)..(1571): unsure at all n locations
  Clone ID: TRIAE-23APR03-CLUSTER553_175
gataagcttttttttttttttttttcacttggttatacatgaacgtcaatacatatattcaccactcgccagtatacagaacacagagtagttccactaccttcagagtttagtacctttgcagcctgcgaggcatgcacgtatgtcaggtatgcaacagccagtgttcgttactatacataaaggccatgttttggtgtgaatctccgagtcacacgacatccacacatctggccgcctcgctgggcaagcgggcatccggttattcgagcactctagacttgcagtgcttcgtgccgtctatgtctgaacttgaagagatagagctagaaacctctgaagagtgcatggttccctttcaagttcaaccctgtgcctgtgagaacgctcaccgaggctttgtcacatcttcctggagttcagaaatggtgccaatccgagctgctgtcctaagccgcaggacaccgctcctctagctaccatgtcttctgccatttttaccttgattcgtaaggtctctacatctgatttgaggattctgttgtccgtgactgcggtggtgaactgctggttggcctctgtcagttgcttgaagagggttgcactttcgcttttaagttgctcgacctgcaactcaaggtcagttagctgcgcgtgcttcctcctcctggaccgtcgagctgactccctgttggacaccatccttcttattcgccttgtatctgatgatttgccgctccgcttgcatcggccgccccctatctcgaccaatgactcgctgtcagagtccgactcggtttcgagagcctggttccctgagattgtttccctcgggctagcggagacggcgggcgtttgcgactgggttggcgccgggacggtgtggtgcggcgcccggaggccttcggaccaccacaggtggccggcgttgctcccttccagctccagggcgttctgcgagtcgccgaagcagaggcccggcaggccaccgccgggggagaacacgtccgctctggcgccaggatcaccgccgaacccgccgtcgtcgtttccatgcccgggcctgccccgctgggcctcggcctcggcggcggcgatgtgctgccgaatgaaggcctcgaactccagctccgacgcgcacttcttcatctctgacggctgcctgcctctccgtctgttcgtcacggtggtggtgttgtcgtcactctgtgcgtctgtctgtctttcttggcgaggcctccgttgcggggggtgacagcgtcgccggcgacggcttttatggggcgcgggaaggggacgtggaaagctccgttgggggagatgaatatgatagcggctgcgtgaatggacagtgacgcgggctgactcggatcctcgtaaggccgagagggaggcagcgtgcaaggctgggtaggggcgtgcttgcgtgtccgtcggcgacttttcattgggttcgggacttcagatctgctgcaagtatacttaaataatagtattacgatcggatgaatcggattgcattcagttatcttattggtacaagattatgttatccggtggcaaaanaaaaa

SEQ ID NO: 5102 - DNA, 1352 bp, Triticum aestivum
  Clone ID: TRIAE-23APR03-CLUSTER553_193
catctcactatgttactccaccacaagtcatattaacacatgggcagccacatatccatcagcataagatttagctgacttcagcaatcatgatcacttcggcagaaccagaacttgcaattttaaaggacacccatgaaaattgctgcgaaattaaacatgcagaagatagtactacagaaaattgagtctgtaagcaaactgttagaacccgaatgtgccttgctgcgttgtggcaagcttttggatacataacatggatgatagactttggaacaacactagtggtagactaaaagacaaccgtgtcaagcatggtacctagggtctgaactatgttcgacgacatcagatttgagacatgctcttctagatgcttcttcgcatcttgccgtcccacattagctattgctaatttctcaggggacaactcatcctcctcttgcactgccttgttgtacttgatggctaggctcagcatttcctgaacagtctgctcattggtttctgaatgtgcgtcaaatttcttcagaattaatccatcagtccatttctttttgtgaaggttaagcagcatcttttcctcgagctcatttttgcggtaatttattgcaatagagtagtagtgtctattgagcccatgaataagagcctgaatagatggcttattcaggtgcccaacattggatgttgtctgacgtggctcctgcccaagcatcatggtctgagggttaatgagacgaaatgcatcaatgaccaccttccccttgacactctggatggggtcgatcacgacggccaactgccctggggttcaaagcttcaaaactctgttgagtattgatatcaacacccgatagcccagcaaccaaaacccaggatgagagtgataccaccctacccaccatttctggcctgccggtctgcttgagcatgtcgagcatattggtctggaagacgtggtcgacggcctcgacgctgacccctgtcccgctctgcggcatggcgaagacgtcgaccacccggaccgtgtagtcgtcgacgaactcgccgagcatgaggcccatgacctccatcggcacgccggccctcccgtgcttgagcatcttgaggagggcgagggacgagatgtagacctgctcggaggagtcgagcagcggcgagtccgacggcggctggcccatcccgccggcgccgaagatccgctgcagccgctccatggcttctctgggttgttcgatttggttccggggtaaggggggcgcttcgggaggacggcgttttttttctcggctgcgccttgctgcttccgtcttctactgcgacccctggatttctttcttcgggcacac

SEQ ID NO: 5103 - DNA, 619 bp, Triticum aestivum
  Clone ID: TRIAE-23APR03-CLUSTER5541_1
aaccacgagttgcagccaagtgagcaagacaacacaccatatttctgagataatcaaaatcagcacctgtgcaagatggagtaccagggacagcagcagcacggccaggcggcgaccaaccgcgtcgccgagtacggtaacccggtggccggacatggcgccggcaccggcatgggcgcgcacggcggcgtcggcaccggcgccggcgcggctgcaggtgggcatttccagcccacgagggaggagcacaaggccggagggatcctgcagcgctccggcagctccagtagctccagttcgtctgaggatgatggcatgggcgggaggaagaagaagggcatcaaggataagatcaaagagaagcttccgggtggccacggcgaccagcagcagaccgccggcacctacggacagcaaggtcatacgggaacggccggcaccggcggcacttacggccaaccgggacacaccggaatggctggcaccgacagcaccggtgagaagaagggcatcatggacaagatcaaggagaagctgcccggacagcactgagcccggcccgcagcagctactcgagagttgaggtgccgatctggccacctttgcagaataataagat

SEQ ID NO: 5104 - DNA, 1872 bp, Triticum aestivum
  Clone ID: TRIAE-23APR03-CLUSTER5547_1
acccgtatccgttctgtaaccccttgccttcctgactgcacttagccaaccaccagtaccaccatcccccgccgcgccacccccgcgggctgcacagcaccactacctacacccacgccggcgacccgtcccccccccgcagggcgcccgtggcccgcacgctgccgggctgctggcgctcctcggcctcggccccgccgcgaccgcgttgtcggcggcgtcggggcagggggagcctgtgctggtcgtcctggcgcgggtcccgggcccgccgttgccggggaaaggggaggactggggcggcgcccacagcgtcggctacctgatctgcgcggcgctagggcaggggttccccgcgatcgtggtccaccacgcccgccagccgcccgggctccaggtcaccggtgcggtgggttgctgaaggtcctcgttggtcgtccaccacattgggtcgccgggactcgttgtctcttttaaatgacaatgccgactgaaaccttatgcatatgactgagtagtgttagaacttagctgcaaataatttgctcattgattctccggatggcgttagttattcatatttaaaaaaatcagctgatattttaggtaatcgaagtgagaggactgccaagtattcgttgggtgttcccaactaagtggcttgaacgatttcctcaattacaaggagcgtgaattttatttaactggagagagtttatgctgggacactacgttcctcagttggctcaagccataaagaggcaccacgaggccactggagacaaaacaatcaatctcaagggttatatggtgggaaatgccctgactgatgatttccatgaccacgatggcctatttcaatatatgtggaccactggcttgatttctgatcaaacattcaagctactgaacattttctgtgatcaccccttctcaccacctccatctgcacagtccgacacgtttcttgacattgctagcactgaagctgggaacattgattcatatagcatcttcacacctacttgtcattcatcttttgcctcctcaaggaacaaagtggtgaaaaggcttcggtctgttggaaaattgggagagcaatatgatccatgcactgaacaacattcaatcgtatatttcaatctgcatgaggtgcagaaggcacttcacgttaatccggtcattggcaaatctcaagtgggagacctgcagtgaagttattaacaccaactggaaggactgtgaaagatctgtactgcatatctaccatgaacttattcaatatgggcttcgtatatggatgttcagtggagacacagatgcagtaattccagtaacatcaactagatacagcattgatgccctcaagcttccaacagtgatcccgtggcatgcttggtatgatgatgatggcgaggttggtggctggacccaagggtacaagggtctcaactttgtgacagtaaggggtgcaggtcacgaggttcctcttcatcgtcccaagcaggctcttacgctcatcaaatcattcttggccgggagcccaatgcctgtgctgtctgatctacgcagcgatatgtaatatgatacatttggtttgagacacgaccagcaccacacgattccagctcaccaaggcagttcagtagtttaagttccatgcagaactttcacaatataaggatggccatagctgttgtcatttgtaagtgctattggcgccaaccaatcccctaagacagggaacagaactgtggaacagttttcctgccattaattgacactacagcactgcctgttaaattaatctgaaattaaggataaagatgaatcgaatttcatcgtccgtcttatacgccatttatagcaagc

SEQ ID NO: 5105 - DNA, 879 bp, Triticum aestivum
  Clone ID: TRIAE-23APR03-CLUSTER55605_1
acacaccctccgaccgtccttcctctctgttgcttcctccctccgaggcactgcccggcgccgtctatcgaaccctgcgtccttgtgctgctcctgcaagcttccgccccttccctggcactcgcgccccattggcgcctgtgcgcggcgcaggcccgcgccacccgccagcggtcccctcccctctggccgctccgtcgcaggcacgcattccatcttcaaaatcaaaacaagtggccatgatgagctccaagaaactagctcaactttccaagaagtggcaaggaatcagtgccatcgggcgaagaagggtcacaacaacggacaaggatgtgcacccgtcctgcagctcagttgcaggcaagggccacttcgttgtctactcctccgacgggaggcgcttcgagatccccatagcgtgcctccgcacgatgatcttcgaggagctcctgaggatgtcgcaggaagagtttgggttcacaagtgaggggaggatcacactgccttgtgatacgacaatgatggagtatgtaatgtgtttgctcaggagagaggcttctgaagatgttgagagggcgcttctcagctccataataacgacttgccaccacccaagcagaatgatgcaagcagccactggacttcaccagcaattttctgtgcgcagctcctcaagagtgaacatctccagatttttctttctgttttcatgttccatctttttccccggttgtacttttggagcacaccttttgtgcaacgtttttccaagggtgccgtactgtggatgtacagatggatgcatgtaaaaataatcacattgtgtttacaagaagaaagaatcaagtttagccccttggaaaaaaaaaaaaaaaaaaa

SEQ ID NO: 5106 - DNA, 2049 bp, Triticum aestivum
  Clone ID: TRIAE-23APR03-CLUSTER5579_1
ggaggatctcgttccaccaaaacctagcacccccttctctccgcctctcccgtcccactgcccccctccccactccccgcccccgccacggccatccccccccacgttcccgacatcatgggcgagcggcagtccggccagggacgtccgccaccacgaccgtctccgcgtggcaggcggtggccaacagcgtcaagtcctcgctcggccccgtcgggcccgacaagatcctggcggatgatggtggggatatcacgatcacgaatcaaggagccaccattctgaggatgttggaggtcgagcatcctgcggcgaacgttccggtgaaattggctgagcgccaagcccgggaggttgcagagggaactgcctctcgcgtcgtcgtcgctgcagagttgctcaagagtcccaatggagtcgtgaggaataagatacacccaagatctattcgtagtgtataaagacttggcaaagccttactaatggtgaagggttgaagtatgtttaggaatggctgtttgtcaaggtggatagacttgcagaatgcacccttattaaatgtgctaaaactagcatactctctaaaccgattaacactgacggtactttccttgctattgtaggcagttaagcacttcaaagagtgcagactccaaacgagaagtgaagtatccaatcatgagatttaaagttttaatattttgaaagctcatggtaaaagtgccaaggaaagttacctgctgaatggttatgcgctgaacactggccgtgcagctcaaggaatgcctaccagagtaacccctgctagaattgcttgtcttgatttcaaccttcagaagacgaaaatgcaaatgggtgttcaagtccttgtatccgatccaagggaacttgagaagatccgtgagagagaatctgacataacaaaggagcgaattcagaaagttctcaaggctggtgctaatgttgtatttaccaccaagggaattgatgatatgtcattgaagtactttgttgaggctggagcaattgcagtaagacgtgtccgcaaggaggacttgcgccatgttgccaaggctacaggtgcaacaatgggtgactacttttgctgacatggagggtgaacgaaacatttgatccatcactccttgggccgtccagtaaggcttttgaggagaggaaataattctggtgaaaggcacaaagaatacaagtgcggtctccattatactcagaggagcaaatgacttgatgctataagagattgaacggtctttgcatgatgcactgtgcattgtgaagagaactttggaatccaatacggtagttgctggtggtggtgctgtagaagctgcattatctgtgtacctggagaatcttgcgacaactcttggatccaagggaacaactggcgattgctgaatttgcagaatctttgttgatcataccaaaggtcctcgctgttaatgccgcaaaagatgcaactgaccttgttgcaaagcttaggtcatatcatcataaagctcaaacaaatgctgataagcagcacttatcaagcatgggtcttgatctgacaaaaggtgtaatccgcaacaaccttgaacatggcgtcatcgagccagcaatgagcaaagtgaagatcattcagtttgccacagaagcagccattaccattgtgaggattgacgacatgatcaagcttgacaaggaagagtctggccaagaagtgtagccacatgccattttacgatccctggctgctgtttgttatgccatggctggctgcttatagactcataggttgctgcttgtgattttccttttcttcctccttgtattggcggacgttctcgtagaatgttgtacggaagatggatgtatgagtgattgagtgtgtatcattatgtgtgggtagtaggactcgggagcaaattttgcctggcattgctgatagttcatgcaagtaacattgttgtcatatatgtattgatcaactgttaccactgcttcacaggaagctgctgcaaaaaaaaaaaaaaaaacacgaattca

SEQ ID NO: 5107 - DNA, 1302 bp, Triticum aestivum
  Clone ID: TRIAE-23APR03-CLUSTER557_41
ctcagccgcacgctaactcgttgcacaagaattcctcccaccctcgccgtctcgccgccgtcaccaccgcagctagataagagaaaaaaagagagagaagaactcgtcgggagggctcgagatctgtgttcggagaggggaattcttgaggtcggaatcggaacaagcgggcgcgctcgggatcggggttaccatacaatttttcccaggaacctttagtgaatgtgctaatggagtcaaagggtggcaaaaagtctagcagtagtagttccctgatgtacgaagctcccctcggctacagcattgaagacgttcgacctgcttggaggcgccaagaagttctctgctgcatactcgaactgcgcgaaagaaaccatcctgatatcggtttttgggcatccccttccccgtagtttaggatttttatgcaattttattctgactccttttctcccaaccaatctctctggctttgctgcttcatctgttcctctctgctctgctttctgactcaaaactgcaacaatggctgccccgacctctgcgatcggatttgagggctacgagaagcgccttgagatcaccttctctgaggcatcaatctttgctgaccctcatggtcgtggcctgcgcgccctctccagggcccagattgactctgttcttgatcttgcacggtgcaccattgtgtccgagctctccaacaaggactttgactcgtacgtgctatccgagtcgagcttgtttatctactctcagaagattgactctgttcttgatctttggcccttcagagttctcagtggcggtcaccatcttcggtggccgcggccatgccgccacctggggcaagaagctcgacgccgaggcatacgactgcaacaacgttgtggagcaggagctcccctgtggaggcgtcctcatctaccagagctttgccgcgaacgaagaggttgctgtctctgccgggtcgcccaggtccgtcttccactgcttcgaggccgagactgtggagagccacccgctggtcaaggaaggcaagctcgccaacctcctcgcatggcgagcggaggattctctggaggagggcgtggtgctgtgcgagtgatttgctgtcgaatgttcagtctgtggaatttgctctgactgtttgtcttttgtcgtttggttactgtgaagcagccggccaggctattgctctctgaataaactattagctctaggtggtttgctgcgtctgccacaatgagcatactgtttggggaaaagttgtctcaacttataaataagcattttttttct

SEQ ID NO: 5108 - DNA, 723 bp, Triticum aestivum
  unsure (1)..(723): unsure at all n locations
  Clone ID: TRIAE-23APR03-CLUSTER55995_1
ttttttttttttttttttttttttttttttcggaaggaaaagagagcgtattattgggtgttgcatatcattgtacatcaccatcattgcaccatatagcttgccagccatcatggaagcaaactcatgcccatctctgcatgcatgcatgcatcagttcttgcactacgagctagctagctactacgactagatcgatcgagacacgtacgaagctagaatgtgaaaaaagaaagtttacatgatctaattaagccgaagcagactccaaaacctggcgctaaaagagcttgaacacagcttggttggaacaaaacaaaaagtgggaacaagaaaacatagagtccgtacgcttgtcgtcgtaaggatgatcgatcgaccgtcgacgcatgcatgcgttgctactccaagaacgtctccatgaggtctgagtagacgctgccctcgtgctgcgctcggtactccatcccttgctgctgctgctgctgctgcgacggcgccggccccgtcgaggctgacaccgacggggacggcgagttggacgagctcatcctcgccggcaacgtgaagctcctcttgaacttggcgctctgggtgctctccatcctcctcgccttgttcgagtggctctccaggctcaggtactcgaacatgtgtcgcatccgcagcacgaagtgcaggtcctncggtatgatcttgcaggaacccagctgcaggangcca

SEQ ID NO: 5109 - DNA, 969 bp, Triticum aestivum
  Clone ID: TRIAE-23APR03-CLUSTER5606_1
ccccttcccgccctcgctctccccccccgtcgccccccgccctcctccctcccctggccccaccaagaacgccaagcagctcaaaccaagcaatgtctttggcaccttccatcccttccatcaaggtgaaggtgggaaaaccttctccacgcgttccctccttccctctcactctcttcccctccgtctctctgttccttcctgccttccaagagacaatcaagaacgccaggcagctcaaaccaagcaatgtctttggcaccttccatcccttccatcaaggtgaaggtgggacgcatcgccccgccgcctccgtaccgggcatgcaagtcgttcgccgtgatcaggagctccaaggccgaggggcccaggagacccacggcgcctccactgtcgccgcccccgcctatgcctcccaagacgccagccctgtccacccctccgagcctgtcccagccaccgaccccagtgaagccagcacagccatcacctcctcctcccgagaccaaaccggcagtggctgccgctgcgacgccaccggtgggaggggttgtgacgttcgagtaccagaggaaggtggccaaggagctacaggaatacttcaagaagaagaagctggaggagaccaaccagggacccttctttgggtggttggccaagaatgagattgccaatggaagatgggctatgtttgggtttgcagtggggatgctaacagagtacgcaacaggctcggatttcgttgagcaaatgaagatccttctctccaatttttggattgtggatttggattgatggctcatgtttggcggtgttgttctgtatttctataagtctgaagtataatctatcttctttcatgtatagaaagatcaatcctgcacactattatatccttgagtttcatttgtgctgtcctgtcagttttgacgaatgtaaaatccaatttccatgaaaaaaaaaaaaaaa

SEQ ID NO: 5110 - DNA, 1172 bp, Triticum aestivum
  Clone ID: TRIAE-23APR03-CLUSTER5640_1
tagggccaaaccaccactatcgcgccgctaactccaccagccgagggccacggcgaagtcggccgcccgcgaaccacgccgccctcagcccgcctcgcttgagcgcccaggcggccacgatctcctccgtgtcgcactcatccacgcactgctccgtcgtcagggctcagcactcgtcacttcgctccatcgtctcaacatcaccacgccaagaaaactgccttccgtggggttcccttggtggacagcagatggttgcgcagggccggcgcgcggcgaaggctggtgcaggtgaatgccaagaccgccggcgcggcccaggaacatcgcggtgggggtcggcacgccggtcagccgcccacgtgggccagacatcgggcgaccgccggcgtcgactcgggtgtggaggccaaagtgaatttcgccaagagcggcgcccaagtcaagccgaacactgtgttcttcacaagtaagttgtgcggggggtgatattggcgtgaaacgcctgccggagtggcccgcgccccctcggtttgggccggcaggttatgtgattcacagaaggactagagcagacacacatctgccttgattgtggatacatatactttctacccaaggcttttgaagaacagcctgatgagtatggctgtccccagtgcaatgcgccaaagaagcgattcgcgagatacgacgtagagtctgggaagcccattggcggtgcactgccacctcttacggtgatagtcagtttggttatcggcatcgctggaataggggctttacttgtatatggccttcaataggcttgttcgtctcttcagaaattttgttctggtcgacaagcttaaccgattgctcatgtactctatctaacagaaaattccagtaatgaaggggtaaaatgcaacatgttatgtttgaggctaattgcagtccaatattctttggatcatgttgtcaccagaggccagtcacttttcagaaatgtttctggagtcatattgctctcaacgcagtggtgattttctgcaaaatggttgtgggcattcatgtggtgttggtattgaaaaacatgcctcatcttggcatgcactactatgtaagacagaagcccctttgatgagttgttgctgatgaagtgatgtcgtaaaatttgaagaaaaaaaaaa

SEQ ID NO: 5111 - DNA, 886 bp, Triticum aestivum
  Clone ID: TRIAE-23APR03-CLUSTER56446_1
cctttgcctcccccggttgcatcggagtcctacacctccgaaaagaggtctggactaacaattcaacacacagatcccatatatataaagtggctgcatgcatctcccagttgcagaggccggggtttgtcctaccaattcaacacgcagatcacatatatacgcccctgtgaatgatataagataatcgattgtgttattcacatggatgaaccgtatggtacaactatagacatgacaaatatggcgaggaacatgtggatttggattgccgacttccagcatgacagaataaggccattaagaatctggattgatgacttccaggctccagcgtcaacagaaaggacgcattcgttctcaaaaaaagaacggacgcattcttacgccattgagcatgaaagggactactgcaaaaatgccagcaactgtgcaggcaatcaatccaggcttctcccggtgatccaaagcaacaaagaatagaagaaaagcaccaatataccagggaattgcagccaagaagaaccctagtaagaacaaaacccagccgacgccgacgccgcagaacggcagccgcggctcccggactgggaggccctccaccaagacctgctgctggatggtgcacgggaaagcaacaacgccctgagcagcgcgtcctttcagggaggggtcgtaggcggctgcagcggcgggcggcggcggaggaggggagaaggtgccgtagtggtggtggtggtatgggggaggagggctggcgccggcaacggggaaggcggaagggagcttggcggtggggtccctggtctgttgcatcgccatggacgaacgaatttcgagagatctcgaggtgtggtggtgtgcgctgtgtacttctggaagggga

SEQ ID NO: 5112 - DNA, 2931 bp, Triticum aestivum
  Clone ID: TRIAE-23APR03-CLUSTER564_1
cactaggagagaggtcgcagacggaacccaaccctccccacccccaaagaagaagaaaaaagctcggattcctccgcgatttcctcctcggccgcccgccgattccctgtcgatcgagctgtcgcggtgccttggtcggattcgggaccctcagccatgacgacagaccagccagtgatcagcctgcgccccggcggcggcggcggcgggccccgcggcggccgcctcttcgcccccgccttcgcggtcgccgcctccggctccggcgacttcctccgcccgcacggcggcggcgcctccggcgtctccaggattggtgacttgcattctgaggcacgtgagcgtgttcgttattcaagagatcaacttcttgacctgcgcaagattactgatgtaaccgagcaaatcttgaggcttcagcaagaaattgaagcagagcttcatggtgacgatcagagctgggttcgcaacgattcaaatgtgcaattgcagacaaagataaatgcgaagttcagcgttctagatcaatgccaaggtcgtgacccgcgtggcaaccaccagggtccgttgattaataaggtttcatctattaacaagccatcacccatcaaccccagtcttgttcctcaagacactggagcaccaagtggcaggcggcaactccagttcaccgggcgacaaccatcccgcccccccagccttgaggttggcccccctccttctcttagctaggcctacataccttggtcagccctcaagtgcaatctctccttctgtacctattccctgaaaacagtgaaaggtatactaaacaaactgacgccggcttaatttgatctactcaagggttaactgctagattctggaattactactgctgatattttgaaggatgttatctctctcatatttgaaaaggctgtttttgaactgacattctgtccgatgtatgccctcctttgttctgaacacaatgacaacctcccggaatccccttctaaagtaccaggcggtaagtacactacataaaattgcgagacggaagatttggatcaggatgccttgctttagggttcgcgattgcaagttgatggtattaaccttagtaaacgctccaacgcaatttggtgaagtggttgctcgtctgattctgtcgtgtggcctgagatttgaagccgtagaggggattctaaaggcaatggaggatacctacttcctcaaagcaatattcagcgccgtgacgaaaaccctagaagcagacccagcaggtcaggccatattgagctcacatgctagccgtagttcgaacgcggtgcaacaagcctgctccgatattaacagctcttggcagctcaatcattctcacggtcgctgtgtctagtgaaaaaacaagcatatggtgtattctctatagcttggattgtatcaccgcagaggaacagggatgtgagccaccacgtggttttgacctgtagatttttgcgaggtcacatgagtgttgatttttgttgcgaggaaaggaagaacccgtggcccgcgcgcgcaggtcgacggcggcctaactcccgctggagcctgggaatgaacaaggcttttttgttttcaaaatgggatgtttttgtgtctcctccaatgttattatttcttttcagttcttacacaatttgtaacaatgtactgtggttttggagtattctgtcggttacaatatatcgtgtcagcattgtaggaagcgaaaactgagtaaaaaattatcattaattaacaagccaccacccagccaccccaggcttattcctcaaggcactggagcactgattggcaagagtgcaggcaagagtgcactcttgggcaccggtggtccaccatcccgcccttccagccttacggctagccccactcctttaccagctcaaactacagcatcaccaaaaccatcaagtgcaactccagcttctgtacctattcctgacaaagcagccagttctgccaaggtgatccctgcagggcttcagaagaagacagcatctcttcttgaggagtattttggtattcgtattttggatgaagcacaacaatgtatcgaggagctgcagagtcctgattaccaccctgagattgttaaagaagctatcaatcttgctctggataaaggtgccagttttgttgaccctcttgttaagcttctggagcatctgtacaccaagaaaactttcaagactgaagatctggaaaatggttgcttgctatatgggtcgctgttggaagatattggtattgaccttcctaaagctccaacgcaatttggtgaagtggttgctcgtctgattctgtcgtgtggcctgagatttgaagccgtagaggggattctaaaggcaatggaggataccttcttccgcaaagcaatattcacctccgtgacgaaaaccctagaagcagacccagcaggccaggccatattgagctcacatgctgccgtagtcgacgcgtgcaacagcctctcgatataacagctcttggcagctcaacttctcaggtgctgtgtctagtgaaaaacagcgtatggtgtattctctatagcttaggtgtttcaccgcagaggaactgggatgtgagcaacagccagttttgagctgtatatttttgcgaggtcacatgagtgttgattattgtttcgaggaaagaaagaagccatggattttggtctctctggcgacggcggcctaactcttgctggagcctgggaatgaacaaggctctttggttttcaaatgggatgtttttgtgtctcctccaatgttattatttcttttcagttcttacacaatttgtaacaatgtactgtggttttggagtattctgtcggttacaatatatcgtgtcagcattgtaggagtcgaaaactgaatctaagattatttttggcttatt

SEQ ID NO: 5113 - DNA, 1068 bp, Triticum aestivum
  Clone ID: TRIAE-23APR03-CLUSTER5678_1
ccggccgttccttccatccaaaacctaaaccccacccccacgctcttcccaaggccgaacagatagcatttcctcgaacacatcgcctcgtccctcctccatggccaccgcgtcgctctccgctctgtcctcggcggccgccgccgccggcaagcgcttcgtcctctcctccccgtcgctctccttcgcctcccgccgcatcgccgccccagcccgcctccgcgccgccgccgtcccgggggcgaggagattcgcggcttccgcggcatcggcatccacggtcgtggccaccattgcggtcggcgacaagctgcccgacgccacgctctcctacttcgacccggccgacggcgagctcaagacggtgactgtcggggagctgactgcagggaagaaggtcgtgctcttcgcggtcccgggcgccttcaccccgacctgctcgcagaagcacctgccagggttcatcgagaaggcgggcgaactccgcgccaaagggggtggacaccgtggcgtgcgtcgcggtgaacgacgcgatgtcgtggagaaaggcgtcgtcagggaggaggcatcgggcagcggtctaaaacgtgcagctgccagtcggacggcaaccatcggagctcacccgcgcgctcggcggggacatggacctctctgacaagcccatggggctcggcgtgcggtcccgccgctacgcgctcctggcagacgacggcgtcgtcaaggtgctcaacctggaggagggcggcgccttcaccaccagcagcgccgaggagatgctcaaggcgctttgagccgcgcctgctctgctccttgcctgagtcgtgtctagtgctccggagtagtgaataataatccgacgaactgttgctcgtgtgagtgtccttcgatgcgtcgacatcgtggagaggattttgttttgttttgttgagaattgcgtgctgtccatgtgctcgatgaaatgacttgaatttttcaaggcgtcgtacttgttcttagcattgtcggtggtaaagcctttgctgagatgtttacatagctcgcgcacaaaataagggggggccgtac

SEQ ID NO: 5114 - DNA, 1848 bp, Triticum aestivum
  unsure (1)..(1848): unsure at all n locations
  Clone ID: TRIAE-23APR03-CLUSTER5679_1
taacagttgtacgcgcatgtgactatatctcacgagtacgatttccattgatcatccagttagagctnctgtaggnaagcgcgatctgatgcggtcttgtcgctgatcaagccagatgcggaaaggcggatgtgctgtatgacgattaagttgggtgactccacgctagtcacagtcaagcatgtttaagatgcaggccagtgagcgcatgtaatagtactccctataggccgaagtgggtccgtgcgcccaccttgaggttgacggtattgataagcttgaaggatctcaaggggggattgctgcaaggcaattaaattggttacggcaggggtttttccaggccggactttgtatacgacaggccagtaagggggcgtaatggggctcattatagagcgaatgggggtgccgggcgcccccttgggggatgacggttttgattagctgacgaaataaacatccgctcgttctcagtttacctgcaccgaccgctctgcatcaaacgccaaataacattttttttttttttttcggattacctgcacgcgagcacagctcttcatcaaacgccaaataacagaaactgtcgcatacacgaaccggtgactaattcgatgactgttctggaacaaaagaaataaagatttgcagcagcaaaatgactgtcctggaactagcacgacagacagcaacatcttcacacagattctcgagctgtcacttatttgcatcacaaaagcaaaacagagcaccgattaccgatcagctcagatttgatccaagatcacctcagcaccagaaaccttgaagtcagaaggggctttctcaacgttgaatgccttgatcttcccatcatcgacaaaggccgaccacctgtgggagcgtcgaccaagcaaagcagcagagagatctatttccaaatccaagcttttgtggaagctcccgtcaaggtcaccataaaactcaattgcatcttttgcctgtaatttttctgcccatccattcagcacatagggatcatttacagctacacagataacagagtcgatcccttttgctttcaacttatcaatgttgttcttgtaactaggaacgtgggactgcgaacatactcctgtgtatgcacccggcaacccgaagatgacgactttcttcccatggaagatgtccttgagaggggtggtggagaacttggtggcgaccccctcgtcccaggaccgcgccttctgcagcgacacgccgggcgccgcggagacgatgtcggagccgaccgacgcgaatcccctggccgcggcccacagcgccgccgcaggggatcctcccgccctcctcgccagtgctgccatcgccacagaaggttgggagtgggtattgttgtcttggatcgggtttcgctggcgagcggcgcttgagagttgagacggcgcacggctgggagctgccgaataagtttttttaccggtgacgggatgtaccggtggagaatcagccatccatctcgtccctttatctcggaaaacgtccacctatttggcgtctatgctaatttcatttataacggatggttattctctccttgggcgaaaacaatgagggtttcaactttagtttccctataagggggaaccaatcgcgctctggactaattccggtcgccagttcatccctcgcacatattgggaacgggccaccggcgcctcttctcttttaacacaataaagtgggaaggggaggggggaaaggggttgacctgaagtcacctgacggggtttcccaggcacaccctcttaaagacgcgaaactggggcgcgtgactgcattcctgatagcgcgcctccctgccgn

SEQ ID NO: 5115 - DNA, 1408 bp, Triticum aestivum
  unsure (1)..(1408): unsure at all n locations
  Clone ID: TRIAE-23APR03-CLUSTER567_118
atccaccactcgcccattgtttgtagcacactagccaagccaagaagtaaacagagaaggaggaagagaggccggccggcgaaatgaaggcgaccgcgggggccctcctcgccgtggtggcggcggtgctgctacgcggcgtggcggcagcgccccggaagccggtggacgtgccgttcgacaagaactacgtgccgacgtgggcgcaggaccacatccactacgtgaacggcgggcgggaggtgcagctgtccctggacaagaccaccggcacgggcttccagacccggggctcctacctcttcggccacttcagcatgcacatcaagctcgtcggcggcgactccgccggcaccgtcaccgccttctacctgtcgtcacagaactcggagcacgacgagatcgacttcgagttcttggggaacaggacggggcagccgtacatcctgcagaccaacgtgttctccggcggcaagggcgaccgggagcagaggatctacctctggttcgacccaaccaaggactaccactcctactccgtcctctggaacctctacatgatcgcgttcttcgtggacgacacgccgatccgggtgttcaagaacagcaaggacctcggggtgcggtacccgttcgaccagcccatgaagctctactccagcctgtggaacgcggacgactgggcgacccggggcgggcgggagaagacggactggtccaaggcgcccttcgtcgcctcctaccggggcttccacgtcgacggctgcgaggcgtccgcggaggccaagttctgcgccacccagggcgcccgctggtgggaccagcccgagttccaggacctggacgccgcgcagtaccgccgcctcgcctgggtcaggaaggagcacaccatctacaactactgcaccgaccacgaccgctacgccgccatggcgccagagtgcaagcgcgaccgcgacgtctgagtcagccagccacgatgatatactgcttcgctactactaccactagttgttgttgtgccgctggtcgcggtgcggtcgctgagacctagtagtacgaggaatttgtatccctacactacatgtgtgtgtatgctcatgccatgcctactttattaatattattctgattgcccatccagatatcaaaaaaaaacggcatcgtgctcggcctcaagaacaccggcgtcctcgaccaagatatcggntagaaccttccttttccgtccatagctgttctgcattcgcatcgcgcgctccatgtagtggtnaattaatgctcccttcgtgatttgtcatgtggtgtagtacaatgtatgtgttgcatctttgtttcaacgggactacgccgcgccggtgtggnaactcttcannaaaaaaaggggggccngtaccaaattcgccga

SEQ ID NO: 5116 - DNA, 1909 bp, Triticum aestivum
  Clone ID: TRIAE-23APR03-CLUSTER567_123
gcttttttttttttttttttgtttcaaccgtttcttttttctttttgctggaatatattttcgaccatttcttgctactaaaggatggaatcatgctataaaattcctgtctgtcccaactcttaacaacccaatacattcatcatccacggggtgttttattttgtctcaccactgcacttaaagattacacatagacccggataagtgcagatgcgaaaacgaacgagacctaccacagaaacacatgttcgcagtgcttcaatgccgtcacaaggtcatctgctcgcttggaatgcgctgaaatcaggaaattatgtacaaacagttgcataatcacctggcgatacagaggtcctcgtccctttttaaccaacaattgctgtgcacgtccttgtccttccaccgtttcattcaacatggacaccatctacagctcgtcgcgaggttccaccttagcagcggtagcgggctggtgctcaagcagatagcgagcagccaacgatgcttgcatggctgcaccgtagggcagtgcatcctcgttgatggtgaagtagggggagtgatgaggcgcctgcggtccacgagtctcgttgagcatccccacaaagtagtagtatgtcttgggaacggcctcggtgtagaaggagaagtcctcggcacccatcagtggctgcttctctctcacgttgttggggccaaccatctcactgcacaccttcgcaaagaaatcgtgaagctcaggattgttgattgttggagggaagaaaggcttatctttgtcaaggaagtccacaactgcgctgcagcgctggacagatgcctgtgtgactatgacctcttcaattcgctgcttcaattgattaaaactctccttcataaaggctcggaaggtaccacctattgtcactgaatcagggataacattgaaggctccaccaccttgaaactttccaaccgttactacctgtgagtccaaggggtcagcttctcgggaaacaagttgctgaaggcttacaataacattggatgcagccagtatcggatcaatagtgtgatgaggaagtgcagcatgccctccctttccacttattactgcctcaaagaatccactccctgccattataggcccaggtctggatgccagcacaccaatcggcacactgtcagctacatgaagtccaaacatgacctctatgttttccacagctccggcttctaccattttcttggctccaccaccaccttcctcagctggttggaaaagaagggctacagtacccttcaactcgtcacggtgctcctgaagaatcttagcagaacccaatagcatagcaacatgtgcatcatggccacatccatgcatcttcccaggcactttgctcttatgttcccattccacgctttcctgcatagggagcgcgtccatgtcggcccgaagcgcgacgaagggcgggccgcctgtgccgacggtggcgacgacgccggtgaccgcgaagggatgcctgtaggggatccccatggcatcgagctcgcgccgcacgagctcactggtgtcaaactcctcgtagccgagctcaggggtctcgtggatccggcggcgcacccccaccatccagtccatgaactccgcctccttggcccgtcgcagaagccccgccgggtcgtctagcgccgccgcccaggtcgcggcggcggcgatgaggacgagggcgacgcgcaacagcccagcataggcggccatggccaacaatagcagtaaatgaattccgccgtgacgttctcgctttcggtttggacacttgtactgtaccacagtatcaatcaggcgaaacgcgcacgagtggcgtgggctaagctgaagtgaacaagcgtctctgtgaccttgagctcggtttgggaggattct

SEQ ID NO: 5117 - DNA, 1780 bp, Triticum aestivum
  Clone ID: TRIAE-23APR03-CLUSTER568_2
acatcccaccctaaaatctccaatcttctcatcttctctcaacaggaacgaacgagagagcaccggcgacgatccccggcgagagatcaatcaaggagggctcaccgcgatggcgcgcgagcagctggaggtgctgacggcgctggacgcggccaagacgcagtggtaccacttcacggccatcgtcatcgccggcatgggcttcttcacagatgcatacgacctcttctgcatctccctcgtcaccaagctgctcggccgcatctactactaccgggaaggggcggacgcgcccggctcgctgccgcccaacctcgccgccgccgtcaacggcgtcgccttctgcggcacactctccggccagctcttcttcggctggctcggcgaccgcatgggccgcaagcgcgtctacggcatgacgctcatgtgcatggtgctctgctccatcgcctcgggcctctccttcgggtccacccccggctccgtcatggccacgctgtgcttcttccgcttctggcttgggttcggcatcggcggcgactacccgctctccgccaccatcatgtccgagtacgccaacaagaagacgaggggcggcttcatcgccgccgtgtttgctatgcagggcttcggcatcctcaccggcggcgtcgtcacgctcatcgtctccgccgccttccgcgccgccttccccacccaggcctaccaggacgcccccctcgcctccacgccggcgcaggccgacttcgtgtggcgcttcatcctcatgttcggcgccgtcccggccctcatgacctactactggcggatgaagatgcccgagacggcgcgctacacggcgctcgtcgccaagaacgccaagcaggccgcggccgacatgtccaaggtgctccaggtggacatcggcgccgaagaagaggaccccaaggccaacgacggcggcgccggagccgccgacgaccgcaactcgttcgggctcttctcgggcgagttcctgcgccggcacgggctccacctcctcggcacggccacctgctggttcctgctggacatcgccttctactcgcagaacctgttccagaaggacattttcacggcgatcaactggatccccaaggccaagacgatgagcgccctcgaggaggtgcatcgcatcgcgcgcgcgcagacgctcatcgcgctctgcggcacggtgccgggctactggttcacggtggcgctgatcgaccggatcgggcggttctggatccagctgggcggcttcttcttcatggcggtgttcatgctggggctcgccttcccgtaccaccactggacgacgccggggaaccacatcgggttcgtggtgctgtacgggctcaccttcttcttcgccaacttcgggcccaactccaccaccttcatcgttcccgccgagatcttcccggcgaggctccggtcgacgtgccacggcatctcggcggcggccgggaagctgggcgccatcgtggggtcgttcgggttcctgtacctggcgcagaaccaggacccggccaaggtggaccacgggtacaaggccggcatcggggtgaggaactcgctcttcatcctcgccgcctgcaacttcctcggcatgggcttcaccttctgcgcgcccgagtccaacggcctctcgctcgaggagctctcccgcgagaacgaggaggaggcgccggacgccaggacggtgcccgtgtgaggaacacgtcgtcagatagtagtatattctgcgagcaggtttggatggatgtatggatgtttt

SEQ ID NO: 5118 - DNA, 3280 bp, Triticum aestivum
  Clone ID: TRIAE-23APR03-CLUSTER5697_1
cccacagcgccaaagcgaaagccacttccttctcgccgcagagctcccaaatcccgcacccgaggaggcgactctcccgcgcgcgagagagcgggtcacgagtcctgcagcgacggcggctgcggtcaccggccgcagagccagcgggcgacatgacggacggccacctcttcaacaacatctccctcggcggccgcgtcggcaacaaccctggtcagtttaggctatattcgggagggcttgcatggaagaagcaaggtggaggaaagacaattgaggttgataaagctgatataatttctgtgacgtggatgaaaatccccagatcttatcagcttagtgttgggaccaaagaggggattcggtacgtgttcaaaggcttccgtgaacaggatgttagtaaccttactaacttcatacaaaagaacacgggaaccacaccagaggagaagcagctttctgttagtggccataattggggcgcggtcgacatcaatggcaatatgcttagctttaatgttggctcaaaggaagcatttgaagtctctctatcagatgtatcacaaactcagttgcaaggaaaaacagatgttgttcttgagttccatgttgatgatactacaggggctaatgagaaagattcgctgatggatttaagttttcatgtaccaacttcaaatactcaattccttggtgatgaggaacgtccctcggctcatattttttggcagaaaatcttggctatagctgacgttggctcatcagaagaggctgttgtctcattggagggaattgccattcttaccccaagaggtcgatacactgttgagcttcatatgtcattcttgcgactccaaggacaagctaatgatttcaaaatccagtatagcagtattcttcggctctttgttttgccaaagtcaaacaaccctcatacatttgtggtcatcacacttgatccgccaattcgcaaaggacaaacattatatccccacattgttattcagtttgtgacagagaatgtagttgagaaggagctgtcattaagtgaggaggttttggctgaaaagtacaaggacaggctgcagagttcttacaatggtctagaacatgaggtattctccaaaattcttcgtggcctgtctggtgctaaagtgacgaggccaagcacattccgcagttgtcaagatggatatgccgtgaaatcatcacttaaagctgaagatggattgctgtatcctcttgaaaaaggctttttctttttgccaaagcccccgacgctcattctgcatgaggagattgagtatgttgaatttgagcgccatggtgctggtggtgctagtatgtcatctcactattttgatctcctggtcaagctaaagaatgaccaagaacatctcttcagaaatatacaaaggaatgaataccataacctcttcaacttcgtcagtggtaagaatttgaaaatcctgaatcttggagaagatggccaagatagaactggtgccgttgcggctgctcttcagagcactgatgatgaccctgttgatccacatctggagcgaattaaaaatcaggccggtgatgaagaaagtgatgaagaggacgaagattttgtggcggacaaggacgacagcggatcccctagtgatgattctgaagagggttctgatgccagcataagcgatggagaaaaggagaaatcttccaaaaaggaagctagtagctcaaagccacctgcgaagaggaaaccaaagaatgtggacgtggaaggttcagagaagagaaagccgaagaagaagcagaagaaagatcccaatgcccctaaaagagcaatagcaccattcatgtatttctcaaaggctgagcgagctaatttgaagaacatcaaccccgaactcagcaccactgatattgcaaagaagcttggagagaagtggcaaaagatgtcagctgaggagaagcagccatacgttgagcagtcccaagtggataagaaacgctatgcagaggagtctgctgcctaccgcggcgctggtgcggctcctgtagacgtggactctgcagatggatcgtccgattgaattggaagattggccgatgtcgaaaggagcatactttcgagtcatggtacaagtaggcatccgatctatcttgctgtagtgactgttgaggtgtgatccctacgtttctgagttaacaaacaacagttaggatatgtaggttccaaggtgatgtttactttgctaagagctgtcagcacatgtgacaggtgttttattcgcaccctgcttgtgcaaccttttttctgcaaaatactcaaatcttcaccggaaaaaaacaaccctagccttcctctctgtttcgccgtccccatctttctccccgtcttcctctccttcgcccgtcgccgacttcttgctgcctctcccgccgtcgaacctcagatccagtcagcttctagggttcgatctttggtgtggacgatgcatctcggttcttcgcctggttgattgcgatggatgaggattagggttagggttggcccttggtcttcgtttgcggcgtcgtccttgtcttctgtttacaagtgattgggtctgctgtggttgattcgtgcgagggtgcctgtcgacggtcctggagcaggatgtttgctgtgagttgttcgtacgtgcacctgttggatgccgtcgcctctcgatgccgtttgccgtttcactcatacctgtgagagtttatggaagatggtgatttgcttggtggagttgagatcgaggtttctattcctgggagtggtgcaccgacggacaggagatttttctggtcccattccagtgtgagactgtccatttatgaaaatgctgctttccaggcgatttgttttctgcagggtgtgtatgggtttgttgtgatggattacaactataagagtatgtctacttatcgagagcttgctcgctctgcaatggttttggctgcgtcgttggtccggaccatgcacactgatgcccatgctgatgtgtctgccgttgtgggtgacgtcgatgttgctgcgcagtggcagatgctgcatactgccttggtcgcaatggcatgtgctttatagtgctggtgtagggcttatttggttttgtttttcagtggtttgttttttccttgtcccgggtgttgtgtatttgagtcatgctgtatgtgcagctgaaatgttgtactatttaaatataatgctcatttgtactcacggcattcaataaagttgttgtaaaaaaaaaaaaaa

SEQ ID NO: 5119 - DNA, 1106 bp, Triticum aestivum
  Clone ID: TRIAE-23APR03-CLUSTER56987_1
ttttttttttttttttttgttcgacccaaccatagaaacaagagcattattgagccacgaaatcaaaacggcaatcccgtaccagaattccccagcctaacacttctgcattgcatttgcctatccaaaaaatcttgctacaaaaatacgcctacgtgtaacaccccattgttaaattaattctttcttgacttcggacacgaggccggcatctgtttggcttttcacattgtgcagcaccttgtcaatgataccgtaatccactgcctcgcttgggctgaagtatttaggccgtctgatgtctcgagcaatctcttccattggtttaccaatgtgtcttgacagcagcttaaccatttctatcttcacatttcgtatttcctttcttgctatgtcaacatctgtcgcctgaccttgaaatcgaccaattggctgcttcatcattatcgtcgatgatggaagtgcggcacggttacctttagcaccagcagccaagagtaaagcagcttctccccatgcattgccaatacagagtgtgaaaattggaattttgacatacctcatagcatcatatacagcaaaagcttccgtctcgtaacccaatttctcgccattcttggtagtgccggtggagttgatgtacatgtagatgggtttctccgcgtcctcgtactgaaggtagaggaactcggctagcatgagctccgtcaccgacggcacgaggcacatccccaggtacacgatcctgttcttgtaaaggaacgaggccaaatccggcggcggctgctcaaacgctgttcccctcaggaacgggataaccatcgcgacgacatccctggtgccgcggccaccggcggggtccgggtggggggtcaggaagcgctgcttgggggtggcggcgacgaaggcgggggaggcagcgagcgcgcgcggacgggccgcgaggcggaggtggggggagggggaggaggggagggcggtgggaggggagaagagggcgcgggcgtcgagggcggcgaccgcctccatggcgtggcagtttgggggagcgagctgagctgagctgaggaggagcggataagccccggcggtcgggggtttgtggt

SEQ ID NO: 5120 - DNA, 1139 bp, Triticum aestivum
  unsure (1)..(1139): unsure at all n locations
  Clone ID: TRIAE-23APR03-CLUSTER57108_1
ggaaataaagntacacattttgtctacttggcagntgagancagagcggggcccagngagctccaatgngcagttgcccancgngagaaccgcccgcgagtggcttttttttttttttttttgtcctctctaaatattattacagtcaagtttgacaatcacactaaatcatctaagacaacttagaggaacaatcaattaaagccttgtaaatctccacgtgtgcttattacccgcatactggtgtagcatgtcaacgataaactagtttgtttctgataacttaaagatcctcattcagcgtccaatctagcattgcacaacatcattactcggcagctacctcttctggtgccaataaaatagccgccagttgatgcaaatgtcatggcacacctctggctggcttcagcgcaacatgccagcaccacgtagctggcatacgccaaaactggaagaatagaaatagctgtgacatgctattataggtaagcaccagatttgggcgttgaagaggcgtcgcaacttggctcaacaggttcttctctagcactcaattgggtatagccaaccccacaatcaagccagaaggttcaaagaagaattatggctgggctgaccatgtcttgtccttggaaattttgttcgattaggatgttctagggaaagatatgttgcgctatgttaacttttcaaacatgcacaaatcaactactgtaccagaaagtacacttttaggaattgtttgaaaatttctgtgtaactcaaaagatcaggcaatgtaactgaatataatcttcagaagcactcatccaagatgaaaagccatgctgcagtatatcaaatctggactatatggctcggtaactcaattctcgaaacgaggaaaacatataaacaaagatagcgtcacataaatcataccgagaaaaatattctgaaatttagtttgcctaacagcaaaaaatgcataatgggcatgtaaccttgtacggaaacaaaaacaagaataaaaatattaagccatatgttccatcagttgactcaaaacttacggccgatccttagctatggaagaaattgacgaacaactattttgttcaacatgacattgccaaaagcaatagatgttagccccg

SEQ ID NO: 5121 - DNA, 2156 bp, Triticum aestivum
  Clone ID: TRIAE-23APR03-CLUSTER5722_1
gtaattccccccggaccagcaagcaggcagaccagacgcccgcaccagcagacaaccctaacgcactcgcaaaaaaccctaatcccctcgcagccgccacagcccccgggagcccgcccgcccgaacccaccgcccgatggccgacgacgcggcatcggccccgccgacggcgcagctggccgccgcctccatctcctcgccgccctcctgggacctcgagccaccgacctcccgcacccgcatccgggccatcctggacgccggcgacggccatagccggggagcgcgtggtcgtcggcggctgggtcaagaccggccgcccgcagggcaagggcgagttcgccttcctcgaggtcaacgacgggtgctgccaggggaacctcccaggtcatcgtcgaaaacgacgtgacatccgctcgctaagcctcacccacacgggcacctccgtggctacgtcgagggcgtgctcaagaagccccccaccgggaattggcaagacagcgtatcgagttgaaggtggagcgggtcatccgagcttcggggaggtggacgccgccggcctacccgctgcccaagaccaagatcacgctcgagacactcagggactttgtccacctccgcgcacgcaccaacacgataggcgcagttgctcggataaggcaccagcttgcctatgcaacccacagttttttcgatgaaaatggatttttgtatattcacacccccataataaccaccagcgactgtgagggtgcaggtgagatgttccaagtcactgccttattcagccaggctgaaaaggtggagaaggagcttaaggagaaccctgcaccatcagaagctgacgttgaggctgctaagcttgttgttaaagagaaaggagatgcagttgctcaactgaaagcagcaaaagctagcaagcaagagataactgctgctgtttccgtgcttacaaaagctaaagagaatgtgttaagggtggaagagaggtctaagttgaaacctggacttccactcaagggtgatgggaaaattgcgtttgagaatgacttcttcaagcgtcaagcttttctgaccgtttcaggccaacttcaggtcgaaacttatgcttgtgctctcagtaatgtgtatacctttggaccgacattccgggcagagaactcacatacatcaagacatttggcagagttttggatggttgaaccagaaattgcatttgcaaacttgcaggatgatatgaactgtgctgaaaggtatgtacagtacctgtgcaaatggttactcaagcattgccgagaagacatggaattcatggttaaacatgtggacaagaccgcaattgagcgtctggagcttgtttcctctactccgtttgaacgcatttcatatacaaaggctgtggagatcttagaaggtgtagataagaagtttgagaacaaggttgaatggggaattgatttagcgtctgagcatgagaggtatttgactgaggtgatatttaagaggccagttattgtgtataactacccaaaaggaataaaggcattttacatgaggctcaatgatgaccagaagacagtagctgcaatggatgttcttgttcccaaggttggtgaattaatcggtggaagccaaagggaggagcgtcttgatattcttaagcaaaggatactggacgcagatcttcctctggagccgtatgagtggtacctggacctccgacgctttggctcagtgaagcacagcgggttcggcctggggttcgagaggatgatccttttcgccaccggcctggagaacatcagagatgtcatcccgttcccacgataccccgggagggccgatctttgaagggttgcagatttctgccttgaaatataagaacgtcaattacactttcgttagcgtttttggaatagtgttggccgcccggttagattgatatatatacgcatgctgatatcatttgatatgcctcgtgtcttggcttgttgtgattctaaaaagaagtatcaggcttgttttatgattagaatattgaagtattattggtccttagcatcttcttttttgtaaaaaaaaaaaaaaaaccctgttatctaaaagctttttcatacggcgcaccccccaggggggggggccccggaccccattt

SEQ ID NO: 5122 - DNA, 1744 bp, Triticum aestivum
  unsure (1)..(1744): unsure at all n locations
  Clone ID: TRIAE-23APR03-CLUSTER57681_1
aacaaaccacgcccggagggggaccgggggcaccccgggctcccccccgcgcccgcgcgcgcccgccacgtgccccgcgcgtctctcgctattgcgccgcccgtcgccgcctcgctagacgaacaaacgccgccacgcagcgacactgggtgcccctgctcgtcgtccccgaccccggcggctcggctcccgatctcgccggctcgccggacgccgtcgcccgtcgccgcctgcctctccgtcccgccccgcccctcccgccagaccggcgctcggcgccaccgggcccctctggtgcccctgcaagccggcgcccgccgcccagtccgctctccgccgactccggcactcggccggcagcaagccagccctgcccggcggccagcctttagcccgatttgaggactcgagggcgggtgtgtgaatggctcaaccttctgtcattcttgcaactgcaagttatgaccacacaatcagattttgggaagccaagagtggtcgctgttaccgcactattcagtatccagactcgcaagtaaatcgccttgagataaccccggacaagcggttcctagctgctgctggcaattctcatatccgcctttttgatgtgaactcaaatagcccacaaccggtaattagctatgattcgcatactagtaatgtgatggctgtggggttccattgtgatggcaactggatgtactcaggttctgaggatggcactgtgagaatttgggatttacggactgccacttgtcaacgagaatatgaaagtcgcgcagctgtcaacaccgtggtcctacacccaaatcagaaagaactaatatctggcgatcagaacggaaacatacgtgtgtgggatttggcagctaattcatgcagctgcgagttggtgccagaggtcgatacagctataagatctctgacagtcatgtgggatgggagtatggttgttgctgcaaataaccgtgggacatgttacgtttggcgcttgcttaagggtactcagacaatcaccagctttgagcccctccataagctgcaagcccatgatggctacattctgaagtgcctgctttcacctgaattttgtgaccctaacaggtatcttgcaactgcatcatctgaccacactgtaaagatttggaacgtggatggcttcaagttggaaaaaactttagtcggtcaccagcgctgggtttgggactgcgttttctcagtagacggtgcttacttgataacagcttcgtctgatacgacggcaagactgtggacaatgtcgactggggaggccatcagggtgtaccaggggcaccacaaagcaaccgtctgctgcgccctccatgacggggctgaatcggcaccctcataagcaacaccgccgcgacgcggcatggttctgtacatatctctgtcgattcgaacaacgcagcagggtgctctgctagattttcagcgccgtggcggctcgaggacaggcggttttaagatttgatttgctgtagtgctaggaccatgtgtaacaatgtacttatatgcagtgcagcctttgggggctgcgcacaggtgatttgtatggttgcttacattgttggatatttatttgtgcacaaccgaaataatatgcacccaccgccattggttccgcttggaaaaaaaaaaaaaaaagtttgttcgagatggttgggtggggggtggtgttttgtgtgtttttttgatantatttattttttattgtatt

SEQ ID NO: 5123 - DNA, 1833 bp, Triticum aestivum
  Clone ID: TRIAE-23APR03-CLUSTER57753_1
tcctccgtttcccacccctccaaaaatattcacctcacgcccccgggccccgggcctccccccgcgccgacgacccccgaagctcccagaggcttctagggcctcgccgccgccggcccccctcccaccaatcgccgcctccggcagcggcgaggccgcttcgcagacggcggagggacggtgctagggtttgcagccgcggccgccggcgcccgcggaggaggatgcatatgatgcggcggctcaagagcatcgcctccggccgctcctccgtctccgatccgggtggtgactctggctcaaaaaggccaaaatttgatcaggatggattgggcgatattgtcattcaaccacatctatctgatgacaaacctatgcatctagaccaagaatcatcatcatcatcatctcatagagatgctgaggcaagcacatctactagtatgaatcctgctaaagctgaagaaacgggtgcagatcttccgaaaggaatgaatgatatgacaataagcgatgataaagttgatggccataataatgataaggatgctgaaggggttaccgttgatggaaatggaacagaagctggccagatcattgtgacaacaataggaggtcaaaatgggaagccaaagcagaaggtctcatacatggcagagcgcgtcgttgggactggttcgtttggtgtagtatatcaggctaagtgcttggaaactggagaaactgttgccattaagaaggtgctgcaggataagagatataagaacagagagctgcaaacaatgcagttacttgaccatccaaatgtagttcagctaaagcatcacttcttttcgacaactgagaggggtgaagtgtacctaaaccttgtacttgaatatgtctcggagacagtttatcgtgttgccaactattattgtcggctgaaccagcgtgtacccatactatatgttaagttgtatgcatatcagatgtgccgggcccttgcatatatccatcgtgttgttggtgtatgccatcgagatattaagccgcaaaatctgttggtcaatcctcatacgcatcaacttaagctttgtgattttgggagtgctaaaaaactggtccctggagagccaaacatctcatacatctgctcgcggtattatagggctcctgaactaatatttggagctacagagtacaccacagcaattgatatctggtctgttggttgtgtagtagctgagcttctgattggtcagcctctgtttcctggagaaagtggcgttgatcagttggttgaaattataaagattttgggtaccccaacaagagaagaaatcagatgcatgaacccaaactactccgaattcaagttccctcagataaaagctcatccctggcacaagctttttggtaagcgtatgccacctgaagcagttgatcttgtgtcaaggctacttcagtactcaccaaatctgcgcttcacagctgtcgatgcttgtgcccatccgttcttcgatgaactgcgggatcccaagacctgcttgccaaatggacggccattaccaccattattcaacttctcgggagctgagctagaaggcctccctgttgagctactccaccggatcattcctgaacatatgaggaagtgaagagagatggcggctggagaagcggtcgctatttctcggcgccactgtgcgggtggagaccggacaccgcgagcatatccatggctcgtcgtggatttgatctggagtagactccccggctggcctggactggcctggagctagagaagggcaaccgcgggcatgtgcccagggcccagacccacccacactg

SEQ ID NO: 5124 - DNA, 2389 bp, Triticum aestivum
  unsure (1)..(2389): unsure at all n locations
  Clone ID: TRIAE-23APR03-CLUSTER57809_1
tcgagcggccgcccaacgctggcgcgtggtcgtggtcccgcagcccctgcccgcgatgtggcccgaggtgcgggtggcgggcggcagcggcgcgggcacgtgcgctgccaaggcgccgtccgtggcgaaccctagggcgcgaccgcagtcccgcctcccttcccgcgatgttgcccgagatccgcgaagagggcggcaccggcgcgggcacgagcgcgaccaaggcgatgtcggtgtcgctgagcgggaagcggggccggtacgtgcggcaggtgacgggccgccacaacgacaccgacctgcacgtggcggcgcgggccggggacgccgcggcgctgcgccgcgcgctggacgaggcggcggtggtcgtggcggtcggggagggaggggagcagctggaggcggtgcgccgcgccgtggccgcggaggccaacgaggccggggagacgccgctcctggccgccgcggagagggggcacctggaggtggtggtcgagctgctccggcacctcgacgcccagggcgtcgccgcgaagaacaggtcggggtacgacgcgctgcacgtcgcggccagagaagggcatcatgctgttctgcaggaaatgttacgtcacgataggatgtttgccaaaacatttggccctgcaaatactaccccgcttatatcagcagctacaaggggacatgctgaagttgtcaaattgttacttgaacaagatgattttggattgggagaaatggccaaagataatggcaaaaatgctttacattttgctgctcgacagggacatatggaaattgttaaagcattacttgagaaagatccacagctagcaagacgaaatgacaagaaaggtcaaacggcactgcatatggctgtgaaaggaactaactgtgatgttcttagagcacttgtcgatgctgatccagcaattgtaatgctgccagacaaaaatggaaacactgccttgcatgtagcaacaaggaaaaagcgagcagagatagttattgttcttttgcggctaccagatacccatgtcaatgcactgaacagagatcacaagactgcttttgatatagctgaagggttgccacattgtgaggagtcgtctgaaattaaggatattttatctcaacatggcgctctcagatctagagagctaaatcagcctcgagatgagctccggaagacagtgacagagatcaagaaagatgtccacacacagctcgaacagacaagaaaaactaacaaaaatgtgcatggcattgctaaggaactcagaaagttgcacagagaaggcatcaataatgcaacgaactctgtaactgttgttgctgtgctttttgctaccgttgctttcgcagctatattcactgtacctggtggaaatgacaacaatggagttgcgattgttgtccagactgcctcctttaggatattcttcatctttaatgccatagctctgttcacatcattggcggtggtcgtggttcaaataacagttgtcaggggtgaaacaaagtccgagcgaaaggttgttgaggtgatcaacaagcttatgtggctggcatcagtttgcacaaccatttctttcattgcctcatgctatattgtgctaggccgccatttccaatgggcagcaatactggttagtttaataggtggtgttacaatgactggtgttcttggaacaatgacgtactttgtggtgaaatcaaagcgcatgaggaagattagaaaaaaagagaagatgtcaagaagaagcggctcaagctcctgggttgataatactgaaatctcagagactgagcttaatcaagtgtatgccttgtaaagagacagggtgtttgaactcagccttgcctctgcaattgagaatgtacatgcttaatcaagtgtatgccttgtaagacacagggtgtttgaactcagcctcatatctggaatcgagaatgtacatgaaaattccagatgcgcgcattaacaaatagattactcacattattccttgattgcacaattcctttctgtaatgacaaccgatgcatacctaaaagggaggcccattgtgtaaggctcatgcagttgaagaatcccctgtgcccaatctgttgaacaaagtcggttgcactttttctttctaaaaaaaaaaaaaaaaaaanctcgagggggggggcccgggtacccattttccagccatcaaactgtgcacaatctgttacgcgcgctcaagtgaggtgcactttttttccgttccattttcccacccatcataattcacgagacattctgttttggttatttggaatgaaggcatctacttgtaacctgtcatcaactgcaaacaaacatttcatgacttaagtaagctcctggcccctcattctt

SEQ ID NO: 5125 - DNA, 1753 bp, Triticum aestivum
  Clone ID: TRIAE-23APR03-CLUSTER5783_1
gcacgaggcggcgctccaccccccgcgcccgcccccccgagacagcacaacttcctcctcctcaccagtcatcgtcggatccacccccgccccgtcggatccaccccatccccgcttcccaactcccctgttctcgccatggaggggctcatcaagggtttggccaaagcggcgatcgacgccttggacggcggcgatgaccagcgggagcggggcgaagaccgcgccgaggcgccgaggaggcaccgccccgcgcgggacgccgaggcggaggaggatgaggagggctgcgagcagcgggaccgctcgacgtgggccgaggtggtctccgagaagaagggcggcgagccggaggagaagcgctggggtcctcggccctccaggcgggaggagaggagggaggacgagggctgggagaggacggagggccggaagcagcagcagcatcatccatctgcgcatggtggatctcacagccagtaccagggagagggcaggattagtgatggtggtagcaggctaccgcaccagcaggcgccaagcacacagggagcaacagcaggtgagagaagatgcaaatgatgaggggagaaaaaacagcatggaagaccacaacagtgtgaaggaccacaacagtgtgaagcatggaacgcatacaaaaggccaccatctgaacaagggcactctgaagattttggtcagatccaccatggcttaaatgtagagcctaccaggacggagctcaatagcttgatgtaggcatgtagccggttgtgggagcttcctgggaaccgtcttgttcctggtaaggactacagaattgaatgtggagagaaggatgatatgtcatctgaaaacctattcagctggctaggcgatgatgtgctcaccaagcccacctactctcgcttctgcgcgcttcttgacaattacaacccacaccaagggtacaaagaagttgttactcagcaggacaagcacgaagaagcagcatttattgaagagattgcccggacagcgccgattaagtacttgcaccggtatttagtgctgaagggagtcgcatcccaagactatgatgacttcaaggcaatgctgacatccctttggtttaatttgtatggaagatgtggcaactctagctgctcttctgcatttgagcatgtgtttcatgtgttggtgggtgagataaaggagcagagaggaggggaccccaggttctcagggtatcccataactggtattcagtttttatctggaaccgaagccaagggaaatttggactaccaaagatacccaagacggagtgacggattgcctgattcggagactcagttactgaccgttcagtttgagtggcatggtgtgctgaaatcagtatcaagctctttgattggtgttagccccgagttcgagctggcgctctacacactgtgcttctttatgggaggggaggataaccgcgtcgatatcggcccgtacaccgtgaacgtcaagtgctatcgtatgggtaacaacaagattggatcagtctttcccattgctgagaactgatttgtgtgatgactcatgacctgcttctgctggtttttaattcttcggtgtttaatttctcttcacttttgtgaaatttacactgttgtttaagaaaaagaaccgctgttcactctgttgttacaatgccacacttattaccatattacaagtatacactacaaaaaaaaaaaaaaaaaagaaaaaaaaaaaaaaaaaa

SEQ ID NO: 5126 - DNA, 1894 bp, Triticum aestivum
  Clone ID: TRIAE-23APR03-CLUSTER57876_1
aacccctagaattaagcacaccccccacgacccgtacgcaccagcgagtgagctccctcctccctcccctccccctcctctttcctccctccacccctcacctacatccccttctctctcctatccaaaccctcctccaccccccatccagccctccgatccaaacagcgagtgagctcccacctccctccctcccctcctctctgctcccaccaccaaaccctccgatccaaaccctctctcacctcgcatgcggccgcgccccccgaggcggcggcgcagctgaccccttcccaccgccgctcccggagcccgccggcatgggcggggtcacgtccaccatcgccgcgcgcttcgccttcttcccgcccacgccgccctcctacacgctcgtcgccgacgcggccaccggccgcctcctcatccccgagatctcccggccccccgcgcgccgccggaggcgggacggcggcggggactcctcctcaggtgccgccgcagcagccgaggaggaggacgccacggaggtggtgcgcctccgcacgcgccgcgggaacgagatcgtcgccgtctacgtgcgccacgcgcgggcctccgccacgctgctctactcccacggcaacgccgccgacctcggccagatgtacggcctcttcgtcgagctcagccgccgcctccgcgtcaacattttcgggtatgattatgctggttatgggaggtctacagggaagcccactgagtataatacatatgcagacattgaagcagcatataactgcctcaaggaaaaatatggtgtgccagatgaggatataattttgtatggacaatctgttggaagtggtccaaccattgatcttgcttcacggttgccaaatttgcgagctgtggttcttcacagtcctattttatctggactgagagtgctatatccagtcaaaaaaactttttggtttgacatttacaagaatgtcgacaaaatcagcctggtgaattgtccagttcttgtcattcatggcacgtcagatgatgttgttgattggtcccatggaaagcagctatgggagctttgcaaggtgaaacattcgcctttgtggctaagtggcggtgggcactgcaaccttgagctgtatcctgactacatcaggcacttgaagaagtttgtgtcgagccttggcaaaaaatcaacgaaacctgacttgaaagagttaccagcaacagaagacacatctcgcaaagacgcagaatctgtgtcctcggacaaaccccaagaagctgcaaagtgccgacagatctcgcggaagagcttagatagtagagttgggaaatccaaaacggtggatgttcctgaaaagccacgaatgagctcagatgacgttgacaagtttaggaggagaagatgcttggtttggtgatctatgatatgacgtctgcacagttcatggagtagtttccgaacaccatggaatggggatcaagcaactgtgtcatactgtatagcgaggaacaacgccgacagttcccgcagtagagggataatagctgtgttaaatgtgggagaagaagaatgaggacgctggtgaataagctgttatttatcaaagagggtacgtctcaacgtggtaactttctcggttaattaacctgtattgcaacccccagtggtggtaggatttccatcatgtaaaagtgtaccgtgttattgtctgtaatcacgagggacaaggatagaacatttgcggccactttgcggcgcagtctaaagtcttggagcaatcacaagaagcaacatattctagtctggatatgcaaatatagtgttcatgaaaaaaaaaaaaaaaagcgcatcgccacgccgtcctccaattgctgcgaaaaaaaaaaaaaaaaaaaa

SEQ ID NO: 5127 - DNA, 1439 bp, Triticum aestivum
  unsure (1)..(1439): unsure at all n locations
  Clone ID: TRIAE-23APR03-CLUSTER579_3
gatgcaaaacacgcgcacacacgtacgtacccctactggtgcagagtttggttgcacgaagacgtactagcggagatggcagggcatcgtgcctgcatgttttcggtggcgttggcccttcttggagtgcttctgggatccattcctgcagcggtgcagtccatcggcgtgtgctacggcgtgaacggcgacggcctgccctcggccagcgaagtcgtgcagctctaccagtccaacggcatcaccggcatgcgcatctacttcccggacgccgacgccctgcaggccctcagcggcagcaacatcgacctcatcatcgacgtggccaacgaggacctcgcctccctcgcctccgaccgcgccgccgccaccgcctgggtccagaccaacgtgcaggcccaccagggcctcaacatcaagtacatcgccgccgacaacgaggtgggctaccagggcggcgacacggggaacatcctcccggccatgcagaacctcgacgccgcactctccgcggccgggctaggcggcatcaaggtgtccacgtcggtgtcgcagggcgtgaccgccggctaccctccctcccaaggcaccttctccgccggctacatgggacccatcgcgcagtacctggccaccaccggcgcgccgctgctcgccaacgtttacccctacttctcgtacgtggacaaccaggcccagatcgacatcaactacgcgctcttcacgtcgccgggcaccgtggtgcaggacggcgccaacgcgtaccagaacctgttcgacgccctcgtcgacacgttctactccgcgctcgagagcgccggggccgggagcgtcaacgtggtggtgtcggagagcgggtggccgtcggccggcggcacggcggcgacaacggacaacgcgcagacgtacaaccagaacctcatcaaacatgtcgggcaagggacgcccaagaggcccagtgccatcgaggcctacgtgttcgccatgttcaacgaggacaagaagggcccggctgagatcgagaagcactttgggctcttcaacccggacaaatcgccggcgtaccccatcagtttctaaacggccggcgcacatctatactcgtacatacgtagcaagacaacaaacatttccttttgctcagctaaaataaactactgcgggctttgtacttgaagaaggtgcctctactgtagaatgcgagcatcatgctttgcatggatggcggaaaaggtcccaaattatttggacgacgaaaacgcccaaattcttcaccggagacaaaaaaataagaggcacaccggcaatactgtgatctttcttttaccacttctttttggtgagccctangtgccgggcgggtaataatttcactggatcaaccgctcccttggcccgtggatctgaacataagtggacgatcccttagacgtncctgc

SEQ ID NO: 5128 - DNA, 1399 bp, Triticum aestivum
  Clone ID: TRIAE-23APR03-CLUSTER58067_1
gcagcaatcacaacaaccagcgcagcgagcaccacagacaccaagaatctttcacacagtctcacgcacgcagagccagtcgcacattttcggcgatggaggtgacccccaaccacacgcaggccgtgagcgggtgggcggccatggagccctccggcgaggtggtgcccttcgccttcaagcgccgggagaacggcgtggacgacgtcaccatcaaggtgcactactgcggcatgtgccacaccgacctccacttcatcaacaacgactggggcatcaccatgtaccccctcgtgcccggccacgagatcaccggcgttgtcacccgcgtcggcgccaacgtctccggcttccgccccggcgaccgcgtcggcgtcggctgcatcgccgcctcctgcctcgactgcgaccactgccgccgctccgaggagaactactgcgacaaggtcgcgctcacctacaacggcatcttctgggacggcagcgtcacctacggcggctactccagcatgctcgtcgcgcacaagcgcttcctcgtgcgcatcccggacgccctcccgctggacgccgccgcgccgctgctgtgcgccgggatcaccgtgtacagccccatgaagcagcacgggatgcttcaggctggcaggaggctcggcgtggtcgggctgggcgggctcggccacgtcgccgtcaagttcggcaaggcgttcgggctcaaggtcaccgtcatcagcacgtcgccggccaaggagcgggaggcgagggagagcctcaaggccgacgacttcgtcctcagcaccgacgagaagcagatgcaggccatggctcggagcctggactacgtgatcgacacggtgtcggcgcagcactcgctggggcccatcctggagctgctcaaggtgaacgggaagctggtgctggtggcggcgccggacaagcccgtggagctgccgtccttcccgctcatcttcgggaagaggacggtgagcgggagcatgacaggcggcatgaaggagacgcaggagatgatggacctgtgcggggagcacggcatcaccgctgacatcgagctcgtctccaccgatgggatcaacgacgcgttggccaggctcgcacgcaacgacgtccgctaccgcttcgtcgtcgacgttgccgggagtggctccaggctctagctgtttgtttaaattattggtgatttggacgcatggttcaacgtagattctgggcttctgtcagaaagaaagcatgggtacctgtttcattttcaaaaaaaaaaaaaaaatgtcggcatccaattggacaggacaacgttcttaatttgtcttctgcaattaaattgtggtaaagtgccacaaaaaagggaatttcatcgacatctgtattatatatttattttact

SEQ ID NO: 5129 - DNA, 1357 bp, Triticum aestivum
  Clone ID: TRIAE-23APR03-CLUSTER58150_1
gcgacccacgagaccccgacgcgcgttggcggaaggcgcttcgtgcccgcttttggccccgactcattatagggccaacttggtagcgcgcctccaccatccttctattcggttcttttttagaaaaggattggtttcacactgatatataatataaaattgcacattacatctcttttattttcttcttccttgactattcatgaacaccggatattaggaaattttctttttttttttgttacaaagcttcattattttgagctccgcccgccatagccgttggaagcagcactaatggtcacattagtgccggttcaattacaaaccggggactaatgagcttcacattaggccctttttctactagtggagtgcaccacaaatatagtaaaggaagataacagccccaaacgtcctcgccacaaaagactttgaagaccacaataacccctcgatgctggcaaagagatctagtagggaaactggaaaactccacgagcgttcatggtagagccttcaccgatgttagtctcggaaacatatccttagtttttatcagtagagttgagatttgcattttccagcttcacgtcatagatataatcccagcttcccacacttgggtagtgcccttcctcacggatttcggtgtagatcccattggcaccaatgtaggggacggtccaggagaacaaccaatcgcaggagctgctgctggatgggaccttggtacgatacacaacggcaccagctgaaccaaccgcagcgccacttgggtggacgtggagaaatgccccccattgcccattctgaatatctgatgggtagggtgtatcgtagatatggccgtgccagtctttgtagttagccaagttcaaagtggcaccggtggcattgtagatgaggcattttacagatattccgttaccgtacctctccttgaggttgtcgacgaaggtttgtgcgttaatatccttaccaccggcgttgatcatcttcatggtatagtccgcaacatccttttgagtgatgggttccttatactctccagtggccagcaccgtcttctctgaaatgggggtaccgaacactcccgaggccattatgccttgctttgctgtgtatgtactgctccacctagtttagatggatcgatggctgtgagagaatgaatgaatgaatttgtacatgtagtcctgcccgtatttatacacgcgttggcaatgcaatacgaggtcccttgccggaagagtgagtacttgcccacgcgtccgtttggttccctttaaggggggtaaattggggcctgggggaaaaattggccataactgtttcccggggaaaatttttttcc

SEQ ID NO: 5130 - DNA, 2091 bp, Triticum aestivum
  Clone ID: TRIAE-23APR03-CLUSTER5815_2
gtcgggtgttagggtttcctcctccgctgcaagcgccttccaatcccaatcccctcctctccctctcccactccggcggcggcagcagcagcatcagcgcggaagagccaaggagccgaccatggcgacgatcgtcaacaccacggaggaggagccgatgctggcggtggtgcgctccacggcggagctcgcctgggccgacggaggcgccgaggtcgccgacccggaggtggcccgcctctgcgccgaggcgcagcagcacgtcctcgccggccgctggctcgacatggccaccctcatgctcgcctccgccgacctcctcctcctcgccccacgcctctccgacaaagatctcgagtgcaccctgaccgtcatctgcaacctcgtcaccaaggccggatccgaggacgaggcgctggagatcgccaagctcatctgcgccaagctcacccaccagccgggcgagaagcccacgctgcgcatcaaagtcctgttagcctgtacaacctgctgccgagcctctccggcaaggccttggtctacaggaaggcgctcgagctcgccgccgccgccgggaaggccgccgccgactgcgtcgtccccaccttcaagaacatcgacgcctttgtcgcctactggggcatcggcaagccggagcagagggacctgttccttgccgtcaccaggattcttaaagaccagaagggcatgaccaaggagtacttcaagtttctgaacaagtacctggccacgttcgatggatcggctgatgaggccgacgcaatcggtgcggcaaaggaagaagctgctgcagcaatcattgagtttgtcaagtcatctgatctctatcagtgtgacctgctcgacatgccagctgttgcacagcttaaccaaatccaaatcccaaaaacctaaatcctctcacgcactccctccgccgccgcccgcacgccgccgaccgcccgccatctccaccacgccgtcacctgtctccttcatcctcctgcacccccactgcttaggcgccgaacactagtaaccctgcgctggagttcagggagaggccaaggcgcggtggtggacgccgccatccccctcagatccggggctgagagagggagggagggagggagggagggagaggtgggtcacctgcgagagagagcactcgcgccctcgctcgtcagtcgtcacccaggggccgccaccaccgccaccacgccatgggcttcctccgatctgcgctcgccggtttgtttgaagaaggatccggccgttgactgttggtgcttcccctccccgggcgccatgacttgggatagtacttctatccagcaagcaacgttttggatgtgagctccagctcaagcagagcatcaaaaacaggggctctatctgctaatggggcagccgacaatgcagtctaagagctacatctcatgtgatttctggatatgagaacttgagaagaacaagcttgatgctattattgaaaaaaataatctatgctacaggattcttctttgcatcccatacacttagacggagtgggaggctgccgcagcggtgctggactcggagcccaagccatccgccgccgccaacaagttgcacctcttcgcggaaatcaccacaactgtgatgtgctgacagtcggatgccttcagaattggctcttaaaactttcaaccaagattagagctagcatacagtttgcagtttatagtcgtactcatactcaatgagtccctacctcggcttctgggcaagatattctttaattttagttgattagcaaccactattgttcaggaattttgagtagcgcgcatcttggtctggcgagccggtgaccggacatcatttgtcaaggaagcaaaaaggactacactcacaaggaaccatgaagccaacgaaccacgtcaactagatgttttagctttcattttgtacaactgatgtctcatacttgcaccttttgactatccttttgtaaacctgatgtatggttcctcggtggttttgtttagaacagattgaagtgtatgtatgtgccaattagttaatggaataaaaaatgtttggtgctcc

SEQ ID NO: 5131 - DNA, 1589 bp, Triticum aestivum
  Clone ID: TRIAE-23APR03-CLUSTER58317_1
atccgattccgtccggttcaaaaaaatatctctcgctcgctcgcgtggagcaattcccattcccattcccatcctcctcactccctccggccaccatggcggccgccgccggcgtgcccccctcctccctcctccgcctgcgcctgccctcgctccagcccgctgcctccctgccctcctcctcgccggcgttgctccggcgccgccccctcctctccctcgccgccgcgccctcgcgcgcctccgtcatcgccgccgcagccgccgccgactccagcaacggcaacggcaacggctcctactccggtaacggaagtcaggcatcactgatgccacagttcagcggccttatgcttgatgaaagctccaggtctaaaaggccgtataaatggcaaagggttttgctaaaggttagcggcgaagcgcttgccggagatcatacagaaaacattgacccaaaggttacaatggcaattgcaagctaggcgtagtggttgctattactagtcgtggcggctatgtctgccgtgggggctcgcaggctgcttgtagtggtcttgatcgctctgctttggatcacatcggtatgatggccactgtgatgaatgcaatatttcttcaagcaacaatggagagcattgggataccgacccgtgtccaaactgcattccgtatttcagaagtcgcagaaccatacatacgccgaagagcaatcaggcacttagagaaaggaagagttgttatatttgctgctgggacagggaacccattcttcacaactgatacagctgctgctctccgttgtgcagaaatcaacgcagaggtagtgctcaaggcaacaaacgttgatggtgtgtatgatgcgaaccccaagcataacccaaatgcccgcatcctcgagacagtgagctacaacgaggtgatctcaagagacctctcagtaatggacatgactgccgtcacactatgccaggagaacaacattcctgttgtcgtgttcaacctgcaaaacactggaaacatcgcgaaagccatcgtcggcgagaaggtcggtaccttcataggctgcacaaggaatctggaataccgcgaaagcacggagggttcgctggatcaagaagacaagatcttggttagtgagtggtgaatccaagagctgtctgtctccctagctggattatagaataggttagctatccaagtagtaccggttcaattgtaataactcgaataaaagaaaccgctccggacataaaaattcgcagaaaactgctgctatgctgtgtatgatagaatgaatgtaggggtggtatcctgtggcatgtatggtataggagtagtctcctaaggcatgtatggaggcctaacctaaatgttacttctcatgctcaggtgagggtttctagtctggtttcctctctggcttcttgcctggtttcctccggggaggccggatcgcgctcttgctgcttggagctcggtgttcgggcctccaacaggcttcgtgatcaggccatagagccccccccctgcttgtattcaggttgtcagtaatatattttatgtcgtatccaaaaaaaaaaaaaaaa

SEQ ID NO: 5132 - DNA, 1160 bp, Triticum aestivum
  Clone ID: TRIAE-23APR03-CLUSTER584134_1
aaaatctcaaaattcccgattcccgttccgaccctcctgcgccgtaccaaagctcacgagcacacgccacgtgattccgatcctgctagaggaatcccgaggctcggctttgccggcatgcggcggggcggcggcgctgcgacggccgttgcggctgcggcggaggcggagcgggacgcgggagcacggttccgcggcgtgcggaagcgtccgtggggccggtacgcggcggagatccgcgacccggccaagaaggcgcgggtatggctcggcaccttcgactccgccgaggacgccgcccgcgcctacgacgccgccgcgcgcatgctgcgcgggcccaaggccaagaccaacttccccctctcccttccccatcaccaccaactacaggccagctactcgccctaccccgtcgccgccgccgccgctgtcccgacgtcggtcgccgcggcggcggccaggccagcctgcagcagcctgagctccaccgtcgagtccttcggcggcccgcgggcgcggccggtgctcccaccgcggcctccgccgccgccgatcctcgacggtgactgccatagcgactgcgggtcctcggcctcggtggtggacgacgattgcgcggacgccgccgcctcgccgtcctgcggtctcctgctcccgttcgacctcaacctgcccccggagtttggcggcgttgcatgtaacgacgacgacgagctgaagctgacggcgctgcggctctgaagtcagaaccaccggctggtggttagagaaaaaggataaggagaaaaatatttggttcttcccttctctccatagccagcacgatccacctccacgctgttgttgctgttgctgtttacatgatctgatgatgattaatatggcctgatctaccaatcggcctgcttgttgccgctggtagcggtgattattgccgactaccgccggcagctcgctgtggttgttgtaatatagcaacgttttacttgcttcctcttgtgaggaagtagacacctaaagtaacttattttctttttagccacatgtgttactgttactcatttaggctcatttgtttcgaattgagaacaatggaaaacaaagttttgtttatgagaatggtactgggtgcttaaatgctagaaaattcgagctaaaaa

SEQ ID NO: 5133 - DNA, 1453 bp, Triticum aestivum
  Clone ID: TRIAE-23APR03-CLUSTER58549_1
acgcttgcacgcacgcagcatttgattccctccctctctccccgacgagcgcggcgcacctgcgaggagacgacgccgggtcccgctcgcggcggcgctcttccgtgccgtactctcatgatgtaccatgctaagaagttttctgtgccctttgcaccacagagggctcagaatagtgagcatgtgagtaatattggagctttcggtggatccaacataagcaaccctgccaatcctgtagggagtgggaaacaacgtctaagatggacctctgatcttcatagtcgttttgtggatgcaatcgcccaacttggtggaccagatagagcaacacctaaaggagtactgactgtaatgggtgtaccggggattacaatttatcacgtgaagagccatttgcagaagtatcgccttgcaaagtacataccagaatcgcctgctgaaggttccaaggtcgaaaagaaggattctagtgattcattctctaatgcagattctgcaccgggttcacaaatcaatgaagcattgaagatgcaaatggaagttcagaagcggctccatgaacaactcgaggttcaaaagcagttgcagctgagaatcgaagcacaagggaagtacttgcagatgatcatagaggagcagcaaaagcttggtggctcacttgaaggttctgaggagaggaagctttcacattcaccacctaccttagatgactaccctgacagcatacagccttctccgaagaaaccacggttggatgatctgtcaacagatgcggtccggggtgttacacagccagggtttgaatcccatcttattggcccatgggatcaagaactctgtccgaagaccaacatatgcgatcctgcattccaagtggatgagtttaaggcaaaccctggtttgagcaagtcataaagcaaagccttcctttacaaaggaaacacttctgagttattaacctgcacggatggccgatcgcatgtgaatatatatcgtcttaacaacagtttgaccactgtttggaccttcggatctgccccaaccccttcagtcacgactaagtgttgttgtcgttgtcatatttcgccatacagatctttgtaattatgagggtgtttctaaagtccccagttagcaatccccttcttccgaaggataatcctcaactgaaacatgtagcaagaaacacaaagtgcttacacgcaataccaaggccctaaagctacatgaagctatctggtagctgtacattcctgttcagttcagtccttgaatctgcttaccttatattgacccctctgccatagatctgggatgttggcagcaacatttttatttacaaatcaacctgtcttctggatgactctgcatttacgaggttggttgtactatttgccatattgggggatagtcctgtgctatgaatagagcactgaacaatgttcctttc

SEQ ID NO: 5134 - DNA, 615 bp, Triticum aestivum
  Clone ID: TRIAE-23APR03-CLUSTER5879_3
aaccagaacaggtgcaggcatcatcaaactctccctccgacgacatcgatccccgtctcccgatcttctcctcctgactcctgctgcagctgccagccatggcctctgagactgtcgtcctcaaggttgcaatgtcctgcggaggttgctcgggggcggttaaaagggtgctcaccaaaatggaaggcgtcgagagcttcgacatcgacatggagcagcagaaggtgaccgtgaagggcaacgtcaagccagaagatgttttccagacggtctccaagaccgggaagaagaccgccttctgggaggccgaagccactcctgtaccggaggctaccccggcagccgacgccgtgcctgcacctgaggcaaccccggcagcagacgccgcgcctgcaccggaggtgaccccggccaacaccgtcgcttgatgaccacgcacagatgatgccgccgtgacctttgaaaactccaagatattgttgttgagagagtcatggcggtttgcacgatgttacttacgagttgactacaacgtaatggaataaacaaagtgtgtatgatctagacaaatgaacacgtcgaccacatgatttacaatagatttcagttctatta

SEQ ID NO: 5135 - DNA, 2087 bp, Triticum aestivum
  unsure (1)..(2087): unsure at all n locations
  Clone ID: TRIAE-23APR03-CLUSTER58836_1
tcgcacgagtacagcggcctcagcttcctcaacaagggcaatgccttcatcctcctcctcctcgccgtagccgtcccgtcgctcctcctcaccggcgaggcctcggtgcccgcacgcccgccccatggctgcctccacggcggcggctcccgccccactcccactcctccgcgccatggccgtcccgtcgccgcccccccccggctaggcctcggtgaacgagtacagaggcgtcaagttcctccaaaagggcaatgccttcatactacacccccggagcgtgggattctacgccccgatctccacggccaaggcaacagcgggagaagggcgtatgcgagggcaaacgcagactgctttacacgagatcttgaaaatatgttagcgtgtgttgaaggctctgtcagctaccgtcaatcgcaggtgaatccttgctggccacagtagttttttggtatttggcatgggagacatccgtgctgaattctagttggagggacaacgctccttggggagactgggaccttgttcaatcctttcatctactgtgacccggcacttgctggactggaaatcgacgggaaaaccatatggaaaaatcctactggctaccttccaggtcggatggcacctcttaagaacttttttgggctgatgtagtttgctttcgtgatacttggtatctactggttctatcaatacatgaagttctggcgagaggttcttccacttcagaactgtattactcttgttattacgttgggtatgcttgagatggcgttgtggtattttgaatatgctgagttcaatgagactggagttcgggcaaaggccatcacattttgggctgtaacatttgggactattaaaagaacagtggctcgtcttattattctcattgtctcgatggggtatggagttgtgaggcctactttgggtggtctgacatcgaaagtggtcatgcttggaggaacattctttgtagctacagaaattcttgagctagtggaaaatctaggtactgtgaatgatctgtctggaaaagctcggctatttttggtctatccagtggctatcttggatgcttcattcattgtttggatatttatttctctagccaagacccttagccaacttcaggcaagaaggttgatggccaaacttgacatttataggaaattcactattgcattggctattactgttctggtatctatcggctggattggctatgagatttacttcaaatcgacagatgtgttcaatgagcggtggcagtatgcatggataattcctgctttctggcatgccctatcattctcacttctttgcgtcatttcctacctgtgggcaccttctcagagctcaatgagatttaccaatgacgcaagtgaaaagtttgatcgagaggacagcctgtcattaataaggccaaggcccattgtttccaacaacgggtggagcatagcttcgtcaacagacgtcaagatgacgaagaacacagatagtgtgacatcttttgacgaagatgacgaagaaaacaaaagggagtaacgcatctgatgaggccacctcatcagatcctttgaagtggatatgctagaacaattttggtatttagcagagggatcggccatgctaattctagtcgttgggatacggtccttggaggggtttcttccttgttaaatccttctcctcattggtttcttcatacagtgcatgcatcactgtaaggatgattatatatgataggaacagttcatgtgtggtattacgggggatgtgtggtgtatgatactcctctttggtagatcacgtgttgtttctagtttatgtgaactatgaatgttgtcagtagtactgctgcgagtgcaattatttgttgctacaaatgtgttcaaaaaaaaaaaaaaaaaagtctttcctcctttttccttctcccgtcgcgcgctgtncggggcccccccgtttcgtcttccggnntttccgcgtttttttttttttttggggcggccgcttttggggttccctgctttcgtccccgggcttgcgncggctttnctcttctttggggccccctgttt

SEQ ID NO: 5136 - DNA, 1673 bp, Triticum aestivum
  Clone ID: TRIAE-23APR03-CLUSTER58894_1
ccgccgtcggccccctcccctcccgcccgcccgcccggcggcgagcgccaccaggacaccgggtttgactccgccgtgggggcgcaggccgcccagcatctagtggcgagagggcgcccccgtcgtcggggtgggtggctgcctcgtcccgcccgcccttcgtctcggctcgtcccgtcccctcctcgaggcctccccagcctcgcgccccgcgtctgaccgccggccttcttgtagccgtgcacatgacattctggcttgccgcggctagtcctcaccccgtgaccctgcttaaccatgtggagcaattagcctccacttcgaagccggaaaacatgggtatacctagaagacgataaacgagaggcgagaggaagcggtggtggtcgttgtgggtggcaggcagatcccggcagcttttcgtctcgtctcgtctcgtccccttttcgagatctcgccagttgggattttgaatctcagcttcttgacacgcatctgatctggtagctctttgtatgtgtttaccagacattcgacatgaagcttttagaatacaccccgttcgactgtgtaaatgtgttcctcgatcaactaaaccttggtgattgtacaattagggggagccttgaagccttctcatgcaagcacgcaggaaatgatcgtcggctttcaataagcctggaacatgagattcttgattaccttggcaagtcttctgatagtgatcctccttcacctgtggagcatttgtcttgtagatcgagccggaaaacgttgatatatctagttctcactcttggccatatgtatccagattatgatttcagtgctgttcgggcacacctattcttcaaagaagaagacatggaaagtttcaagcagatggtagacaactacttatcggaggcttctaggctctgggcagcaagaaatgaaggcagttctcttctggacagtatgactaaagctattgatgaggttatcaaaatcagggagtgtgacatctacagctacaacccagactctgacggagatccatttctagagaaaggggccatatggtcggtgaactttttcttctacaaccggaagctaaagcgagtagtgagctttcgctgctgctctacttgcaaagaagggggcaattggttcggtgaactttttcttctacaaccggaagctaaagcgagtagtgagctttcgctgctgctgtactagcaaatttgcaggagatgacttccttgctggtgcactctcggatggcgaggaggaagatgcgttgatcgacatggacatatgactgactctgttcggctaggaacatgaccaaccaaccagtgtgacctgcttgtgtaatatgcagctcgtatgacgacagttcccggtaggaaactacgtatggcggcagttccctgtaggaacttttagtgtgattttgtttgtctgtttggagcgcatacacttttggcctctattgtttatcgtccatgtttgtagatacaagatttagcttcagtctgccaaacttgaactggcatagtttgtccctttgggttgctctctggagacatgtttccaggaatatggcttcagtttgcagtcttatgcatgtaaattggattcttgaatttgaacctttaactgactttatcaaaaaaaaaaaaaaaaaaaaa

SEQ ID NO: 5137 - DNA, 1660 bp, Triticum aestivum
  unsure (1)..(1660): unsure at all n locations
  Clone ID: TRIAE-23APR03-CLUSTER59061_1
ccaccccccgcccagcgccctcaaaaccctctccctgccgcgccgccgcataaacccctcttctccctccccacccgccgccgccgccgcgacgaccaaccgcccagcgcggccatggcgccggcccccgcgccgattcagataggctccgaccactcgctccctcaaaacccttccctgccgcgccgccgcataaacccctcttctccctccccacccgccgccgccgccgcgacaaccatccgcccagcgcagccatggcgccggcccccgcgccgattcgcgacctcctcacctccttcagccactcgtccgacttcctcgccctctcgtcgggcgacggccgcatcaaggtatgggacgccgtgcgcgggcacttgcagacggagttcgccgacatcccctcggtggaggtcggggcgctccgcgagacgaagcgcggccacctcgccctcgactacacctgcatgaagtgggtacaactctccaccaagaagaagaggaaggctgggagctcgctgctcgtgcttgggacgggcagtggagatgtccttgcactcgacgttgctgcgggccattggaagtggaggatcagcgattgtcatcctggaggtgtgacagcagtggcatactcgaggcatgggcggagtgtgtacacagcaggtgctgatggcatggtctgtaagattgatgcctcagatggatctgttgcagggaaatttaaatcttcctccaaggcaatatctgcgttggcagtttcatcagatggaacagttttggcaacagcagctggtcagttgaggacctttgacgcttctgacaacaaaaaaattcaaaaattctctgggcatccgttccggtgcaaagaattaaaaacgacagcatatgcattgaagatctgatgaggaaatatggcgtcattgatcaaagtctcgtcggccatcctgacatggccactaaaatcttatcagatctgtttagtagcagtggcataacaattgacgctaatttacccagcaagaagattcgagcacatctaagatctttaaagcctggagatgcttgcaagcttctagagaatttagtatgtgcatggagatcaagatctggtagcgctgagcttgttttgcgttggatatactgcttactagtaattcatggtcgttttatcccctcggagaaatcaagaaaactaattagcgacctggagaagatgtgtgcagaaagatacacagcaactgaagatttactgaagctttctggtcgtcttcggctgataatggcacaggttgacaaggatgtgaaagatgtgtcggcgaaggccgcagtccaatctgatgaagaggaagaagatgaaattgatgaaatggtgtatggtgaagacgtggatttgtctgaaaatagtgacgatgatgccgagtagaatcgcagcattgttggcatgtctccgagagattgttcgactttgtgtactgtcaagatgtatttttcaagctttccatagttgagtttgtaaaaccgcgcaacgacggaaggttgcactaattttgacagcaggaggtaatatctgaaaaaaaaaaaaaaaagatatactgcttactagtaattcatggtcgttttatcccctcggagaaancaagaaaactanttagcgacctgg

SEQ ID NO: 5138 - DNA, 1228 bp, Triticum aestivum
  Clone ID: TRIAE-23APR03-CLUSTER59089_1
ggaccccaatccaaatcgcctctttcccttcctccttccttgttccccgtcccatcttctcgttcccccctcgtacgcggaaaccccgcctcgcctccacccaccgccggggtccagccttccgcttccgccgccgtggtgctcgaggcttgtcttctggtgaattcggcgattcaagcaaaaggaaaccatgagctatttccaagctacaacatgcaagcctcatactgggctcattgcggacagacccataatgggtcttgggaagacctgcagattactacctgtcccccagtattccctacggccacgtcctctcggatttcgcaagcttgataagcatatctacccacgtcttgttcttgttgctgctagccacccaaggcttactcctgtatgcgcctcaagtggaaaagggaaccccgagattgacaatgatccctttatggatcatttgaagaaggccatggctgatgcaaaaaagccacgacccttacaagatgtgctgaaagagaaattcgccaagctgagagaacaagcatctggtggaggtggagggaatggaaacaggcgtggaggtaatggtggttccggtggcccagaagatgaatcattcaaggaatcattggatgaagtagtccaagttatcttagcaactgttgcttttatacttgtgtacatccatattatcagaggggaggagctgtaccgtcttgcgagggactacactagatatctggttactggtaagcgaactgcccggctgaagcgctccatgcaacaatggcgcagtttctcggagaaattcatgcaaaacgagggctctcaagaagagcggtacgaaaggccagctgctacggaacccatgtggtggcagcagcctcaaaagtttgttcatcttatggaggagctttgcagagggaactggcgtccacatgcccagaagtcttagttctggcgttccaccgtccttttttgacacttgaaagaatatgttgggtgttgtgtgggtgagatgggtactggctgcgttgcttggctggcgcaaaggttttacatggatggagtttcctgatggggcagagatggtgttgttctttgttcgttagcctgtatttctgtctctggtttgtcaagtatttgaatgtgggtataagttgttggaaattttgtagttgaagagaccgattattccttatttatgatggttagcttgctctaaaaaaaa

SEQ ID NO: 5139 - DNA, 824 bp, Triticum aestivum
  Clone ID: TRIAE-23APR03-CLUSTER590_19
actaaagggaacaaaagctggagctccaccgcggtggcggccgctctagaactagtggatcccccgggctgcaggaattcggcaccagccaaaacacactgacaacatgaaggccctcttcctcataggactgcttgctctggtagcgagcaccgcctttgcgcaatatagcgaagttgttggcagttacgatgttgctggcgggggtggtgctcaacaatgccctgtagagacaaagctaaattcatgcaggaattacctgctagatcgatgctcaacgatgaaggatttcccggtcacctggcgttggtggaaatggtggaagggaggttgtcaagagctccttggggagtgttgcagtcggctcggccaaatgccaccgcaatgccgctgcaacatcatccaggggtcaatccaaggcgatctcggtggcatcttcggatttcagcgtgatcgggcaagcaaagtgatacaagaagccaagaacctgccgcccaggtgcaaccagggccctccctgcaacatccccggcactattggctattactggtgatgtagcttccatttatgactagctaataaactgtcacataccactgcgtgtgacaaataaaagtggtcatggaataatttatgaataaaatttcagcatgtgcctgcgcgaggtgtctatagcaaacatttcagtatgcctatatatgttaatcaagatagcaatgttcacatacacccagaataatagtttgtgtaattagttgtgtatgttcttggtggtggtttgtgtacagatttgccttccttctaacaaaatatgaatacatgga

SEQ ID NO: 5140 - DNA, 1089 bp, Triticum aestivum
  Clone ID: TRIAE-23APR03-CLUSTER5913_2
aaaaaaaagcgagatatagcacctgggagcaactcctccttccccactgcctctgcttccggtggatcaatcgaggcgaaccaccggagcgccgccggagccgccgcggcgattggaggcggtgaagagcctcctgaagccgaagccgacgccgcagcagcagctgcgcgagtggcagcgccgcctccgcaacgagggccgcaacatcgagcgccagatccgagacgtgcagaaggaggagaagaaggtggagaaggccatcaaggagtccgccaggcgcggcgacatgggatccgccaaggcgctggccaaggagctggtgcagtccaggaaggccgtcaaccgcctctacgagaacaaggcccagctcaactccatctccatgcacctcggcgagatcgtcgctactaccaggacggtaggacatttgtccaagagcaccgaagtgatgaagcttgtgaacaatctgatgaaggccccagagatagctgtcaccatgcaggaattcagcaaagagatgacaaaggctggcgtgatggaggaaatggttaatgatgccatggattcagcactggatgatgaggacatggaggaggagatagaggaggaggttgataaggtcctctctgcaattgccggggagactgcgtctcagcttcctgacgctgttcgtaaacaaaaggagaaggttacacaaccttcgacaagtgaacctgcacagagaactgctgtagcggaatccgttgacgaagacgatgatgatctagaaaagataagagaaaggctcgccaaagtgaggtcgtaaaagagaatcgatgtgctgacatgtgtataatagtccatttggtaatgtacgatacacaacttggcagatgtcgcccttgtcactcacagactgatctattattacccaaaccaccgggttgttggatctctgctgtaacctgaatgtgacgatcatcacgtgtgatcaaacgtgccctgtattttgttttgttttcgacttgttgcgactacataaatattgtaagtatatgcagatatcatgtcagtaaagctggatgcacatctgtgcagagctaccaactg

SEQ ID NO: 5141 - DNA, 1630 bp, Triticum aestivum
  Clone ID: TRIAE-23APR03-CLUSTER59148_1
actaatttcctcgcaacccggtgcgagccgcctttcccgtcacgagcacgagacggaaccgggcaccgaggccacccacggctcggcgcagcggcgtgcgataagggagaccgaccgagggagcgagcgaacctctccggtgaggggacggggacgacaaggccggcaagattcgaggggccggcggaaccaagcggaaggcagcagagtcgtcgtccacgcggggcggccgccggcggacggagccggcagctccggcgcccaaagagatgggggtcgactactacaaggtcctcggcgtcgaccgcggcgccagcgacgacgacctcaagaaggcctaccgcaagctcgccatgcggtggcacccagacaagaaccccaccaccaagaaggaggcggaggccaagttcaagcagatctccgaggcgtacgaggtccttagcgacttccagaaacgcacaatatatgaccagctaggggaagaagggctcaagggacagccgcctccaggggcaggaggtcctggtgcatcttctttctaccctggtggtggccagtcaacctcatttcccttcaatccgaggagtgcggatgatatatttgctgagtttttgggaggatgggacaatgagcggaattggtcttggttattccggtttacatacggggaaccaaggatcttatggtgggggcgtgtttagcaacgagtatctcgctaagcgatttgcagagggttctgccggcaatatgccgtcgcccatcacacaaaccagcacccattgagaatcagctttcagtgacccttgcggatttgtataagggtgtggccaaaaagatgaaaatctcaagagaggtcatagagaccagtgggagagtttcacaggtagaagaaattctgacgatagatgtgaagcccggttggaagaaggggacaaagatcaccttccctgaaaagggaaatgaatctccaagcatgatgcctgctgatattgtcttcatcattgaagagaagccccatgatgttttcaccagggaaggaaacgatcttgtcatgacacagaagatctccttggtggaagcattgactggctataccgtgcaactcacaacgctcgacgggcggagcttgtctagacaagttaactcggtaatccaccctagctatgaagaggtgatccctggagaggggatgccaatacccaaggagccctgtaagaagggaaatctgcgcgttaagttcagcatcaagttcccttccaggctgacatctgaccagaaagctgggatcaaaaggctgttgggttcttagccctgtgtgccattttctatagactgatgaaagcgactgtgaatatctccagcatgtggctaggtagatttctatctgtccggtttggacaatgagcggaattggtcttggttattccgtttacatacctgtagaaatgatgttgtcattctatgtgttgtttttccccataacttggtagaggctttttcacatatgtgaccaggctggttgttgtcaatgttttaatctgttcttcctcgggattgcaggaaggtttgagtccagaaacgttatacagattttgtcccctgttgtgtcaggacaaaaaaaaaaaaaaaa

SEQ ID NO: 5142 - DNA, 1876 bp, Triticum aestivum
  Clone ID: TRIAE-23APR03-CLUSTER5914_1
ctcatctcaccagaccgcaccaccccgcctccctcctcgtgccctccgccgccgccgccgccgcagccgcagcctcggcctcgaggcctccacccgccccccacgcggggccgaggctccagaggcgccccccgtccgcccgctacaggacgcccccgcccccgcgcagatcgcggccgccatcggcatcctccgcccctggcccgccctgccgctcctcaatatccccagccccagcgccgccgtcctcctgtcctcctgcgccgccgacctcctcccctccgcggccccccgcgctggcctcgtggccgcggccgtgcggggccgcgcctggatcgtcccggcgtcggcctatcatgagcagaagagggaatgcttcctcgtcgccgcggcctcggcaggggggcagtgggcgggagacggccaggcagggaagggggagcgtctctcctcagttatgctgtcccagatcgtcgtcttccgaggctgctgtctcccttccataatcttttctcctcttccctactggtgggtccaagtggttttgccttatcccaaaaacaccactactttctgggttgggtttttgagggtaatggtttcattgtgttgcccttggaatcggggaatgacctcagcaagacacttatgatgtacttggtggcatccctgtaccacgcgaccctacccttgattatcttatcaacatcatgagccttgttaacgttgaaatgttttttacaaatacaatcaaggccatggaccctttcttttcagtcctactttctgcaatgttccttggcgagctgcctactccatgggtgtgttttgtctcttcttcctattgttggttggtgtggcattggcatctatttctgaagcttcttttaactgggctggatttctgacgtgcaatgggttcaaatgtgaccttccagtgaaggaaatttccgtccgcaaagaagctcatgctgatcaaagaggaacctctggacaacatcaatctcttttcgattattatcaacctcttatccttcatcacagtcatgtcattcttccttctagctcctgtaaccttgttgaccgaaggtgttaaggtcactcctacttatctgcagtctgctggtctgaacttacaacaagtgtacacaaggtctttgattgccgcattctgtttccatgcataccaacaggtgtcatacatgatcctcgcaagggtgtcaccagttacccattcggtaggtaactgcgtcaagcgtgtggtggtcattgttacatctgttctgttcttcaagactcctgtgtctccaatcaactctatcggaaccgcaatcgctcttgcgggagttttcctgtactcacaactgaagagacttcagcccaagcccaaggctgcttgattgcattctgttcgtcaggatcaatagagcgttgccactcttggaatcggtgctttagtttagccggacatattgggaagccttgttgagtaactagtaccgtgcaggatcatttgtaattcagtaatgagcattttgaccaggaaagttttgaaatctttttcaccgttctctacttggacgttctagttgccacttaataaagcctctgcagtttgatcgtgccgtgatgaagtcaccgatgagcaacatctgtaagggttcatttctgtcccttttagccattttcatagataattcagaaagctttagttgctaacactacatgaagttcatgaacaagatattgcaacttacattgtatttaaccggacagtactacattcatgtgtgccctgatgccctccatgtctggtgtcagggcatcgtgcatggttgtgaacttgcattgctgtaaccttgtttctaacaaacag

SEQ ID NO: 5143 - DNA, 1090 bp, Triticum aestivum
  Clone ID: TRIAE-23APR03-CLUSTER5924_1
cccccaccccattcccccctccccctgttcgtgctgccttcactgcccccccgctctgcacccccccagggattttggcaaaagcaggggaccttcaggatgaagctcagagcagccattttgcccgggttcatgctccccattgctgtgctctcccccccagcattggcccaaaagacgaagggcccccctgctcccccggcgccggtcctccccccgcccccaccgccgccgccgccgccgcgccacgtggacctcgcggacctcctgaccgtggccggcccgttccacaccttcctggactacctccagaagaccaacgtcctggagacgttccagagcaaggcgaacgacaccaaggaggggatcacattgttcgtgcccaaggactcggcgttcgcggcgctgaggacaacgacgttcgccaacctcaccagcgaccagctcaagtcgctgatgctgtaccacgcgctgcccaagtactactcgctggcggagttcaacaagctgagcagcctcaacccggtggccaccttcgcggggtcgcagtacacgctcaacctcaccgacaacatgggcagcatccggatcaagtccatgtggtccaaccccaagatcagcagcagcgtctactccacccgtccggtcgccgtctacgaggtcgacaaggtgctgctgccgatgcagatcttcaagagcgacccgccgctggcccctgcccccgcccccgcccccgccgacgccaagacctctgatgacgcgcctagcccggcgtcggggaagtcagcgagcgcgaaggccaaggcggggtccaagagcgcgtcgcaccgcgctggcgtcggtgtggccagttacctggcggtggctgtctccggtggcgtgatgatgcttttgtgagcgagagactaatgagagaggtagtggcggggttcatccgtgctgcttaatttttactacatggattgttgctgagtccgattgttgctgagttcattctttggacatagtaggcgttctgctaggatttgcatcatatatgcttctgtggttggtccttgttgatactacttgatatactactattttattt

SEQ ID NO: 5144 - DNA, 7517 bp, Triticum aestivum
  Clone ID: TRIAE-23APR03-CLUSTER593_1
ccggttcggcaggttcccgttgtccccccctctcctcgccgctcggggccctccgacggtaacctcttcccgccctgccgcccccgccgccgcaacctccagccccctcccccgctgggcgccccagcgtatgctcccgtcctccccccccccctccatctcgccccaatcgcaaaaaccgcgccgtccctcgactcccccgcccacctccccgtcgtcaccccgagaaccatcacggggaatctttacaacaacaagcgccaacgccgccgccaagccccccccacgccaaccccgccttccgcgcacccaaccttggtgcctcctaccgaaaacaaccggcccctgccgcaggtagacgcgggggcgagggccgtcgcggaagcctccccaatgtagacggcgctggctgcccagtatgggaaggctcttgcggagttaaaagccgacacaccgtctacacttttgtcgctccttgcagacacgccggacggcctcgcgttgcccaacggaccctcgcagaacctcagcacaagcgctgcggccataagggagcacgttgtggatggacaggtgcagcatcttggttgacgacagaactgtgcccatggacaacgcatccggggagtcacacatagatcggccttgcgtgttgtctgacggggaggccgtcctacttctggataggggacatgtggagcaggcaaattgtactagcgaggcgttttcctggagccggaagcagccgagaggagggcactaggcactcagtgtggtcattcacgtagggcgcaagcaacaggagttccatctcttccatgaagcgggtcacaagtgaaagttccgcaagaaacctgacactcaatacctgaggagatctataagaacgcttgtgtgtcaactacagacgaagcagtcgataggtgtcaggtgttggggtatcctgcaatgatcaaggcatcatggggtgggggtggtaaaggaataaggaaggtacacaatgatgatgaggtcagagcattgtttaagcaagtgcaaggagaggtccccggatcgcctatatttattatgaaggtggcatctcagagccgacatctagaggttcagttgctctgtgacaagcatggcaacgtggcagcactgcacagtcgagactgtagtgttcaaagaaggcaccaaaagatcattgaggagggaccaattacagttgctcctccagaaacaattaaagagcttgagcaggcggcaaggcgactagctaaatgtgtgcaatatcagggtgctgctacagtggaatatctgtacagcatggaaacaggcgaatactatttcctggagcttaatccaaggttgcaggtagaacaccctgtgaccgaatggattgctgaaattaacttacctgcatctcaagttgtagtaggaatgggcataccactctacaatattccagagatcagacgcttttatggaatagaacatggaggtggctatcacgcttggaaggaaatatcagctgtagcaactaaatttgatttggacaaagcacagtctgtaaagccaaagggtcattgtgtagcagttagagttactagcgaggatccagatgatgggtttaagcctaccagtggaagagtggaagagctgaactttaaaagcaaacccaatgtttgggcctacttctccgttaagtccggaggtgcaattcatgagttctctgattcccagtttggtcatgtttttgcttttggggaatctaggtcattggcaatagccaatatggtacttgggttaaaagagatccaaattcgtggagagatacgcactaatgttgactacactgtggatctcttgaatgctgcagagtaccgagaaaataagattcacactggttggctagacagcagaatagctatgcgtgttagagcagagaggcccccatggtacctttcagttgttggtggagctctatatgaagcatcaagcaggagctcgagcgttgtaaccgattatgttggttatctcagtaaaggtcaaataccaccaaagcacatctctcttgtcaatttgactgtgacactgaatatagatgggggcaaatatacgattgagacagtacgaggtggaccccgtagctacaaattaagaattaatgaatcagaggttgaagcagagatacattctctgcgagatggcggactcttaatgcagttggatggaaacagtcatgtaatttacgccgagacagaagctgctggcacgcgccttctaatcaatgggagaacatgcttattacagaaagagcatgatccttccaggttgttggctgatacaccgtgcaaacttcttcggtttttggtcgcggatggttctcatgtggttgctgatacgccatatgctgaggtggaggttatgaaaatgtgcatgccactgttactaccggcctctggtgtcattcactttgtcatgcctgagggtcaggccatgcaggcaagtgatctgatagcaaggttggatcttgatgacccatcttctgtgagaagagctgaaccatttcatggcacctttccaaaacttggacctcctactgctatttctggcaaagttcaccaaaagtttgctgcaagtgtgaattctgcccacatgatccttgcaggatatgaacataacatcaatcatgttgtacaagatttgctaaactgcctagacagccctgagctccctttcctacagtggcaagaactcatgtccgttttggcaacccgactcccgaaagatcttaggaatgagttggatgctaagtacaaggagtatgagttgaatgctgacttccggaagagcaaggatttccctgccaagttgctaaggggagtcattgaggctaatcttgcatactgttccgagaaggatagggttactagtgagaggcttgtagagccacttatgagcctggtcaagtcatatgagggtggaagagaaagccatgctcgtgcggttgtcaagtctctgtttgaggagtatttatctgttgaagaactcttcagcgatgacattcagtctgatgtgatagaacgtctacgacttcaacatgcaaaagaccttgagaaggtcgtatatattgtgttctcccaccagggcgtgaaaagtaaaaataaattaatacttcggcttatggaagcattggtctatccaaatccatctgcgtacagggaccagttgattcgcttttctgcccttaaccatacagcatactctgggctggcgcttaaagcaagccaacttcttgagcacactaaattgagtgaactccgcacaagcatagcaagaagcctttcagagctggagatgtttactgaggaaggagagcggatttcaacacctaggaggaagatggctatcaatgaaaggatggaagatttagtatgtgccccggttgcagttgaagacgcccttgtggctttgtttgatcacagtgatcctactcttcagcggagagttgttgagacatacatacgcagattgtatcagcattatcttgtaaggggcagtgtccggatgcaatggcacaggtctggtctaattgctttatgggaattctctgaggaacatattgaacaaagaaatgggcaatctgcgtcacttctaaagccacaagtagaggatccaattggcaggcgatggggtgtaatggttgtaatcaagtctcttcagcttctgtcaactgcaattgaagctgcattaaaggagacttcacattacggagcaggtgttggaggtgtctcaaatggtaatcctataaattctaacagtagcaatatgctgcatattgctttggttggtatcaacaatcagatgagcactcttcaagacagtggtgatgaggatcaagcgcaagaaaggatcaacaaactctccaagattttgaaggataacactataacatcacatctcaatggtgctggtgttagggttgtcagctgcattatccaaagagatgaagggcgttcaccaatgcgccactccttcaaatggtcatctgacaagttatattatgaggaggacccgatgctccgccatgtggaacctcctttgtccaccttccttgaattggacaaagtgaatttagaaggttacaatgacgcgaaatacaccccatcacgtgatcgccagtggcacatgtacacactagtaaagaacaagaaagatccgagatcaaatgaccaaaggatgtttcttcgtaccatagtcagacagccaagtgtgaccaatgggtttttgtttggaagtattgataatgaagttcaagcctcatcatcattcacatctaacagcatactcagatcattgatggcagcgctagaagaaatagagttgcgcgctcacagtgagactgggatgtcaggccactcccacatgtatctgtgcataatgagagaacagcggttgtttgatctaattccatcttcaaggatgacgaatgaagttggtcaagatgagaagacagcatgcacattattgaagcatatgggtatgatatatatgagcatgtggtgtcaggatgcatcgctttctgtgtgccagtgggaagtgaagctatggttggattgtgatgggcaggctaatggtgcttggagagttgttgttaccagtgtaactgggcatacctgcactgttgatatttaccgagaagtggaggaccccaatacacatcagcttttctaccgctctgccacacccacagctggtcctttgcatggcattgcattgcatgagccatacaaacctttggatgctattgacctgaaacgtgccgctgctaggaaaaatgaaaccacatactgctatgatttcccattggcatttgaaacagcattgaagaagtcatgggaatctggtatttcacatgttgcagaatctaacgagcataaccagcggtatgctgaagtgacagagcttatatttgctgattcaactggatcatggggtactcctttggttccagttgagcgtcctccaggtagcaacaattttggtgttgttgcttggaacatgaagctctccacaccagaatttccaggcggccgggagattatagttgttgcaaatgatgtgacatttaaagctgggtcttttggtcctagagaagatgcattctttgatgctgtcaccaatcttgcttgtgagaggaaaattcctctaatttacttgtcagcaactgctggtgctaggctcggtgtagcagaggaaataaaggcgtgcttccatgttggatggtctgatgaccagagccctgaacgtggttttcactacatttacctcactgaacaagattattcacgtctaagctcttcagttatagcccatgagctaaaagtaccggaaagcggagaaaccagatgggttgttgataccattgttgggaaagaggacggacttggttgtgagaatctacatggaagtggtgccattgccagtgcctactctaaggcatacagagagacctttactctgacatttgtgactgggcgagctattggaattggggcttatcttgctcggttaggaatgcggtgtatacaacgtcttgatcaaccaattattttgactgggtattctgcactgaacaagctcctggggcgcgaggtgtatagctctcagatgcaactgggtggccccaaaatcatggctacaaatggagttgtccatctcactgtgtcagatgatcttgaaggtgtttctgctatcttgaaatggctcagctatgttcctccctatgttggcggtcctcttcctattgtgaaatctcttgatccaccagagagagctgtaacatatttcccagagaattcatgtgatgcccgtgccgccatctgtggcatccaggacactcaaggaggcaagtggttggatggtatgtttgacagagaaagctttgtggaaacattagaaggatgggccaaaactgttattactggaagggcaaagctgggtgggattccagttggtatcatagctgtggaaaccgagacagtgatgcaagtaatccctgctgaccctggtcagcttgattctgccgagcgtgtagtccctcaagctggacaggtgtggttcccagattcggccgcaaaaacggcccaggcactgctggatttcaaccgtgaagagctcccattgttcatacttgctaactggagaggcttttctggtgggcaaagggatctgtttgaaggaatccttcaggctggctctatgattgttgagaatctgaggacgtataagcagcctgcttttgtgtacataccaaaggctggagagctgcgtggaggtgcatgggttgtggtggacagcaagatcaatcctgagcacattgagatgtatgccgagaggactgcgagagggaatgtccttgaggcaccaggactcattgagatcaagttcaagccaaatgaactggaagagagtatgctaaggcttgaccctgagttgatcagcctcaatgccaaactcctcaaagaaactagtgctagccctagtccttgggaaacggcggcggcggcggagaccatcaggaggagcatggctgctcggaggaagcagctgatgcccatatatactcaggttgccacccggtttgctgagttgcacgacacctctgcgagaatggctgccaaaggcgtgatcagtaaggtggtggactgggaggagtcccgagccttcttctacaggagactgcgaaggaggcttgccgaggactcgctcgccaaacaagtcagagaagccgccggcgagcagcagatgcccactcacagatcggccttggaatgcatcaagaaatggtacctggcctctcagggaggagacggcgagaagtggggagacgatgaagccttcttcgcctggaaagatgatcctgacaagtatggcaagtatcttgaggagctgaaagccgagagagcgtctacactgctgtcgcatctcgctgaaacctctgatgccaaggccttgcccaacggtctatcgctcctcctcagcaaaatggatcctgcaaagagggagcaggttatggatggcctcaggcagcttcttggttgatgactggcccaccctttgataacgggagcatccattcagccagcataaaccggccttgcttgttgccaccaagcaagtcctgtctatggtggactgggtaccaacggaagcgcagacgacgacaagcaaattttacttgcgtggcgagctacaggagggggaggtttttcaactgaaacacattgtttgcacataggtaggaggcatctcatctcaggacaatttgtatgtttattgttattacagataggtacacacaaagcatatgtatgctggatagatattcggtgtgagttgttgcaatgcaagattcatcatcttaatttacgagatacgtgtgatggtcgatgtgatagtcctagtttcctcggtggcgaggaacgctgagtttccttttgctgcagttatgtgatgtataccctgagaac

SEQ ID NO: 5145 - DNA, 1967 bp, Triticum aestivum
  Clone ID: TRIAE-23APR03-CLUSTER5955_1
aagatttagtttcacggtggcaactgcaaataacaaaggcggcggccggcgggtggaggcggcgcacacggcacaaacgctgcggtggcgtcccggggccgggcaccgtgccactgccccaattactcaattccttcccaccccgcgccgcagcgccaacgaccaaaccaccgcgcaggcgcgcaaccgcacgccaccctccgtcagtcgggtcgggcggacagcgaccggcgcgtgcgccagcgagggggctggatatagatggaggcgggcagtgccgtgggggcgcgatccacttgggcaccagccgtccgggaccgagaccgagaccgcgccctgccccgccgtgtccgctgccgcgccgccgccatgccgccgtccgtccgcacggtctccatccccttcgccgaccctcaaggacggggcagggacctgagcggcaagatcgaggaggggctcggccccgacgggctccgcctcatctccatttccgacgtgccgggtttcccaggtctcaggcgaacgctcctgcgattggcgccgatagttgcaaacccgcctgaagatgtgaagaaacgacttgaagaccccggaccgcagggtaattttggccggagccaagggaaagagaaacttgaatctgggaaactccacacattcaaagggtcccagtatgcccacccaattttggaatctccctactgctgatgatgtccttgtaagtaggtacccatcatactgccgaccaagtatctggcccgctgatcatctgcctgagcttgaaatagcatttaaagctcttggaaagctaatgttggaagttggcttgatgttggctcgtcattgtgatctctatgtaatgcagcacggagtgggaccatatgatggtgaaagtcttgagcagacaatttcccgttcaaggtgtcacaaggggcgtctcctgtattatttccccagacaattcagcacacaaaaagaagatggtgattctgtttcatcgtggtgtggatggcatactgaccatgggtctttaacaggtcttacatgtggcctgtttatgaaaaattcagtggaggtcccctgtcctgatagtgcagctgggctgtacatccggactcgtgatgaccgagttgttaaggttacatttggggaggatgaattagcttaccaaattggggaaactactgaaatactatcaagaggtcgtctatgtgcaactccacactgtgtacaggcacccagcggtgtgaatgcttcaaatgttgagcgctctacttttgcaatgttcatgcaaccagattggaatgagacgcttaactttccaagttgaaattccctaccaccaagagttgattccaccaaacggagcgcttacgtttggagagtactcagagagactggtgaacaagtattaccaggggaagacgtgattcgcatggattgtcacgatgaggcgcggagaaaaggccccagtgaagatactatgctaccaaggaaactaaaatcttcagctagtcgtgcctgcaaatacacttccaagtccctagaaagcatgaaaaaaattataggtatagattacatcatttccgtaccatgtgcgcttgtaaaaaagatgcagaaacatgacctcctgaaaactgtataaaatgagatgaaattgtgcacatgtagtttgttatatggtcctaacttgtgcacggaatgctctatttttacacacttgtggaatccaaaagagcgcaacagcacaacgggtttcgttgcctacatgcgccctcgtcgcccacctttcccacggttgtaactccccaggcggggcctgctactttcaggcacccagcggtgtgaatgcttcaaatgttgagcgctctacttttgcaatgttcatgcaaccagattggtacgtgcaaactttctactcaaaattgtgaggacagtgtagttttgcttccatttgatcgactatg

SEQ ID NO: 5146 - DNA, 1944 bp, Triticum aestivum
  Clone ID: TRIAE-23APR03-CLUSTER59816_1
aaaaaccgtccccactcacctctccccacccaccacggcaccgccgcctccgccgcccccgtccccaaggacccctccgccgtgttgaggggatcgcgtcgggagaaagtcttccctgcctcgaggcaagtgtcgtatggtatcacccagcacaccgacgcgagcgccgggtggggttagccggttgcccagcgccacgggcggcccgggcgggtgggcacctcgctccctgacccgccggggcgcgccagccgcgcagttgaccttccgttccaggtggacgggcgcggcgtggacctcaggtgcccctggggcgcgcggagggagggcaccgggggcgccgggagcgcaggggaggagggcagtgatgacgataatacacaaggaggggaagaaggcgatggtagcacacaggagagcagcgattatgaagacgacggccgcaattgccaagtgatactagccgagacaaactgtccaggaaagctctaccccgagagccaagcagaggccatagaactcagatgggcagactggttcttccagcggattgtagaacactcaaagctgtgcaaggagattatggccctgggagatgatgatgagactcctttccccccatctcccatgaaagtgttccctgaggcaacagctttatgcatccttggggccaaatcctgccaccaccgtgtttacaggacccatgacacttctaccaccccatcaactcttggatatcgtgaaccaagtcatatgctacaatttttctccatgcgtctatcaagctttgaagcctcgtattccattagtgtgtacggaatattcgccattcgggattacttggaccggcgacggaactatgtctttaaccgtcccagggatgatgctgtaacaattgagaagcaggattcttttgtcgtaccactttgtagcccttgtcgaggaatgtatgtatcggataaggctttagtagaagttgatctttgggtaaagaaggaaggggatgaatcagatgacaagcaactactttctgcctacgctgagattgatgtccatgctgaagctaatgtcatgttttattcacgaatttctggtgataattgcaatttggacttaaaatacatagtcctttcagaaagtgtcgaggctgtaatacaagtatatgcaaaggtcgaccatcctcaccatgtgaggttcactgcttttagcaccggatatgatgactatcctcatcgtggggttgtgctgtttgatgacaaattatttggtcacgaaaaactattccagcatattgttgcagtgaaagcaaatgaagaacttcatgtttttttagaagtgaacggttcagtgttccagtggacttttcaagatgaacatgtcggagctgttatttctcctgatgactcaatctttgagtatggccagttcttcgtgagggtgatatttgctccaaaggattgtcagtgaagctcagctccaacattctgacagtgtagccattggctgaaagcctgaagctcatggaaaagtgttgttgcttttcttggtattgtatataagtagcagttgaatttgtcttcttaagccctcttaggcagacatcagaagtattaatttttatagcctgaagctcatgaaaactagagaaaaaaaatcttgacttttatgtggcctatccatttagtataactggtggaaacccaaacatgttccaagtgcatttcctctgttatcttcgtagttccactattttctttttaatttggatgcatccttataatttgtttgcatggtaagttactatgtagatcaagataccttgacaagtggggaaaaagtagcctgtttggttcaaatcaagtgtttgttgcactgggctgattgagctggtgtatttgctgattgaatcgaagtcaaatttattatccaaaaaaaaaaaaaaaa

SEQ ID NO: 5147 - DNA, 1087 bp, Triticum aestivum
  unsure (1)..(1087): unsure at all n locations
  Clone ID: TRIAE-23APR03-CLUSTER59974_1
actgcaccgcacaccacctgctcgatcaaattacaccgcgcccgaacaacgccgctagcctccggccgcctccgccccttccgatgagctttctcgccgggcgcctcgccgcccaggagggcgcctacttcctgcaggagtccaagctcgccgccggccgcctcgcggcgaagctccccgcgtccgcgcgtgggcccaggccggcgtccccgcctccgtcgcccgacgtgctcccggagatcctccgccactccgtgcccatcaggcctacgccgcctccggctgactccaccctctacggctccactcgctgggtcctcccacagggcggcgccgagacagccggcgtgtcgcccgacgtgctcaacccgctccgctcgtacgtcgctctgccgcaggccaccttcggccccaaaagatgggaacttccaactgagcagccttactactcggcggcaaccgccaatgagcggcgacgtgatatgcatcctcctcccatggaccctgagaagttgaaggctgtaattgatggatactcacaggttggaaaggcatttcttgctgggactgttttggtgtttggaggagcaacagctgtgctgctgtacactgccaataagctacagttgcattcagtagacgacgtcaaagctaaaggaaaagacgcagtgcaaccacatgccgatatgatcaaagaacagatagctccactgaggaaatgggccgaggacacgtcccggaaatggcattacgaagccgacagagagtccggggagaagtctgtccttgttagagagctttcaagggcacttggttctaagacgcgtcctccgaattgatcaatactactggcgagtggctgttgtcgttgttgttgtaacctgtaagtccaccattatgaagctttcgcttgttttacgtgtctgccttgtctatatgtgtaaggctacaaggaacgaaatcaatgtacatattttacccctatgttaaataaagcagggtttgccactttgaaaaaaaaaaaaaaaaaaagaagaaatacctgcacagtatactagnnnnnnnnnnnnnnnnnnnnnnnnnnnnn

SEQ ID NO: 5148 - DNA, 2352 bp, Triticum aestivum
  unsure (1)..(2352): unsure at all n locations
  Clone ID: TRIAE-23APR03-CLUSTER6023_1
attaagtgtttatacacacacgattatggttatttttctactccctcggcgctcgcctctgtcctcgagcttcgccttggatcgcagcgcagcgcagcgtagttggactcctcccctgttcctcgtcgttgcttgtcgtgcgcgcgcgtgagcgaacatctcaaatggacttttttactgagtatggtgagggaaacagatacaagatagaagaggttataggaaaagggagttaaggcgtggtctgctctgctttggatactcacacaggtgagaaagttgctatcaagaagataaacgacatctttgaacatgtgtctgatgcgacacggatactccgcgagatcaagttgcttaggctcctaagacatcccgatatcgtggaaataaaacatattctacttcctccatcgaggagagagttcaaggacatatacgttgttttcgaactcatggagtctgatttgcaccaagttataaaggcgaatgatgacttgactccagaacattatcagtttttcttgtatcagttgctccgaggattgaaatacatacatacagcaaatgtatttcatcgagatctcaaaccaaagaatatcttggctaatgctgattgtaagctcaaaatatgtgacttcggtcttgcaagggtagctataagtgatactccaaccgctatatctccaaagccttatatcgcaactaggcggcccccagccgtggatggccgcaacgggcactggtagactgctgtggcaatgccagaaaatccgtgtcactggttcaggtagggtttactcattccaaggacacaccttcaaacatgccattctgtatattatctgtcacgcttacatctcccggagacgataaaactgtatgcgaagtcattgtggcaggctagtctcctgttaagctcaactctggtctggttacctgcacggaaaaagcctgtatcctgctctcaaaaaattctaaatacagaaccaggtgaattaaatttgttagagagaatgctagcatttgatccaaaagacgggccaagtgctgaagaggctcttgctgatctttatttcaagaacatggccagtgtggatagggagccttctgcacagcccattactaagcttgagttagagtttgagagacgaagaattacgaaggacgacataagggaactcatatacagagaaattctggaatatcatccaaacatgctgagggaattccttgagggggcagagccaactaatttcatgtacccaagtgcagtagatcatttcaaaaagcaattcacattccttgaagagcattatgcaaagggatcaacagcagcaccgcctgagaggcaacataattcattaccaaggccgagtgttatctattcggataaccggccacagggttcagatagccgaccacagggtgctgccaacattacggatgatctttccaggtgtataatcagagataatgcacaaaagccacgcagagatcctgcttcagttggtgcaaacagagttcctaagggtgctgctgtcgcaaggcctggtaaagtggttggttcggcacttcgttatggtaactgttcaacatctggtactgagcaatatgaacagcgaagggtcatcacaagccaaggaattgttccaaacggcgttccttcaggcagctcataccctagaagaaataacacctgcaagagtgaaacaggtgaagctgaaaggatcgacgtgagccaagccgtgccaccaaagccatataccggaaataaactacctgcaactgtggatggccgcaatgggcactggtagactgctgtgacaatgccagaaaatccttgtcacctcattccaaggacacaccttcaaacatgccattctgtacagagttatattatctgtcaagcttacatctcccggagacgatagaactgtatgagaggcctttgcgacaggctagtctcctgttaagctcaactctggtctggttacctgcaattgggtagatccagttcaactgttcaacaagtataacaaaaaaactggaaactttgagcggcattcgcgacaaaggactgttactgacctgactgatggtgttcctcgatttgtttctccaagctggtggccttgagggaggttcagagagcccactgtacactatctaatgttgtaacacggagtttaattaattgactttaatgttcttgttgcttgtagtctgtcatcaagctgtagtattgaactattaaacacggctatttctataacacattatttggaccctgctcgctattgagtgcggaatttataatgatgtatgcagtaatcaagtagcccgnagtaaaaa

SEQ ID NO: 5149 - DNA, 1344 bp, Triticum aestivum
  Clone ID: TRIAE-23APR03-CLUSTER6024_1
gggatggaggatcggcgggttgcccggtagacctcggtagccctcaggcagcctggcgcagggccgcggtacggaggggatgggagaggggatgagtgagagaaatggtgagatcggaggggtcaggtggatagccccgaagctccatctcgcaggcaaccggaaggggagagatccgtggggctggcggcgcggacgtgtggagggcatggtgacgcttggattgcttgtattaatatgggtaagatgtaggagctgttggagagaagtcaaaaccgcatttgtgctggctgcatgcgcgccagatcacaaatgggcagcaggctaatattggagtatgcataggcgttaaatgttatgggcttcacaagaagtcccgggtacacttatctcaagaagcctgtcactagaccactaccagatgccgaccagcgagagagatcgaatccttgcaagaacttagtaggaacttcaagaattcctgaagccaagcttgacggattgcctctaatcatgctagtgacgccggaaaccaagcatctaactcacattctgctagttccaagagtgagattggcatggttgagttcatcgggatactgaatgtcaaagtcatcggcaggcaccaaattagctatcagagatatgtctagcagcgacccttatgtcgtcttgaccctcggacaacagaaagcacagacttcagtgatcaaaggaaacctgaaccccgtctggaatgaagaactcaagctctctgttcctcagaagtacgggcctctgaagctgcaagtgttggaccatgatatggtttccaaggacgacctgatgggggaggccgagatcgacctgcagcccatgatcaatgcggcagcatcctttggagatccagagctgctcggcgacatccagatcggccggtggctcaagtccggcgacaacgctctaaccgccgacagtgctgtcatggtgaccggaggcaaggtgaagcaggaggtcactctgaagctgcagcacaccgagtcgggggaggtgacggtggagatggaatggatggctctaaacatttagaggatccggatacgatggcaaatttgtattttgatttgtattttgctgcaaaggatccattgaatcgactttttttggaaaaataataatttttgctactagtagtaggcaataacaaacataacctgaactcaagccttggctctgtggttgggcatgcggttgtgcagcctaacgacccgagttcaattcctagaattgacaggtgatgtacatgggttttcccccatttattgaagatcaagtttggtgtgtggtggaatcactcatcaaaaa

SEQ ID NO: 5150 - DNA, 1676 bp, Triticum aestivum
  Clone ID: TRIAE-23APR03-CLUSTER60441_1
ccgtcccactcgcctcccccccatccgccccccctccccctcctcctccccgcctgctccccccagccggcggcccggcgcccactagctgctctccagatgcatcctccccatgatcctgggatggagggagtcgtggtggcaggggacagatgcgtgatgaggaggaggccgtggtcaattggtcatggtggcgtgacggaggtcgtggctcgccccccgccgcctctctcgcgggcccattttccctgcccccttcccggcgtccttacctctgccatggcctccaccctccctctccatcgtccttcccgagctcttcctctttgggggctcgccgccatccgatgccgcgcgccatgattctagatcggccgtaggccgagtaggagcggtttctatagtgagggcaggacgctacccgctcccgcggctctgggctgagggggagaggtcaaggaaggttgaccggtcatggaggtgagatccgacacagcggatgaacatgggcctcgcaccagggatcatgggagcaacgggggtggctggccccccgaagctagacgcgaaagggggcacctgtgcagggacggaagccggcgtccaggtgctatccattcctgctcttcttcagcttgcagggcagaagatcacaagaagccgaaccattccaagtactgtcgagcagaggctctagagaggaggtttgattttccttttcggggtttgtagcacgaatgcaagaatttctcatgtaggtttggagatgtccttattttcatggctcaatcatcaaatgacgtcaaaattgaattcctaaaagcaaggctaattgatgaaggaaaactaactgatgctcttgttgtatccgactgctgtttgtgtaatggagcgtctgataaattactttgattgtccattgatcaaagggagtaaataataagtctaggcataggacaatgtaacagtgcttgagtccttacatcatacatgatcgtgtaattctatgacatggactgtttatggagttaaatctcgacaaggcatatttcccatttctcaaaaaaaaaaaaaaaaaaaaaaaaaaaaaaaaaaaaaaaaaaaaaaaaaaaaaaaaaaaaacaaaaaaaaaaaacaaaccccaaaaaaaaaaaaaaaaagttttctctgccccccaccctccaggggggccccggaacccactcccccaaaaagggggccaacataaaccccgcccccggcgggcttgaataacgcaggcgggggggaataacaggggtcccacccagaaacccctttggaaaaagcccccgttatcaaaagggcccacccaaataaattagccccaaaatagattccccttcccaaaaaagtacgccccccagagaagggaaaggggaaatttgaacgggcaaaatttttcgaaaaaactccccgggtaaaatttgtggcaaaaccccccacttttttttaacaaaagggggcaaaacggggaaaaaccccctttataatcccaaaaaaaacaccccgaaaaggggggggagggggggtcccccctggggagaaaaagaacccccatataaaaaaaaggggggtccctccccccaaagggggaaaaaaacccctcatttgggggggggggggccccccacaagagaaacacctccccctaaaaa

SEQ ID NO: 5151 - DNA, 1271 bp, Triticum aestivum
  Clone ID: TRIAE-23APR03-CLUSTER60615_1
accacccgacggccggggcccccacccctcaccccacccacgccccccccgatgcctcggcgcgccctcaccctcctccagcattggacttacctccccgccctcaaagtctcctcccccttcttcttcctcttccacttcgccttcttcactagcatcatcatcgccacaagcgcaggaggccccgtcgcggccggcgtcttcttcttccgcgcgggacccgcctgcacctgcgtcggagtcgacggcgacgggaggagaggatgggacgggggccggagcgagggcgcgcacgcggcccccgcctggacctcccgccccacgtccggctgcgactcgcgcaccaccgggggcgtctcgacggcgcgaggcgtcaccggcggcgggggcgacgccgccctggcgcaggaggccgagttgtgcgtcttcgacgccgtgatcgccagcctctccatgatcctcgtcagcgagattggtgacgagacgttcagcattgcggctctcatggccatgcggcaccccaagtcgacggtgctctctggtgcgcagtcggcgctggttgtcatgacggtactatcaactgggcttggcaggatcgtaccgaacttgatatcgaggaagcacactaacagcgcagcaactgtcctttatgcgttctttgggctgcgactgctttacattgcttggagatcggattctagcgcatcacagaacaaggaaatagaagaagtacaggaaaagctggaagcaggtcaagggaaatcaacactttagacgcgtcttctcaaggttatgtactcctatttgcgtggaccttccttgctttggcggggctagctgaattcaggagacccaaatttgaactcgactattccacaggcttcccgtaggtgttcccattgggtgcccactgggggaaccccatctccacacctctcgccgtcattgggcgtcgggatgggtgggttgatggatatcgcaagtaaccctagccaccattggcaggcctcctctcccttggcttcttggtatcaccatatttccaccctccaacgatactctcaccttgtgctttcttcttcctgtattttttttttttgtttgtgatgatcacaccacactacctaagccccgtcacctcatacttcttagcagcagatgctgcccggaatacagttctttgcgttgtaccacgatactctgatatatgtatggggttatgataactgctaatatatacaagttgacccgattccaagaaaaaaaaaaaa

SEQ ID NO: 5152 - DNA, 1077 bp, Triticum aestivum
  unsure (1)..(1077): unsure at all n locations
  Clone ID: TRIAE-23APR03-CLUSTER6066_1
aagggttttccggcattccaacacggacgagccaacgagaggagggtggcgagatgacggcggggcctaagagcggcgggggcggcgcggcagccgcgcgagcggccgctgcggggccgaggacggtgctcatcacgggggtcagccgggggctgggccgagctttagctctggagctcgcgcgccgggggcacgccgtcgtcggctgcggccgctccgccgatcccatccgctccctcgaggccgagatgggttccccgtctcgccactttctcaccgtcgctgacgtcaggtctgacagcagcatgggtgaattggcaaaggctgttgtggaaaggaagcaaattcctgatatcatagtaaacaatgctggtacaataaacaagaataacaaaacgtggaatgttccagcagaagaatttgatacggtggttgatacaaatattaaaggaacagcaaatgtacttcgccattttgtaccacttatgatacagaagaaacatgggatgataatcaatttatcctctggttggggaaggtctgctgctgcagaggttgctccatattgtgcttcaaagtgggctattgaaggtttaacacgctcattagcaaaggagttgcctcctggattggcagcaattgctcttagccctggtgttgtgaataccgacatgcttacttcatgctttggaagttcagctgcgttataccaatctactgagcaatgggcacccaaggcagccacaatgattctaagcctttcactggaagataatggtgcctcactaactgtatgatgctgtagcaatgttgtattaatcacagatcggttctcaagtaattatgacatttaacttgcagctgttgaatatcaattatgttgtagtaataagataaaaaggttcatgtacttgtgctcgttggtttggctaaccgttgtttcaaaaaaaaaaaaaaaagaggggggctgggcgcctcgctctcgcgcgcggcggggggtgggcaattcgccgttttgggcccccnnnnnnnntnnnnnnggcgcttgtacgcgcttccgtgcctanattttttatn

SEQ ID NO: 5153 - DNA, 1924 bp, Triticum aestivum
  Clone ID: TRIAE-23APR03-CLUSTER606_35
cgattgggcaaggaaggggccacccccctccccattcctacccacccagcatctcggcagtaactctcctccctcccaccggcgcgcccgctcgccgcgcgcgcgaatctcggtcgcaactggtgtactgttgaaggaaggaaaaatcatcctatttgtcatggcgggaactgactcctcggcgtcatcgagacaaagcagtttcaactcattagcaaaggacctagaacttcctttggagcaagggtgcctcaccatcgttgtacttggggcttctggagatcttgccaagaagaaaacgttcccggcactctaccacctttttgagcaggggttcttacaatctggtgaagtgcatatagtggggtatgcgagaacaaatctttctgatgatgggttgagagggcgcatccgtgcataccttaaaggagcctcagaggaacatgtttcagaattcttgcaattgataaaatatgtcagtggttcctatgacagtggagaaggttttgaaaaactgaacaaggaaatatcagattatgagatgtcaaacaactcaggaagctcccgtaggctcttttatttggcattgcctccatctgtctacccttcagtgtgcaaaatgatccgaacatattgcatgagtccaacttctcgcgctggatggactagagtaattgttgagaagccctttggaagggacctggactctgcagaagaattgagttcccaacttggggagctattcgaggaagatcaactctacaggattgaccactacttgggaaaagagttggtccaaaacttgcttgtgcttcgttttgcgaaccgtttgttcttaccactttggaaccgtgacaatgttgataatatacagattgtattcagggaggacttcggaactgatggacgtggaggatattttgatcaatatggaatcatccgtgatatcattcagaaccatttgttgcaggttttctgtttggttgcaatggaaaagcctgtatctcttaagcctgagcacatcagagatgagaaagtcaaggttctgcaatccgtgaacccgataaaggacgaagaggtagtccttggacaatatcagggctacaaggatgaccctacagtgccagatgactctaataccccaacgtttgcatctattgtacttagggtacacaatgaaagatgggaaggtgttcctttcattcttaaagctggtaaagcattaaactcaagaaaagcagaaattcgtgtgcagttcaaggatgttcccggtgacatttttaaatgtaagaagcagggaagaaatgagtttgtcatacgcctccagccatcagaagccatgtacatgaaactaactgaattcgtgcaggtgaagaaacctggattggaaatggctactgaacagagtgaacttgatctgtcatatgggatgcgttaccaagatgtcaaaattccagaggcatacgagcgcctcattttggatacaataagaggggaccagcaacactttgtgcgccgagatgagctgaaggctgcctggcagatcttcactcccttgttgcacgacatcgacgctggcaagctgaaggctgtttcatacaagcctggcagccgaggccccaaggaagctgatgaactgagtgagaaggttgggtacatgcagacccacggttacatctggataccacccacccttgcatagagtgcctccctcgatccttgtaggtttgtttagctaggaagagtgaaagtatcacggataaaaatcttacgaattttagctgtactgcggtttacctggcgttgtaataacggatctgttcgacggagtatacctcaccacggtgtgaaataaaaaatggagtgtttcaaaaaaaaaaaaaaaaaagggtcgcgcgatcgatgccgaatcactagtgaattc

SEQ ID NO: 5154 - DNA, 1552 bp, Triticum aestivum
  Clone ID: TRIAE-23APR03-CLUSTER6071_1
aatcgattgggttgggttgggtttgcgggtggaccgatgacggtggccgccgcacgctgcctcattctcacccccaccatctcctcctcctccgccgtgctccggctcccccggatcgcccgccgccgcccgctctcctgctcggcctcgccgctcgccgtgttcgccaccatggagtcgccgcccgagggctaccgcaccaacgtcggcatctgcctcgccgacccctccctcacccaagatcttctccgcgtccaggatcgacatccccacggcgtggcagatgcctcagggtgggatagacccaggggaagagccgcgagcagctgccatcagggaattgagggaagaaaccggtgttagatctgccgaggttgtcgccgaggcccccaattggttgacatatgatttccccgcggatgtcaaagacaagctgaatgctaggtggggaaccaactggaagggccaggctcagaagtggtttctatttaggcttaccgggggtgatgacgagatcaacctgggatgggggcgatggatccgagaagccggagttctccgagtgggcatggatgacccctcagcaagtgattgagaaggctgttgatttcaagaaacctgtctacaaggagacactgaagcacttcgccccatatctacagtcagatccaacagcttcgtcatagactttgcagtctcccacgggctttatacgtagaggggctgtgtcaatcaataatttctcaaaaatgtattggggccacggagtatttctagaacgtctggcgtatcgccgccgcctgctatcccggcattggatccccgtagcccgatcatgcgcaacgagatgagtacgttgttgtcgcaataataataatactcgggacacattccccccaaaaaaaaaaaagggccctagttccggcaaatcttggtagcatgcaacatggacgcgagcagggcctgatactttttggccaggagaaaacagcatcgctgctgctgtcgccgtggctcagatcaacaggtagtagagccttccttcttgagctgttattaagcgccgatcccggtggcgatggaaatgatcttccgtgtccttggggaccaaatgcctgaactgaagcgtcctggctgttggccatggccttttgctttgctttgctgtggcttggtgtgggagcacggaggacaatcaaggcctccacgctttgtaccgggtggtctctctccggcatgatattgtctgtgagtttgtcccagtgtcccgtggccgtgggaggaggagggattgcagtaatggcatgcgatgtggttaggtgagggaggtggatggatggggatcggcggcggcggcgtgcgtggagcatgggagctgttaaatgccgcccgttataaaggttggttgggtctcctcgccggcgggaaggaaagcagctgggcggagtcaatgtttcgctgtgcggccgacggtcgttggtggcctccttccgcctttcctttcctcatgaactgcccgtgccatgccgtggcctttaatttgtgccctttg

SEQ ID NO: 5155 - DNA, 854 bp, Triticum aestivum
  unsure (1)..(854): unsure at all n locations
  Clone ID: TRIAE-23APR03-CLUSTER6077_2
aaagggcagagagagtggggagcaaaaggttttccagtggtgggcttcccgccgtggaagtccttgcgggaggggtctcgggcttggggtgggtggaggcaggacgaagaaagttttcgtttttaaaaggggttccccggggaaaaccccggaggcaggggccaaaggtttttagggtccaagtgggggggaggtgccacaccgtgacggcggggcgccgggccacaagcaagggtccaaacttgcatggtctgttgggagggcagtcagggtaccatcgctgattactcctactttgcggcaaacaagaacaaggttgtggagtgggaggagaactctctgtatggtactttggttaatcctaagaagtacattcctggaaccaagatggtcttccctgggctgaagaagccacaggcccgagctgatctcattgcgtacctgaagaaagccacctcctcttgaaatggcaaagatgatgctatgatcttgtcatggcgagtgaattcattttgcagtaaaataagaagattagacattaatagtcactcgggtttgatggggtgtgatccacgagacaattatcttgcgaatttcgttttcatgatatgggtttcatatcactaggtttagttggtaaaatgttcgtcaatcttttgattcagttgctggaaaaccccagtacgcatgttttgacctccaggtggcggtgggactggaatgcccacccatgttgatgagcatgagatctttaaaattgatataaagctttctgccaaaaaaaaaaaaaaaaaaaaaaaaaaaaaaaaaaaaaaaaaaaaaaaaaaaaaaaaaaaaaaaaaaaaaaaaanaaa

SEQ ID NO: 5156 - DNA, 1551 bp, Triticum aestivum
  Clone ID: TRIAE-23APR03-CLUSTER6091_1
atttcccggaaccattccaattctaggcttgggcgggcaaagccggccaacaggcacgaattgccctggcgttaccctccctctcccccaagccgctattcgccgtctccacttccccacttcctcctctcccccccctaccccctggcccccgccgccgccccctcctcctcctccgccgcctcccgcccctccgccgccttccgcccccctctccccctctctcccccgccccctcggtctcgaaccttcaaactggggaggccgtgccccgtgggccgtcacgcaaacaccgatcctaaagtaccaacgaagccgaaggcagcggagtcaagcccggacacgagttcgagaatcaacgaccccaacgaactaaacggcgcaaagcaactcgacctcccacgtaagatccgccttcaactgcctccgctggtcacatgcgttcttcgtgtctgggctgcactttgtggatctgctgcctatggatgtatggactggaaaatctaagatgtagctagatcttttggttgcatgttaatgtcgggcccatctctaaaaatatacacgcaaataattagcaacaacatcaagaaggcctccctgaatgctgaagatggaaacggtaggcggtggctctttccttctgctgccgtgccgtgccttagtgcgcgtagaccgtaggtgctcggtgctattttgtttgttggtgtggttggcgtttggctgtatcacgtattttcggctacgttccgccatgctatggggggttccttgctttcttacatatattcagcgccccctctcaagctcaagcagcaggggggctggccaggctttgctcttggtgcgagttacattggcttgccctggtgggctggccaggcgttatttggaactcttactcctgatattgttgtcctaactactttgtacagcatagctgggctagggatcgctatcgtaaatgattttaagagtatcgagggggatagaactctgggacttcagtcactccctgttgcctttggtatggaaactgcaaaatggatatgtgttggagcaatcgacatcactcaattatctgttgcagcctacctcctgagcaccggtaagctgtattatgccctggcactagttggactgacaattccccaggtgatcttgcagttccagtacttcctgaaggaccccgtgaagtacgacgtcaaataccaggcgagtgcgcaaccgttcttcgtcttcggcctgctggttactgccctggcgaccagccactgacggacggacctctgctttggatgagggggcattttgtacaacacagatagtggaataaatctgcagcaacaacatcaagaacgcccccctgaatgctgaagatggaaacattaggcggtggctctttccttctgctgccttgcctctagtgcgcgtagaccgtaggtgcacagtgccaggttgtttgtttgtgatgttatcagttggctgtaccaggtcattttggatgatacggtacggtacgttactgttaatatcagattgtttctccct

SEQ ID NO: 5157 - DNA, 1337 bp, Triticum aestivum
  Clone ID: TRIAE-23APR03-CLUSTER610_1
gtgcggctcgagccccgacctctgcgtcccccaggccccacactcccccgcgcgcaagggcaccgttcccgccgccccgccccgctcccggcccctccacgtcccctcgcgggtctcctcctcccgattcgggtacgagctgtggccaaccacacccctcccccctccccccttcccgtccttcccccagctcagcttcctagggtttcctcccgatccaaccccgacctccatggccaagaccaagcagggcaagagggacatcgactcctacaccatcaggggcaccaccaaggtcgtccgagtcggggactgcgtgctgatgcggccgtcggacacggacaacgcgccctacgtggcccgggtggagagcctggagtcggacggtcgggggagcgtgcgggtgcgggtccgctggtactaccggccggaggagtccaagggcggccgccggcagttccacggggccaaagagctcttcctctccgaccacttcgacacgcagagcgcacacaccatcgagggcaagtgcatcgttcactccttcaagaactacaccaagctcgacaacgtcggcccggaggacttcttctgccgattcgagtacaaggcggccaccggagcgttcacccccgaccgtgtcgccgtgtactgtaagtgcgagatgccgtacaacccagatgacctcatggtgcaatgcgagggatgcaaagactggttccatccaacctgtatgggaatgaccattgagcaggccaaaaagttggatactttcctgtgtgcggattgtgctaaagaaaatggtgcaaagaggccttcaaattcatacccgagttcaccaagttctgattctaaggttgagccgaaaaggcggaaatggtaatcgcttcaacaaaaaccatccccggtgaggagatgcactgtttatggcgtcagccctccattgctggtgcagaaaaaaacgtggcgttgtacagtgcatgagatgagctaggctatttaactgtaggattgaaattatgtttgctgctgtatctcgggagcgtttcctgcaatctaggtatcggcgagaaggaaatcgggaattgtactgtcatttgctcttgtcaaagtagcccttgtgtgtgaattaacttgttccctgcaggaaacgttcccgtttcctgtgtgaatgatgatgatgagcttgactgttgtagtttcataatttagatgtgtcagagtcttatgaactggtgaccatgacgacatgtttatgttgtttcaataattctgcaataatccgtgctacatacttttgtagggattgtttattccctaaaaaaaaaaaaaaaaaa

SEQ ID NO: 5158 - DNA, 2147 bp, Triticum aestivum
  Clone ID: TRIAE-23APR03-CLUSTER6135_1
ggttgaagttgattgaatgaagccagacagaaaagggggaagggtccgatccgggacgagaactcctccgcccaaccagcctccgcgccgcatccaaacagatccacacccgaaatccccgaaaccctcgccggcgaccatggggcagggcacgccgggcggcatgggcaagcagggcggcgcgccgggcgaccgcggcaagccgggcggcgacggcgacaagaaggacaagaagttcgagccgcccgccgcgccgtcccgggtcggccgcaagcagcgccgccagaaggggcccgaggcggccgcccgcctccccggcgtcgcgccgctctccaagtgccgcctccgcctcctcaagctcgaccgcgtcaaggactacctcctcatggaggaggagttcgtcgccgcgcaggagcgcctccgccccaccgaggagaagacggaggaggaccgctccaaggtcgacgacctccgcggcacccccatgagcgtcggatccctcgaggagatcatcgacgagagccacgccattcgtctcctcctccgtcggccccgagtactacgtcggcatactctcattcgtcgacaatgactatgactaaccagggtgctctaaaagtttttctaactacaaatcgcatttggttggatttttgcaagatgaatttgaccctatggtatctgtgatgaaagttgagaaagctcttctggaatcttatgacgagattggaggattagatgctctgcttaaagaaataaaggaggcggctgagcttccgctaacccaccctgaggtatatgaagacattggaatatggtcacccaagggggtcatattatatggagaacccggaacagggaaaactctacttgccaaggctgttgctaactccacatctgcaactttcttacgtgtcgttggaagtgaacttattcagaagtaccttggcgatggtccaaaactagttagagaactatttagagtggcggacgagctttccccctcgatagtcttcatcgatgagatcgatgcagttggaacaaagaggtatgatgctcattcaggaggggagcgtgagattcaaagaactatgttggagctgctgaaccagttagatggttttgattcgcgtggagatgttaaagttattctagctaccaaatcgcattgaaagtcttgatccagccttgcttcgccctggccgaatagaccgaaagatagaattccctcttccagacattaagactaggcggcgcatcttccagatacacacggcgaagatgacattgtcagatgatgtgaacctggaagagtttgtcatgactaaggatgagttttctggtgctgacatcaaaagcaatatgcaccgaatctggcttgcttgctttgagagagcgtaggatgaaggtgacgcacgccgacttcaagaaggcaaaggagaaggtcatgttcaagaagaaggaaggcgtgccggaggggctttacatgtgatgaattgtgcaccggtcttcactaccagaatgatattgtgtagtgataatatatttggtatcgtgggatatgtttccctggtttggagaatataggcgcaaatttgtttgtaacattttcttcgcctgaatggttggataattgaatagtttgttgtactacgatctgttgactcctttcgtccgaagtattgaatcataagcttaaatcgcaatggccagtcattaaaaaaaaacgcgtgggctgctacatggaatctctcccaagaagcccgagatctctcggcatcactgtcccagtgtggagaaaacccaagggtgaagcaacccatgtttttcggccaaagtattgatgatgatgatgaatgggcaaggtcaggagacggcatgggagttgggatataacttaatttatggtccctagctagctcttatgtgtcggccgtctctttttatgtacctcttgagttagtactcaggatggatgaattgaaaacattccaagctttgctccttcattttggtcttgtggccctctgtcgtgtaggtgctgctttatttataattgtaagatttccaatttcttgtcctgtcagaatgttgaaacattcctgtcttgtcctggatgttttgagataagaatgtttgttgttccc

SEQ ID NO: 5159 - DNA, 1724 bp, Triticum aestivum
  Clone ID: TRIAE-23APR03-CLUSTER6142_1
cacgttcctattgtagttgtcctcccttcttttctttccgtaaaaagaagaagaaagaaaacccctcttgtccactgcatattgctcctaaaggaggacccccaaaccctagctttatcaatgatcccgtcccaagcggcggcggcgcatagagatgaagcgcaagaacaaggagcagaggagggcagatggaatcaccgatagaggcagtgattcgctggagaccatgcggccgaacaagaagcagaggttgggcggtggcagcggtagcgatgaggagacctcgccctacctggtggtaggtcatgggagcgtgagccctgccttctccgtgttcaaggtggaaccctacaccgacggcggcggcgacaccccggtgagcatcccgcgccgcctcgcccgcctcaaatgcaaacacaacatgtctttcgtccctttgagattgaaggaccgccggtggatcgtcggcgtcggcggcagctcaaccgagaactactacggcccggggaccatcattttcgacaccgagaagcagttggtgatccggggaccggaacctaagtcgatcaagagccacccgatcctgctacccatcgaccagaagatctacgccctttcccgaagcccctcagtgaagggaccgctcgattacttgccctggttcgaggtcctcgatctctcccaggcacaggaagttgacggctgtctaaccaactgcagtggagctccctgcagcggccgcccttctttccctgggagctcatcccacggcagtacttatgtccaccgagggttgccgtcgagtcatacgtccccgtgggctcccacatactggtttctgtgaccggacgggtgggcacgtacgcttttgacacgaagggctcgaagaagtgggtgacggtggatgacgagaacaacctgccgttcagcgatggtgccatcccgcacgggaggtgggctcttcctcggcttatcaagcaccacaaaggccatcactggatacaagattaatatcggcactaggtcactctctgttgttgagattcctgtggtgtccgacttggaagatgaagagctggtcggtcgctcacacaatttcctttccctggggattgatagtggcttctgcttggtgacctgttggagtgttgacgaatcgccgtatcccccgtatcaccgggcgcacatcagggtgaggacgtacagaacagatgattttgtggagtcggagggaaaatgcttagtcgtctccaagcagtggatgcaggtttacaagatccgcgatttgatccggacactagatgcgccatgtctggttggtgtggtctacatatgagtactaagcctgacctgggaggttcgtatatggagatcctctgatgtctttgggagctgcaaacaggcttttctgatcgtgtattatatatttgtgctgaatatctcatatgcacacagcgcttaaccgaacttcagacttagaaaggagttttttgtcgtttatgtctaatttccttttccttgttttcaccatgctatctgtaacaattccatgtatgtctcttggcttgtgaaaacttaacttacagtttcaaaaaaaaaaaaaaaaaagcttatcgataccgtcgacctcgtaccgtttccttgtttgagtaatagactaaattctgataattgtgtaaaagaaaagggaaattaactaaaacttcattatatttcataacata

SEQ ID NO: 5160 - DNA, 2928 bp, Triticum aestivum
  Clone ID: TRIAE-23APR03-CLUSTER6146_1
ccaaccaccctcatctccacgaaatgccgaaacttaaaacccgagcgcctcccacatttcttggcggcgcccctgtacccacaccagctgtcgcccctctcgcgaaaggaggcggctcccctggccgcaccggccgaagcgccgcggccgtacgagctcgcggtcgcggcggcggagctccgccccgtggactccaacctcgccgccctctgcgactaggggtgggcctaggaagtcggctacaggcccttctgcgagttcgtcgtcgacgccatgggcgaaacctttcgcctccaccgtcgcaacggctcccgcagtgtctacttcagtaatatgtgacgtgctccatagagagaggcagcagctcggacagtggtcctgcatatcgaaagctgtaatgttggttcagtggcggtagggcctgcattggcatagactcccggggaaaaggttactgctcgggataacctcatctgtccagcgaagacagaggcattgttactgggtatcctgaggtaggccggaacccttccggccatggctatatatgagttgtggtgatgaaacttcatacagtatcagtagtttgctgaactccctcaatggggtagccatggagagcgcggcagtagtgcatgttggggtaacctttgacagactgctacactgtagctaagaaaactgcgttcaaaactttcttcacaaggttcgcatgctctccttacatctgacggtctgtgggtacctaatgacgagaaacggtttgaaatagctttctttgcactactggcaaaggtcacttttcctgaatgagaagtttgcggaaaatggaatttggaccttatggcaagctcatcaactgttgattgttccatgggaaagggaaagagtctgatgaatgaaactgatgagaagcagctaatggaatctgaactgcagaacttgaagttgcatgataacatgccgaataaaactgccaataacattattgatgttccaaatgttgtaattccgcaggatagcacaccgcactccattccacaaaatgctgaagcttccaagaggatggagaatgatatttctacaggaggaccatctgcagaaagcacctcttatcaatttaacgaaaatatgtggctttctattgagcagacaaagaattacttctcaagaacttcttcaagtaatggattagttccatgtgagtggggaagacccactgcacctctttggggtggtagggttgttggtcgacggcaggttagatgcagcaggggaagttctttgtctgctgatgaatataatactttcatgaatatatttgaaaggggttctcttctctattgcaatatgtcatttgatgcactgttaagtgttcgaaagcaacttgaagaatttgaatttccttgcaaagctgtaaacgatggtctttggctccagatgctcctgtgccacagagtgcaagcaatagttgctgatacttgcagaaactgttgccttacaagtaattcttgtgcttgtaaacaagcatatgttggtacacacagccactacaggcaggagcatgataggacaagtgcttcaggaactgcaggtagtatctaccttgcagatgcccaaggcgatgggaatggtatgtttagtcctgtgcgtgttaacgtaagaggagcagttgatggacttgctggcattgggagaggaaactcaaacgtgcctggcgctgcttgggctcctacgcgttatgtcttctctcgtgttccctatgggcttggttcaaggaatggtcagcaaccatttgcgaatgatgaatcagaacctagagttgaccacaatggagatattccaggagatggtctgactgcattggtcaatcttagccaagaaagcaatgcttctcatcatcaggcagaaagtatttttgaggcaggcatgcaaactagatattctggtgctgctactgtttctacaccaggtggttcttctctccagatgcaagagtcaaaagagcacgaacttgggtccagttgggaaagtgcagataacacagctatatccttggacatgagaacaccgcttagtcatttccctcctttccgctttggggttgaatttgaagatgtgcataggcttgcagatggtcaagtgaaacactcagctgaagtattttacgctggctcgctatggaaggtaagtgtccaggcattcaatgatgaggatcctcatgggcggcgcacccttgggctttttctccacagacgcaaagctgaattgttagaccccttgaggaaggctcacatgtatatagacccccgggaaaaggtcactgctcggtatcagctcatctgtccatcgaagagagaggtgatgatattcggaagcctgaagcaggccggcactctcctgcccaaggctccaaaagggtggggttggcgcacggccatactgttcgatgaacttgctgatcttctccagggtggagccctgagaatcgctgcagtagtccagcttgtgtaagccaaaaatcgccccatcgtgcatctggaaacaaacgatggtactatatatagtagcgtggatctatgcaaaataggagagacgatagtacgtaaataatgccttcaaggttggtagtgtaactatcaccgtaatgtaatgtattacctccgtcccaaaattcttgtcttacatttgtttagatacggaagtatctaacactaaaacgtgactagatacatccgtagaaaaatcgaagacaagaattttgtggacggagggagtatgtagatattccagcatgacttgtattccgcgaatgaggtacattcggtgccttgaagcagtgtaataagagtcctgtagcgtcatgtaattcaaagtggttcgccgcaaaagaattgtactaattcaaagtaaaaaaaaaaaaaaaaa

SEQ ID NO: 5161 - DNA, 1594 bp, Triticum aestivum
  Clone ID: TRIAE-23APR03-CLUSTER6157_1
acgccctgcctcccgcgttcacagtcacactccacgcgctgcctgccactcccctcccccggagcacctctgccactcccatggcgtcccggatcttgctcccggcgctcctcctcctcctctgctcgcattgcggcgacgcggcggcgaggaaggcgcgcggcggcgagtccagctcgcaggtcaagttcgacttctagcaccacactcacgcttcactcgctcacagtcacgccccacgcgctgcctgccactcccctcctccgcagcactcactgccgcagtcagtgccggaagccatggcgtcccggatcttgctcccggcgctgctcctcctcctcctctgcgcgcattgcggcggcgcggcggggaggagggcgcgcggcggcggcgaggccagctcgcaggtcaagttcgacttctcgcccttcctcatcgagtacaagagcggcgtggtgaagcggctcatgggcaccgaccgcgtctccgcggccgccgacccgctcaccggcgtcacgtcccgggacgtcaccatcgaccccgccgccggcgtcgacgcgcggatctacctcccgagcctccgcgccaccaccaaggtgcccgtcctggtctacttccacggcggcgccttcgtggtggagtcggccttcaaccccatctaccacgcctacctccacaccctagcggccaaggccggcgtggtggccgtgtcggtgaattaccgcctggcgccggagcacccgctcctgcccggctcctagcactgggggcggggcgttttgggggggtgtcgccctgcggggtccggcgcgcaacgggggcgtgccccgttccgcttcatctgcccgcccgagtacgcgaggggccaggcgtacccgaaaaccgctcaagctgccgacagcttcctggcagcgccacggcgcctcccgcgtgctggtcaccgtgtccgggcaggcaccggctgagcccgtggcagcgcgcctactacagctcgctccggcgccgccgctggcctggcctggcggtgccggtcgccgcccccggcctgggccgcctgctcctccgctccacggtccgcacgccccaggcgcaggccgagatggccaccctcgtcgccttcatcaaccgcgacgactagtggctcgccggcggccacaccgcccacccgacatgagtgctctgctacgctaggtaacgagtacgtacgtacgtagcgagggggaaggcctttggtttgagtcgatttcttgtgtcgccacggtgtagagtgcggtacgtaggtggattcggttcctccccagcaaccggccggacggagaggggggccgcgccgtgctctgccaccgacccatctgcagctaagcaagctggagtagcttgcaacgttaacgcagtagtagtagttggccgtttctcgcagtcgccagtagtagtaactaccgagccgtatactactatagtagtgtcactgtcactatatttacctagcgattgcagtgtccagtgtgtaactttttgtactgctgctatggtgaactggccgtgtggaaatggaatggtgtgatttagtataaaaaaaaaacccacgcgtccg

SEQ ID NO: 5162 - DNA, 1619 bp, Triticum aestivum
  unsure (1)..(1619): unsure at all n locations
  Clone ID: TRIAE-23APR03-CLUSTER6159_1
gaaatccgaagcaggcgccgcagttcgtcaatccctccgctcagagccctcactcccccaactctcgccaggtggcggcgtcggcggcggcgggcgggcgatcggcggggcaggtccacggcgtccgtgcaccgggcaggcacgcgggagctgccggagcagctgccgaccgataggccgaccgtctggtcaagctgttcttaggatgaggtcctccaagactaatgggagcgtgcagaaggcggggagagttagccatgcccagggagaagggccgagctgggttcttgtcgcaggaggagttctggtgagcacgctctcggtcagacttgggtgcaagctgaagcagatgtttgataccaagaagcaaaatagtacatccagagccaaaagaagacctggagcttgtgaactacactccaatctgtaccggtttgatgatgaaaccaattgctactgctgtgtctcagatggtggagtggaaatcaagcaagcacctgcaagttctttatcgaaacctgatgaaccctcccttcctcttgcaaagataccagggccagaatcaagcaaagagaacagtggcgtcatgtggacgtcatcgcctgaccggcttgaagatcatcgcagaccattgcagtactcaaacagttctggctctccctgtgtttcagaatcaggatctgacatttatatcaagagagaggtcatacagaagttgagacagcacctcaggagacgtgatgagatgatcatggagatgcaagcacagatagctgatcttaagaactctctcagcatcgaggagacgcagaccgccaatttgcagtcccagctggatggtgccaatcgagatctgttcgaatccgacagggagatccagcagctaaggaagatcatcgcagatcattgtgtggctgaagcactctcccgcgacaagcccttgcaagctggaaactggcaaccagatgccgccaatgggcatgctaatggctatgctgatagcagcatcgatgaccctgagctgcactgtattggtattgagaagaggaacggcgaggcagagagggtggagatgctcaagagagaggtcggcgagctgaaggaggtcatcgaagggaaggacttcctgctccagagctacaaggagcagaaggtggagctctgctcgaagatgagagagctgcaggaaaggctctcggcacaggtgcccaacatcttgtaggatctactcgtcaacctcgctaaggcgcagtttgcaagggctaatgtagctagcaaattggtgtcgtcaagggattcacaggaaaagatttcgtcgcacgtgctagggtctttgcagaatgtttacattgatttgtttctttcctctcagtttctgtcattggttgctcagtgtcagaaaaagggcttagttttttctttttcagttgctagggctaaggtagctttagattgaacttggatgagtgttgtacaggtatttcggtcttgaggcgtgatcatgtaatgtgccccctcttttagctcagcgtggtttacgccggtgtggcttcgaatatgtggatgcttacatttctgaagtttgctttgctagacannnnannnnnnnnnnnnnnnnn

SEQ ID NO: 5163 - DNA, 1312 bp, Triticum aestivum
  Clone ID: TRIAE-23APR03-CLUSTER615_1
acgactccattttaactggtcgccgcagcctccgcccgacgctgccgcttccccgcgatctctctcccgctctcttctccccaccaccacccgagtcgtcgtctccgtcgccggccgccatggctccgggcctctacaccgacatcggcaagaagaccagagatctgctctacagggactactgcacgcaccagaagttcaccctcaccacatgcacccccgagggcgtcgcaatcacagctgcaggaactaggaaaaacgagtcaatctttggcgagcttcagacccagcttaagaacaagaacttgacagttgatatcaaagcaaactcagagtcagatcttctgacaacattcacagttgacgagtttgcaactccagggctgaaatcaatcctcagtttggttgttccagaccagaggtcagggaagcttgaactccagtatctccatgaattcgccggtatcaatgcaagtgttgggctgaacccgaaccctatggttaacctttctggtgtattcggaagcaaagaactgtcagttggtgttgatgtttcatttgacacggcaactagcaatttcaccaagtacaacgctgctttaagcctcacgtatccggatcttattgcctcactccacctgaacaatcacggtgacaccttgactgcgtcttactaccacttagtaaagtcacattctagcaccgctgttggagcagagctgtcccacaacttcccaaggaacgagagcacattgatatttggatcacagcactcattggacccgcacaccagtgtgaaggcacgcttcaacaactatggcatggctagtgcccttgtccagcatgaatggcgagccaagtcactcgttaccatctccggcgaggttgacaccaaggcaattgagaagagcacaaaagttggtctgtcattggtgctaaagccttgagatgcacagctgggaccctatgttttgaaaaaaaaagttcagttctgctggattggaataacatggccccaggtcatctcttcgtgctttcattttgatcttgaattcctcctttgtccacataatctgtttcctaggcaaatgttagccttgacgtcctcgttattttgatttgatcatcagcgcctgtcaataatttctggttattaagaccatctgcgcctgtcaataatttctggtgattaagacctgttgtgaatcttgtcaaatgtgacagattggcggttacagacagcgtgttcaattcattccttgatgcccttgtccagttgatccatttgatgtgtgcaaaaaaaaaaaaaaaa

SEQ ID NO: 5164 - DNA, 1409 bp, Triticum aestivum
  unsure (1)..(1409): unsure at all n locations
  Clone ID: TRIAE-23APR03-CLUSTER6160_1
tcgacccacgcgtccgctctatatatgtcgcagtaggcgaggcatagactccgcgatcgaggccttcccgaaatcgccctattcctccactctcggcgacccgacctcccgccggccgccgcctccactctccgtcggacagcggcggcgctccccctcgcccccccaccccccaccccccaccgccactccctcgggcaaggccgcaacacggggagatccggggaggaaggatgtcggggttcggcgacgggtacgtgggcaccgcgcaggatgcggtgaagatccgttggcttgagaagcagcgcgatgcggagcgccggaagatcgaggagctcaagaacaagaacgccgacgggcagcccggcctcctccagttcggctccagcacctccgagattcttgagactgcattcaagaaggaaactgtcggcctagttacgagggagcagtatgttgagaagagggttaacatacgaactaagattgaggaggaagagaaagagaagcttcaaaaattgcaacaagaagaagaagaactgcaaatgcagaaaaggaaaaagaggagagtgaggggagatccacgcttgtcattctatgatgacattgggaacggaagtgacgaggatgagtttgagaaccaagaaactcagaagaaacaacttggaaaggatcccacagttgagacaagttttctacctgacagagatagagatgcagaggaacaagcagagcgagaacgcttgaagatgcagtggtcgcgtgagcaagaattgatcaaaaatgaacctctttcaatcacttacagttactgggatggtactggtcacaggagagctatccaggtgcgtaaaggtgactctattggagaattcttgagggctgttcaacagcagcttgctccggagttccgtgaagtacggacaacatcagttgagaacctactctatgtgaaggaagatctcattatccctcatcaacacagcttctacgagttaatcattaataaagcaaggggcaagagtggaccgcttttccactttgatgttcacgaggatgtgcgtaccattgctgatgcaacaaaagagaaggatgagtctcatgcggggatagcgtggtcgcggccgaggtacgagaagaacaaacacatattcccggcctcgagatgggagatctatgacccgactaagaagtgggagcgctacacgatccatggagattagtgtttgtagaatgatgcagcatagtttgagaactgaagtgtttctactttggatttatgtagcaactagcacggcgattttcctaatgcgatatccaaagatcatcagtgttgttgtctgcaacgatttcccttactgaactgtagtaaactgtacctgcccgggcggccgctcgaaatcnannnn

SEQ ID NO: 5165 - DNA, 1132 bp, Triticum aestivum
  Clone ID: TRIAE-23APR03-CLUSTER616_22
gagacagtataaatttttcagaaaatgtatgctcatgccattacatgaaaggaaaaaatatataaacataacagaaaaaagctacacagaaaacttgaaattacaggcatttccagacaatacatcggtcaaatataagaaaaacaaaagaaactaaaaactacaaacaccctatgttaattctgtagccacagacatgataaaaaaggaaaaactctgcagccaccgccgcccggctcagcgctcgccggacgaccaccgggggtcattctcgtgcatttctggacgcagatctagccatccccgccggcatcatcgaagatagaaccttatccaccaagtcgcatcaaccggcactcacactacactcatccactcacaagctaatctagcggcgtagctcacttcagtccagtcggcatggcggctccgaggggcgcggcactggtgctggcgatggtgctcgcggcgatgctggtggcgccgccggcgacggtgcacgccatatcctgctccacggtgtacaagcacgctgatgccgtgcctgcagtacgtgcaagcagggcggggtcgcccgggcccggggctgctgcaccgggcatccaaaaacctgcttggcccgaggccaacaaacaagccccgaaccgccgcaacatctggcgggtggcttgaaaaaagttcgccaacggcgcctccggcggggccctacatcaacccgcgccgccggcgctcccctccaagtgcaacgtcgccctcccctacaagatcagccccagcgtcgactgcaactcgatccactgaacgaactgaagcgccctggcccgtgtgtctgtcgacgtacgtctgccgtgtgaggagtcccatgtctggagaataaattgctgctactagtactgaagcttagctaggccttggcggccagatccgtgtcgttctacctagtcgttgtgtgtggtttagggtcgatcgagttaattatccgcatgcagttcatggtgttgtggcctgggtgccggtaggttccacgagcagagcagagtggtgaactgatattgtgtgcgtcgtactacgttcgtgtctatgtaatgtgcgtgctttatctataaattatcctcgttaaataaaaaaaaaa

SEQ ID NO: 5166 - DNA, 1302 bp, Triticum aestivum
  unsure (1)..(1302): unsure at all n locations
  Clone ID: TRIAE-23APR03-CLUSTER61_20
tcatcacccaccaccgcgcctcagctcacgcatctctccctcagctccggcaagcaacaccagctctcctctcccctcgctcacctgctacaatgtcgaccgacgtggccgccgatgtcccggcccctgaggtggaggtggccgccgaccacgtcgtggagaccacggccgaggccgccgccggcaacgcgaagccggtcaaggagaccaaggccaaggcggcgaaggccaagaagccctccgccccgaggaagccccgcgccacccccgcccacccgacctacgccgagatggtgtcggaggccattaccgccctgaaggagcggacggggtcgagccagtacgccatcgccaagttcgtcgaggacaagcacaaggcgcacctccccggcaacttccgcaagattctgtcggtgcagctcaagaagctggtcgcctccggcaagctgaccaaggtcaaggcctcgtacaagctgtcggccgccgcggccaagcccaagccggcggcgaagaagaagcccgcggcgaagaagaaggcgccagccaagaagaccgccaccaagaccaaggccaaggcgcccgccaagaaggccgccgcgaagcccaaggccaaggcgcccgccaagcccaaggccgccgcgaagcccaagcccaaggccgccgcgaagcccaaggccaaggccgccgcgaagcccaaggctgccgccaagcccaagggccgccccgccaaggctgccaagacctcggccaaggacgcgccagggaagaaggcccctgccgccgcggcgcccaagaaggccgccgccaggaagccgcccaccaagagatccacgccggtgaagaaggccgcgcccgccaagaaggctgcgccggcgaagaaggccccggccgccaagaaggccaagaagtagatccttggagggagatcctagggcttggcgatagttttccagtagcagtttttcctgttctgtgctgttagtcgagatgtccgggctgtgtcgggggtgctaggctgtaaatttgaaatctgggttggggtgcactggtgatcctgtgcacccctttgtgtgtgttgtgagaaacggtggcgacgatcgcgttgtagcaagcttatgtatttgtgtaactgaattgggtaattgaatcttcattttagcaacatccttctgaaaaaaaaaaaaaaaaaaaacanaanaataaaaaaaaaaaaaanaaaaaaaaaaaaaaaaaaaaaaaaaaaaaaaaaaaaaaaanaaaaaaatnaaaaaacaaattnnccgaancctnggcngganaaac

SEQ ID NO: 5167 - DNA, 1798 bp, Triticum aestivum
  unsure (1)..(1798): unsure at all n locations
  Clone ID: TRIAE-23APR03-CLUSTER6200_1
aaaaccctcacatttcagtccatctcccatcgcatcctcacttaaaccccacgccgcacccctcgccgccggccgccgccacgccctcaccatggctcacctccgcctcctcctttcccactcccgctgccacccgcatccccatcgcctcctcccgctcttccgcttctccacctccaactccggcgaccccccaccgccgaccatcaagcccgtctcctacgccccgaagccgcaggccccacccgaggaggcctcctcgccggatgcccggagcgctagccccgggtggcaggactcgcctcccaggagatttgagcagcagccgccgaatccgccgcggcagtttacgcggcaagaggtgcggttcgtcaaggacgcggggcccgcgatcgcgccggtgtcgtacccgagcagggttgcgccgctcccggaagaccgtccagcggaagatggggctggggaaggggtgaatgagcaggatctgcgcggcgaggcggagcggattgagatgaatgctgagcgggcgaggaggtccatcttcggcgtgccggtggagggggagactcggccctgtcacacgcattatctggtttgttttggtggcccactcatgtcatcctactcattcgctccgcagtctgtcgtgtggaatcgcgatgtagtattgagttcattaccagaggagaatatggtagtttctcttatggggggtgtttatccacgtcgtggtgaccagctggtccctggcggcttaatgtcgccgcagggctctcccgtttctgctgggcttacgttagtatagttagcgtatttattgcagctggtgtgatgcagttctaggtcgtcatctcatccagcttgtgcacctgggaaaataaaatggtttgtgttgtcactaagtttcgacaagtgcatagcaaccccaatgttcatgcctcggctttcaaaggtcgctagaatattgggtccgcgtggtttgatgccaaatcctaagttagggtctgtgacaaatgatgtttctggtgctgtcaaagcggcaaaatcaggtcgtgttgattttaagatagataaaactgctatagtgcatgttggccttggaaagatcaatttttctgaggagagtttacgtgaaaatattggtgctttcgtaaatgcacttttacttgctaagccggtgggcctaaagaaaacttcgaaatatgttggatacgtgaagaagttcacgctgagtagcacaatgggacctggatttcctgttactataccgtcgctatcggcagctgctgatgactatagcaaggcgcatgtgagctaagtatgaaacaaatctgaacgaaccattttattttcggggtacttgcaaccggttccttgcaagtggctggcctatcgcagcggagcatggcgtgtgataaccaggctgagcagttggatgggttgctgttctgacacgcccggatgatacttttgtggtcaaaaactttgagcaaaccgtatctcgttaaattccgcacggtcacacaattatatggtttgttttgctggcccactcatgtcatactccttggtgctcaccagtttgttatgtgcaatcacaatgtaaccttgagttcattactagagaacttttttttttttgtcttgggcataactagagaagattgtagtagttggcatctgagtgatcagtgaccactaggaagtaaccagtttttgctgggcttatgttagtatagtttagcatgtanattgcagcgggtgtgatgcagttcgaggtcgtcatcccatccagctt

SEQ ID NO: 5168 - DNA, 2427 bp, Triticum aestivum
  Clone ID: TRIAE-23APR03-CLUSTER6217_1
gacaacagccacactcgtttcattcttgctggatcgaccgcgcgccggccggccatggggagcgacgacagcggccgtggcagcatcgccttcttcgggacctaccgcccgccggtgccactggacatctactcctgcccggccgacccgccgccgtcctcacggaaggacgagctgcacctcaccgacggcgtctcctacaaccagaacggccgggccatcccggcgccggcgctcaaggagctgctcacgttcctgggcaagaaaaaccccgcgctcgccgcccgagtgcggcgcccacgccggacgacgccgagaagggccgcgtcgccggcctcgtcttcgtctccgagagggacaaggggctcgagacgctgcacgtgacccttgtgcgtcccaaaggcgaaggtggtgcggtaaaggtgctgagcctgggcgacgtctacggcgccgacaccttcggcggctcgcggatggaggacagcggctgcatcgccgagcgtgcttcaagggtggcgcgctcgcaccggtcggccactcgctcgtgtacggcctccaccaaggagccggtggacgaggcgccgcacgccgtggaccgtggtgtaccggaccaacctcgccgacggcaagacggagcgcctcaccgccaccaggccagtacgacgtgagccccgccgtgtcgccgtcgggcaagatggtggcggtggccaacttccgcgggaacaagtggaccggcgagatcgagcgcctcaacaccgacatcgccgtcatgaacgtggacaagacggcgcagggcggcctgcgccgcaggatcctcatccgggacggcggctggccgacgtggggcagcgacaacgtcatcttcttccaccgtgggaccggggagtccccgacgaactgggccgtgttccgctacgacatcgccaccaaggagaccgtgcgggtgacgcccgaggccatcgacgccatgactcccgcggccatcagcgagaccagggtggccgtggccgccatccgccagaagtctaggcaggccgccatgaccacgccgcgagaggaggcgcagtaccgccacatcgagatcttcgacgtcgcgtcgccggaccggccggccgtgcagatcagccagaaaatcaggcccaagggcgaccactacaaccctttcgtggccgacggcggcagccgcatcggctaccatcgggtcagaaccgacgatctcgtcattggggtatgtctttgcttctcgtgctaattctcagctcagttgcacgacatggatgactcatcaagattacttaccaacggacatcgcatgacatggatgtagaataatctttctgcgcctaccaagagcttcgacacgaaacaaaaaaaaacaacgagcagtggaacatgctcgccgtcaagggcagcaccccattcaggccggcgtgcccttacatgtaccctgacggaggagagggctggcacatggccggccacctcaccatcccaaagagatgctgctagctttcctcgactttttccattttataattccgcttagttgcgcagtacaacgccttcccgtcgagcaacgcgcagggggacaagttcgtgttccggtccacgagggacggcggcaaggagaagttccacaagaacctctacatcatggaggacgcggagtagggggagttcggccagggcacggtgacgcggctcaccaacgggccgtggaccgacacccactgcagctggtcgcccaagggggactgggtcgtcttctcctctacccgcgagatgccagccagcgcgccggagatggccttccttgacgcgggctacttcgccgtgtacctggtgaaggtcagcgaccccacggtggtggtgcgggtggtgcaaagctcggcgaccctcgcgggacacgtgaaccaccccattttcagcccggacatgaggagcattgttttcgcctccgacctcgccgctgtctccaatgagcccatctcgatgcctgtcttcctgcactccgttaggccctacggcgatatcctctccgtcgacctccgcgacactgatgacatcaccaagaacaaggacatccaggagttccaccgcatcacgcacagccgctacgagtactccactccgacatggaccaagttcgccaccgacgaccccaacgagcagtggaacatgctcgccgccaagggcagcattcaagccggcgtgcccctacatgtaccctgacggaggagaggggtggcacatggccggccacctcaccatcccaaagagatgctgctagctttcctcaaattttttctatttcataagtacgcttaattgcgcacttgaataaagtttgatttctattttatgttctcgatatgcagtctgcttgttaagatcaaaaaaaaaaaaaaaagatggatggcaaagctg

SEQ ID NO: 5169 - DNA, 1989 bp, Triticum aestivum
  Clone ID: TRIAE-23APR03-CLUSTER633_1
aattcgcatttgtttctcacactcatacatagcaccatgggccgggtgaaaagattttaccaggatttcatccatatcaagctgcatagcttctgccgtatcagtggatatgttgtcgattcaatagcttttgtctatagatttgttgcattgcatgttcaccccttctggatccaactgtcctacttccttgccattgctatacttggttcagtcctcttgatgtcgctgaaaccaagcaaccctgacttcagccctccttacattgacatgttattcttgtcaacttctgctctaacagtttctggcctcagcaccatcacgatggaggatctctcaagctctcaaattgtggttttgacattgctcatgcttataggaggggagatctttgtttcactcttagggctcatgcttagagtgaaccatcaagacatgcaagatcttccaagcgtgaagatcagctcggttcctgtcgagcttgaagagctagacttgcccaacagcatggcactatgtgatgagtcgcagcttgaagaagcagctcatgcaattccacccaagaaatgtacagagttgaagaggagtaggtctgtcaagtgcttaggatatgtggtctttgggtactttgccatgatccatgtcttgggctttctgctggtttttctgtatataactcatgtgccaactgcaagtgccccactgaacaagaaagggatcaacatcgtgctcttctcactatcagtcaccgttgcctcctgtgcgaatgcaggactcgtgcccacaaatgagaacatggtcatcttctcaaagaattcaggcctcttgttgctgctgagtggccagatgctcgcaggcaatacattgttccctctcttcctgaggctactggtgtggttcctggggaggatcacaaaggtgaaggagctgaggctcatgatcaataaccccgaggaagtgcgttttgctaatttgcttgctaggttgccaactgtgtttctctcctcaacggtcgttggccttgtagcagctggggtcacgatgttctgcgctgttgattggaattcttcagtctttgatgggctcagctcttatcagaagactgtcaatgcattcttcatggtggtgaatgcgaggcactcaggggagaattccatcgactgctcgctcatgtcccctgccattatagtactattcatcgtcatgatgtatttgccatcatcagcaacatttgcaccacccagtggagatactaaaaccaccaatgagaacacgaaagggaaagtcaagagagggtcgttggtgcagaatttggcattctcaccgctcgggtgtaacatcatctttgtgatggttgcctgcatcacggaaaggagaaggctcagaaacgatccactcaacttctccaccttgaacatgatatttgaggtcatcagcgcatatggcaatgcagggttatccactggttacagttgttctagactgcatcagctgcacccagagatcatctgccaggacaaaccatacagcttttctggatggtggagtgacggaggaaagtttgtgctaatattggtcatgctctatggaaggcttaaggctttcacactggccacgggtaaatcctggaaagtatgatacaagtggccaagattacttggaaaggcagatgtaccaaattggtataactgtcgctagtgtactgcctgaagaatcaggcttctaattggattatagtttgtggatgttgcgcttgcaaaggacaagcttctgtttccctgctaaagtcatctttgtatttgtcagtcatcatcaggtatcaatgcaactgaagaattgagccatctgttgatgtgttgcatgctagatgtaaccacatgagttccccacaattgtagcgaaagagaaagcaaatattatttgtattgttggagtggagttaatattattgcacacaatttataatacagataaattttgtgttgctta

SEQ ID NO: 5170 - DNA, 1946 bp, Triticum aestivum
  Clone ID: TRIAE-23APR03-CLUSTER636_107
cttttatccgtctccggcgccgcagggcggtctaggtctccggcgccgccaccagagccggcgcctccgtccccacccaccctcactccctccacctctctccaccgcccccgagctgggcctgctccgcccccgccggagctccatcttcgccgccccaagcccgaggcggaggccctttctgccgccctccctccccacgcgatccactcagcggcggcggcggcggcgacccgacctacgcgggtaagcgatccagcaattccgtagcgccgacgcgatagagccgccgcgatgggctctctggagcctttcaaccggctggtgaggctgacggcgcgggccttctacgacgacatctccatcaagggcgacacccaggccaagacctcccgcggcgacaaccggggcatggccgtcgtcgtcctcgacggcctcaccagacgccagtgggtccgcgaggaagacttggctaaatcattaaagctccactcaaaacaacttcgccgtgtcctccgattctttgaagaagagaagctagtgacaagggatcacagaaaggagtcagcaaaaggtgcaaaaatatatagtgctgcagcagcagctgcaggtgatggtcaacccacgaaggagggagaagaaaaagtaaagctgcacacacattcctactgttgcttggactatgcacagatctgtgatgttgtacggtaccggatacaccgcatgaaaaaaaaaaacgttgaaggatgaattggacagcagaaatacagttcaacactatatatgtcctaactgtaaaaagaggtactcggccttcgatgcgttgcaacttataagctacacggacgagtatttccattgtgaaaattgcaacggcgaactacttgcagagagtgacaagctttcttctgaggaaatgggagatggtgatgataatgcacggaagcgtcggcgtgagaaactgaatgatatgcagcaaagaattgatgagcaattgaagccattgcaagcacaacttaagagggtgaaggatctgcctgctcctgagtttgggagtctacaatcatgggaaagactaaatctcggtgctttcgcgcatggtgattctgctgcagctgaggcagctaggaatgcacaagggcagtacaatggtacaccgatgccttatcttggagatacaaaggttgatgttgagttggctggttcgggtgtaaaagcagaaggtgatgaatctggcagagatggttcagcattgaaagtcttacctccatggatggtcagagaagggatgaatcttacaaaagaacaaagaggagagtccagtaacacatcaaaaggagatgaaaaatcagaagtcaaagatgagaaaaaacaggactcaaaagaagatgagaagagtttacaggatgaataccttaaggcatattatgaggccctcaagaaaagacaggaggaggaagatgcaaagagaatgcagcaggaaggccaggcattttcttctgaaattcattctgagcggcaggtgggcatgaaagccaaacgtgaggatgagaatggtgaggatgagggtgttgaatgggaagaggagcaacctgcagggaatacatcggaggagccatataagtttgtggacttgaatgctgaggccccagaatccggcgacgacgaggaagatgagattgactgggaagaaggttaaagtacagcgacaagttgccccgtcttgaattttcatgaagtcagttcaaagtgggatgttaaatgataataataatgttgccagatgtatgcatcatatcaaggcttggctgcaaataacatttttctcccagatttgtgaaaagttactataatgtgaagtatgatagtattgatgaagtatgatattgacatccatgtgacgtcaaggaattcaaaagaatttgaaagaacttgttcccttttaa

SEQ ID NO: 5171 - DNA, 2676 bp, Triticum aestivum
  Clone ID: TRIAE-23APR03-CLUSTER636_111
gcaggagaagagagacacgagctctccctccggaggccacgagcctccccctctgttcgtcgtcccctctccaacgcccgcgcgcccgccaacaccattccccgctccgattcctccgaatttccggctccccatggcttccccagatatctcctttgatattcgcccagagtttaactcatttgatcatctaagaagcacgggatatatttcaacagatagaccatggttgaaactatatggaataagagttccacccgtgtcaccgttcaacagtttgagcagtacgcccgatctggcactcattcaccagtgcttacctgatgaactgcttatcgagatatttgggagaatgagcccatatactttagggagggctgcttgtgtctgccgcaagtggaaatatactacacgcaatcctactttttggcggaacgcttgcctgaaaacctggcagaggaatggaatagaggcaaacttcaggatggtgcagtcgttatatgattcttcctggagaaaaatgtgggtgcagagaccaagaatccgaattgatggtctttatgttagtagaaacacatatattcatactggaattacagaatggcagttcaagaaaactgtcaatgtggtttgctactaccgttacttgagattttttccaaccgggaagttcctgtacaagatttccccacagaaagttaaagatgttgtcaagtgcatgcatctccgagcatcaaaaggcgatagtgtgtttaaaggcgactatacactgtcaggggatggccagatagaaatggcactcctatatcctggacatcggtacacacttgttaggatgcgccttagggttagaggcactacaattggtgcaaataacaggttggatgtcttaaagatcctaaccaccggggtgaatggaaccgaactgggaaactggaaaggcaacatacttgaacttgttgaggactgggaggagaacgagacgcacgacccagacgtgcctgctgtttcccacagcaggggtttgactccctttgtgtttgttccatttgaggagtctgatacttcaagtgctaaacctgccaatgggagaaagatggattactttgtccctgggtgagcagcaccgcctaaagacgaccgcggtgatgggcaatggagatggtcgataatctcatcacaggctgatattatgctgcggatggagacgactggcttatttcgttccataccgagttaatgttggaacgatatgtacatacacagtacttgtcttgtttcctttcgggttgaaggcatgttgtattgtaatgtactccctccgttcctaaatatttgtctttctagagttttcaacaagtgactacatacggagcaaaataagtgaatatacactctaaaatatgtctatatacatccgtatgtggtagtctatttgaatctctaaaaagacaaatatttcggaacggagggagtacatacaataaatcatccatcaaatggtacatacacaatctactttttttgtggaacatacacaatctaccagacaactgtgtgccggctaccaaggcctaccataagctccaggtatcgcataaagatgagagagagagaaaatgaaactacgaaggaacataaagatccccttttaagattcaggacgtggttcagcagctagagatggtcagtagacggtagcagcagcacggtttgtccctgtattacaacaggatgccacgacgagtatttcagttatacccatcaaatctgaatggtgtgcgcagcggagggttgacagctgggcgccaagaagcaagcagccacagtcctttggattatggaactcacattcgctgattaggttccacccttggatctatgtgccgaagacaaagccatgaaagaacctaaacaagcttcttccatattcaggaatctcaccgccatgcagaagatacaaccagctttctgttcttccatccaagataaatgacaccatctttctcctctagcttgtagtaactgttgtaatcatttaacagtgttctgatagtattgttcaccaatgcacttagggggtatggtctaaagccagccattgcaagtctagaccgccactttccaaaaggttcgtgcctctccactctttctgcaccttcacatgcaattaaattgacaatatctcttgcaacacagtgctgctcagtgctcatcctcaccttgtcatccctagggcaagcaacatctattgcctcgaacatggctgtgtagtagtcaagggtctccatgtatctactgaagaatggggcagtgtttgtgttagcctcctgctctacaagagttaccaccctaggagacaggctcttaaccattctcaatatcctatcccggtggttttctatgcagacactctcatcaggagtatgatgcagctgatacgcaaagttgacagcaatagcctctcccattcttatatcgagatgttcaagtgtaacctcgtgactagctgcatttacggcattgaactcaaagggcagacaacatgactgggcaatgttgcataacctacgcccaactatatccagtccaccacctcgggcataagccgaatctgaatcatctataccagtaattcttaggtatggtggtccgctagccctcgcagcaagggcc

SEQ ID NO: 5172 - DNA, 1280 bp, Triticum aestivum
  Clone ID: TRIAE-23APR03-CLUSTER636_112
aaatcctttcccccctcccgttccaactttattgtgtttaaacaaatcgaaaaaaaaatcccacaagagcaaagccaagcaaagcaaactttgtccccccagctcctctcttgccttctccgatcgatcaacagcaaccaagactagctagccgcgcgcagggatggctcgccaaggcatggtcacggcgctgctgctggtggtcctcgccgccggctgctgcgcgtcggcgggcgccgtggcgtacctctccaagctgccggtgaccctcgacgtcaccgcctcccccagtcctggccaagttcttcacgccggcgaggacgtgatcacggtgacgtgggccctgaacgcgagccagccggccggcaaggacgccgactacaagaacgtgaaggtgagcctctgctacgcgccggtgagccagaaggagcgcgagtggcggcaagacccacgacgacctcaagaaggacaagacctgccagttcaaggtcacccaggcagggtttaccccggcaccggcaaggtcgagtaccgcgtcgccctcgacatccccaccgccacctactacgtgcgcggcatacgcgctcgacgcctccggcacgcaggtcgcctacggccagaccgcgcccgcctccgccttcaatgtcgtcagcatcaccggcgtcaccacctccatcaaggttgccgccggcgtcttctccgccttctccgtcgcatccctcgccttcttcttcttcattgagaaacgcaagaagaacaactagatgtggagatcgaaaccgtggcaaagtttgttggctttctctggccggtcgttttctctctacatgtaacagtatcagtacggaccagcacgtacgtacgtacggtgcaaactgtacggataaatgttcgggtgcatacctcctttttgttgtgagcatgtaatgactatgaatgaaataatttgatttcagacagtagtacatacgcaaagtattctattcctagtacatatgaagcaacttggttgtttgaagttgagcaaaaaaaaaaaaaaaaagttattgatccggcaacctccagggggggcccgacaccattccccctatagggagcaaattacccgcggcccgggccggctttttaaacgcgggggggaaaaaccgggggttcccattttaaccgtttgaaaattcccctttcccctgggggaaattaggaaaggccccccaaatccccttccaaaatgggcccccttgaggggaaggagaatgaagcgtaattttttaaaattcggg

SEQ ID NO: 5173 - DNA, 923 bp, Triticum aestivum
  Clone ID: TRIAE-23APR03-CLUSTER636_76
agcaccgagctcgagctaagatcaaacacaaggcatcgagccgtcttgccttttagcatcatcttagcgtgtgtgctgctaatcctcttttcaagcatgggtggaggccacgacatgcacggcagccccaacggcggcgtgaagggcttcgtgtccagcctcgtcggcggcggcaaaggccacggctacgggtcatcatacggccaggggcacggctacggcggcggccatgtacagggctaccagcagggatacggcgggcatggacagagctacgagcacggttacggcggacatgcgcagcacggacacggcggctacgagcatgggtatggcggcgggcatgtgcagcaggsacacgggcacgggtacggcggacacgggcagcagcacggatacggcggcsgccacgcgcagctcgggtaccctcccgctgccggcgcctaccctccgcacggggggctaccaggcgcacggctacgcgccggcggcctacccttctcacggggcgcaccagggtcacatgggatcgtaccacaccgggcatggcggcgggcaccaccacggcggcaagtaccacggcggcaagtacaacggcggcaagcacggcagtaagtggatcaggtgaagtggcgcgcgtggcagcgcgtacgtgcgtacgtgcgcgcctccatggcatgccttagttgatcattaaccatgctctccgtatactacctaaataagggcgacgcatggtgtgtgacactatgtagctttcctttcagctggtaatgatgtgtgtggtgacctaataagtctgtgtgtggcttagtacgaaaaatttgtgtttgctgtactgatgaaatacaaggaatatgtaccaccgtgctcggccctgtgtgtactgatgcatcaaaaaaaaaaaaaaaaaactcgtgccg

SEQ ID NO: 5174 - DNA, 1046 bp, Triticum aestivum
  Clone ID: TRIAE-23APR03-CLUSTER636_77
gaggctcactctcagggtcgggcttctcttcactgcaactttttcttggcaagccttcctcctcgcaggctcgcccacaccacaccatccaccggctccgcctccgccttcacccgccattccggaaaggcgcggctgctggtctctctagggttcgtcggcccggcgcgggggtgcggcgggggacccgtgcttctgcttccgcaccgagagtatggctggaaggcacaccattgttctcgtgcaaccatctccaaacaaagcgtccagaacttttatggacttcagttcactcaaccaagcactggatggtatctgtgcccgttatgaaaagaaaatcatggatatcaacccgatggccaggaacttcacttatgacatcaccgacctctacaatttcatcgatggcctagcggacatcagcgcgctagtgtatgatcatcaactccaagcttttttgccgtatgacaggcagtggataaaacagaagatgttccagcacctcaagaaccaggcacggcagtagccagccgctggttctgattaacaaaagcaagtgtacaaggtggtatgtctgttgtctgtagtttcagatggtgtgagagacctagggttcatgtgctaattgtaagagaagatgatcgatttgcttggctatctgccatttytgatgcgacaccgacacaccgtagtactccctccgttcctaaatacttgtctttctaggcatttcaacaagtgactacatacggagtaaaatgagtgaatctaaactctaaaatatgtctacatacatccgtatgtgatattcatttgaaatgtctagaaagacaagtatttaggaacggagggagtaacacataacatggcttttatttctctagatagaatacctagcggcgctagatcatactcgcttgatgtgatagcattcttcagtacagtcgaatctatttctagaatcacctgattacaccccattgatgaggtgatttgcaccgcttggagaagagctcgagcttcagcttgaagagcatggtcgaccc

SEQ ID NO: 5175 - DNA, 1207 bp, Triticum aestivum
  Clone ID: TRIAE-23APR03-CLUSTER636_89
cgataagcttttttttttttttttttggacagactctgaatcttatttaaaataagccaagctaataagtctgttactacagtagtatgtactccctccgttttaaaatatttgtctttctagagatttcaacaagtgactacatacggagcaaaataagtgaatctacactctaaaatatgtctacatacattcatatgttgttttcatttgaaatgcctagaaagacaaatatttgggaacggagggagtatatgttatgaaacatgcaaagcagggcttacaaatctgtgacagcggcacagcgccccatggacgatctcacgactgccaagctaatacaccagcacgcggctgctaatcccgctgttattgcaaccgactgccgttgtggaggagcaggagctggtgtgggcgccggtggcccgaatgcacacgagccggaggggggcgagccgtgtggtgctggtggtggtggcggacgtacgccggtgttggcctggacgacggggtggacggcgagagaggcggcgttttggaccttgggaacaggaacgcccttatcttgagcggctggagccggtccctgctagcggcgtcgtactcctccagcaggtggccgaggtcgtcgttggtcgtgacggagacgagcgcgtccaggtcctccgtcggcagctggcaccgcaggctcaacgcctcccatccgcacatgtccgtcagcttccgttgcagctctgaagcgatcgatcgatccacagtcaaacagctgaactggctggagtgccggaaacgatcaatggacagcaggaggcgtcgttggtaataggcatgtaccgtgaaattgaagggagcggtcgacggagaggacgcggttgttgccgccgacgtagcggagcgcgccgtcggggtggcgtggaaggatcatgcccccgtagctgcacaggaacttgacgctgccctctgcagctgccccgggggaacccggcttcacgacgcagaacacatcgtcgtcatccaaggagccgagcgacgacgtgcacgagcaggacgacgaccacgaggacgcgcccgccatgccttcttgccggcggtggacgacactgaagctgcaagtcgatatcagtgtttgagaacgcaagaagctgtgtgtgtttctatgtgtttggagcggtgctccagcccataacggccgcctcgagcgccgcac

SEQ ID NO: 5176 - DNA, 2001 bp, Triticum aestivum
  Clone ID: TRIAE-23APR03-CLUSTER636_99
atatacggtgccagcgcttgtcgggctgtggggctttggctctgacacatcggagcggcgggagcgcgagcgcgagcgcgatggcggcggtggccggagccgggagggcgaggggggcgagcctggcggcggccgtgcgggctgtcgcggcgacggcgcgaccggcgtcgaacgccgccgcggcggccggggtgagcgtggcggcggtgatcctcaaggggaatgacacgccattcgggtcggtcgggtggtgggcgtacgccggcatctcctgcttcctggtgctcttcgccgggatcatgtcggggctcaccctcgggctcatgtcgctcggcctcgtcgagctcgagatcctccagcgcagcggcaccgactccgagaaggcgcaggctgctactatccttccagttgttcaaaagcagcaccaacttcttgtcaccctgctactgtgtaatgctgttgccatggaggctcttcctatattccttgacaggatttttcatcctgttgtcgctgttgtcttgtcagtgacatttgttcttgcttttggggaggttataccacaagcaatctgtactaggtatgggttggcagtgggtgctaactttgtatggcttgtacgtatcctcatgatcatgtgctatcctattgcataccctattgggaagctcctagactgcgctcttgggcataatgaatctgcactctttaggcgagctcaactgaaagctcttgtttctatacacagcaaagaggctggtaagggtggggagcttacccatgatgagactacaatcataagtggagctttggacttgactgaaaagactgctcaagaagctatgacacctatcgaatcaactttctcactagacgtggactccaaattggattgggaagcaattggtaaaattcttgcccggggccacagccgtgtgcctgtgtactcaggaaaccctagaaatgttattggcctcctgttggtgaaaagtcttctgacagttcgtgctgaaacagagacaccagttagtgcggtttctattcgaaggattccgagggttccggcggacatgcctctgtatgacatattgaacgagtttcagaaagggagtagccatatggctgctgttgtgaaggctagaccaaagaatcctccagccgacacaactgaaccaaacatggaagcagctggggcaacacagctgactgcacccttactatccaatgctgaagaaagggcggaaagtgtggttgtcgacattgaagcaccgcatagcaggcagactaatggaaacaaacaccactctgtgcagcaaaacgataagccatcgaatggagtgggtcgttcatcagaggacatagaggaaggcgaggtcattggtatcatcacacttgaagatgtatttgaagaactcttgcaggaagagatagtggatgaaaccgacgaatatgttgatgttcataaaaggatccgggtagctgctgctgctgccgcgtcatcagttgcaagggctccatcagttagaagattaactgctcaaaaggcttccggaacgcaragccggcaagggcaggctggacagcctgctggaattttgaagaagcctgctactgaaggtgattcaaacccatcaaaacaggtgaaccttgtcgaacctytgctggaaaataggaggtaattgtagatgtatcacataaatagagcgacgggacgcatgaaagcatgttgtgatgttgctatatccagtgagagtaaataccagtttgctcgctgtaaatttcaacagtagcaatttgaaccttgtcatgaatgtcactatgtcagcgttgagtttcatcactgggacggtagcaactactgacatttgggaatcgtagacttggaactagtgcaaatgataaattagatgtgtcccgcagactttgtgaatgtcgagcacgtggaatattataaggtggaatgcctacacggtgtgcctgacttcaaaaaaaaaaaaaaaa

SEQ ID NO: 5177 - DNA, 1432 bp, Triticum aestivum
  unsure (1)..(1432): unsure at all n locations
  Clone ID: TRIAE-23APR03-CLUSTER6378_1
ataccgcaggcggagcggctggggtgggctgcacgctgatccctcgcgagccggtagcacagagacagaaggtgcgaggccactctcaaccaatccactctcccccgctagccggcgacccagccggcccacctgcagctccccccgccccaggtccacaccgccggccccaggcccccccttccgggccgacctccactccggccgtcgccacctccacggctccagcctatcgccgcgaaatcgaccggttcttcgatcctagcagatgattaccgtggtatccaccggcacaagagtataatgtgagcccctcagtcgctcacctgcagcaaaaggaagcaggtcaaaacagcatgggctcgaatgatggaccaaacagcataactagcttgcctgcgaggcgacgcctgcggtggaccgaggaggtgcaggaacaacttgtcgaggctgctgctcgacacggcggtgctgacaaagcaccaccgaaatcacttgcaggacttgatggttcctctggaatgcagatatctgaagccctgaagctgcagatggaggtccaaaagcggttgcatgaacagctcgaagtacaaaggcagctgcagctgcgaatcgaggcacagggaaagtaccttaagaaaatcatagaagagcgtccggcttgaagtacaaagtcagctgcagctgcgaatcgaggcacagggaaagtaccttaagaaaatcatagaagagcagcagcgtttcggtggcggtggtataaagtctgaaacacctggtgcaggagctactgtcacagcgtcgagcgatcagttccccgactctgagaggacagacccctcgactcctgcacccacatctgaatctgcatctcaaggtgcagctttcaaaagagacagtggaagccagactgaagcaatcaagagcccatgtcacgatgaaccgctgctaacagcagattccaactgtcatcccggttctcctactctcagtccgaagcacgagagggcagcaaagaggcagcgaggcagcgaggctgaattcccggaggccgagttatcccttccgcagcatatcttcgagtcgagctcggggccggagttccagcaatgtgcggtgccctactactcgggtcattagcctcccggcagctacattttggcagcatcttagaatggtgtcatctaaggggatatgttgtatgttgacaaaagttgttaggtgttttcaggtggttgtttacatgatgcatacttacacatgacatctatatcttgcatttgtagcgccttgacttgtaaccttattggcagatgagttgaccagtttgggtggggtgggcactgttagcctgtttttacatgctatgttttctaattaaagttcttgagtcttaacaccaagtttatcttgctatgcaatttgttaaaanaaa

SEQ ID NO: 5178 - DNA, 2643 bp, Triticum aestivum
  Clone ID: TRIAE-23APR03-CLUSTER6388_1
aaagcacaagctgcccgtgcaaaatctgcgtgaagacgcggtcggcgccggcaaccacgccatatacacaacgcctctcgccgacctcccccacccccagatgccggccacggcgagcggcggcgcgcgggcggaggaggcagcatcggcgctttcgctgtcttcctccgcacctttctgcatggggacgcggccggaggagctcgcggccaggctggtggccgggggccccggcggcgtcggcgggccaggaggaggacgcggagagggaggggagggggagcacgagcgggtgctcgcgctgcgcgagatcaagaaccagatcattgggaaccggaccaagaagctcctctacctccgcctgggcgccgtgccggcggtcgtcgcggcgctggccgagcccggcgcgtctccggccgcgctcgtccaggcggcggccgcggcggggagcttcgcttgcggcgtagacgaaggcgcgcgggccgtgcttgctgctggcgccgtggcttatcctgtgatacagttattgccccctgacgccagcgtttgtgactcccctgcccgtgcgctcagaatgctacaccagtcgcaacaagctccaacgctggatgtctatcacgagaaaaatatggactttcttctttcccttttggacagcgagaacgagaattatccaggtcgatggatccatcattgagactaaaatctgtgttggctctgaggaatattatgttccttatgaatcccaaggataaagacctcattctgaaggagctaactgtatctactctctcaagcctcatatgcgattctgaacattctgttcaggaacagaccttagcgctggtacagaatcttcttgatggatatgtggattctgttaactacgtcactggtgaagatggcatggttataaatgcaatctcaagacaactgaacagcgcgtctgccacaggcacgttgtgcatccagggtatgtcggtgcctgcacagacaaaataaaacgaagttgattctggtcttactttagctcattgaagaacctggtcatgtgggagatgaggctcccttggcactaactgcccttataaaggacagtgtggaactgcagaaagcaagccttttcaacaaatgcagttgcgaagcttagcaaccatttgttagcaaatacattggagacaaggcgggcagtgaccatattgcttgctttagctgaactttgctcaaaacaagaagagtcaagatctcaacttatgtcaggccaggtatcaacattgatacttgatgcgttgaagcacgattgtgtggatattcgtgttgcagcatgttcatgcctgaagaatatttctaggtcatcaaaggtgcttagtgcgggccgcttatcctgtgatacagttattgcccccttagtccagcttttgtacgactcatctacttcagttcagattgctgccctgggtgctatttgcaacattgcagtgaatttaacacccaggaaataggacctgagctgcttgctggcgacctgacaactttaggcaccatggtagtcgatggatccaacattgagactaaaatctgtgttggctctgaggaatattatgttccttatgaatcccaaggataaagacctctgtctgaaggagctgaccgtatctactctctcaagcctcatatgcgattctgaacattctgttcaggaacagaccttggcgctggtacagaatcttcttgatggatatgtgggctctgttaactacgtcattggtgaagatggcatggttataaatgcaatctcaagacaactgaacagtgcgtctgccacaggagtttgcatccagggtatgttggtgcttgcaaatatggcagctgggaatgaattaaacaaggaagctgtaatggatgttactgttcctcaccgggcagatcgcatcaaaccatcttttgtggtcaacttcctgcagagcaaggataaacaattgagagttgcaaccttgtggtgcattctgaacttaatttacccaaacagtgaatcttcatctactcgagtagcccgactccaaaatgctggtgtaatttcacaagtaaaaaacatgataaatgacccctgcttggattgcaagcttagagtacgtatggtgcttgaacactgcttagacaatgccgctgccggtttcatgtgatgggtcggcaagccattgacgtttacggaacaccatacaccatacagcaatcgggcaaaggaaagctgggcgtgcttggcaccgagatgcaggccatgagcgcgaagtctttactggtctctccctgtattgagcctatcactgtaattttttctcacgagaacccgatgacaactggtttctgttgcggaaaggctggcacgcccttgttgtaagtttgtaagcatgccacttggagaacatgagtttgtgagtatgctaccttgagaacctgagctgcttgcttgcgacctgaaggccataggcacaaggtccagagaatcccattttgtagtgccacaagaacctttggttgtgttgtgacgaagagtgtataatcgatccaccgctgttgctgttgtaaattgcagttatctcttacaatgatcggtctgttttatcttcaaaaaaaaaaaaaaaa

SEQ ID NO: 5179 - DNA, 1547 bp, Triticum aestivum
  Clone ID: TRIAE-23APR03-CLUSTER64173_1
atttcccgtctagggttttgcttcctccccgagaaaaatcgaggcctcagccccccggaccaatccccccctttccgtccagggttttgcttcctcccccagaaaactcgaggccgaccccctaatccccgagcgcgccccgcctcgccgaccggtcgccggagatgtcccgcacgctggtgcagccggtggggcagaagcggctgaccaacgtggccgtggtgcggctgcgcaagggcggccagcggttcgagatcgcctgcttccccaacaaggtggtcaactggcgcgaccgcgtcgagaaggacctcgacgaggtgctccagtcccacaacgtctactccaacgtctccaagggcgtcctcgccaagtccaaggacctcatcaggatcttcggcaccgacgacctcgtcgaaatctgcgtcgagattttggagaaaggggagctccaggtttctggcaaggagagggaggcgcagctgtccgcgcagttcagggacatcgccaccatcgtgatggagaagactatcagtactgagacccggcgcccctacaccatgaacatgatcgagcgcatcatgcacgagatacactttgccgtcgatccaaaccttacctccaaggaacaggcactgagagttattaagaagctaatcgagaaccctaaatacaagataaagcgtgcaccattgacagtgcggttcattgcacctaagtccaatcttgctggccttatggagaagcttgatgggtggaatgcaattgttctttcaaaggatgagtctgccgatcagtcttccgttgtatgtgagattgagccatctattctgcactcgtgtgaagagaaactgaaggacgtgcaagggagggtggaagtactctcggtgtcggcacacacagaaggtggctcttctacagaccaatatgacaatgtcgaggacaatgtggagaaggcacagcccgtgcctgcgaaggagtctggtgctgttgctcagctaagtgaaaccatgcagaaacagagcctttcaagtgaagtggaaagccagggtcaggcaccaggcaagccgcagaaaagatgcagagaatgtgacgtattcatggaggacaagctgtacagagaccactgcaagtccgggtggcacaagcacaactacacacgccacaagaatgggcttcccccactcagccaagaggagtgcttgatggaaatggagatggcagattcccagaggggtctgaaggactacgatttctgaggtgggttttgtctagcactccctctcaccacgccttcaaggccgagagatggtatgcacaaggcatgaattttgcagtcttgttgtttccgtggacatagtcatcatttggtaaatgctggtatgaagtggggaactagttttgcggtacgctagcaagtttataaaatgtaatcaggttacgttgtgtgaatgtgaactgtgtgtagttggctgagtaaacttgtggcagtactcaaccacgctaaaaaaatggtgcgccaacttaatgcaacatatgtatatcgattt

SEQ ID NO: 5180 - DNA, 884 bp, Triticum aestivum
  unsure (1)..(884): unsure at all n locations
  Clone ID: TRIAE-23APR03-CLUSTER64188_1
aaccaaccagacccgacgagtcgccttcctcctccttttcgccccatcgcccggcggcggcggcatggcggcgggcggcgacctgacggcgacctgaccgacgacgagcgcaaagcgctgcgggggagcaagttcgcgcccctcccggcgccaccgccgtcctcccgccccaacccgaggatggcccatcctggaggaccactgactacaaataaggctgctgctttagcgaaattcctcgagagaaaactacagcaacctgatggcttggactctctaaatcctgatcttgtaaatttggctgtgaaaaatgcaaaggaaaccataaaggcaagcaagggtgaggcctcaacttctgggagagtagtacggcatgttccatcatttgaggattcctctgaggtttccaatcaagatgacggggagcagagacaggaaaagaagaaaaagaaaaagaaaaagagaaaaacaaaggccgctaaagataagctccacaatacatcaaagaagaaaaagaagttatcgctatgactcttgaatatccatgggaccatggagttaaaagaaggcagccgtccacacttttgcacttcttagatctcttggtttcatctgaacctcaatcagcactgtaaagtgtaaacctagcagtggcatcaggcatcaaggtgacccgtcacagtgaacaaaagaacatttatgaaccccagagtgcaaaactgaatgtagttggttctggtctaacggtccctataccatcagaattgcttggaaagttttatatattctgcaatttattaccggcgccgaatgccggcctgagtttgtgatgatgcagcagagatgatgcagctcgccaaaaaaaaaaattcataanaanaaaa

SEQ ID NO: 5181 - DNA, 1196 bp, Triticum aestivum
  Clone ID: TRIAE-23APR03-CLUSTER64260_1
ccctcgaaaccctagccgccaccttccaccaaggcaccaacccacagcacccatcacacctacgcgccgacggcgtacgccatgcagcgcgccgccgtaaggtttgcttccatggccacccgccgattcgctgcgtcggccacccgcccggggctcccaactggcgcggcgcctcttcggcctgccgcggcggtggtcaacggcacctcgcgattatccctccagccaactgttgctgctgccgcggcggctgtgtgggcccgccgcgcgtaccccgccacgtctcggcagacgaaggcggtcggcgaggaggacgttgatgccgacggcggcttctccggcgaggcgccctgcgacgaggacgccgaaggcgactccgacagcgacgatttggaggacgctgatctgtatgcttccggaagcgactaggaaatcgaaaccctagccgccaccatccaccaaggcaccaacccacagcacacatcacacgtacgcgccgacggcgtacgccatgcagcgcgccgccgtaaggttcgcttccatggccggtcgccgcttcgctgcgtcggccacccgcccggggctcccaactggcgcggctcctctttggcctgccgcggcggtggtcaacggtaccacgcgattatccatccagccagcttttgctgctgccgcggcggctctgtgtgcccggcgcggttacgcgggcaggtctctgaagacgaagacggtcagcaaggaggaggaggaggacgacgacgacgacggcggcggcggcggcgacttcttcgatatgtcctgcgacgaggactccgacgacgactccgacagcgacgatttggaggacgctgatctgtatgcttccggaagtgacgagtaggaaccagtgaagaagcgcgggaggtgctgactgctgagagctcggctccgtcgagagattttgttgtttcgtttctttctcgagatggagaacaaaataagccatgccattttaccaccaggcatgctcaacattaagttatagtatgctacaagaaaattgtttgtagtacctaaatttcagcttgttgaatcgtcaatttattgaatttcagagtgaaaaaaaaaaaaaaaactgtatgaaaatttggtactttgacaatggagaattaaactgtgctcgttgtgcaaaaaaaaaaaaaaaaaaggggccctag

SEQ ID NO: 5182 - DNA, 1749 bp, Triticum aestivum
  Clone ID: TRIAE-23APR03-CLUSTER644_1
ttctgcccccttccaccgggccggcgtggagccgagctccgttcccgctgcctcatccctctggtctcgttccagctttgctcgcgctgtgtatgcagaccattttctacattcccatcatccatacacatgcgccagtcgcctctacccagaaagttcccaactcccacgcgtcttcgcgagttctcctgtaacgccgaagcagggctcgagccgagtccacgacaatcgttcatggcgccgttgcaccgaggccagcgtcccagaccgagactccatcccaggctgattaaagtatccttacttgtcttaagaaaacacatcctgactagacacactaaaaggcctactgagaaaggaccggaacggcacaagtgaacccgtcggcggatgtggattcactggttgctccaggaaataagaggcagccatatagatagggtccacagatgatgcctcctttcgggacaccgctaccatacgcaacaatgtatgttgaaggcacactatataagcagcctcctaggccaccgtgctcagacccatacagcccatatcctgttcaagcaccaaatgggacagttcaaactcctacatctggtgctggagggtcggagacagataagtcaaacaaaaataagcggaagactcccctgaagagatccaaaggaagcttaggtagtctggatgtagttacagtaaaagataaaacgccacctgcaaaacctttagtgtcatcctctaatgaaggttcttcacaaagcgagagtggaagcggaagttattctggaggaagcagtacaaattctaaaagtggttcacacacaaaggatggttctgagcacggcccggctaatgatgctagcaataaaggagtcactgctcagggcacagcagttgagcccacacaagtatcttctgggccagttgtgcttaaccctatgatgccatattggcctgttccccctcccatgcctggccaagcaactggtgtaagcatgggagtggattactggggtgctcctacttctgtacctatgcatggcaaagctgtcgctgcaccgacatctgctccttcatcaaattctcgtgatatcgttcttagtgatccggtcatacaggatgaacgagaagtgaagaaacaaaaacggaagcaatcaaacagggaatcagctcgtcgctctagattgcgcaagcaggctgaatgggaggaagtagccagtcgagctgatttgctgaagcaggagaacagttcactgaaggaagaattgaaacaacttcaggagaagtgtgataacttgacctcagaaaatacatctttgcatgaaaagcttaaagcgcttgatagtgagaagccaaatggaaacttgtgaagcagtgaaggccgcggcttcactttctgactgctgatataaactggaggtgacatgataggccggagataattaggaggtattcatgtgtgcaattagatttttggctgagatggtaggattgtatcataggattcaacatgatggctacagattcttcgtcttctttgtccggacgtggcagctgccgctctatggtgttttcttttcctgcttttgtgtgagatgctaccttagcagtatgtaaagatccccaagttatatttgagactttgcgggattagcttataagatgcttgttgtagagctgctggttgaccagaactgatgcttgttatagttatgatttataaaacgtccaaaaaaaaaaaaaaaa

SEQ ID NO: 5183 - DNA, 868 bp, Triticum aestivum
  unsure (1)..(868): unsure at all n locations
  Clone ID: TRIAE-23APR03-CLUSTER64520_1
cccccgcacgcccaagcaatgtatcccaccaccccctccgacgcgtacgacaggttcagcaacggccctccgcccacggcgccgccgccgcagcagcagcccacgtacaaccacgccatgaaccagagccaccacgcccgccccgccgccgggctggcgcgctggtccaccggcctcttccactgcatggacgacccgggaaactgtctcatcacgtgcctgtgcccctgcatcacgttcgggcagatcgcggacatcgtggacagaggaacctgctcgtgcgccgggagcggggcggcctacgcggccatctgcgcgacgacggggatggggtgcctctactcgtgcgtctaccgcaccaagatgcgggcgcactacgacctggacgagggggagtgcccggacttcctcgtgcattggtgctgcgagctctgcgcgctctgccaggagtaccgggagctcaagaaccgcggcttcgacatggggatcggctgggacgccaacatggagcgccggaaccggggcgtcaccggcgggcaggtcatgggggcgccggccacgcccgtcggcatgatgaggtagacaggtcacgcccgcgaaatctccggtgattttcatgcgtcatgctcccctcccatcccctgtgccatttctccttgtgttattctgggttggagatcgttcgattttttgattgactgtttttctagcggcgtgtgcattgtctactagtttgcttgatgtgccgaattctgggcatccttcgttcactgttgtcgcctgtccacgtgcgcatgcagttgggnttgattgaagttccgaatccgttgatccaagtaaatttccaaccattacgactaaanataac

SEQ ID NO: 5184 - DNA, 1244 bp, Triticum aestivum
  unsure (1)..(1244): unsure at all n locations
  Clone ID: TRIAE-23APR03-CLUSTER64545_2
ccccctcctcctccgccgccctagggttccggccatggcgcacggcggccagccccgccgcgccccggccgcacgccgccccaagccttccgcgtccgcccccgcccccgccgctgaccggaagcggaagcgcgccgccgccttcaagaccgccacgctcaagaaccagatccgctccaccgagcgcctcctccgcaaggaccttcctaatgacatgagggtggctcaagagaagaaattggaagaactaaagagacggcaagagaatcagactcaagaggccatgcaacgcacaatacagttgagggatagaaagataaagttttttgagaggcgaaagattgagaggatgataaggcgtcttgacaaacagcaacggataaatgctgatgaggccagcaacaagctggcaacattgcgagaagatcttgaatatgttagattttccccaaagaaagaaaaatatttccctttattcaccgggggtaatacaccagatgttgtggagaaaaggaatacatggcgtaaacagatcaaggagaatctcatcgcggctgcagcaaatggaaaggacttagaagagacagccagtgacgatgacaccttggatgtgagtgaagatgatttctttatgtctggaagttcaagtgatgaagaggcagatgatgagcttaccgataaaagtacaaaagaacctggtgcttcagctagggcagcgtctggtatgtcgagtgatgaaaagaaccagcggcagagagatgctcgagtgcttatgccaccacctcgctcattaccacctaatagagctagatctgcggataaacgtgcggtgtccagctctagcaatgcttcgaccagcacaagcggtaactcattcaaaaataggagagcatccaatctttctggagatcacaacagcactctgagttcaaattctgatgctcatagccacgccgcaaaaggagaccgaagaaaaagaagcaggcatgaatgaatattccgatcctccagaagagcagaaaccaagatctgttccatcccaaagcgcggcttcattcatggctcgtcgattcgaaaagggagaaagaaacccagcaaaagtgtgcctgagcaagcagttgattttgtacgctcgctctctntgatgtaaaatgaaccctccccttcctcccgtcgccccgcccccgtttgtcttacagatacagaacaacttaccgtcgtaaacacccgacattgctcgttcg

SEQ ID NO: 5185 - DNA, 1013 bp, Triticum aestivum
  Clone ID: TRIAE-23APR03-CLUSTER65118_1
ctcctcattaagttcttcctcctcctcctcccttccaccagagccgggtttatctttatcggctagctgccacccgcgcctgtgcgccatggactctactctcttcatcatcggcgtcatagggaacatcatctcggttctggtcttcatttctcccatcccgacattctggaggatcgtgaggagcgggtcgacggaggacttcgaggcggcgccgtacgtgctcacgctgctcaacacgctgctatggctctactacggcctcaccaagcccgacggcctgctcgtcgccaccgtcaacggcttcggcgccgtcatggagaccatctacctcgtgctcttcctcgtctacgccgccgacaaaggcaaaagggttaaaaccgcaaagttggtggcagttttggacattgggtttttcggggttgttttcgcggccacaacatttgccattgatgggctggacatgaaaatcatggttattggcttgatatgtgcatgccttagcgtgttcatgtatgggtccccactcactgccgtgcgaagggtgatcgcctcaaggagcgtggagtacatgcccttcttcctctctttcttcctcttcctcaacggaggagtctgggccacgtatgccgtactcgacaaagatgtcttcctcggggtccctaatggaacaggctgcttcttgggcggcatccagctggttatctatgcggtgtacatgaacagcaaggtcgcctctcactcttatggcagcgacgaagcggcttcccttttgtcctccgaggccagcaaacatggccagcacgatgcatccactcgtgtttagtgattgtgtaaaattatgtaatttttgctgagtaaagtccaactcttatcacatactttgatactttttaaagctagttagaacatcttcaactgtccatttatcagttttcatccgaataccctatttaacaaaagtttcgcaagtttgtatcccaattaccgaaagttttcccgttttgtcccat

SEQ ID NO: 5186 - DNA, 1327 bp, Triticum aestivum
  Clone ID: TRIAE-23APR03-CLUSTER65203_1
atccctccggtcgcctccggccttgcctcgccccctcgcccctgcccccgccgcctgccccggcagcccgtccctggcccccatggcggccgcggaggtgtactcgccgaccgcggcggcggcggcgcagcaccagcagcgcgggaaggcggcgacgcaggcgtggcaggcggtcgtcggctggatcggcttcctcctccaggtcctgctccagatcctccgcggcacgccctcctgcgcccagctcctctccttcgtcggcttccgctacccgctcctctcctccgcctcggccgcccccgaccagccgtcgccggaggtggccttcatgccgctccgctccgagatcccggccgacgccgcccccgtcccggcgcccccgtccgagcccctccagcgcctcacggtagtgcttgacctggacgagactttagtttctgcgtacgaatcatctggtcttcctcctattgtacgcacccaagctgttgaagctggattacattgctttgacatggagtgcatatcaactgataaggatgttgaaggaaaacaaaaggtgaatcatgttactgtctttgaacgtcctggtctgcatgagttcttgcagaaaactagtgaattcgcagatcttatcctctttacagcgggtttggaaggttatgcaagacctttagtggacataatagatgctcacaataggttcaaactccgtctctatcgtccatcaactgttactacggaatacagagagcatgtgaaagatctttcgtgcctgtcaaaagatttcagtagaatcgtcattgtcgacaacaatccgttcagcttcatagtgcagcctttgaatggaataccttgtgttccattttcagctggacaacactcagacgatcaactgatggaggttatcttcccgctcctgaagcatctctctgtccagagagatgtgaggccagccctgtacgaaaggtttcatatgccagaatggttccaaaagcatgggatccctcgaactgatcaggctctctaagaattgtttaggtggagaagaatcaagtgcctgccacgccatatgtcccttagggggagagcacttgtacattattatttatattcatttttagattctcttccctgatataagatcatgtcattgttcatacagaattgccatgtctggaggtaaaaggaaatgtaatctagcagaatgtcacatttgtattggtgtcaacatcaattgttgtatatcacctttgttgtaaaaaaaacctcggccgcgaccacgcttctcacgcgcggttccaggtctataaaaaaaaaaaaaaaaaaa

SEQ ID NO: 5187 - DNA, 817 bp, Triticum aestivum
  Clone ID: TRIAE-23APR03-CLUSTER65208_1
catcattcagacatagaccgagagtcgtccataggttcgtcctacacagacaaacacagccatggtggaggacttcacattccctaccatgccaccggtgccgtgcagcgccaagaagctccctttccctcacttcacttcgccgccgccatggttcgtcgtcccggtcgacgcgggagcgtacgaccatcaccggcggtgcttctcggccaccgagcaagccaacaacgacgtctacccggggccgggggggcgctccgagaggttcgccgtcatggaggagcacaagatggacatgctgtgggaggacttcaacgaggagctggcccgggcgccgcagccgtgcccactgagcatggagtggtcgagtgaggcgtggcacgccggtgaaggcgacggaataccatcccggtatgtggatgtggtggccgcctccggtaccggcagcagcgtggtccggcgaaggagactgagcctgatgatgatgctcaagctgctcaagaagctcttcttggcacgcaagtccagcaccacctcaaggaagacgccaccaaactgacaacagtttggatgcgagaattacatagatgcgtgcataaatcaatctcaggtgtatatataatatcgcattgtcgatcgatagatacatctttctgaatcaatcttctagcttctcacttgcttcttttccctcgtttgcgcggctcttcagagctttgtgctgctcaattctggctatgggttctgtttgaaattatcatggtttggcatgttcatagattggaaaacatttcggatttcaaaaaaaaaaaaaaaa

SEQ ID NO: 5188 - DNA, 599 bp, Triticum aestivum
  Clone ID: TRIAE-23APR03-CLUSTER654_21
acccaaaccccagcgtctcaaacaaagccctgctgtgcctgctccgatcggcgcgaggaaccagcgagagaccgcggagccagaggaggaggaggagaagatgagctactacaaccagcagccacccgtcggcgccccgccgccgcaaggtgcgcaccccgtcgattcccgtctccatcgattctctttcctttccctgcgcggtgcccctttcctctttttgtgctgaatcttggcctgtgaatctttgaatcctcaggctacggggacaaggccggctacccaccgccggggtaccctccggccggctacccacccccggcgcagggctacccgccggccggctacccccagcagggctacccgccgcagtatgcgcagcagccgccgccccaccagcagcagcagcagagcagcgggccttccttcatggagggatggtaagctcctcgtccatctcctcgattttccctacctgcggggtcccgagcgctagattagatcaaagctcgcccggggcttgtgcttagggctgtaaatcatgatcggccgtgtcagatctgcccgtgcacaccggcggcgtcccctttctccgtcgg

SEQ ID NO: 5189 - DNA, 1309 bp, Triticum aestivum
  Clone ID: TRIAE-23APR03-CLUSTER65603_1
aacgccggcctccgcgctacactacaccgtcacccgatgagagccgcggccacatccacagccttctccctcctctcgccctcccgcctccggacctccgctcccaccaccaccagcctcccctaccgccgtcgtccccgcatcgccgccatggccaccgccgccgcctccttccgcccggaggccgcgcgctcgccccccgccgtcgagcccccggccccgccgctctccaagttcaaggtggcgctgtgccagctctcggtgacggcggacaaggctcgcaacatcgcgcgcgcccgcgccgccatcgagtccgccgcggccgacggcgccaagctcgtgctcctcccggagatatggaacggtccatattcaaatgacagctttccggagtatgctgaggacattgaggctggtggcgatgcagctccttcattttcaatgatgtctgatgttgctcgcagcttgcaaattactcttgttggtggatccatatcagaacgttctggtaacagcttgtacaatacatgctgcgtctttggttcagatggcaagcttaagggtgatattccagaaatgattccattccagaaatctaatacacggaaagcttaccatgatcttactgttgttgcactacagatgtagaccgaattggtataggcgatttgcatatgacatgtctgtttctaggaattggcaatgatgtatgctgcaagagagtgctcatttgctatgctatcctggtgctttcaacatgactactgggccattgcactgggagttgcttcaacgggcaagggctgctgacaaccagctttttgtggcaacctgtgctccaactcgagatactagttcaagctatgttgcttggggacattccactcttgttggaccgtttggtgaggtgatcgacacaactgagcatgacgaatcaactataatagctgagattgattattcattgattgagcagaggaggcaatttcttcctctgcgacatcaacggcgtggagatctttatcagctggtagatgtccaggggtcgggttccaagtagactgcctgaattgctcgggtaggcatgatccatgaagcaagaatcgctgattgagaaggcaggctcatatgctttgattcgtgagatgtatgtgccacatcttcatctgtaatttgcactcctggcacatgatgtgtgaaaaggggacaaaaccaataagagacatgtaacatgtacaattgcctgagttgcgaaataatcaaaccccttggcgggaagcaaaaatcgaaaactgtactcaaaaaaaac

SEQ ID NO: 5190 - DNA, 550 bp, Triticum aestivum
  unsure (1)..(550): unsure at all n locations
  Clone ID: TRIAE-23APR03-CLUSTER656566_1
gatgtgagggcggcattnttcgagctntagggtgagctcctngaaaccccgacggtgcggtgcctacgagccatggcgagggggtagggtccctnttcggtgattgagatggaanatgttgttccccttnttctntaggtgttcctggagcatggccatctttgaaggtcggatatgccctgctttgctgctctgcttttcctcatatgatcctagtgtggagtgctcggcctttgcaagctgtaatcttaatttcctttgcattagctgcttgtggaggttgtagttagcgtttcagtccagtgttcccattgtatccttctgaccgctataatttgattgtttgctgtaactcctggccggttgatggctttgttaattcaaagccgggctcctcgcgagccttcgttcgaaaaaaaagaaataagtattcttagtctgtcatactattttatagaaacccccccgatgtttcttatattaaaacccgcagtacataataaatgttttttttaaatactcgttacctctaaaccgtaactataaattt

SEQ ID NO: 5191 - DNA, 1173 bp, Triticum aestivum
  Clone ID: TRIAE-23APR03-CLUSTER65668_1
aaatatagagtagatccagaggcggcggcaggcgctttcgacttgtgcctcatcaagccaactgctcctgattcctgaagcggtaaaaagagcgagctttgggattggcagcaatggcgacgaaaccactagttggctctccgctctcggcctctcctgctgctcaaagcacccctgaccctggctttccaaccggtgttgctgctcaaggcacccccacccctggcccttccagtggtggtggtggtaccggtgctgctgctccagtccccgacggtggccctaaaagtggcagcgggaatccaattgggtcacctcccgtgtttcacggataagttcttgttctgcttcggatctccgaccttgtcttgtgcaagtttcaaactgtaatatgtttgttcccagttaaggtatgagggtcctaccgcccttccattggtatagaagcacattttgaaatgcacacatctggatgcctagctttcttgaattgtgcctcatcaagccaactgctcctgattcctgaagcggtaaaaagagcgagctttgagattggcagcaatggcgacgaaaccactagttggctctccgctctcggcctctcctgctgctcaaagcacccctgaccctggccttccaactggtgttgctgctcaaggcacccccacccctggcccttccagtggtggtggtggtaccggtgctgctgctccagtccccgacggtggccctaaaagtggcagcgggaatccaattgggtcacctcccgtgtttcacggataagttcttgttctgcttcagatctccgaccttgtcttgtgcaagtttcaaactgtaatatgtttgttcccagttcggtcaagggttcgaccgccctcttgttcgttaagcatggagtttgaatgtttgataaccacaaccttggttcttataactgatgttgttttaagtatggatatatggcttgaatacacacatctgatcaatagtatttatgggtctaaagcagtgtaattaagatgccatcgatctgtaaaattattaaagttgtatgacgaggtaaaaaaagagatgcgtgtggaaaggtcagcacagctagatttgagggtggcaaggtcaaacacggatatatgttgaggtgaaatgaagacctatgtgttgccaaaaaaaaaa

SEQ ID NO: 5192 - DNA, 1761 bp, Triticum aestivum
  Clone ID: TRIAE-23APR03-CLUSTER6567_5
accaccaccaccctccgccccgctcgctcctccgcattattatcacccgacgcccctcccctctcctctccgactcccccccggccccctccctcccctgctcgccaacgcgcggcagcagattcgcccgcctccctcctcctccccaccctctgcctgtgtatttttgctgctgagtaggggagcgcacggggagctgtgggcgggcggcggcgatggggaagccgcgggcgatggtggccctcgcggccgcgctcgcgctgctcctctcctgctccggcgtcgtcgtcaggggccaggacaccgagaggatcgaagggagtgctggtgatgttctggaggatgatcccgtcgggaggctgaaggtgtacgtctacgagctgcccaccaagtacaacaagaagatggtggccaaggactccaggtgcctcagccacatgtttgccgccgagatattcatgcaccggttcctgctgtcgagcgcgatccggaccatgaacccggaggaggccgactggttctacactccggtgtacacgacctgcgaccttactccgtggggccatcccttgcccttcaagtccccgcggatcatgaggagtgcggttcagttcatctcatcacactggccttattggaaccggacggcgggtgctgatcatttctttgtcgtgccgcatgactttggggcatgcttccattatcaggaagaaaaggcgattgaaagggggatccttccattgcttcgccgcgctacacttgtccagacattcgggcagaaggatcatgtctgcctaaaggagggctcaatcaatatcccaccatatgctcctccccagaaaatgaaaactcaccttgttcccccggagaccccgcgttccatctttgtgtatttccgtggtttgttctacgatacggcgaatgatcccgagggtggttactatgcaagaggtgcccgagcgtcggtgtgggagaacttcaagaacaacccactgttcgacatctagacggaccacccggccacctactacgaggacatgcagcgcgccatcttttgccttagccctctaggctgggctcgcgggagcccccgtatcgcggaggcggtggtgttcccggtgatcatcgcggacgacattgtgctgccctttgcggacgccatcccgtgggacgagatcggcgtgttcgtcgcggaggacgacgtgcccaagcttgacaccatcctgacctccatccccatggaggtgatcctccggaagcagcggctgctggcgaacccgtcgatgaagcaggccatgctgttcccgcagcccgcgcagcccggtgacgccttccaccagatcctgaacgggctggcgcggaagctcccgcacagcaagagtgtgtacctgaccccggggcagaaggcgctgaactggacccagggccccaagggcgacctgaagccatggtaggtagccgcggcaccggcattggcgccatgagctgatgatgttcagtcggtctgaaccagctgagaggactgatggatgagtaagcccagccaaaaccaagccaagctaagccattactgtcatcaaatgtaaagctccttcctgtctaataccttgcttctttttgttgtgatgatgtgcctgcctaccttccatgttatggcatggcatggttcccttgttttttgttgccctagtgctagactgctgctgttgtaggtgatcatggatcatagagtgttatatatatatgcatgacctttgtatt

SEQ ID NO: 5193 - DNA, 1928 bp, Triticum aestivum
  unsure (1)..(1928): unsure at all n locations
  Clone ID: TRIAE-23APR03-CLUSTER65732_1
attccaattgtgtgccacttccctcctcgcccccaaccgtgacgcagcaacctgcagctctattcccacccgcccccgctaaagcagcacacgaagcccccgccggtccggccccccggccaaggggcctcctcaaaacagccccacgacgtgtcggcgtcgacccacccacatccccggacggccactgcccgccccccaggcagttagttcgtggcccggaattctcctaaattagtttagtgatttcgggtcccacgacccgtatcggctgctcctctcctgcgccgctggatctcttcctttccatcccactcaggcaatacaaaggggacagaagggcaggggtctaggtgctactccggcgcggtcggcagagccacagcacacccatcatctcttcaagcttggcccgcccagcaatttgtttgtagctccgccactgctgagacccctagtgttcccagccacgcctcgcccactcgcgctgtgtgtgcctcggagatggccggcgcgtcattttttgataggatggtttcccagcttcggtcgacatccaagtactacactggatatcccaaggatctagggccatcaagaatcataccgttcacatcagagcgtcagtttgtgcagctattacatgaaggacggcctgtagttgtggcctttaccattaagtgcacttatacacagcatcttgacaaagtactggagaaagctgctgctacattttatcctcatataaagtttgttcgggtggaatgcccaaagtatcctgggttttgcctcacgaggcaaaagaccgagtatccatttcttgaagtattttacaacccagaacaggctgctaacccaggtaagattgtggatccgagcatcacgaaatactccgcaaaagtcctacctttcaactatgaccagagcgtgtatggatttcgagagtattttaagaagtatgggttcaagtattccgaagcaaactaactaggtttgtcatggtgaagccctgcagagtcagccagtccaactggcatgatgaggcctagtatttgaatttactttcagcctgtactaacaaacagtgatactgcattcttaagaatcagcaccccctgcatactgggctggctctgccttggcaaatggttggaaaaatggcaaagctgttagctaggtttccagtattctcaatcaagattgtagtagaatttctggatgttgcatgttgttctttgtcgaatctctgaactgcattttcagactcgctattaataaaattctgcggcccaaaaaaaaaaaaaaaaaaatttttcgccaccgccaaccacccaacggaggccggtcccccccctccaccccgcccgggctcccgcctttcgaacccctggcgaggggtaggggcccgcttgactggaaaaccgtccccgttgcttcctgaccggccttggcggcaggcccgcgttccccaccccccccgaacacgacaccgcccccgtaaatcccgcgctccctaatgaggcagcccccccccacgaggggcgttgcccccaccccccccatttcagccccggcaccgttcgtgccagctgccctattgaacagccataggccccccccccggcccctttcgcactccccacgcccccgcgccgtgcgtcacgtgctcccggcggtccgtcgttccgctgccccgtgccgtggccccgcccccactgcccctggcgcgggtctcctctctttctggggagaacgcaggaaagaacatgtgagcaaaangccagcaaaaggccaggaaccgtaaaagggccgcgtgctnggcgtttttccatangctccgcccccctgacnagcatcacaaaaatcgacgctcagtncanaggnggcgaaaccccgacaggacttttaagatcccaggcgtttccccn

SEQ ID NO: 5194 - DNA, 1883 bp, Triticum aestivum
  unsure (1)..(1883): unsure at all n locations
  Clone ID: TRIAE-23APR03-CLUSTER65789_1
cttcttttgaatcccctccctcccctccccctcggccgcctcgccgccgacccggcccgggacggaggccccctccctccccccctcccggaaccttctggaagcttccccacctccctccgctgctccggcgagagcccgcgtcgcagccgccgccgagggccaccacctcgcactgccgacccgttgcttgcagcgggaggaaaggggtcaagatggttgttggatcattcattaccagagctttgatacttgttcttgggcaaaggcaaaccccctcttttgaattccctccccctctcccctcggtccgcctcgccgccgacccggcccgggacggaggccccctccctcccggaacctcctggaagcttccgcggctccctcccctgctccggcaacagcccgcgtcgtcgccgccgccgagggccagcacctcgcgctgccggcccgttgcttgcagcgggaggaaaggggtcaagatggttgtcggatcattcatcaccagagctttaatacttgttcttggatatgcatatccagcttatgattgttacaagacagtggagctgaataggcctgagattgagcagttgcggttctggtgtcagtactggattttacttgcaatgcttactgttttcgagagagttggggataatttcatatcatggttgccaatgtatagtgaagcaaagctggcttttattgtgtatttgtggtatcctaagacacaggggacttcatatgtctatgagtcgttcttcaagccttatatcgcaaaacacgaatctgagattgatcgcaatcttcttgagttgaggacaagggctagtgatattgctgttacttacttccacaaggttgcagactacagccagtcaaggttccatgaaatcttgcaatatattgcttctcaatcacaaggatctcgttctcaggcacagcaacagcagcagcgtccaccacctccacggactcggatggcgaatcctgcaccaccacctgttcccgcaccaacggcaccaccgatgccgccacaggccgcccaagttcctcctactccaccaaggatgcaggtgcaagataaaggcccagttccagttgcccctcctggcgcagtgcctcctgtgcagcaacaaacaccttcctgtcctggccctgtcgccggcaacagccccccaaagagtgaagacatgctggttgatcaatctgggccttcgacaagcaacgtgccaccccgcccaacaatgcctgaagacgaggagacgctcatccaggaggctattcggttgactcggggccggctcaggaggcgcatgggtggatctggacctccatccaactagctcttctcgcacttacgacgatggcaggggaaatgctgggttggtccatcaggcatggctgaatttcctcgcacagttgcaagctcacgtccaccttgtaaaacgatgaatcctggttcctgttgtttcacagcccagattgtgtatataaacccaccccatgccaggggtaaaaacgctgggatgccagtggaccaccagtttagctaggcggtagcagaagatggtggttaagatgctcggtgaaatcggttccaacttagttctgtcgaaattcgttggtggtgacttcgtctgtattggaaagtggttcaaaggtgaagtgaaataatcttaggctgtaccgggaagatagaaccttcgcccgcctcgcattagcacgttctgttgctgctacatttaacggggggggggaagggagttnnnnnnnnnnnnnnnnnnnnnnnnnnnnnnnnnnnnnnnnnnnnnnnnnnnnnnnnnnnnnnnnnnnnnnnnggggannnnannannnaaaaattttttgtacccccccca

SEQ ID NO: 5195 - DNA, 2297 bp, Triticum aestivum
  Clone ID: TRIAE-23APR03-CLUSTER657_1
tctgcttctacttctacttgagcggagcctgctgcgttcccacggccaccagccactccgcctgctccgcggttccacagcgcctagctcgaaaaggtcgtcattgagaggctgcaccaatgggttccattcctaattattgttcttatcaaacaaacagtgttggttcactgaaactgtcgcctcacatccaattccagcaatcttgtaacaatgaagttatgttcctatccatgcgaaataagacacagctggccaaaagaagagccacaaattatggaactcatcgtaattctagtaggactcctgcacctatcgtatgttcaactggaatgcccataattttcgttgccactgaagtgcacccatggtgcaaaactggaggccttggtgatgtcgtaggaggattgcccccagctctggctgcaatggggcaccgggttatgacgatagctcctcgctatgatcagtacaaggatacatgggatacaaatgttcttgttgaggtaattgttggtgacagaacagaaacagtgcgcttttttcactgctacaaaaggggggttgatcgtgtttttgttgatcatcctatgtttcttgagaaggtatggggcaaaactggatcaaaattgtatgggcctaccactggaacagacttccgagataaccaattacggttctgccttttgtgccttgctgcattggaggctccgagggttcttaatctcaacaattctgaatacttctctggaccatatggagaaaatgttgtcttcgttgcaaatgactggcacactgcagttttgccatgctatttgaagagcatgtataagcaaaatggaatttatgtgaatgccaaggttgctttctgcattcacaatatcgcctatcagggcagatttcccagagtggacttcgaacttcttaatttacctgaaagtttcatgccgtcatttgattttgttgatgggcatgttaagccagtagtagggagaaagattaactggatgaaggcagggatcactgagtgtgatgtggtccttacagttagtccacattatgtcaaagaacttacttctggcccagagaaaggtgttgagttggatggcgtccttcgtgcaaagcctcttgaaactggaattgtaaatggaatggatgttgttgattggaatccagcaacagataagtacatcagtgtcaaatacaatgcaacaacggtggcggaagcaagagctctcaataaagaaatactgcaggctgaagttggattgcctgtggactctagcatacctgttatagttttcattggacgtcttgaagaacagaaagggtcagacatactaattgcagccataccggagtttctcgaggagaatgttcagataattgttctcggcacagggaagaagaaaatggaggaggaactgatgctgctagaagcgaagtacccacagaatgccagaggcatagcaaaattcaatgtcccattggcgcacatgatgtttgccggggctaatttcataattgttccaagtaggttcgagccatgtggcctcatccaattgcaagggatgagatatggagtgattcccatctgttcatccaccggaggactcgttgacacggtgagcgagggtgtcaccggattccacatgggttcgttcaatgtcgagtttgaaaccgtcgatccagcagatgtcgcggcagttgcttcgaatgtcacacgagctctgaaacagtacaaaacaccgtcgttccacgcaatggttcagaattgcatggcgcaggacctatcttggaagggaccggcaaagaagtgggaggaggctcttcttggcctaggagtcgagggaagtcagccgggcatcgagggcgaggagatcgctccacttgcgaaacagaatgtggccactccctgaaatctccaaatattagggagagtgttctaagattcgacaaaataatgaggttgctaaagatgaagctgtattcatctaggctttgccatttctctactactccatgtgtaacatactacctgaatttcaacaagtatgcatccttatgtaggtaaaaaaaaataggttcgtcaagtagtggtccatctggctagcaggtaccgccagcttgtagtatctagaagaggggtgataggttcgtggctttgtgccatttgcctccgttgtgccaaatcaagaacagaagggccctagctgtgagtgtgggtaaagtatataggttaagtcgttatctggaagaatctactacgaaaagatgcacgcaaccggcaatacgtc

SEQ ID NO: 5196 - DNA, 1348 bp, Triticum aestivum
  unsure (1)..(1348): unsure at all n locations
  Clone ID: TRIAE-23APR03-CLUSTER65819_1
gtttcctctccagacgcgaaccttccttcttttcaaccccaaatcaccgataataaaagccgcgttccccgatctgttccggtctccaagaacccgcccacctctcctgtctctctttccccgcgaaatttgtctgcgatttcgtggagcagttccgcgccttctcgccggtcgccgctctccaggatgcgcaacctcctctcgaattcgtttgagctcaacaaggaggaacggcccccggggaatgtcgatattgagctaggtttgcaaggcgacctgtcgggttccgcacagccaggtttcgatggcttctatgaacaggtcagggagattgataagttgcttgagacgttgacaaaactactgaaggatcttcagaactcgtccgaggaatcaaaaattgtcactaaggcatcagctatgaaagatatcgataggcgcaacgcgaaggatgattatgaagtgaccacggttgcatgagtcaataaaacataacttcagcaattgaataaagagaatcttgcaaacagagaaaagccggtctttcacaagggatcaagtgtggaccgatctcggacctcagtgacaattacattgactatgaggttgagagaacgcatatcagagtttcagacactaagagaagcaatctcagacggagtacagggaagttgtagagcggcgtgttttcaccgtatacgggcgagcgtgcctgatgaggagactattgacaagctgatagaaacaggcgacagtgagcaaatttttcaaagagctattcaggaacaagggcgtggaagggtgctcgacacactccaagagatccaggagcggcatgacatggtgaaagagatcgagactaagctccttgagctgcagcagattttcctcgacttgtcggtactggttgaggcgcaaggcgagatcctgaacaacatcgaagtgcaggttacaggtgcagtggagcatgttcagactggaacaaacctccttcagaaggcgagggtcctgcaaaaaaacacgcggaaatggacctgcatagcgatcatcatcctgctgatcatcgtactcgtcatcgtcctctcgttgaaaccgtgggcaaagaagtagggaaaaaggagcatcatgctatgctaggacaatatacgatatttcatatgatgtttattgtatagcttttgctgtgtatacgtcaatgccatatggtgccggagccgtcatgtatatttctctgattagtttttggtggggtgtgaactttgttcgattttgtggttcgaataacaaaattcagcttgattatgtgacttgtctttctacaaaaaaaaaaaaaaaagcgcntntcaga

SEQ ID NO: 5197 - DNA, 2387 bp, Triticum aestivum
  unsure (1)..(2387): unsure at all n locations
  Clone ID: TRIAE-23APR03-CLUSTER65850_1
gcacagctcgacgcgcacacccacccgccgaccgcacgaccgccccccccgcacccgcgcgcgcacccgccggcgtcaccgacgggcggcggtcaccggcgccctcccccccgagctccctgcgcgcccgccctcgggggccgccggcctgcctcgcccgccttcctgggcccccgccgtcgccgcatggcggccgctcaacccccccggcctccgcgacccgccctccccctccgcgctccccttgttgcgtccttcgccgccgccacccgcgcatcgtgcgacagccagcagctcttcagcgtgtccgagtcggcgaatgtaccattacagactgatattcaatcaggtagcgttgtcattcgacgaggggggcttctacaattggagtcacccccagaaaatcgtttcgacatagatcatcttaataatgtaaataggaacaagaatgacaggggtccgaccgttgggtaggattcaaaggaaacatgggtatgcctaaacaacagagcattgggttttaatcaccgccgtgtgattgtgacctgtggtgttgatagcgttacgtttctaggggcatttcttcctgcatcggtaagggttctaaatgatgagtttcagaaagttaggcaccagaaggcgtaggtatagcatgatgaataatatggggcaggcagagcttttgaagcaaacctgaaggttattagccccatgctcgttgtcatttttaagccggccgacgcactgtttctcgaagaggcgaagcatattgctgatcgattgttacctgcctgggatacaacatctggtatcccttataattcaatcaacttagctcatggccgagctcataattttggatggaccaacggtgatagtatccttgcggattctggaacggagcaacttgaatttatagctttgtcccaaaaaaccggagatcctaagtatcagctgaaggcagaaaatgtcatccgacagcttcagaagatatatccaagtgatggcttacttcctatctacataaatcctcagtcagggcaagcatcatactcaacaataacattcggtgctatgggagatagcttctacgagtacttgctcaaggtctggattcaggggaataaaaccggagctgtaaaacattacagacaaatgtgggagacatcaatggaaggtttaataagcttgaccaggcaaactacaccctctaattacacatatatctgcgagaaaagtggtggctcgttatctcacaagatggatgaacttgcatgcttcgcccctggtatgctggcacttggagcctctggttatgggcctgaaaaagctaaacaaattatgaatctggcagaagagcttgctcggacctgttataacttctaccaaacaactcccacaaagttggctggagagaattattatttccacgctggacaggatatgaacgtgggcacgtcatggaatatcctgagacccgagactgtggaatcactcatgtacctggcgccttacggggaacaaaacataccaagattggggatgggacatattccaggcatttgagaagaactcccgcatagcatctggatatgtgggactaagagatgtgaatagtggtgaaaaggacgacaagatgcagaccttcttcctagcagagacgctcaagtacctctatctgctgttctcccctccgtcagtcgtatctttcgacgagtgggtcttcaacactgaagctcaccctttgagaatcgttccgacacatggtagcaacggccagtcaattgaaactgcaacaccagtggtccgaccgttcggtaggaagcaagggaaacaggggtaggcctgaacaacagagcagaggatttttgcatccgccgtgtgattgtgacctgccttgttgagaacgttatgttacgatgggaatttcttcctgcagcggcaagggttgcaaatcatggcactaggctatttaggcaacacaattgtaggtagagcatgatggataatccggggcatgctgaaccttcagagtataaccgaagatcagcagccccatgaaagttttcatcttcaaacttgcctatgctccgtacgttattgatttgcaacacatatgtaacttagtgtccataggttgttgctttcatggggctctcctggagttgtatccttattgttttgattatatgatatataaaaggggttgtgtttcctttcagtatatacattttgttaggacttttggaaacagtggccgcatttaagagaaaaaaggtatgtgggcctgtatttgcagcaccaagaaaaaaaacaaaaaaggtgcggtccgcttctagaggcatnccaagacttcacgttacgccgtggcatgcgctacgtgcata

SEQ ID NO: 5198 - DNA, 1822 bp, Triticum aestivum
  unsure (1)..(1822): unsure at all n locations
  Clone ID: TRIAE-23APR03-CLUSTER6596_1
ttttttctacactaggactagactgatcgccctcctcctgaagtctaaaccctcactccccttcaccactgctcccgcagccttcgttcggccttgcccctcccgccgaaccaaggagtaccgggcgcggcggcggcggctaccgcccgcagggccagcatggcgtttctcttcaacaaattccaggaggcaatcaaaacacttgctaagagtccaagctttgctcgagacccacggcatcttcagtttgatgctgacgtgaatcgtttatttctctataccagctataatcgtttgggagagcattctgaagaaaaggacgccgaggagattattgacctggctagcaaagcatctgttactgaccagcagaagcaagttcagggaaatgttcattatcaacttaagcatatatgcaaatcaatggataacattcttcgtcctgatacaaaagatccatcacaatcttcttctgatgcttataataattctcgacgaagtggcttgagtttggccgttgacacacgagttgcagctgcaaacaagccagctgttcctgctacgcgacctttaactcaagctgaattgtcaaacaaattcagggatcagtttggctacacccttgacatcaagccgtcactaatacctcacaaagatgcagggcaaggtctgttcttatctggagaagctaatattggtgctgtcctagccatctaccctggagttatatactcacctgcgtattatcgatatatccctggatacccaagaatcgatgcgtgcaacagctatcttatcacaagatatgacggaacaataatcaacgcgaaaccatggcatttaggtggtgaaacaagagaaatatgggatggttcagatccagtggattacaatacaacgccacccaaaagcccagagagcaactctgaccgggcgtggaggatgcttaacaagcccctgcagaagagtggcactgaaaacttcggggatgtgcttgaacggcgaaatccactagcctttggtcatttcgcgaaccacccaccgggagggtcgactcctaatgtcatgatctgcccatatgattttccactgacagagaaggacatgagagtatacatcccgaacattgcatttggtggtgaagagcccgttacaatgaagaggtttggctccttctggttcaagtccagagcccctggtaaagagactggggagtcaccggttctgaggacgctagtaagtacgaggtccgtatgtgacgaagagctctacctgaactaccggtacagctcaaaggggcggccagactggtataccccagtggatgaagaagaggataagaggagatggagctaggtctgaaccgacctgcctgtaatgttttgttccaatgtttctttcatcagtaactggtgaactccagaagccgattcggccattctttctatgtttcagtcaaccgcataggtagtgtctctgctgaactcttctcgcaggtcttttgtggcaataaaaagaacaccagttacgtctcatgttatttgaggtagtatctgtattatccatcccgttgttgtaaggggatatttacgagcttatcactcaatctgtgtcagcagtgccatacttatttgctttcggaatagtaacaagctatgccatattgccagcgaactgcttctcatctaaataaatactacctcagtaacttaatataagacatttttttgacactattacagtgtccaaaaaaaaaaaaaaaagtaacttaatataagacgttttttttaaaaaaaaaaagaaaaaaaacccnaaggggggg

SEQ ID NO: 5199 - DNA, 1609 bp, Triticum aestivum
  unsure (1)..(1609): unsure at all n locations
  Clone ID: TRIAE-23APR03-CLUSTER66028_1
gtcccacgctccctcttgcccccctgaaaacgaaccctctctcccaccatcctagtgcccccgccccaccacccgcgcagatcgccgcgtaccagcagagagagagagagcgaacgcgggtttgcctcccatggagaagggggacgggcccgccctccagcctctgctgtgcctcgcctggctcgccgccacgctccccatcctcgccgccgcgctccccatccccgcggccgccggcggccgcctcctccacagcctcctctccgccttctcctcccgcggcaagaccgtcaggccgtcctcctcatcctcctcctcctcctccaaggcgaagttcacagttccacagaagtacttcttgcatttctatgtggtgggagtagcggtgacaacaagcttgctgcttgcaatatgcttctatgcatatatgaaaatgacaccgctgttgccagagccatcgagttactccacaatcgctagccatcttattgggtcaaattcgttctcttttggcagtgtcctgtcgcgcaccatggaacacaagtaccgtgtctggcggactgtctttgtacttctattgatggaaattcaggtgctgagacgcctgtatgagactgaaaatgtgtttcactacagcccatcagctcggatgcacattgtaggatatctgacgggtctattctattacacggctgcacctttatctctcgctagctcttgtcttcctgaagcaatagattttatccgaggtcaaatagttgagttcatagtaaagggtcgtgcaagaatgccagacctagtcattgattcaccctctctcctaaagcctcttttaaagttggggtggtgccagtggataggtgctattgtattcatttggggatccctccatcagatccgttgtcatgcaattcttggatcgttgcgcgaaaataaagattctgatgaatatgttattccttgcggtgactggtttagtcgtgtgtcttgccctcattaccttgctgaactagttatatatttgggcatgttgatagctagtggtggatcagacatttcagtgtggttcctgttcatttttgtgataacaaacttgtcatttgcagcagtacaaactcataggtggtacctccaaaagtttgaagactacccccgctctcgctatgctatcattccatttgtattgtagcatctacaagcattccttctgtgcagtaaaaatctgtgtgttctggctagaatgcacaagcccggcatgtaaaagatattcatgtaaatgtgacagcatgtaagttaaaatgttgtgttgtgtgacttgaaatacttacaagggttctatttccagttgtaaattacgatacatactaaggtagttgggtcctgggtatgcagtaacctttatggacatatttaaggattagtagaaaataaagtcctcacagaaccggaagcatgccaaatttgacaactangctgatataagttccggactccaagaatccgacttacatggngtataacttataagtcatcttaatcatgttctgctgattaacaaaaaaaaaggggggcccgtaccaattcgcctanatgatccgatancccgcta

SEQ ID NO: 5200 - DNA, 1638 bp, Triticum aestivum
  Clone ID: TRIAE-23APR03-CLUSTER66030_1
atcccttcccccccgcctccacccctcccactgcccccacgcagcagcccgcgcccccaacccacccaacgcgccgccgccgctagggtttctccccctccccccgccgccgcccgcgcagagccccgaatctccctacccgcggcagccatgagcgacggcaaggacaccctcgacctctccgccctcggcgccgccgtccccaacgccgcagagctcagcgccgaggacaaggccaacctcgtggagtcgattaagaacacgctgcagggattggcggcgcggcacacggacgtgctcgagagcctggagcccaaggtcaggaagcgcgtcgaggcgctcagggagatccagagccaacatgatgaatttgaggcaaagttttttgaggagagagctgcacttgaagctaaatatcagaagatgtatgaaccactgtactcaaagcgtcatgatgttgtcaatggtgtggttgaggcagaaggcgtaaccaaagattcaggtgaagctgctccagatgagaaagaggaaaagggtgtgccagatttctggttgaatgcaatgaagaaccatgaaatccttgctgaggagattcaagagagggatgaggaagctctcaagtacctcaaggatatcaagtggtacagaattactgagccaaagggtttcaagcttgagttccacttcaatactaatccattcttcaagaatgaagtgctttcaaaaacgtaccacatgatcgatgaagatgaaccaatcctagagaaggctattggaactgaaattgaatggtatcctggaaagagcttgacacaaaaggtgctaaagaagaagccaaagaaggggtcgaagaacactaaacctatcacgaaaatcgaaaattgcgagagcttctttaatttcttcagtccacctcaagttcctgatgatgatgaggaaattgatgaggatacagctgagcagttgcagaaccagatggagcaagattatgatatcggatctaccatcagagacaagattattccacatgctgtttcatggtttactggagaggccgctcaagatgaggactttgatggcatcatggatgatgatgaagatgacgacgaagatgacgaggaggatgaagatgaggatgaggacgacgaggaagatgaagacgatgacgatggtgataagaagaagggcgggcgagttcctgcaggggaaggtcaggcaggggagcggcccgcagagtgcaagcaacagtgagatccttcccagacgaagactatttttcttggctgaagaatgtttggttctgcttgatgctatgtctttgagtttggttccgaggagccagtgggggattgattgagttgggttttgtggaagaaccggtggggggtttctttgtgggggacatggtattatatactggtagcatttcaattgttgtattgggttgaaatactttgtcccgctgctgcgagtgatcatcgatggtgcccgtttggtagtcctacttgttttgccgggaaattttgatgtactaggtatttgtgcgcgctacattcattgtttcaaaatgcatatctgcattgccttggccaaaaaaaaaaaaaaactgaaactaaacttgtgtcgaaaggcctgagc

SEQ ID NO: 5201 - DNA, 1596 bp, Triticum aestivum
  unsure (1)..(1596): unsure at all n locations
  Clone ID: TRIAE-23APR03-CLUSTER66044_1
aaccttgaccgcagccgagaaacctcgctaaaatctcgccgaggagggagagggctttggaattggcgccaaccattcgccaccgacgccatccccaccccccaagtcccccccccaacctcgccgccccgccgggctccgccccccccttgctgcgccatggcgggcgccaccgccgcccctccgctggacatcagcgccgccggcccgcccccggccttcacgggcaaggggccgctccccgccgccgccgccaccctcgcccgtgccgtgccgcccccagtaccggccccagtccctcgcccacgtcgccgccgaccacaacatcgacgagactactgaaggaagtaggcttacgaataggctgccccattggttgctttacggtccacatggcactgggaaaacatcgacgatacaagctgtcgcgaggaagactatatggctcaaagtatggcaacatgattctggaggctcaatgcatcagatgaacgtggaattggtgttgtcaggcagcagatacaggactttgctagtgcacacagcctctcttttggagcaaagcctgctgttaagttggtcctcttggatgaagcagatgccatgaccaaggatggacaatttgcattgcgaagagtcattgagaagtatacaaggagcacaaggtttgcactcatatgcaatcatgtgaacaaaatcatcccagcactgcaatcaaggtgcactaggtttaggtttgctccacttgatggctctcatgttactgagcgtcttcgacatataataaaatctgaggggcttgatgtagatgagggtggcttgactgcccttgttcggttaagtaatggtgacatgaggaagtctttgaatatattgcagtcaacacacatggcatcccagcaaataacagaagaagctgtctacctttgcacgggaaaccccatgcctaaagatattgagcagatagcgttttggttactaaatgaaccattttcaaccagcttcaaacatatagctgatatgaagatgagaaaaggtctggccttgattgatatcatacgggaggtcactatgtttgtgttcaaaataaaaatgccatccaatgtacgagtaaagttgatcaatgatttggcagatatcgagtatcggcttacctttgcttgcaacgataaactgcagcttggggcactgatctcgactttcacgactgctcgcacggctatggttgctgccgccgactaaattgaacaaaatggcccaccatggatgcctacatggatctggaaatgttgtggcagcttatttatcttctctgtatttagtttaaagcgcattgagcagaaaattttcatgttagatctgtctgtctgctcgacgtgctagctgcttgggaccttggaagggtttcagaactgaactgtaactgattgttgtcaggtttaggtgatgtatggacgtaaggtgcatgctacaatacatttctatgcagtagggagtcattcacaactcaaccaattaggttgcgcagtattgtcgngaaaaaaatcaagatgggcaattcttttnatcagctattaggttttgtaggtgcaaagt

SEQ ID NO: 5202 - DNA, 942 bp, Triticum aestivum
  Clone ID: TRIAE-23APR03-CLUSTER66115_1
accaagagatctctcccttcattttaaaagaggttgtgtgcatcatccaatcaaccctctctctctctcctcctagctagctagcttgttcatcttgttcttccaagtcttcctgctaggtctctcttcggggatatgagtgggaacaactttggggacagcatggggtggggcagatcgtccggctccaggaagggcaagagaggcggcagcagcagcggcggcagtggcgccgacaagccgaagcagccgcagcgggggctcggcgtggcgcagctcgagaagattaggttacagagcgaaatggctgagtacttccatcctcttggtggtcagccacccagcttgatccacagaacggccagcctcaatttggaggatacgcgggcgtcaacgtcctcgctctcatcgtccccatcgtcccccttccatgctaccgccgtctcgtcggccttcccggtccatccgaattttgggatggcatatggggagagaggagacgctcgatatggtgaattccagactcccatcgtaagatcaccaagcagcagcactatctacgggccaccacattacgcacatcctggtgtcacattgccactgtttgcaccagaggaatctacccgtctgagaaggcaccatgaccggagccggtcagctgattcgacgagtatgaattccgatgatccagaagacgtggatctcgagctcaagctatgatcctcaagtgttcttctccttacgttcatctctcctctgatcttatacgacagttcctttctttagcctgcatggggttttccttccttgtggtgcaataagtttctgaattggtgccactagctagaaccaaggatttgccagcttgtgtaatgcgcaaaagataaaaagagaggaatagcaattcacattattttttacgtcacaaaaaaaaaaaaaaaa

SEQ ID NO: 5203 - DNA, 1893 bp, Triticum aestivum
  unsure (1)..(1893): unsure at all n locations
  Clone ID: TRIAE-23APR03-CLUSTER66182_1
acgtaagattaaacaacgccggaggggagcggagaggggaaacaaaacaaaagcaattgccgtgtctccctccgcccggcccggcgattcggttccggccgcgcaaggtgcctcggttcgcttctggccttgctccgatccttggcctgcccgccccctccggccgttgccgtcgtccccagggttcgcccctcggctccaagcaagctaggtcaattgctatatcagccacacttgtaagcggtgaaggtcaccactagcccatgggcttgatgggcggcggggagcaccatgtgcagcaaccaggcagtgggggaacgcctgatgccgtcaagccaccaactccggtacacggtcataaaccgagcaacccccgtatatcaacctgcagcgccgacaaaggacgacggcctctctcgttgccgggtgtgccactgcgtggagcctgatctgagaggcgagtctgctctgggtttcctaggcattgtaccgccttcgccagacccctcggtcgacaaggacccaagcaatgacaccaccaaaacttccaccaccaaggatgctcccaagtttctcgagttcataagccccgagggggagatcttcaagtgcgccaccgacatcgaatcaggccatttgcagcggcaagacgatgtcgtgaacctcggatgctcttgcaagaatgagctcgccctcgcgcactacgcgtgcgcgctcaagtggttcatcagccacgggtccaccgtgtgcgagatttgcggaaatgtcgctacaaacgtgaggcccgaggatttcaacatggtgctcgcctccttgaaggactacgaagctctgagggaaaggacgtctaccggggatctctcctacttgcactacagggcggacgcgttcgtcgatccggtcgcccttgccgcagtacggagacagcggctttgtgagatatcatcatggttcaaccctcacaatacacatttcgtgttttctcagaggcacaatgaagaagtgccagttagcccaagtaataattctgtagactatagtgttacggctgcaagggcagcacatgcgaggcggaagtttgggagtagtggagcttttgttgctatcgctctgggttttgttcttcttgcatggtttgttgctccacatgttggcaagagagcggctgcaatcattcttcatatgcttctgggaggcctctgctcactgactataataatctcactaagatttgttagtcttcccgaggatccagtttgggtcgatacgatgctgggcgatcctgttcgtgtcctggttcctcgtgtttggagtgtgggcctctcgaacccgcaccgcccgccgcgcgtcatgatgatatcgagtgtgccctcagtcagtcgtcgtgaggaattaggaccgcgtcgcaagagtagcgtccacgagagcgttaggtaccgcacccctgtctatattcgccgcgagctataccatggacgtactattttttctttagctggagtatgtgagatgtacaacatgtttgggcaagaaaacaaggggagttatgttactgagtgttgtggtttcagacatagctggagtggtactggtctggccagtgttgcaaaacaatacagtaatgtgtgtaaaaaaaaaaaaaaaaaaatttaaacagtcgcccccccggggccgcccgtcccccgagtgggttcccgtgtaccctatttcgccctttagtgaggtcctatttacacgcggctggcttggnccgtccttttacaacgtccgtgacttgttaacacccttggggctacccacctttactcgccttgctagacatccccccttttccccagactgcggtagtggggagagaggcctcgccccgatagcgattgccacaggttgcgg

SEQ ID NO: 5204 - DNA, 1734 bp, Triticum aestivum
  Clone ID: TRIAE-23APR03-CLUSTER6639_1
accttcttccttcccccttccccgtctgacctttcccgtaagactttctctgcaagcccaaccctccccccggccccctctccccgatctcgggatggcctggcggtgggcgttggcgcggcgggttcccgcgctcgtcggcggcggcaccggcggcggcggccccggcccaggcgcagaggctcttctcctcctctcggcgccctcccggggaggctgcctccctgcgccgctcctccgattcggaacaaaggtggtggtgggttgcagaggtgctgctttcgtgacctcgcggtggctgcatgatgccacccaatgcccaggactcgccagggacggagtttccgagggctgaagaacaacaatgatcctatttgaagtggttgctgctgaactatcgattcttggaaatagactacggtccatggtggttgctgaggtccctaaactagaatcagctgctgaatatttttttaaagtaggagctgagggaaaaagattccgacctacggttttattgctgatggcatcagctctgaaattcccaataccagaatcgacagatgttggagttttcagtatattggcaagtaagctgcgcacacggcagcaaaacattgccgagataactgaaatgatccatgttgcaagtcttctgcatgatgatgttctggatgatgctgacactaggcgaggtgtcacttcattgaattgcattatgggcaacaagctttctgttttggctggtgactttctcctgtccagagcatgtgtggcacttgcagcacttgggaatacagaggtggtatctctaatggcaactgcagttggacatctagttactggtgaaactatgcaaatgtcaacaagcagagagcaacggcgaagtatggagtactacttgcagaagacgtactacaaaacagcatcattgatatcaaacagttgcaaggctgttgctattcttgcagggcacactgctgagatttcagtgcttgcatacgaatatggtcgaaacctgggtctagccttccagttgatcgacgatgttcttgatttcacaggaacctctgcttcacttgggaagggttcattatctgatattcgtcatggaatcattactgctccaatgctatatgcgatggaagaattcccacaactacaagatgtcgttgaccagggttttgacaatcctgcaaatgttgagatcgccttggactacctccagaagagccggggaatcgaaagaacaaaagagcttgcgcaagaacacgttaaccttgcggtcaaagccatcgaatctctcccagacagtgacgatgaagatgttctgatttcaaggcgcgctcttattgatatcacacagagagtcatcacaaggacaaaatagcatgattatacacagggtggagaagataaggcggagtttcgccacaggtgtagtgttccgcttggaaatttttggtcgccttggtcattgcattctttccattgcccgggttttgtgtaacatttgatgagacttcagggtaaccattcctgggaatcatcctaagtcgcagctgtagtggttttagttactggtggcagcagaatctgtgtattaatatcacgattggcgattgcacgatgacctgatcataagactgtaaccttataaatcgaagtatgtaacactatatacgaggaaaaagtaacctgcttgtgttgagataaaaaaaaaaaaaaaaaagc

SEQ ID NO: 5205 - DNA, 1142 bp, Triticum aestivum
  Clone ID: TRIAE-23APR03-CLUSTER66411_1
gttccccaccttggtcctctctctctctctctctctctctctctctcaaccgctgccgcgagcccgtgtgagagagatggggagacgccgagccggcggcggggggcgcggaggaggcagaggtcgaggccgaggaggagaaggacggggtggaggagaggaggaggatctgcagctgcacaaggccgcgaggtcgggtgatgcggcggcggcggagtccctttgcgagtccaaccctctcgccctcaactccagagaccgcctctcccgcaccccactccatctggcggcatgggctgggcatgttgatgttgtgaaatgcctttgcaagcacaaagctgatgtcggggctgcagcaatggatgacaccgccgcaatccattttgcttcccagaaaggtcatttggaagtggtgcgtgagctgctggcgtcgggggcctctgtgaaagcaaagaacaggaaaggcttcacggcgttgcactttgctgctcagaactcccacctggatcttgtgaagtatttagtgaggaggggcgtggacatcacaacaaagacaaatgcagggcaaacggctctacatgttgccgagaatgatgatgtgcgtgctttcctgaaagagtgtgagcagtcactgaagaagggagtggagctaccatccgagaagaaggatgattctgtagctgagaaggctgatgacggcaaggtctcaggtgaagatagaaaagatggtgttgatgcaggacagggcgagaagaggaagagtgaggagattggtgctgggacgaggccgccggaggtgaagaaggccaaagtttcactttcgcatcttgagaacgacatggaagaagaggatgaagcagacgaatagaatcgaatagcctccagaatgccctttgatggtgccaacctgtttgctgtgttatccattgttcttttggcaattttggaatgttggcaagcaagtgtaagagttttagctgtccatgggcatgttatccgtatcatagttgttgaccagcagtactatgttttgatcaagtagcttatgatgatgatttactactgattcccttaaaccaagatgattttactactgtgagtaagcttattaagtgctgtggtttttaattttgatggaatat

SEQ ID NO: 5206 - DNA, 998 bp, Triticum aestivum
  Clone ID: TRIAE-23APR03-CLUSTER66436_1
gcgatctgcaacgacctggacgaccggcagtagggcacgccacccttcccctcccctcaaatttttggggcgccgacgacccagcgcggtatcccgcggtcgggattgggggtggaggccgctgccgatcccctgctggatctctttccaacaatattcgacgacctccccctcgatctggcgtcccatcgtcaacgcctctgttgtcccacgttgccacctcgaccgagccgccgtccacacatctgattggtcctagtggacgccggccaccacggcatctggacggaccccctcctctcctcactcttctccatggacggttgcgcacagtcaccatctccagcgcgcgatttcaacagaaggagtccggggagtgcctctctctcaccactgtggggttcccaacaaaagggcttgcagtttagagaacatttttttgtgtatttttccagattattgctgttgatttgagtgaattcagtttctaatgaaatttgttaattctgtcagtgtagttcggctggcgccggcatgaggttcacatgtacatggtagcttggatgacttggcattgcacgtcgtcatttgttgtggtgccatgcgggtgtgtgcggcgtgcaactcggagcaagcaggcatgcagtttagaccgttgtttgtggattttttgtctgtcaaatgtatccggttgggatataatgtattgtgtgtaaaaactatttgttgagaagtttatttcaacaagcattaaatagttcattttcaatgcttaggtttcaggcttcctgaaatgatcaaaggagcacgatgatgtataaacagctagctagaacttgcatctgaagagccgtctggaaactgtattgagacaaggctatgtgttattttgcgatggcacagtagcaccactattgtacattttgcaactcatggacatttgaacattaatacatacggttcactgactatcatattggcaccacatcacatagttt

SEQ ID NO: 5207 - DNA, 1572 bp, Triticum aestivum
  Clone ID: TRIAE-23APR03-CLUSTER664_1
aggcacctacccttctccccctccactccgcgcaggagcttccccgcagattccgctcaaggcaaggcaggcaggagctagctcggggacagcgtcgccgggagagctcgatcgctgcaccactacatcactagagatagcccatggaggagatcggccaccacttcgggctgggagccaccgcccacggacagcaccacagccagctcccatggggctcttcgccgctcagcgccgtcatcgcgccgcccccacagcaacagcagcagcagcagtccgccggctatctggcgcacagccctctctccctgaacacggcgccgcccagtggaagccacggcggcggcagcgggtgtagcaacccggtgctgcagctggccaacggcagcctcctggaggcgtgcgccaaggcggccaaggagccgtcgtcgtcgtcctacgccgccgacgtcgaggccatcaaggccaagatcatctcccacccccactactcctccctcctcgccgcctaccttgactgccagaaggtgggggcgccgccggaggtgttggcgaggctgacggcggtggcgcaggacctggagctgagacagcgcacggcgctcggcagcttcggcaccgcgacggagccggagttggaccagttcatggaggcgtaccatgagatgctggtgaagtaccgggaggagctgacgaggccgctgcaggaggccatggagttcctgaggagggtggagacgcaactcaactccctctccatctccggcagatcgctgcgcaatatcctttcctccggctcttccgaggaagatcaagaaggcagcggaggagagacagagcttcctgagattgatgcccacggcgtggaccaggagctgaagcaccatctcctgaagaagtacagtgggtacctgagctccctgaagcaagagctgtcaaagaagaagaagaaagggaagctcccgaaggatgctcgccagcagctcctcagctggtgggagatgcactacaagtggccttatccctcggagagccagaaggtggcgctggccgagtcgacgggcctggacctgaagcagatcaacaactggttcatcaaccagaggaagcgccactggaagccgtcggacgagatgcagttcgtgatgatggacgcgtaccacccacctaacgccgccttctacatggacggccacttcgtcaacgacagcgggctctacaggttcggctagcttggccaggcctcgtctcttactggtgaccttggtcggtgccaatggcggcgaccgagtgccatatgctgaagcactaggttaccgacgaccgaagctagttaagttagcgtttgtgtgccgcatgcgagctggaaggaggccgcatgcttattttgtttatcatcactacttatacctacctacctatcatttatgcatggactcgatcgcttttgtgtggttttgtagcgattgacgcgaccatatggacaaccgcctgtttgctgcgacatgccttgctacgtgcatgcttgaataatttgccttctctctaaaaaaaaaaaaaaaaaaaaaaaaa

SEQ ID NO: 5208 - DNA, 1555 bp, Triticum aestivum
  unsure (1)..(1555): unsure at all n locations
  Clone ID: TRIAE-23APR03-CLUSTER6651_1
aaaccaaaacccgcaacccgtcccaactcccctccgagcggaggggaagaagggtagagtcggtccgcgccggccaaggaagatgaatcacgcggcggacacgttgcgggcggacctgatcagcatccacgcggcgcgtgctgaaggagcgatgccggcacccggggacgcgcggcgaccgcaccagccgcctctcccgcatcgtgctctggccgcaagttggtcgcccccggcctgccaagaaaggccggcctcgccaagctcaccggcctcgccggcgagaccaacgtccgagggggtcggcagcaaaaccagcctggacgtgctcaccaacgaggtgttcgacaacaccctcgacgggggcggccgcacgtgcgtcgtcgtgtgctgccgcggacgatatctcgaggctctccggacccgaagctccagttgggtaagtactgtgtctgcctgaagaccctggaaatggatcctccaagcactcgagcggcggcgtcatccaatgagggaacgctcgcgttgggatcccacagggatctaacgaagccaatgacacccgtggactcgtggagcaaggaactgaccccctgggcaagggggcatgcatcacgccctgctcccacagcgtgatacggatgccagcgtctttcacccgtaacccaacaactgcagacttcgtcaaggccatcagactcgccagggcgcccaaagtcctcgggaacgactaggataagcaggacgttctctccaacgaggtcacagaccaagcgcagggtaggaggggcaactgcaggtatcccacggatggttcatcacccaaatccattgaaatacattggcagcatggttgctgatgaccaccgcaccttgctatacggcggcatattcctgtaccccgcggacaagaagagcccgagcggaaagctccgtgtgatgtatgaggtgttccccatgtcattcctgatggaggaggctggaggccagtctttcacaggcaaaggacggtcgcttgacctgatccccaccgacatccacgagagatccccgatattcctgggcagcagcgacgacgtggaggagatcaaggcgctgtacgcggaggaagccaagaaggaaggatctgcatgatggtcgaccggtcgtcgcgcgcaaggcgtgtgaatcgatgacgactcgtgggccttgctgacaatgtgattcgaatgtcaggcatttcttttctatatatacgtctgtgtcattcagtgtaatatagcgtggaggccttgaacagcttcactcgtgagcagccaaggcttctgcttctttccacaattcgttcactgatgatacgtaatatacatccatgtatacatatggcacgtaatatacctccataactacaatttccaaacaatccattttaaagacaaacaactccctgcgtcgggtgcgtttccatctcgactatttcagagccgactcgtacatgccaaaggtctcagcctgagtggctggcgcggttggcgaagccatgtagtacaagcttggagtcaatnactacacagttttt

SEQ ID NO: 5209 - DNA, 1980 bp, Triticum aestivum
  Clone ID: TRIAE-23APR03-CLUSTER66573_1
gtcatttcattataccacaccaaaaccagcaccagcacacggcataccacaagcagcagcagcagccgccgccgtggacttcgacgctcaagtactcgagctctagcgcttcgctctctagcggctctcgcacggatcaaagccgatggcgacggcggtccaccagctctcgttctccgcgccgggcgcgggcggcagggggcggcagagccgggcgtccgcgtccgcgtcgcacgacggaccggcgacgaggtggtatccccgaatcgcccgggtgccgctgccgaaggtgccgggcgagcacggcccgcggccgctggggcgcgctcgaggaccggctcgagtacttctacgcgcccggcgggcgcgacggcttcttcgcggcccgcgtccgcgcgcaccgctccacggtggtgcgcctcaacatgccccccggccccttcgtggcccaaggacccccgcgtggtggcgctcctcgacgccgcctccttcccggtcctcttcgacacctcgctcgtcgacaagaccgacctcttcaccggcaccttcatgccctccaccgacctcaccggcggctaccgcgtgctctcctacgtcgaccccgccgagcccaaccacgcgccgctcaagtcgctcctcttccacctcctcacccaccgccgccagcacgtcatccccacgttccgcgaggtctacggcggcctcttcggccgcatggagaacgacctcgcccgcgtcggcaaggccgacttcggcaactacaacgacgacgccgccttcggcttcctctgccaggcgctcctcggccgtgaccccgtcgactcgccgctccgcgacgaagggcccaagctggtagccaagtggcttctgttccagatcagcccgctgctcagcctcggcctggcgggcctgcccaccctcgtggaggacggcctcctccacagcttccgcctcccgccggcgctcattaagaaggactacggccgcctcgccgacttcttccgcgacgccggcaaggcggtgatcgacgagggcgagcggctgggcatcgcgcgggaggaggcggtgcacaacatcctcttcgccatgtgcttcaactccttcggcggcatcaagatcctgttcccgtcgctggtgaagtggctgggccgcgccggcgggcgggtgcacggccggctcgcgacggaggtgcgcgccgtcgtgcgcgccaacggcggggaggtgacgatgcgggcgctggccgagatgccgctggtgaagtcagccgtgtacgaggcgctgcggatcgagccgccggtggcgatgcagtacgggcgcgcgaagcgggacatggtggtggagagccacgactacgggtacgaggtgcgggagggggagctgctgttcgggtaccagcccatggccaccaaggacccgcgcgtgttcccgcgcgccgaggactacgtgcccgacaggttcctgggcgaggacggcgagcggctgctccggtacgtggtgtggtccaacggtcccgagtcggcgacgcccacgctgcaggacaagcagtgcgccggcaaggacttcgtggtgctcatcgcgcgcctcctcgtcgccgagctcttcctccggtacgactccttcgacgtccaggtcgggtcctcgccgctcgggtcgtcggtcaccatcacatcgcttaagaaggccaccttctgaggcatcgccacgtgtactcatttttttccctctgcttttctcgatcgatgccagtattacaccatgcatgcgatacgctagcatggagtgatagaggatttgtgcaacaaaaatttcttttcctagcaaagatgagcccgatttttcccaaaaaaaaaaaaaaaattgggatgtttttgccaattagtcagtgagatgaaaggggacatgtactcctactaccttactgatcaagctggttatccaccgtgggttggtggcactttctacaaggaccgatcaagatct

SEQ ID NO: 5210 - DNA, 713 bp, Triticum aestivum
  Clone ID: TRIAE-23APR03-CLUSTER66613_1
attccgaccgaaggacacgactccggtagccaggtaacggcggccgacgggagagcagaggagacgacgcggcggaggagaagatgggcgaccagagcctgagcctgggcatcctcatcgacatcgtcgacgagcagtggatgcgcgacaccctccccgccgacgatatccccgtgccgccggcgatggccgtgaagaccgaggacaccgaggacccggcacccgcaagaattattttatacccaacagatcaggaaagccagccagcacaaggggacgtatggagggattttgccttggagaatatctaactgcttatgatctacaagtgcttcaaggaatcaagatgctgctggaattctaggagctgcacggcgtactctgtagatgtttcttaaatccagtggatgaactagtgttgtgtctctgcttgaactgtactgtgtcatggcaatatgtaaatgctccagatattggtagcatgatgatggaattggacattgtcagaaactagattatgtagcctgttcttaattctggaggcgataatttgagctggttggctatgtatggatttcctggcatagaacatttgcttgctattgtttcttgaaactaaataaaaaacctcaccccgcttggccgcctccgcctcggatggttgaaacatgaaggcattcttaaaaaaaaaaaaaaagtcgacgcggccgcga

SEQ ID NO: 5211 - DNA, 2887 bp, Triticum aestivum
  Clone ID: TRIAE-23APR03-CLUSTER669_23
cctttccattcttacggatcgggagcgccgccgcttacccacctctcgtctttcggcgaacccccaaggaactatattcccagcgtgatatccaaaaccagtcaagatggtgaagtttactgcggaggagctccgcggaattatggacaagaaaaataatattcgtaacatgtctgttattgctcatgtcgaccacggcaagtctacgcttacggattcccttgtggcagctgctgggattatcgcccaggaagttgctggggatgttcgcatgaccgatacccgtgcagatgaggcagagcgtggtattacaatcaaatccacgggtatctctcttttctatcagatgactcctgaatcacttgagatgtacaagggcgacagggatggagatgaatacctgatcaaccttattgattcacctggccacgttgacttttcttcggaagtcacagctgctcttcgtatcactgatggtgctttggtggttgttgactgtattgagggtgtctgtgtgcagaccgaaactgtgctgcgccaagctcttggtgagaggattaggcccgtcctcaccgtgaacaagatggacagatgcttccttgagcttcagtttgaaggtgaggaagcatatcagactttctcccgtgtcatcgaaaatgccaatgtcatcatggcaacatatgaagatgtgctccttggtgatgtccaagtgtacccagaaaaggggactgttgcattctctgctggtttgcatgggtgggctttcacccttacaaactttgctaagatgtatgcctccaagtttggtgttgatgaggtgaagatgatggagaggctgtggggtgagaacttctttgacccagccacaaagaaatggaccaccaagaacactgggacagctacctgcaagagaggttttgttcagttctgctatgagccaatcaagcaaatcatcgccacctgcatgaatgatcagaaggataagttgtggcctatgttgaagaagcttggtgtgaccatgaagaatgatgagaaggacttgatgggaaaggctctcatgaagcgtgtgatgcagacttggctgcctgccagtcgtgctctgcttgagatgatgatatttcacctcccctctccttcaaaggcacagaggtatcgtgtggagaacttatacgagggcccccttgatgatgtatatgcaaatgctatcagaaactgtgaccctgacggtcctcttatgctgtatgtctccaagatgattccagcatctgacaagggtagattctttgcctttggacgtgtttttgccgggagggttgcaactggcatgaaggtccgtatcatgggtcccaactttgttcctggccagaagaaggatctgtatgtgaagagtgtccagcgtactgttatctggatgggaaagaagcaagagtctgttgaggatgttccctgtggtaacactgttgctttggttggtttggatcagttcatcaccaagaatgcaaccctgacaaatgagaaggaagttgatgcctgcccaatcagggcaatgaagttctctgtgtcccctgttgtgcgtgttgctgttcagtgcaaggtggcttctgatcttcctaagcttgttgagggtttgaagcgtctggccaagtctgatcctatggttctctgtaccattgaagagtctggtgagcatatcattgctggagctggagagcttcaccttgaaatctgtctgaaggatctgcaggatgacttcatgggtggtgctgaaattattgtttcccctcctgttgtctccttccgtgagactgttctggagaagtcctgccgtaccgttatgagcaagtcccccaacaagcacaaccgtctttacatggaagctcgcccgttggaggagggattggctgaggctatcgatgatggccgcattggcccgcgtgatgatcctaaggtgcgctccaagatcctgtctgaggagtttgggtgggacaaggatctcgccaagaagatttggtgctttggacctgagacgactggccccaacatggttgttgacatgtgtaagggagtgcagtatctgaatgaaatcaaggactctgttgtggctgggttccagtgggcatcaaaagaaggagcattgtgtgaggagaacatgcgtggtatctgctatgaggtctgtgatgttgttctccacactgatgctattcacaggggtggtggtcaggttatcccaacggcgaggagggtcatttacgcttctcagctcactgccaagccaaggctgctggagcccgtgtacctggttgagatccaggccccggagaacgcacttggtggtatctatggtgtgctgaatcagaagagaggccacgtgttcgaggagatgcagaggcaaggtaccccactctacaacatcaaggcctacctgcctgttatcgagtccttcgggttctcgagcaccctgagggccgcgacgtccggccaggccttcccccagtgtgtgtttgaccactgggacgtcatggcctccgatcctttggaccctggcacccagtcggcgacgctcgtgacggagatccgcaagaggaagggtctcaaggagcagatgacccccctatccgacttcgaggacaagctctaaattttggggcttcgaggacaagctctaaattttggggccatgttttggtactggctcttgctgtgaagggaggcgcggtatttttctccctatgtgtcttccttactatgttgttgtttgtatgtggtgctactgagactatggttttgatgatggttgtggtgatgtaacagatgttaaacttagatcatacatttctggcatcccatggtggtttatttttaaaaaaaaaaaaaaaaaaggccccta

SEQ ID NO: 5212 - DNA, 2932 bp, Triticum aestivum
  Clone ID: TRIAE-23APR03-CLUSTER669_28
gttcttccttcacccctgcttccattctcttcctccgggagcgccgccgcttgctcatctcccacctctcgcctcgggagccggaagcgaaaccccacggtactatagtcccggtgtgacattcaaaagcagtcaagatggtgaagttcacagcggaggagctccgtggaattatggataaaaagaataatattcgtaacatgtctgttattgctcatgttgaccatggcaagtctacgcttacggattcccttgtggcagctgccgggattatcgcccaggaagttgctggtgatgttcgcatgactgatacccgtgcagatgaggcagaacgtggtattacaatcaaatccacgggtatctctctgttctatcagatgactcctgaatcacttgagatgtacaagggtgacagggatggggacgaatacctgatcaaccttattgactcacctggtcatgttgacttctcttcggaagtgacagctgytcttcgtatcactgatggwgctttggtggtkgttgactgtattgagggtgtctgtgtgcagacygaaactgtgctgcgccaagctcttggtgagaggattaggccwgtcctyacygtgaacaagatggacagatgcttccttgagcttcargtggaaggtgaggaagcataycagactttctcccgtgtyatygaraatgccaatgtcatcatggcaacatatgaagatgtgctccttggtgatgtccaagtgtacccrgaraaggggactgttgcattctctgctggtytgcatgggtgggctttcacccttacaaacttygctaagatgtatgcctccaastttggagttgatgaggcraagatgatggagaggctttggggtgagaacttctttgacccagccacaaagaaatggacctccaagaacactgggacagctacctgcaagagaggttttgttcagttctgctacgagccaatcaagcaaatcatcgccacctgcatgaatgatcagaaggataagttgtggcctatgttgaagaagctgggtgtgaccatgaagaatgatgagaaggacttgatgggcaaggctctcatgaagcgtgtgatgcaaacttggctgcctgccagtcgtgctctgcttgagatgatgatatttcaccttccctctccctcaaaggcacagaggtatcgtgtggagaacstgtacgagggtccccttgatgatatatatgctaatgctatcagaaactgtgaccctgatggtcctcttatgctgtatgtctccaagatgattccagcatctgacaagggtaggttctttgcctttggacgtgtttttgccgggagggttgcaactggtatgaaggtccgtatcatgggtcccaactttgttcctggccagaagaaggatctgtatgtgaagagtgtccagcgtactgttatctggatgggaaagaagcaagagtctgttgaggatgttccctgtggtaacactgttgctttggttggtttggatcagttcatcaccaagaatgcaaccctgacaaatgagaaggaagttgatgcctgcccaatcagggcaatgaagttctctgtgtcccctgttgtgcgtgttgccgttcagtgcaaggtggcatctgatcttcctaagcttgttgagggtttgaagcggctggcgaagtctgaccctatggttctctgtagcattgaagagtctggtgagcatatcattgctggagctggagagcttcaccttgaaatctgtttgaaggatctgcaggaggacttcatgggtggtgctgaaattattgtttcccctcccgtcgtctccttccgtgagactgttcttgagaagtcctgtcgcactgtcatgagcaagtcccccaacaagcataaccgtctttacatggaagctcgcccattggaggagggattggctgaggctattgatgatggccgcattggcccgcgtgatgatcctaaggttcgctccaagatcctgtctgaggagtttgggtgggacaaggatctcgccaagaagatttggtgctttggacctgagacgactggccccaacatggttgttgacatgtgtaagggagtgcagtatctgaatgaaatcaaggactctgttgtggctgggttccaatgggcatcgaaagaaggtgctctggctgaggagaacatgcgtggcatttgctttgaggtctgtgatgttgttctgcacactgatgctattcacaggggtggtggtcaggtcatcccaacagccaggagggtcatttacgcttctcagctcactgccaagccaaggctgctggagcctgtgtacctggttgagatccaggccccggagaatgcacttggcggtatctatggtgttctgaatcagaagagagggcacgtgtttgaggagatgcagaggcctggtaccccgctgtacaacatcaaggcttacctcccggtcatcgagtcgtttgggttctcaagtaccctcagggcggcgacatctggccaggctttcccccagtgtgtgttcgaccattgggacatcatgtcttctgatcctttggaggccggctcccagtccgcgacccttgtcacagagatccgcaagcgcaagggtctcaaggaacagatgacccctctatctgatttcgaggacaagctctaaacttttgcttctgttacatggtctagtttgcttttgctgctaagagagctgcactattatctgtctattgagtcgtcgtcgctgtattgctattggaatgtactcctatctgtcgtgatactggcactttgttttgatgtctgtcgatgttaaaacttagattatatatctgtcgcgatacttttgatgtctatcaatgttaaaacttagactataaaaaaaaaaaaaaaaaaaaggaaaaaaaaaaaaaaaaaaggccccta

SEQ ID NO: 5213 - DNA, 3300 bp, Triticum aestivum
  Clone ID: TRIAE-23APR03-CLUSTER674_1
ctggagtcgttctccctccatccctccgctcgcctctgcccagccacagccagagccagggccgtcgccgcccgcgccacgccactcccaacatctcccgcgctgctcttcccaagaaaacaaacccaaaccagcaacgcaagtagggaaagaatccgagtccgacccagacttttttaacaactacgcgccgcgccgcaagattccgtggccctccgtccgttaaacccgcccggcccggcggcggggtccggtgagtgagcgagctaggcgccgcaatgtcgtcgaggtccggggccgccaggatgcgagcgtgcgggccgtggggcgagggcggcagcggcgtcgtcggggacgcgcacgcgctcgagagggagatgtcgcgggacggcagccactacagcctctccagcggcatcctgccgtccctcggcgcgcggagcaaccgccgcgtcaagcttcgccgcttcatcatctcgccctacgaccgccgatacagattgtgggagactttcctcatagttctcgtggtctactctgcgtgggtctccccattcgaatttggcttcattcggattcctacgggaggcctagctgcgacggataatgccgtgaatgcaatcttcgcagttgacatcatcctgaccttctttgtagcttacttggacagactgacctatttgctggaagatgatccaaagaggattgcttggcgttatgctaccagctggttggttcttgacgttgcctccaccatcccatcagaaattgctcgcaggatgctaccttcaaagctcagatcatatggattcttcaacatgcttcgtctatggcgtctccggagagtcagctctctctttgctagattggagaaggatagacacttcaattacttctgggttcgatgtgcaaagctcatttgtgtcacactttttgccgtgcactgtgcagcatgcttctactatctccttgctgataggtacccggacccaaaggaaacatggattggcaataccatgccagattttcattccaagggcttgtggattcgctacgtaacatcagtatattggtcaatcaccacacttaccactgtgggttatggggattatcatgcggagaatataagggagatgattttcaacattttctacatgttctttaaccttggactgactgcttatttgattggcaacatgaccaacttggttgtccatggcaccagccgtactcgaaaatatcgggatacaattcaagcagcaaccagctttgcacttaggaatcagctaccacctcggttgcaagatcagatgatatcacatcttagcttaaagttcaggacagattctgaaggtcttcaacaacaagagacacttgatgcgctgcctaaggctattagatctagcatttcacaatatctgtttctcaatctggttcaaaacatttacttgtttcaaggagtatctaatgatctgatttttcaactggtttcggagatgaaagccgaatattttccacctagggaggacgtcattttgcagaatgaagcacccactgacttctacattttagtttctggtagtgtggaattagtagaggttccaaatggtgcggagcatggtgcagaacaggtggttggagtggccaagtcaggagaggttattggagaaattggggttctttgctataggcctcaactattcacagtccggacaagatccttatgtcagcttctacggatgaatcgtacggcctttctcagcattgttcaatccaatgttggagatggaactatcataatgaacaaccttattcagttactaaaagagcagacagacggcgtaatggtgggtgttctgaaggagatcgagagcatgctagctcgaggccgtctggatttgccaattacactctgctttgcagtgactagaggagacgaccatttgttgcatcaactacttaagcgtaatttggatccaaatgagtcagatcaagatgggcgtacggcactgcacatagctgcttccaaaggaaatgagcaatgtgtcaagcttctattagaatatggagctgatccaaatgccagggattcggaaggaaaggttccgctatgggaggctgtgtatgcgaagcatgatacggttgtgcagctgttagtcaagggcggtgcagaactatcatctggggatacgagcttatatgcttgcaccgcagtcgagcaaaacaatatagaactgctcaagcagatactcaagcatgtcatcgatgtaaacaggccatccaaagacggaaacattccgctgcaccgtgctgtctgtgacgggaacgttgagatggttgagttgttactgagacacggagcggacatcgacaagcaggacagcaacggctggaccccaagggctctagctgagcaacaaggccatgaagaaatacaaaacctgtttagatcagtgatagcaccaaggaagtacacatcaaatggtagggtgacacctatgttgctaggcaggttcagcagtgatccctcgatgcaaaaagtgatccatgaagatgttgagcagcaacccagcaaagttcttccgcaaagaaggaaagtcagcttccacaactctctttttggtgtcatctcttcggctcatccgcgccgggagactgaccatctgctctcaagaggtcttgcggcaacaggcggtccgacttatcctcaggcccatcacaacccactcatcagggtgacaatcagctgccccgagatggggaacactgctgggaagcttgtgatcttgccggggtcgataaaggagcttcttcaactaggtgcgaagaagtttgacatgatgcccactaaggtcctgacaattgagggcgcagaagttgacgaggttgagctcatcagagatggtgatcaccttgttctcgccagtgatgactgggtaccagatgatacgcaaataagaggtaaaaattaggcagagaattacgttttccggtttactgtaatttgggtaaaacggggaatgttgaaccacgcttgtaacaaaaaagccaatggtgaaaaaataactggaaatcaccaatggctactccacgactcatctccaccacgtctccaccgtgataaagatggtgaaatagggttatgcccagcaggtgaaattaataatctttttgaagtggtatagggtataccttgtatagaaattcttgtctgctgggcatgcagaattttcattgtatagaaattcttgtctgctaggcatgcagaattttcaaaaaaaaaaaaaaaaaaaaaaaaaa

SEQ ID NO: 5214 - DNA, 1560 bp, Triticum aestivum
  Clone ID: TRIAE-23APR03-CLUSTER6759_1
cactaggaacaaaaagaaaaaagaaaaagaggaaggaaggaaaaaatctcccggggcgcaagcaaacgtgacgccacggctcactccggccttcgtcgtcctcctcttcctccccccactttccccacaatagtttggcgatcgctcgctgccgccgccgcgaccgcgactgaagcctctgctccgctccgctccgctcgccgctggaagatggagcctgaccagagtggcaccgggcagacttctccccgtgggaacgactgggaggtcgtgcagctcaccgcgtcgaactacgcgtctgcgcctggcccggctagaactgaaccttctgacgaggagtctgaaggccaagtgtatggcgcagaagggggtgattcggcagccgcggcactgctgatgtgtggccacttctcggttccgcagaatgaggctgagaatctcctcatgggagctgatactagcatagagcagcaggaggcgcgcggcagccagtacgcagtctctgacaagggtgatgatggtgatagggaggaagagccgcaggagaaactgaaggatgatgttcttgacaggatcccgtccttcgacaaagggaaaagccttccctctgttcatccagaattcgttgcttccaggtcgaggaaaacaagccgtacggttctggaaccccacgcaacgtgtggtggccagaagcaacttatatcgctctacaggagcgctaaagagagcaacaagctctggcctatcgttgtggctgctgctgctctgatggggatggcgtatttccggcggcgctggcagaagggcaagctgcagcttcagcaggtcaaattgcaacctgccagcagcaaggagagaatcaaccaggccaccgtaccgcttaaccgaatcaaggacattcttgtcgctggcaaccacccgagtccggctactcacggaaatgctcggttgggctgatgatgataaccatcccgcctgacggatgatgtatcctgaaactagtgtatgcaatggagaaatacccgatgccgcagaacgtatgggcgtttatgcgtgctggctgtgtaattaaaccccaaaaccacccccgggcatgtagctccacacgggtattctctggttgctttccgatgataaccatccagcctagacggatgatgtatcctgaaactagtgtatgcaatggagaaatagccgatgccgcagaacgtatgggcgtttatgcgtgctggctgtgtaattaaaccccaaaactcctcctgggcatgtaaatatacacgagttttgtgtggttgctttccctcctttggaagaactctctccttggccaggttcagtgtgctgctgcttcagtttgtcggccactgtaacttcttccgttgctcccgtggatattttttatctgtcttgttgcgggttgcagtttgtcaggttgtcggccgatatatacacgatgaacttatgatattattgggtgccgaatttttggtttgtgttaaaggaaattttagcctatatatagttgagattacatttgggtccacaaaaaaaaaaaaaaaa

SEQ ID NO: 5215 - DNA, 877 bp, Triticum aestivum
  unsure (1)..(877): unsure at all n locations
  Clone ID: TRIAE-23APR03-CLUSTER676802_1
atgatccctacatatatatncaaccagatggtgatggttanagggactgtggtattcccagcccatcagggttcaaatcctgatgctcgcatttatttctggatttatttcaggatttccggtgatgcgcattcagtgggaggagacattcccgttgatgacgaagtgcctacgacgacttcgtaaatttcaagatgatatggcggctcagtcttttggaggtgctctcaatagttagcatctgcacgttgcagtacagagaggattatccctttaattataaattaattaaatcctaacaggtccaagtagagcctgcaaaatgcaagttccgataacctgttggccaaagcaggcatccgcaccttgaggcctcctttggtttgtaggaactctataggataggatttgcaaaggaaaaattcctttgaagccctttgatttataggaatggatttctgttcctatgtaggataggaatcaatccttcacattttggaggaaaaaaaattaggctagactctgtggaaaaattcctatcatatgcaccaaatggtatctctttctttaaaggaattgagatgcctgtcatctcacttcctatgattttcatattcctataaaattcctatcgtatgaaccaaaggaggcctctggtggagtacagtactactgtagctagcaggacagttggtacagtagttttcttcaagaagcggaattcaacgaagtcatgatggttccttcgtccgagcaacttcacagtgggaaaggttgggcctgtgatttgatggctcattcgtcattattactgcggcgtgacgaccggggggactctcccttggagttctgcgtgcatggcaagtggaccaggatg

SEQ ID NO: 5216 - DNA, 1726 bp, Triticum aestivum
  Clone ID: TRIAE-23APR03-CLUSTER6774_1
aactcttacatgcgggtcccactgtcagtaacaaatcatctcgatccatccaagcagcaagaggatatacccaacaaggcccaggcccttccccccaaccccgcccgaactgccctcactcccgatcctctccgacgacgagatgggctcgatggagctgtccaccgcgccggagaacggcaccgcggcggccgccgcggcgtgcaacggcggggccgccccggcgaacggaggggtcgagaggaggctgagatcctcggccgcgtccgcgtcctgggcggcgcatctgccgctggaagtggggacgcgcgtgatgtgccggtggcgcgaccagaagccccaccccgtcaaggtcatcgagcgccggaagtccgccgcctcctcctcccccgccgactacgagtactacgtccattacaccgagtttaacaggaggttggatgagtgggttaaacttgagcaacttgatcttgataccgtcgaggctgatgttgacgagaaggtagacgataaggcaacaagtttgaagatgacacgacaccagaaacgtaaaatcgacgaaacacacgtggagcaaggtcacgaggagcttgatgctgctagtttgcgggagcatgaggagttcacaaaggtgaaaaatatagcgaagatagaacttgggaaatatgagatagatacctggtatttctctcctttcccaccagagtacaatgactctgcgaagctgttcttctgtgagttttgcctgaacttcatgaagcgcaaagaacagcttcagaggcacatgaagaagtgtgatcttaagcatcccccgggtgatgaaatctacagatgtggaactctatcgatgtttgaggttgatggcaagaagaataaggtttatggacagaacctttgctatctggccaagctattccttgatcacaaaacactctactacgatgtggatttgttcttgttctatatcctgtgtgaatgtgatgatcggggatgccatatggtgggatatttctccaaggagaagcactctgaggaagcttacaacttggcctgcattctcactctccctccataccaaagaaagggttacggaaagttcctgattgctttctcttatgagctttctaaaaaggaaggtaaagtgggaacaccggagcgtcctctctcagatcttggtctgctcagttatagaggctattggactagagtacttctggaaattttgaagaaacataagagcaacatatctattaaggagctgagcgacatgacggcaatcaaagcggacgacatcttgagcacgctgcagagcctggacctgatccagtaccggaaagggcagcatgtcatctgtgcagacccaaaggtcctcgaccgccacctcaaggccgcggggcgggggggcctcgacgtcgacgtgagcaagctgatctggacaccgtacaaggagcaaggctaagcaaagcacatctgccatgcggccatgccatgtcgaattagataagctgaccaatcgagtcgtgtatattttaggaactccttccttccccgtccctcgtgcagtgactctactagtctcttttttccgaactgtggctgtagtggtcttgtgtaacatcagattgttgtgtctctcagcacgttgtttgccaagctttccgattaataactatgtcacctgctgtatttgtggtcttcctgctcatataattggatggaaaagcaa

SEQ ID NO: 5217 - DNA, 1267 bp, Triticum aestivum
  Clone ID: TRIAE-23APR03-CLUSTER68120_1
gagaactagtctcgagttttttttttttttttttaatactaaacagagcaatttttcctttaccttgagtaaatgcttacaatactaccccttttttttttttttttgtggggtatattgcaaacaagttcatcacgcatatcaccaccacacacacacactcacacaacgtcaggaccagaatcatggagtttcaagaatggttcgttcaaatgatgtagcagccagaactgcagagcctttcattgctctcagcacactagtttcggttctgtatgttctataaagttcacgaaacaatggtacaacatgaggattttgcttatgctccatacactcagcttattaagaatccttttacgtaacaggcatgcgatccttaagaatggttgcttgaagcgatgccgtttttctccaagcgaatgggtatgtgtgtcgtgtgtaactgcaaaaatcaccatgttttaggttccttgaccttcacctcacttgtgtactgtcatacaacatagcgatatgtgacgtatctgccggctgtctcgctgggcctgatgatcttcaccacctgccctcgtttgaggccgtagtacctcgcaatgggatctgtaatctgtattcttggtagctgagtttcctttaaagtgtaccgcgccaataacgtcttcttttcctcattagcaagcacttgatgctccggaacaagaacatgttccttgatatttataagcatttccgcatcctggaaaacctccaagtggatctttggctccagttcttggagaaacgattttgcaaatggggtgaggttctgttgcacaaccaatatagccctggagactttctcggcgttcatcatttcaacgtacttcttgatgtgcttcatccccaccttctcgtcgttagggaagaacacgtatatctggtcgttggggtcgttcttcttgcacttgttgatgagcatgtcctcgcggtggaaggactcgccgtacttgcgctggaagtcgcggcgggtcatggacagctcgtgctccaccaccaggtagccccggtcgcgcagcatgtgcatcaccgtgcgccggatccggaccagccgccccaccgtcacgtcctccgtcaccaggcccgacgccatctccctcctcctcctcctcctcctccgctgccggcggcggcggcggcggcttcggtttcgaggcggagctggagctgccgagcttgacctgcggagggcgacgacgtcggcccactctgcttttctccaatcctt

SEQ ID NO: 5218 - DNA, 2753 bp, Triticum aestivum
  Clone ID: TRIAE-23APR03-CLUSTER6815_1
ttatcagcttctgtcccgctgtgccgacatgagttctttttgaagaccaacgcctaaatgtcaattgttcagaagtgcgccagcctcctccggcacgtcgccaccgcatgccccccgaacctccccatgaactggcatcatctcgcgggcacccctaacaccggatctaacctctggggtttctctgggcgttggcgtgccgatcagaagagccagaaaagcatgggcgggtgagagggcccctgtccgagctggccgttcgccaagagtatcctgatccgatgttactggggaccacgtcatatctgcacgaaactttttaccaacctacatatcaacaacctatgtatcagcaacctgcataccaacaacctacgtatcaacagcctgtatatcagcaaaatgcgtatccccaacctgcgaaagcttcaaacccttttgacctcggaaatgaggcagccccaattcaagctcacatgtcccgaccactgggagcatcagcaggcgctactaacccaacattagttggtaactctagttttggagttccacctcagcagcctcagcagatgtatcagccatctgtacatcaaaaccattacatgatgcagcgaaaatagaagatctgatggaaatcggggtggttcaagaagtccaccatacaatgaaagttactctgaccgtcggagttatagtggacggagtgatgacagaaattccagacattcctatggagaacgtagtcctggctatgaccagaatgactataagaaaagcccccgcttctttgaagttgtcgatgatagatctgggaaaacaactccagttcaaaggttcgaggaccgcaggttttctgaaccacggaagccagagactgggtctccaaattaccagagagaagccaacggatctagtcctcctgttgtacggccagtgagggagatattgggtgatgatgctcctcaacttcggattggcgaacctccaaagccgaatgtagtcagaccgattgaccctccaaaaccaaatggaaccaggaccattgagcctccacctcaggcacagaggacatctactgccagcagtattggttcttccgaggggatttcggaacagacgaaggcagcaactccagtcagtttaattgattttggtgcagatcctgaaccgactagctggctattgcaattttaatgtttattgcaatgcaaaaatgaaggatgtataattgtgattaatcagttgttttcgtctcaagataaaaaaaaaaaaggcaaaagtgctccatcagcaagcggcggtgattgggcatcttttgatgcttttggccagcagcaacaaacaccacaagtaggcagcaccgtaaatccacttgagtctgtgcttgcacaactatcattctccgaaacaccctctgcctccaatacgtcagccttttcaacttctgttgatccgcaagcaaatggaggacagctgtccatgatagatacatcacattcttcattatttggtccacccgttggaatctcaggcaatcaggtctcaacaggaatgcctgtccaaggatctgcagttcatcaatctgctgtggctgcctctatgggtggtcttccatctcaattgccttcaaattctcaaggaaccagtggtattcaagaagcaacgtcttctcatgacagcaaatccagtgggcggacagtactgccagtggatttctttacttcactatatccatcagcaactccagcaatgcctggctggcagagagctccccagtctggaatgggatttggcatgcagtatcctgctgcaatgttgcagggaatgcagtcatatcctcaggcaacattttctcaacctacatatcaacaacctatgtatcagcaacctacataccaacaacctacgtatcaacagcctgtatatcagcaaaatgcgtatccccaacctgcgaaagcttcaaacccttttgacctcggaaatgaggcagccccaattcaagctcacatgtcccgaccactgggagcatcagcaggcgctactaacccaacattagttggtaactctagttttggagttccacctcagcagcctcagcagatgtatcagccatctgtacatcaaaaccattacatgatgcagcatgtttcaaacaacatgcctgagcagctacctaatggcatgcttccaaggcaacaaggaggtgctggttccctcggcgtaggctatgatcaacaagctgctcctaggtattcccagccaaacaccccaccgtcctatggtgctgtgggtggaaatcctttcgggtaaaaggcttatcaaatgtggacgtaccatgttacctgtttatggtatcttgtgtatcttcagaccactggtttgtggtgcccactgcccagtgtgataagaatgcacaaagccctggagaaaatttgtttcatattactggttatgtgtttgtcactgtagctccacataagcttcaggagcaggagttctgcggttcttctagcccctattttcttgtatatttgtgtttggtgttctgtgtgcgttgcatccgatgtatattcacagagaccctatgccttgtatggtttttgattgggatctttcgagcggccatatctgatagtgtacttagttcagaatgttatttttagtccagctggctattcaattttaatgtttattgcaatgcatgactgaaggacgtataattgtgattaatcagttgttttggtctcaaaaac

SEQ ID NO: 5219 - DNA, 669 bp, Triticum aestivum
  unsure (1)..(669): unsure at all n locations
  Clone ID: TRIAE-23APR03-CLUSTER681618_1
atgggtagaantagggactagccagcacctatcgcactatcagtatgatcctagtatcaccaaccaagcgaccacaacacttccagtgccgatcatcacacgcggccgtggccctccatctgctacttctcggtgtagcactggcaatggcgagcggcaccacaagggcacacgccgtccacgcgccgtgctgcnacctgctccagggggtgaacctggcgccgtgcctggcgacgtccgcggacgcgtggggcgccgtgaacataagcgccgcctgctgctcgtcgctgaacgaggcgctcgacgccggccgccgctgcctgtgctcgctgctgctggccaacggcgtgctcgccggcctcgtcgccaccctgatccccacgctccccatggtgctgccgctgcccgggtgctacctctacgcgcctgctctcgcggcctgccaaggtgaccgttcgttcaaattatctcttgcatccgcccgggcatggacgctaacgccgagtagttgcttcccctttatctggttggtttcagtgacgttgctgcagacgagttatgatgcgccgccggcgtcggcatctgtggctgccggcgtgggggatgctgctggcggcgcggtggatccggcgcctcctcaggccgacatcgcgccgccgcctaagaatg

SEQ ID NO: 5220 - DNA, 2538 bp, Triticum aestivum
  Clone ID: TRIAE-23APR03-CLUSTER6826_1
attttgccaggcctcaccagcgtgccctggcgcaaacgacgggcgttcgtccctcttctctgccgaccaaaaccctaaaccctagcccgactaaaccccctcccccctcctcctccggcggcggcgccagccaccggcagcacacaaaccgggcgaagatgccgctggggcagcgcgccggggacaagagcgactcccgctactgcggggtcgaggtgctcgacttccccgccggcgacggcctccccgccgtcctcacccactccctctcctccgccttcgacttcctcctcgccccgctcgtcgatcccgactaccggcccacgcccggcgccgtcctgccggtggcggcctcggacctcgtcctcagcccgtcccagtggagcagccacatcgtcgggaagatcagcgagtggattgatttggattccgaggacgagcagctccggctcgactcggagctcacgcttaagcaggagatcgcctgggcgactcatctctccttgcaggcgtgtgttattcctcctcccaagaggtcgacctgtgccaattatgctagagttgtaaataatattttgcaaggcctgaccaatatgcagttgtggcttaggatacctctggagaagtctgaatctatggacgaagaccgtggcaaaagtgaaacagtagactcgtgggaatggtggaattcattcagactgttatgcgagcatagcagtcaactgtatgtagcacttgatatcttgagctcgctgccatcaatgaactctctagggcgctggttcggggagcctgtaagagctgcgattcttcaaacagatgcttttctaacaaatgcaagaggttatccttgcttgtccaaacgccaccaaactctgcttactggtttttttaaccattcagttcaaggtaattatctctgggagatcaaatcataatgtttcccaagtatctgaaggagtgctctcacgtgatgaaaaccacaccgaagatacccccactcagcatgcattgagcccgtaccttgactacatggcctacctctatcagaggatggatccacttcctgagcaagaacgctttgagatcaactatagggatttcttgcaatctcctctccagcctctgatggataatttggaagctcagacgtatgagactttcgagaaagacactgtgaagtatacacagtatcaaagagcaatcgctaaggcgttggttgataaggtctcagatgatgaagtttccacaactaggacggtcttgatggttgttggagcaggccgagggcctctcgtaagagcatcattgcaggctgcagaagaaactggtcggatgctaaaagtatatgcagtggagaaaaatcctaacgcagttattactcttcatagtttgatcaaattggaagggtgggaaagcatggttactattatttctagtgacatgcggtgctgggatgctcctgaaaaagctgatattttggtcagcgagttgcttgggtcctttggtgataatgagttatctcctgagtgtctagatggtgcccaaagattcttgaagcctgatgggatttctattccttcatcttacacaagctttatccaaccagtaactgcatcaaaactacacaatgatattaaagcacacaaagatattgcacattttgaaacggcatatgttgtcaagctacaccgagtagcaagacttgcacctccacaagaggttttctctttcgcacatccaaacttctcaccaaaggccaccaaccaaaggtataccaagttacagtttgaactaccacaagacacgggatcatgccttgtgcacggattcgctggatattttgatgccgtactatataaagatgtccatctaggaattgagccgaacacatgtacaccaaacatgtttagctggttcccaatctttttcccactgaggaagcccatatacgtgccgtcagagtcgcccatagaagtgcacttttggcgatgctgtggtgccaccaaggtgtggtacgagtgggctctggtggctccgtctccatccccgatccataacagcaatggccggtcatattgggtcggtctataagttggaaaatcagaatactctgtgtcggttttttgagagagaagaaattgtcgatcatatgcttggtttttgagtgtgtccagctacctggatcaaagaaacagatcttagaacctggatacaggcacatgctgtaactcgcaagcttttgctttgtaacatcttttacttcttattgttgttgccgcgctaatccttgtgcgtgctagggtttcggaaaaaaaaaaaaaaaacagttttgacattgccttttctgttcttgaggtgaacatgcggagacgcagatctagtttcgtgctagggtagtcaaaatgtgtttctttcgtccgggatgcaaagcaagtggctttactgtagaatcacaaacatgcatagggtttgctactcaaatatatttctcgatgcttgggaaataacaatttagttgttgtcaaaaaaaaaaaa

SEQ ID NO: 5221 - DNA, 1681 bp, Triticum aestivum
  Clone ID: TRIAE-23APR03-CLUSTER6828_1
atcccactcacccccccccccaccccaccctctcagccccatcccgccacgatcagaggcctcctcgcgcgcgccacgctggcccgccgcgccgccgccgcctcctccacgggcggcgcctccacggccgcgcgccgccacctcgcgggcgcggcggacccccaccaccactccttccacaaaaccccccactatgagaggcctcctcgcgtgcgccacgctggcccgccgcgccgccgcctcctcatccacgggcgccgccgcccccactcccgcgcgccgccacctcgccggcgcggcggaggcggccgaggcggagctcaagaagacggcgctctacgacttccacgtggcgcacgggggcaagatggtgcccttcgccggctggagcatgcccatccagtacaaggacaccatcatggactccaccctcaactgccgcgccaacggcagcctcttcgacgtctcccacatgtgcggcctcagcctgcagggccgccaggccatccccttcctcgagtccctcgtcgtcgccgacgtcgccgccctcaaggacggcacggggtccctcaccgtcttcaccaacgacaagggcggcgccatcgacgactccgtcgtcaccaaggtcaacgaccaccacgtctacctcgtcgtcaacgccggcggccggggacaaggacctcgcccacatcggcgcccacatggaaggcgtgcctctgcttgcttccccacctcaactggctacaccggcgaagatggatttgaaatctccgtcccatcagagaacgcggtcgatctcgcaaaggccctcctggagaagtccgaaggcaaggtgaggctgaccggcctgggtgcccgcgacagtctccggctggaggctggcctccgcctgtacgttacaccggtgaagcaggttttgaaatctctgttccatcagctcacgcggtcgatctcgcaaaggccctcctggagaaatccgagggcaaggtgaggttgaccggcctgggcgcccgcgatagtctccggctggaggctggcctctgcctgtacggcaacgacatggagcagcacatcacgccagttgaggcgggcctctcatgggcgatcggcaagcggaggaaagccgagggcggcttcctgggcgcggaggtgatcctgaagcagctcaaggaaggccccaagatccggcgcgtgggcatcttctcgcaggggccgcccccgcggagccacagcgagatcgtgagcggcaccggggagaacatcggggaggtgacgagcggcgggttcagcccgtgcctgaagaagaacatcgccatggggtacgtgaagaacgggctgcacaaggccggcacggagttcaaggtggtcgtccgcggcaagcagtacgacgccgtcgtcaccaagatgcccttcgtgcccaccaagtactacaaggccccttaggttgtgtacaaaagagaaacaatggatggatgctccctggactgcaaattttctctcgcgactctgccatggcggcctgttcatggcaggctgccgcagctgtaacctctgtcgggcttcctcttacagcttgacatttctcctctacccttctaataataatatatgccggtgcgttgtttgctatcccaaaaaaaaaaaaaaaaaaaaaaactaaaaaaaaaaaaaaaaaaaaacc

SEQ ID NO: 5222 - DNA, 890 bp, Triticum aestivum
  unsure (1)..(890): unsure at all n locations
  Clone ID: TRIAE-23APR03-CLUSTER684744_1
aactatatctcttctgctcaatttttatgctacatttcgcctctacagtcaacctgaacagcactgatccaaaggaattgtactacatacaaggtgtctctggacatcattttaaagatagtgtttccttgtgagagcaacattctttttgtttcatggttcaatagaggtctcatagtgaactacaacactaggttgcagtataatgtcagctgattgcaacatcctgagttactttagaagttttcatctgaaaacttgattttcttttgacattcattgcacatgtattntgatttgttcacaaggaagctcacaaatttgtgtccatctttttcgtagtaatcatatggcttgcatattttatcagactgatcatagtcacgaagatcagactgataatatttggtagagaagatcagaagaaacatttatatcatatttttgtatgctttttctgtagaaaaggtaccatgggttgattgtgttggatcccattactatatcatgtatttgactgctattcctaagaactgctcctggacacagcgctctatgttgacatgtcttacattctattgtgtcgcctatctgtatagttactcggatcttacatttttgtatttttgtcgatgcaggtgtgttcttcctactataaagcaacatggatttatttaaattaaattgtgcatattttggaaaataaatcttgtgtgtctatagtcatgttcatgtatgttctgaaccgagacaaatattcttcattgtctatgctttttccttctgttaatgatgatagtgaagctctccatcttattacttccttacccattcacttgaaatattgcctaaatattattatttttgtaaaaaaaaaaaaaaaaaaaaaa

SEQ ID NO: 5223 - DNA, 2696 bp, Triticum aestivum
  Clone ID: TRIAE-23APR03-CLUSTER6893_1
tcaacacttctgtcgcagtttttgtcccgtcacggaaagatcctccccggccccacccgccatcggcctctcgccgtccgttcagatctttccgcccccggccggcgaggccacaccgccgcacctctctctcacacgtgcctcccagccccagccgccgcgagcgcagcggcagggacggccgcgtccacccgctccgacgctgacctgtgggccatgggcaggtgacgtagtaggtgtcaccctgtgccttcgtcttcccccagataaagccaagcccagcgacgccaacaactcctcgtcctcctcctcgtggactccccccaaaactaaaccctcttctctcttcggagttggatgcgccgcccgtgaccagcgagccgccgccaggagccagcccaccgcgaccgcgacctccggcggagatggcgtccatctccggcgcggcggcgccgccctcctcctcctccgcgtgccggctgcggctgcggaggcagctgctcatgcgcccctcccacctccgcctccgcgcgccccattccgtcgccggagcctctcccgctcctccgactccccccacgccccggccccgccgctcgcgtccagggcgccggcccagggcggcggcgctgcggtcgagaaggacccgatcaagctctgggaccgctacgtcgagtggctctaccagcacaagcagctgggcctcttcgtcgacgtcagccggatgggcttcaccgacgacttcctcctgcggatggagccgctcatgcagcgcgccttcgtcgccatgggggagctcgagaagggcgccatcgccaaccccgacgagggccgcatggtcggccactactggctccgcgaccccggcctcgcccccaactccttcctccgcaccaagatcgagaagaccgtcgaccacatcctcgccttctcccagggaattgtccctcgcatggctcaactaggggaggctctggatgctcctcttgctcttgtactctctatgggtggtggtgcacccgcttcccggcctcaatttgtttccgaggcacttgcgcctgataaccccccattgaagatacgatttattgacaacaccgaccctgctggaattgatcatcaaattgctcaactaggggaggaacttaaatctactcttgtaattgtaatctctaagagtggtggtacacctgaaacccggaatggtctactagaagtacaaaaagccttcagagatgctggactggatttttcaaaacagggtgttgcaatcactcaagaaaattctctattagataacactgccagaatagagggatggttagatcgatttcctatgtttgactgggttggtggtagaacatcagaattgtcagcggtggggttacttccagctgcattacagggtatcgatgtcaaggaaatgctagttggtgcagcactaatggatgaggagaccaggaacaccgtggttaaggaaaatccagcagcattacttgcgttatcttggtattgggctacagatggaataggcagtaaggatatggttgtacttccttacaaggatagtctgctacttttgagtagatatttacaacaacttgtcatggaatctcttgggaaagaatttgaccttgacggcaatcgggttaatcaagggctaacggtatatggtaacaaaggaagcacagaccaacatgcctacattcaacagcccatctccgttactgacaacttcttcgttacttttatcgaggttttgcgtgataggccttccgaacgtgcaggtggaatttatgcttgtttagtatacgtcaacgcatagcttcagcctggtgacgaggcagggaaaaaagcagcaggagaggtagtggcccttcagaagagggtgcggactgttctcaacgaggccatctgcaaggactggttgcactctttgaacgtgcagtcggaatttatgcttctttagtaaacatcaatgcattgcgtcggcctgctgtcgaggcagggaaaaaagcagcaggggaggtgctcgcccttcaggaaagggtgctgactgttctgaatgaggccagctgcaaagaccctgctgaaccattgaccctggagcaaatcgcagatcgttgccattgccctgaagatattgagatgatatacaaaataattcagcacatggcagccaacgatagagcacttatagcggaaggtagctgcggttctcctcgaagcgtcaaggtttaccttggtagaatgcaatgtagacgacctatgattacccccttcatctttgcgttttggatctgtgtaaaattgggtgggtctcctagaataaaaggaacaacaccagtggctgggcttgtgtgctccagatgtgccattagtttcttatttggttgtgatggcacgattgctccttgtgctttagggtacagattttcggttttaagtgccaccagttacaaaacaatggaggatgttactgagtttcaatatcaccactgtattctgtcaagctccattcgacacacatctggtagtacaattgtttgcaaccaatttgagcatatgccttttctggcatgggaataaaaatatccaaacaagtgggtatattcttttggggcaggtgattcccaaagttttttttggcccccaaaaaaaaaaaaaaaaaaaaaaaaaaaaaaaaaaaaaccccc

SEQ ID NO: 5224 - DNA, 1982 bp, Triticum aestivum
  Clone ID: TRIAE-23APR03-CLUSTER690_30
aaaggcagagcggtcaaggctgggagagggagagggagagcatcgtcgtcgtcatcattcgttcgttcacagaggaggagtggtgttagcagtgagagagtcagaggagggaggaaggaaggttcaggggaggggaggggaggggagtgagaaacgaaatccatttattccccgtctatcggaggcaaacccgcggcctcctttcccgagccggctggatggagagggacttcctgggcgccataggccacgagcagctgctgcagcagcagcagcgccagcgcgccgccgccgccgaggacgacgccaccagaaaggagtcagcttactttgggggaggaggagtgccacccatggattggtccttcgctggcagggccggggccgcgccggctgtcatgtccttcaggtcggctgcgagggaggagcagcagggcgagctcgcgtaccccaagcagcaggcctcccgcgtcctgacgccacagagatcgtttggtgctgagacccatggcagcgtgcagtacgccgccgccgcgcgtgcggcttacggtgtgcagccttcgcagcagcagcatgctcctaatggtgctagggtgattccaatgtcgtcgccgttcaatcccaacaatcccatgttcagggttcggagttcgcctaacctcccgaatggcggtgctgctggtagcccgtttaaacaaccgccttttgccatgaacaatgcggtggctgcttctaccgttggtgtctataaatcaagggacatgccgaagccaaagacagcgcagttaactatcttctacgctggttctgtcaatgtattcaacaacgtctcagcagaaaaggctcaggagcttatgttcttggccagcagaggatctcttccaactgcacccactactgttactcgcagcccagatgcaacctttttcactccggctaagcttgcggcacctgaggcttcacctgcaaagcagatgctagctcagataccacagcgtgtttcacctcctttgccggccatttccaagccgatgtccatcatgtctcaagctgcatgtctccccaagagcacatctagctccaacactgattccgcagtgccaaaatcttcaggccagttggttgtacctcccactagtcagccctcgtcgtcgactcatactgcgacactatcgtccaccactgctgcaagtattatgccaagagctgttcctcaagctcgtaaggcatcccttgcccgattcttggagaaaaggaaagcgaaaatgcttcacacacgacagtgtttggacgataactgcacgatcgagggatccagcggccgctgctgggctgtgctcgacattcttcggctggatttaaccgtcgtgcacaagtcgtccaaactttatcgtccccatagcactgctcaaaggaaagaaagagtgacgactacggcgccatatccatcagccaagagcccgatggagagcaccgacacggtcggaagcgccaacgacaacaatagcaagtcctcatcatgcacagagatcgccttctcaagcaaccatgaagagtcgctgcgtctaggccggcccaggaacatcagctttagcggggagtccccaagtacaaaactacacatctgatccgatatgatcttccggttgtccatagattcaatcatgatggctgatgcaaagccgtaataagattttgcatccaggcaggcagggaggagggaagggatattgggaaaggcaggcagcatgatatatgttattgatgatgctcttattcttgtttatgatgtggtttttgttttggttagttcgcaacctgtaatgctggtctagctggtgcaacaccccacctaactaacaagggagctgtcgcttgcagactcttgattgttattttttgttttgcccctgcgcccattgtattgcagaaagaaacatgttaatttagcagtataaattataggcttacaaatttccacc

SEQ ID NO: 5225 - DNA, 2015 bp, Triticum aestivum
  Clone ID: TRIAE-23APR03-CLUSTER690_34
gtttttttcggcaaaagagagcgcgttaggtatgggctgccgaattcctttcggcggctcccttgccgcggatggcgagggttagcgcctcggggaagcgacggttctggttccagggacggagagacacgccaaatctttccgtctgcagcttactttgggggaggaggagtgccgcccatggattggtccttcgctggcagggccggggccgcgccggcggtcatgtccttcaggtcggcgccgagggaggagcagcagggcgagctcgcgtaccccaagcagcaggcctcccgcgtcctgacgtcacagagatcgtttggtgctgagagccatggcagcgtgcagtacgccgccgccgcgcgtgcggcttacggcgggcagcctccgcagcagcagcatgctcctaatggtgctagagtgattccaatgtcgtcgccgttcaatcccaacaatcccatgttcagggttcagagttcgcctaacctcccgaatggcgttgctgctggtagcccgtttaaacaaccaccttttgcgatgaacaacgcggtggctgcttctactgttggtgtctataaatcaagggacatgccaaagcccaagacagcgcagttaactatcttctacgctggttctgtcaatgtattcaacaacgtctcggcagaaaaggctcaggagcttatgttcttggctagcagaggatctcttccaactgcacccactactgttactcgcagcccagatgcaacctttttcactcccgctaaactcgcagcacctgaggcttcacctgcaaagcagatgctagctcacataccacagcgtgtttcacctcctttgccggccatttccaaaccgatgtccatcatgtctcaagctgcatgtctccccaagagcacatctagctccaacaccgattccgcagtgccaaaatcttcaggccagttggttgtgcctcccacaagtcagacctcgtcgtcgactcatcctgtgacactatcgtccaccactgctgcaagtattatgccaagagctgttcctcaagcacgtaaggcatcccttgcccgattcttggagaaaaggaaagaaagagtgacgactacggcgccatatccatcagccaagagcccgatggagagcagcgacacggtcggaagcgccaacgacaacaacagcaagtcctcgtcgtgcacggagatcgccttctcaagcaaccatgaagagtcgctgcgcctaggccggcccaggaacatcagctttagtggggagtccccgagtacaaaactacacatctgatccgatatgatcttccggtgtccatagattcaaccatgatggctgatgcaaaaccgtaataagaagattttgcatccaggcaggcaggaggagggaagggatattgggaaaggcaggcagcatgatatatgttatggatgatgctcttattcttgtttatgaagtgttctattttggttagctcgcaacctgtaatgctggtctagctggtgcaacaccccacctaactaacaagggagctgtcgcttgcagactcttgattgttattttttgttttgcccctgcgcccattgtattgcagaagaaagaaacatgttaatttaaaaaaaaaaaaaaaaaactcgagactagctcgtgccgaattcggcacgaggtacgtgctgagggccagcgccaccaagttcggctcgtccgcctccttcggcagccgctagatcggccggccgccgtctcggtgatggtcggaggcactgaactgtagatatatcagaggacagagggcctccagtgtgtgctgctgttcgggtcctggattctgctggtctttgcacgcgtctctgttttccgcagctcgccgccgcgtttgctgcttgttttctctaccgatcgagtgtgtcttcgttagtgtttgcttccattccatgtactatctgtgaacgatgaggatgatgtactgtcatgtatgcatccaaggtaatttggggggaaatttgaaatgc

SEQ ID NO: 5226 - DNA, 1495 bp, Triticum aestivum
  Clone ID: TRIAE-23APR03-CLUSTER690_45
acctagctcagttttcagttccatgaaggacacgagcccctccttccatcgcacacacaccacacaccctcgccttgttgtcttttacctaccgcttctcccccgctccataaataccaccttcctctccctctcgtcactcccccaccacacaccccaccccaagcccccacctccattttttccagtcaggttcacagcgagaagcaacagcaaggcaagctagctacacgccgatggccaaggacgaggtgatggagaccggcggcggcggcgacttcgcggccaaggactacacggacccgccgccggcccccgctgatcgacgcggcggagctggcctcctggtcgctctaccgcgccgtcatcgccgagttcatcgccacgctgctcttcctctacatcaccgtggccaccgtcatcgggtacaagcaccaagacgggacccggccgtgaacaccgccgccgaacgccgcgttgcggcggcgtttggcgtgctcggcatcgccctggggccttcggcggcatgatcttcgtcctcgtctactgcaccgccggcatctccgggggccacatcaacccggccgtcaccttcggcctcttcctggcgcgcaaggtctccctggtccgcgcgctgctctacatggtggcccagtgcctcggcgccatgtgcggggtcggcctcgtcaaggccttccagagcgcctacttcgtcaggtacggcggcggcgccaacacgctcgccgccggctactccaagggcaccggcctcgccgcggagatcatcggcaccttcgtgctcgtctacaccgtcttctccgccaccgaccccaagcgcagcgcacgcgactctcacgtcccggtgctggcgcccctcccgattggcttcgccgtgttcatggtccacctggccaccatccccatcaccggcaccggcatcaacccggcccggagcctcggggccgccgtcatctacaacaaggacaaggcctgggatgatcagtggatcttctgggtcggccccatgatcggcgcggcgatcgcggccttctaccaccagtacatcctcagggccggcgccatcaaggccctcggctccttcaggagcaacgcgtaacaagttatcatccatgtgatctgcatgcaagattgaagcaatggcgacccgtgttgtgtccatccatccagagagaaatgcgcttttgcaacttytcgacagttcagttcggccgccgcaatggtcgtgttatttatgtgtcggcagctgcatatgcgtagtacgagtacgtggttggcctccatgtgcccggtcctgcgtgccgtgtcttgtaattcggtccatgggatcgctcgcttgtcttaattagcccgcattgcttttcctattgtatttaaatttagcgaccatatgtatgatcgatccaacgtcgccgcctttctgtctaattcatcaatccaccaagcaagtgatcatcccaaaataagaaaaaaaaaa

SEQ ID NO: 5227 - DNA, 1464 bp, Triticum aestivum
  Clone ID: TRIAE-23APR03-CLUSTER690_46
acctagctcagttttcagttccatgaaggacacgagcccctccttccatcgcacacacaccacacaccctcgccttgttgtcttttacctaccgcttctcccccgctccataaataccaccttcctctccctctcgtcactcccccaccacacaccccaccccaagcccccacctccattttttccagccaggtttgcagcgagaaggaacagcaaggctagctacacaagccgatggccaaggacgaggtgatggagaccggcggcggcggcgacttcgcggccaaggactacacggacccgccgccggccccgctgatcgacgcggccgagctggcctcctggtcgctctaccgcgccgtcatcgccgagttcatcgccacgctgctcttcctctacatcaccgtggccaccgtcatcgggtacaagcaccagacggacccggcggtgaacagcgccgccgacgcagcgtgcggcggcgtgggcgtgctcggcatcgcctgggccttcggcggcatgatcttcgtcctcgtctactgcaccgccggcatctccgggggccacatcaacccggccgtcaccttcggcctcttcctggcgcgcaaggtgtccctggtccgcgcgctgctctacatgattgcgcagtgcctcggcgccatgtgcggggtcggcctcgtcaaggccttcagagcgcctacttcgtcaggtacggcggcggcgccaacacgctcgccgccggctactccaagggcaccggcctcgctgcggagatcatcgggcaccttcgtgctcgtctacaccgtcttctccgccaccgaccccaagcgcagcgcacgcgactctcacgtcccggtgctggcgcccctcccgatcggcttcgccgtgttcatggtccacctggccaccatccccatcaccggcaccggcatcaacccggcccggagcctgggggccgccgtcatctacaacaaggacaaggcctgggatgatcagtggatcttctgggtcggccccatgatcggcgcggcgatcgcggccttctaccaccagtacatcctcagggccggcgccatcaaggccctcggctccttcaggagcaacgcgtaacaagttatcatccatgtcatctgtatgcaagactgaagcaatggcgacccgtgttgtgtccatccatccagagagaaatgcgcttttgcaacttctcgacagttcagttcggccgccgcaatggtcgtgttattatgtgtcggcagctgcatatgcgtagtacgtggtccggtcatgcgtgccgtgtcttgtaattcggtccatgggatcgcttgtcttaattagcccgcattgcttttcctacttgtatttaaatttagcgaccatatgtatgatcgatccaacgtcgccacctttctatctaagtcatcaatccaccaagcaagtgatcatcccaaaaaaaaaaaaaaaaaaaaa

SEQ ID NO: 5228 - DNA, 1448 bp, Triticum aestivum
  Clone ID: TRIAE-23APR03-CLUSTER6938_1
aaagccaacccgtccaccccctcgcgtattccgccgccacgccgccgcggcgcccttcccgccgtcgcgagccgtatctttcggcaacacacacacacaaagccgcccacacgccatggaggagaccgaggctaagaagcccacccccgcatcccccctcttctccttctccaaccccagcgcctccttcggcttcgggttcggcgccgcgcccggccctccccctccgcctccgccgccagctgtcgaggtcctcctctccgaggaatcacccgtcgcggccggcaacttggagcctgtggtggttgacgactccctatcgatctacaaggggagagttaacacctctgatgttttgggggtaaaaaactctgatttggttccaggaaaatatgaaggggggttgaaactgtgggaaggatcattggacttggtgaaaaccctaaattcagacatcaaagatgatcgattgcttatggaaggcaaacacgtactagagctaggatgtggacatggcctccctggcatctttgcaggtctgaagggtgctgctctagttcacttccaagatttcaatgctgaggtccttaggtgccttaccatcccaaatgtaaaagctaatctgttcaaggaatcatctgaaacatctaggagtgttggtttttatgctggtgattggagtgaaatcgacaagttacttcttcgcggagatgctgtccaggataaaacaaccaatcttcacacagaaaatgaagggcatagaggctacaatatcatcctgatggctgagactgtgtatgcattggattcacttcctagtctctacaggctcatcaagaagtgcttacactaccctagtggtgtagtttatatggcagggaaaaagcattactttggtgtaggtggcggcacaaggcaatttctacgcttggttacagaagatggtgccatgcagtcggacctgcttgctgaagttactgacggatcatccaatgttagggaggtttggaaattctcattcaagtagacaagcatggcctctgtgattgctgtatcagatacaaaacgtgtaccgggctccatattggtagagtgtgagccttggtttagccgtatcatggtgttttaatgcactgttagttccaagttgattgttcatgaactcttgagaagtcatacaagtacttgagtcctatctctgaattactgactcttaaaaaaaaaaaaaaaaaaaaaaaaaaaaaaaaaaagaaaaaaaaaaaaaaaaaaaaccgctctcgctcccgccccgcccccgggccgggcgcccccccgctatctgcccggcgcctccggtagggataccagagtgttgcttcggtgtaccctttcctctgagatgtgaattctccatgatgcccgcttgtaccatctcacaactttgacaaaagcagcactttctattgccc

SEQ ID NO: 5229 - DNA, 1325 bp, Triticum aestivum
  Clone ID: TRIAE-23APR03-CLUSTER6958_1
attcgaggatgagaagtgggggtcaaattaggcaatctcggttggagatgctctgaccgcgccgccggaacccttccgcacgcagtagctcctcctcagcccgtctgcttgactggcgcggagtggagggcagatccatccgggctgacgattctaggggcttcgaggatgaggagctgggctaatcgcccccactcatcccttctcgcctctttcctcgcggcctcttggcttctcgtggccgcatcgcctcaggaattgcatgaagcatctggatccaggattcttcatcacacaaagtcacacacacatgaggtgcattgttcaagggaacggagccgtgcagcttggaaagctgttgatgagtacttgatgccctttgtggaaaaggagaaatatgaactcccaagcaagtgtaggcttcgtcctgaaaacgacatgtttcgggaacaagagcaacataagatccattttgattgtgaacgagtggcgttgtggcttctgcaagaaatcctttcgagcagaaaaatttatcgatcagcattttgcaaaccggcacagtaatcagatggaatgctgctgcagctgcaaggaaccgtcatctttgtgagaaccttgcggacagttgctttcctattactcgagggcattctgccagccgacttcatgaatttttcttgcgccaattctgtgagggctccttccttacaatgggggcctccaaaacctttccccttaaaggtggcaggaaccagaacaaaccttgcattcttcctggctctctcgcatcttgaacgatgctgcttttgcctgtgttctaggtcgcagggtactttcacaccggtgcgacctggctctctgcagctcgacgttgctgccgttgccggtgaacccgtgcacaagattttgccgccagaggtaagtggactactgctttggcctaattacattcatgaaacttttcgtgatgcctgcccctccttcttttgcagccccgcacggagacacaagatccaccaagcagtcatgtgtaattcatgataggttacagaacatatcctttgatgtaaaccgaaacattgttgaccgcgacaaattgctcctggaacttggtgcttacatgattctgtacagccaatctaatgtcaggagactgttgtacaatattcaaggatgggaaaggttaaagctatctaagtattgtcggtgttactggggctgtagattctggggtagcaacatttactttatctgagaggtgctatctatggttttcataagaatatatagaggccctttgatttggtttaaaaaaaaaaaaaaaa

SEQ ID NO: 5230 - DNA, 956 bp, Triticum aestivum
  Clone ID: TRIAE-23APR03-CLUSTER6962_4
acatctcaaagttaatatgcgaagatgaagctcgttgtgctgtcagccctgctcctgctttctctcgtcgccgtctcctccgccgaggaattcgatttcttctaccttgttcagcaatggccagggtccttctgtgacacgaagaaggggtgctgcttcccggacaccggcaagccggggacggactttggcatccacgggctgtggcccaactacgccaagtgcaagacccgcggcgagctcgacggcgccctggagatggtgaccaagcgcaagaagaagtgctggccggagaactgcaacagcgagcccctcaagctctgggagatcaaggacctggtgacggagctggacgccaactggccgacgctggcgtgcaagagcgggaagagcatcgagttctggacccacgagtgggagaagcacggcacctgctccaacctggaccagcatggctacttcaagacggcgctcggcttcaaggcccgccacaacctcaccggcatcctcgccgacgccgggatcgtgccgtcggacagcgagacctacttcctcagcagcatcagggacgccatcaaggaggggaccgggttcacggcgaacctggagtgcaaccggggcgtcgccggcgagacgcagctgttccaggtgtaccagtgcatcgaccgcgccgggaagaacctcatcgactgtccgctgccgatgcagggcaactgcaaagacagggtccagctgccggccttctgattaaatttgagttctaattgaacacccgttgccggcgtccgtcggggtgttgtgcggcggctcattggctcgacgcgccccggccggccgcctgcacggtgcgcggctggattacgtgatggatgtacctttgtgtttgttattggttcagttaaaatgccgtcacagtccggagttctgggcatcgacgtaacgtttactattaaaaa

SEQ ID NO: 5231 - DNA, 1452 bp, Triticum aestivum
  Clone ID: TRIAE-23APR03-CLUSTER69802_1
cttttatgccatccccacccacgaaggaagcccgcaccgcagacgccccgcgccgcgtcaagaacacacagagaggacgaagcacggtctgggagagcgagagccgcagcggcgaggttccagccatggcggtgagcaacaacatcacggcatacttttcagagttgtggcatcgaacacattgtggaaggccttacaccgcagacgccccgcgccgcgtcaagaacacagaggacaaagcacggtctgggagagccagagcaacagcagcggcgaggctccagccatggcggtgagcaacaacatcacggcgtgcgtgacactgatggcgctcatctgcgcggtccccgtcatcgcctcgggggtgtggttcgcgtcggcgcagggggaggagtgcgcgcggctggcgcgctggcccgtggccatcctgggtggcctcatcctgctggcggcgctggcgggcttcgtcggcgcctactggaaccgccgccgcctcctcgccttctacctcttcgccatggcggcgctcatcgccctcctcatcgcgctcctcgtcttcgccttcgcggtcacccgcggctccggcgcctacccggtgctcggccgcgagtacgacgagtaccgcctcgacggcttctccatgtggctgcgcgggtacgtcgaccccgcccggtgggaggggatcaggtcctgcctcgccgtctctgacacctgcaagaagctcgcccgacaggccggctacgtcactgccgaccagttctaccagtcccgcctcacgccgctccagtcgggctgctgcaagcccctgtcggtgtgcgggttcgggtacgtgagcccgacggtgtggacaaacccggcgcggcccgcgtcggacccggactgcggcctgtggagcaacgacccggcgcagctgtgctacgagtgcgagtcgtgccgcgcgggcctcctggcggcgctgcggagccagtggcacaaggccaacatcgcgctcgtcgtcgccaccgtctcgctcgtcttcctctacctcatcggctgcagtgcctacaagaacgcgcacgccgaggccatctaccaccgctacaagtggtgattcccatttcccatcccatcccatcactgagaaccaaccgccatcgccagtttgcccatgtaatagactagtatgtttgcttcatactgtactgtattattattagtagcttggtaactggtagtaagctagtaggggaagatgggaacttcagattcatggtttgcccatgcatgtatcgtgaagaattttagcgagatgcatgcgctcttggtgttgatgtgaatgttgtttgtaatatgcagtagagatgttcttcagatttatggttaagaattttattatattttgctcatctggtggctcgattgcctctagaactgcaacagtgatcacttgagacggaacgaatctcatctgtc

SEQ ID NO: 5232 - DNA, 1751 bp, Triticum aestivum
  Clone ID: TRIAE-23APR03-CLUSTER69850_1
acccgaccaccacaccccaccttttttccttccttccccgctaagcgacggctccgtccagccctcccaccacgcccccgccctgcccgcccgtcccgccccagtccaccacgccattccttaccctccaagcgacgactgctcccccctccgcgcgcgcgcgcgcccaacctgttcacgccggggcacggcaggcgcggcagcggcagcagaccggccggcgcgcgcgcgcgggcgggcgggcggcgatgcaccaccgggtcgcgcgggtcgccgacagggtcctctgctgcggcaggcaagcctccggggacgatctgaacgacgagcggaatggatcgatccggtgggtgttctcaatgagggggcgacagtctgcaacaagtagattctattacgaaagacaagatcggagaaggctcgcttgggagcgtctactggggacaagtttgggatggctctcagattgctgttcaaaagttaaagaatgcaagaaattgggacagaaatggaatttgcttcaaaaggtcgaatcgtttgggaagagtaaaggcacaaaaaacctcctgagtttggaagagtaaggcacaaaaacctcctgagttaacgtggattttgagttgatggacctgaacgctttcttttctttgcccctatgccgaacctcagtctttttgcctatctcaccggaaaccgagaacatttattgccattggtgctgctcgggctattgcgtatcttcaccaccatgagacacccccaataatccatggaagcatcaaatcgaccaatgtgctactagattcagatttccaggcacacgttggggacttcggtcttatgaagctcatctcagatgaaatagatcatgataagataatcggtgaaaatcaacgaggttatcatgctcctgaatacgttatgtttggcaaacctacaacaggttgtgatgtctacagctttggcataatacttctggagcttactagtgggagaaagccagtagaaaaatcaggctcccaaaaaatgctcggggtccgaaactggatgctcccgttggcgaaagagggtagatatgatgaaatcgcagactcaaaactcaatgacaagtattccgagtctgaactaaaaagagtggtgctgatcggactagcgtgcacgcacagagaaccagataagagaccgacgatgctcgaggttgtgtccctgctgaaaggtgaatcgaaagagatgcttctgaggcttgaaaaggaagagctgtttaggccagattcgatggctagttccgtcggaacgactccggaagggagcaccgactgcattcttaagaatgatgaagggctggctggggcttgatgggttggtaccctggcccctaggtattggtagagtggatattcttgctgaattggagcttggtctgcatggtttggcttgactgaaatgtataggattggtttgttatttatgatgaactcctcccttttttgagagagggggagatctagagaggtgagttggctttttatagaaagtgctttttgtgtgcactgggtggaagacccgtatactcccagatgtttgggcatgcgtcatcctgttgtcactgtgttggttactctaaacaaaatttccttctgcatacaactgaatgcagatgtctggatgatcatgttctctcaaaaaaaaaaaaaaaacctctgcagggcagtctggcaaaaaaaaaaaaaaaaaaaactcgagactagaaa

SEQ ID NO: 5233 - DNA, 1716 bp, Triticum aestivum
  Clone ID: TRIAE-23APR03-CLUSTER69860_1
aatcgatctctgagtttcagaaagtttcaggtaatggaaactgtcttgagggaagaagaatcaagaagaatggctgatgatgaccagcagtggaaggtcccgccgaacgtgcaggagctggcggcagctggcccggaggagccgcctagccggtacgtggtccgcgaccatgaccgtcccgccctcgccggcgctggcggcgacgtgacggaccccatccccgtcgtcgacctcggccgcctgtcctgcggcgacgcctctaagtttcagatgatatcaaaattcttcagaaagtctcgctgtctcaggtgatcgaaacaccgatccacgacagtaaggagggaagaatcaagaatggcggatgatgaccagcagtggaagatcccacccaacgtgcaggagctggcggcagctggcccggaggagccgccgagccggtacgtggtccgcgaccatgaccgccccgcgctcgccggcgctggcagcgacgtcacggaccccatccccgtcgtcgacctcggccgcctgtcctccggcgacgcagacgaggcggccaagctgcggtccgccctccagacctggggcctcttcctggccgtcgggcatgggatcgagccggctctcctgggcgagatgatggccgtgacgagggagttcttcaacctcccgctggaagagaagcagaggtacaccaacctggtcggcgacaagaaagagtacaggatcgaggggtacggcggcgacatggtcctgtcggagacccaggtcctggactggtgcgaccggttctacctcgtcgtggacccggagtcgcggcgcctccacgacctctggccgacgcggccgccctccttccgggacgtcctgcaccggtactccgcgcggtgcagggagctcgccgacgccgtgctccgggaggccgccggcgcggcggggctccccgaccaggggcgcctggccgacatgctggacgagaaggccgtgacctacgtccggctcaactgctaccccccatgcccgcgccccgaccgcgtgctcgggttcaggccccactccgacggcggcgcgctcaccgtcctcctcgccgagaccgccgggctccaggtgcgccgcgacgacgacgcaggcggcggtggatggcacgacgtgcccgtggtgcccggcgcgctggtggtgaacctcggggacacggtggaggtggtgagcaacggggtgctgaggagccccgtgcacagggtggtggcgggcgcggagagggggcgggtgtccatggcgatgttctacacggtggacccggagagggaggtggagccggcgccggagctggtgagcgaggagaggccgaggcggtacgagaagaccaagaagagcggcgactacgtcaggaagctgctggagagcttggcgcgaggggagcgggccatcgacaaggtgaaggtcgtctgatcgagcagctttgatccacggttcgctgcatgcatgcgcgcgcggtgggcatggtggctagttgacgtgcactgtgcacactacttactttacttttttttaggggcacgctttacgtacggtaaaatatatgggtctggcaataagctactccagtagccggttcaaaaatacgagtagtaattaagctagtcgcctcgaaaataaatatccttttcgccgcaaaaaaaaaaaaaaaaaaaaaataaaaaaaaaaaaaaaaaagcttat

SEQ ID NO: 5234 - DNA, 2257 bp, Triticum aestivum
  Clone ID: TRIAE-23APR03-CLUSTER6988_1
gtcctccccccgtcgccgcgtgagtccctctgattcatacgctaccacaccaagaactaccaacagaccacgagcgagcgagcttcttgcgcccgcccggacttatcacctccctccccccccaggattcttcgcgaccacctcgagcgagtttccacgattttgcttgcgctacaacaacaacatgtcggtgctcccggagcccaccctagccggggtggcgcgagagctggcaaccctcgccgcgccgctctggctcgccgccctcgtcggcctgctcatcggctgggcctggcgcccgcgctgggcagcagcggtcgtcgacgtcgccgtcgccggccagcaccaccacgagcccgtcgccaaccacttggccgtcgtgcctagagctaagccggcctcggtggagccggtgacggaggaggaggaattggctgtcagcaccccggacctcatgcacctccgcagggtcgtcgaggagaaggacggcggccccgcctggacgcacatcatggaccgcaccctcccgacattccgctaccaggcctggaagagagaaccccagaacggaacgccgcagtaccgcagcagcaccatcttcgaagacgcgtcgcccgatgtcgtcagggatttcttctgggacgatgacttccggatcagcaacacctgggacgacatgctccttgagcacgacacgctggaggagtgcacgaagacggggacgatggttgttcgctgggtcaggaagtttccgttcttctgcagcgacagggagtatgttatcggtcgcaggatatgggcatctggaaagacctactactgcgttaccaagagcgtgcctcgtccctctgttccaaggtgcagcaaacctcgccgtgtggacctgtattactctagctggtgcatccgtccagttgaatcaagaaacggtgatggggcaatgacggcatgcgaggtgctcctgtttcatcacgaagacatgggtatcccatggagcatcgcgaagctcggcgtgcagcagggtatgtggggctgcgtcaaacggatcgagcctggcctacgggcataccagaccgcaagggcctccggcgagcccatctcgaaatgcgctgcaatggcacatgccaacacaaagtttgtcgccgacgagctcaccgcttcagagaacaacaccgaggccggttcgaccagcaacaacgcccaagccgagaagccgaagcactggacgggcaacctacccaaggtcttcgtgataggcagcgtggtcgccctggcttgcaccttcgacaaggggctactgaccaaggccctcgtgttcggaacggcgagaaggtttgcaggaccaggaagaagataggaaccaaacatcgacgatccatgacgcgcatttgttccgatgcacaaccgagcgagcgatgctacccggtattatttccggtcctgagacgctcgtgcttgcagatgaggacgaggacggcgtttgctcatgctagagagcatctgtaagcaggcttgtgtacatactgctgtagctgcagtctgtgaagctgagagctgattaggatatggaaccatgatgataatgagactgaattgtattggatgctgagacatggccatcatcatcattatgatgatgatgtactacaatgaataaggctcatattttggaggtgctataaaaacatagtgcttttaaaaaaaaaaaaaaaaacaaaaaaaaaaaaaaaaaaaaaaaaaaaaaaaaacgaaaaaaaaaaaaaaaaagtgtttatcgacacccgtccaacctcaagggggggccccggacacccccaattcgcccctataagggactcgtatatacccgccctcccttgggccgccgttttacacacgtcgggattgggaaaaacccctgtgggttacccccatttaaatccccctttgcagcccataccccccttttccccagtttggcggaaataacccaaaaaggccccccccccaaatgcccttttcccaacatatttggcccacccttgaaaggcgcaaagcgaaaattttaaacctgcctaaatattttggtaaaaaatcccgcgctaatattttgtggtaaaacacccccccctttttttttaaccaataaagcccgaaaatcggccaaaatccccttttataatttcacaagaatacaccccccaactctcgctttggagcgttttttcccactttttggacaccaagaagtccccctcattaaaacaaagtggggccc

SEQ ID NO: 5235 - DNA, 1195 bp, Triticum aestivum
  Clone ID: TRIAE-23APR03-CLUSTER69937_1
attaataaaatcgatcagccacgacgagacgagaggtaagatctcgacttgggaactctcacagagatctcgacttgggaactctcacaagaagacgccgagaggagaggagaggatgctgctgaggagctcctccacgccattcctgcgctccttcctcacctcctcctcctcccctacgcccccttcctccctccagctccggcgggccttctccgacggccacctcccttcgctcaacccctcctcctccggcgacaacgacagcaacagaaccaccggcctccacaccgagctctccttctctgtctacaacaccttcagcaaggccaagctggagccccaccaggagcaggagatggaggaggagcaggagcaggcgccgcagcctgagctgccggagctgccgctgttcctggcgaggggcatggggatcgaccgcctcgcctccggcctcttcaccgccggcatgggctccgaggctgccctggccaggatggccagcggggtggaccagaaggcggtgctggcgctggacgcccagtacaaggagatggtggacgagcagcccggcaacgccctgttcctacgcaactacgcgcagttcctgcacgaggtgaagtgtgactcgagaagggcggaggagtactactcgcgcgcgatgctcgccgacccaaccgacggcgagatcatgtcgcagtacgcgaagctggtgtgggcggtgcaccgcgaccacgaaaggtccctcacctacttccagaagtcggtgcaggcggccccgcgggacagccacgtcctcgcggcgtacgccagcttcctgtgggagcaggacgaggacgaggacgacgacggtggtcttgggggaggcgagcagggatcacccgggcgtgctacgcagccgaggcagctggcttccacggccgtttgactaccagggtggccgagatgggctaacgatgtgcttgctgaggatgatcatgcttgtagtattgtgtttccgtgtaacctgcaaaatgtttggacggtcgaggtgcgtgcacttgctacagaataaagaacgtaaacggttgagggaatggaaggctggacctgtaaacattggtgattccgtctgcagatgctaagttgtcactatgtttattggctaaattataggagtactaagggggtgtttgttccaaaaaaaaaaaaaaaa

SEQ ID NO: 5236 - DNA, 1729 bp, Triticum aestivum
  unsure (1)..(1729): unsure at all n locations
  Clone ID: TRIAE-23APR03-CLUSTER69_1
atgggcctagcagagaaccacctgtccctggatttggtgagggaatggatggaggagcacgcggggccggcgatgacgccggcgcgaggcgacgaggagagggacctcaccatcagcgggctcgccacgtaccagccatacgacgggatacttgccttgaagatggctcttgctggatttatgaggcaaataatgcatgagtcagtatcctttgatccatctcaaatggtgataacatctggtgcgacgcctgcaatggaaatactgagctcctgtattgctgatccaggaaatgcatttcttgttccgtcaccatactaccctgggtgggacagggacataaaatggcgaactggtattgagttgatacccgttccttgccgtagcaccgacaactttaacatcagtatcactgctctagaaatagcgtataagcaatccctgtggtggtggaaagggtcacggagggtcacaaatggcaacaaatcaaaccgctgaaacacctatataacccctttaacactgcgagatcttctagaatttgctactgagaagaatattcacttgatttctgaggaagtatttgcgggatcaacattaggaagtggtgaatttgtcagtgtggcagagcttgtgaacgagctagaagactttgacagaggcaggttggaaacaatcatgcctttggtggtggaacaaagaacagggatcatgttcatattggtcaatgtcctctctgtccctggttgaatccaagcacgggacaagattgccagattctcatctgtgtcgaccccgaaccagcgccttcttgttgccatgctttcggaccagaagtttatttcaaattacctgaaagttaacagagagaggctgcgcaaggcgtacaatctgctcgttgatgctttgaagcaggtgggcatcgagtgcttcaagagcagcggagggttctactgctgggcagacatgagcaagttcatccggtcttacagcgagaaaggagagcgcaggctttgggacaggctgttggaggaggcgaaggtcaatgtcaccccaggttcatcttgccattgcattgagccgggttggtttaggtgctgtttcacaacgttgagggagcgggatattcctgtggtggtggaaaggctcaggagggtcacagctagccacaaatcaaaccgctgaaacgcctagagaactcctttcgggcctgtagggtgtcaagaaataactgcttcgccaggtgcttcgaggaaaacgcaggagcacacagggaaaaaatgccttaacctgacctgttccgatcagagtgattccgtcttggcatctaccattgggggaggtttgaaactgacagttgtggaaacagtcatgtctttgggtggtggaactaagaacagggatcttgttcatacccatcatgtcctccctgttcccgttcgaacccaagcgcgggcagctctttgggaaggttgtaattgtgtcggattctcnatcttgcttccccgtaggtgtcacaggcggtaaaattgtccgtctccatggtaggcgtgggtcaaatcttgtgttcattcacccgttcaatcctgttatcttcctttttggcaattttgttctttgggtaacataagttagtgtcgaggaatccggtttctgccgttcttgtcatctgtaaagtatccagtttggaattcaggttcttcctccttttgcaactcggttctttggt

SEQ ID NO: 5237 - DNA, 1494 bp, Triticum aestivum
  Clone ID: TRIAE-23APR03-CLUSTER70041_1
caacaaaacaagccacccgtccagatcccccaagtccacccatccgagatcgcccaaaaaaaaaacaagtcacctgtccagatcccccaagtccacccatccgagatctcccaaatccacccgaccaagccatggccggcggcgacgaggaggccacgacggcgctgctgccgccgccggcggggtcggcggaggcggagcgcccgcctcccccgccggccgaccggctcggggtcggctacctcatcttcttcacgctcggcgccgggttcctgctcccctggaacgcctacatcaccgccgtcgactacttctcctacctctacccgggcgcgcccgtcgaccgcgtcttctccgtctcctacatgctctcctgcctcctcccgctgctcctcatcgtgctcgtcttccccaagtccagcgccccggcccgcatcaacaccgggctcaccctcttcacgctcgcgctccttgtcgtccccgtcatggacgccgtctacgtcaagggcagcctccgcctctccggcgcgttcgacgtcactgtcgccttcgccggggagctccccgagcgctacatgcaggctgtcgtcgccggaaccgccgcttcaggtgtacttgtctcagcacttcgagtgatcacaaaagcgagcttccctcgggaccccaatgggctaaggcaaagcgcaatcctgtacttcatggttggcatggtggtcatgatcatctgcatagtgtgctacaacgtggcgcgcaggcttcccgtcgtggtgtactacaagaacatcaagcagagggctcagaaggcggaggtgggtggtggcatgacggggcctgcctggaggtcgaccctgtggagcatcgtcgggacagtgaagtggtacgggataggagtagttctcatctatgcagtcaccctgtccatatttccggggttcatcacggaggacgtgcactcggaggcgctcaaggactggtaccccatcatgctcatcagcgcctacaacgtgtttgatctcatcggcaagtgcctgccggccatctacctcctgcagaactccaatgttgcggttgccggttcgttcgcgaggctcctgttctatcctctcttctatggctgcctgcacggacccagctacttccgcaccgagatcccggtcaccgtgctgacctgccttctcgggctcaccaacgggtacctgacctccgtgctcatgatcctcgcgcccaaggccgtgcccatacaccactccgagaccgcggggatcgtcatagtgctgttccttgtggttgggctggtcctcggttcgtttgttgcttggttttgggtcatctgaatgcatggggcacctgccatccgcccgcgtatttcgtatctgtgtaccatagcacgctcttcttgctgatgcttcattttgcccaccaaagggtatgtaatttctcaactgtgcaaatgtatgtaaatttccatttcatgaaaggatgaccactgttcat

SEQ ID NO: 5238 - DNA, 1757 bp, Triticum aestivum
  Clone ID: TRIAE-23APR03-CLUSTER70072_1
acgtgttccagaataccgcgactagaataccgcgactatagccatctacccctggccgttctcctccagctgttgcccccgcgcctacgcatctcctccccttctcttctcggggactgactccccggaaccagtaaacgagagcccgccgagaagaggaggcggaggccgcgggtgcgtactggccggccggccggctgcccacggtcccatcgcctcgtcggacgaacagcgcatctgcctccgcgcccggcggccgcgttcccggcgggataacgatgcagggcggaggcgtctccggattccataacgcgccggtgacgcgggcgatcgtcctcgccagcggcctcctctctgtcgtcttcagtgtcaaccgccgagcccgcgccctcggcctctcctaccaggacatcataaagaactttcgagtttggaggatatttgcatctgtatttgcctttcagtcaacaccagagttgatgtttggactctaccttctgtattatttccgtgtgtttgagaggcagatgggctctaacaaatactctgtttttactttttccccgttcgtagtttattctctatcgcagtatcattacctcttgagattctatctttggttctcctgcacgatacaaactacatcactgctcttgcatctggaccttatggccttatatttgcctcgcgtcttccccttctcctcgccattcccttctcttcgcgttttcgtctgtgtcgcgtcattctcagtcctagctcgcccgcagcccctgctggcctcctgcttccggtatcttcttggaagcgttcccttattcctggtatttgtgccctgtcggcccgttcgctctgtcgtccccctgtgtttggttccccccggtggaggctccctctgcgcgtggcttctttttccgcctgcagtttggtccccccgtccgccagctcgtctcggccgtcatgtaccctcgtaggcaggccgtcctgcgcagacccgcccgtctgctcggttcccgccggctgcggagcccccagagtcctccattgctatgctggtatcgatgggctttgacagcaatgttgcgagacaggccctcgtgcgagccagaaatgatatcaatgtagccacaaacatcctgcttgaagcgcagtctcattgagctgactcaccgcaactttgctgataaatatggcgggctgaactggttatatctggccatgaatggttgttccccacgcattcgacaacagatcggtgaactcatggtagtggtttggagaagttgaacatgttccttcctagttgacagcttaggaagccgggaaacatttgctgcagttagtgtggtcacatgtcaatactaaagagttttctcaactcagaggcaatgtaccatttgaaattcagcttgtatgataggtgatacataaacatttcaatcatagtgtaaaattgttttgcagcctgaaagaagtttcattatacacaaaaagcaaataatatccacacacacaaaaaaaaccaaagttcgccgcagtctcattgagctgactcaccgcaactttgctcatcaatatggcggggtgaactggttatatctggccatgaatggttgttccccgcgcattcgacaacagatcggtgaactcatggcagtggtttggagaaatttttatgtatcacctatcctacaagctgaatttgaaatggtacattgcctctgagttgagaaaactctttagtattgacatgtgac

SEQ ID NO: 5239 - DNA, 1359 bp, Triticum aestivum
  Clone ID: TRIAE-23APR03-CLUSTER70141_1
ataaatatgagtgagatcatcccccttgctatatcgtctcgcacacgccagcttaaattcccatatgcatcttgacaaacctttctagatagatagacagatagaattgagccgtgacctcactcttaatttggcccctctctctttctccacacgactgatcactgcgatatcaccactgacgagatggcaccaaggtcctcgtcaactcgctactagatcgtccgaggcaggcacggccggccgtcaattgatctcccatggaggcgagcaagggaagcgatgggagctcgggcgcctcggcgagcaacgatgacagcacggtggaggaggaaggagcgggccgtgaatcgcacgaggacgcctgcagggggaactctttgtcgtcctcgtcggtgcgcccctacgttcgctccaagaacccgcgcctccgctggacgccggagctccaccactgcttcgtccgtgccattcataggctcggcggccaagatcgtgcaactccgaagctcgttcttcagttgatgaacgtcagagggcttagcataggccatgtcaagagccacctccagatgtataggagtaagaagattgatgactcaggccaggtcataggtcatctccccttgccccatgccttccatcatcgccagagtggcgccggcaccatgttgtcaaggtttggtgctgctgcatggcctccatggagaagcttccatgaaccatattgggcccatggtcgcccctttcttggatccaagacctacaactctttggaagctgaagccgaggcggctttccttcggtcccgagctcaacatgtagctcgggctgcatctagcaatccgggattgatgatgcagtcaggctgtccatctcggaacgatcatcataccatgaaccaccagcctaaacgactgctgcaactgacagtgcgcaatgacgacgatacccatgttcttcttgatcttgatctcggtctctcgctcggtctccccgtgccgatgagggaggcgaagcggaggagatcgggctgcggctgggtgaaagaaggccctgatgagaaaggagccgatgaagaacaagtggatgagaccagcactgccactatgctatctctgtccttgttctctcctagggatgctcctaggaagatgagtagtactagtgctagtgatcatgcagtagatgagcatgctacaaggagggcaagtactcttgatctcaccatatgatctacacaatgtggtgatatctcgtggtacttgtccatacatacatatgttatatattatgtagagcgaacatatatacctatgttttaccatacatattatgttatcttctaattaatgtttg

SEQ ID NO: 5240 - DNA, 1107 bp, Triticum aestivum
  Clone ID: TRIAE-23APR03-CLUSTER70340_1
ttccttcccaagaaaccctagatcaagtgctgccgcctccctctccccgatccagatccctcctccgacgcccctcctcccccatccccggccatcccccttccatcacccttaatgtcccagtcgccgctctctctctctctctccctctcggttcagtgagatgggatccactcccgcagccaccgccccaccctcacactcaccatcgacgacccccgccgccatcgcacaccatagcgccatcccctcaccctagccccaggtcaggcagtgcgaggcggcgctcctagacccgcgatggccgtctgggtcatcgccttcgaggacgacgagtacgccgacccggcagtcatcatcgcctccgagacggacgcgtgttggcggcacatggggcccacatcatcatggccgtgcgcaacctcgccgcggcagaggccgtgcgccaggtcgtccttgccgagacccccgtcgccagcctcaacctgatagagctggacctctccccactgacctccatccgcaacttcgccgccaacttcgccgacaggggcctaccgctgaacatcctcatgacaattcaacatacccctgccctttcggagagggaaggtttcccactcatggacacctagctgaatgcctgaacctgaacctcgtttttcttcttcttcttcttcttcttcttcttcttcttggtaattccttgttgattccttctgggcatgctatattattgggtgcaacaacaaattattgtccttgttttgatttccttcctgtcaagttcatcctttagtgctagtactagtggtacatcagtttgatttaggaaaaacaccagcctctgcttaacattaaatctagtcaagcaattgatgcacaacatatttgtttttgtacaacaacaatccgttaaacgatctggcctgtatacacatgttgaggaagagagagaggatatatacttgttctgttgcttctatatacatgtatatacgtttagtttttcaacatgcttcaacattttttttaaaaaaaaaaaaaaaaaaaaaaaaaaaaaaaaaaaaaaaaaaaaaaaaaaaaaaaagaaaaaaaaaaaaaaaa

SEQ ID NO: 5241 - DNA, 1780 bp, Triticum aestivum
  Clone ID: TRIAE-23APR03-CLUSTER70360_1
ctacgcctcactcctactaaaactcaaggcgcgcacgccgaacgcacggccaccgccactgccccagcctcctttcctcctctcccaccccacgccgcgcacgcccgagcgacccccatggagtccctgcttgcggcgctcccggcgggcggaggaggcgcggtcgctgccgctgccgcggcacgtcggcgggctggccgcggcggccgcgctcgccgccaaggccggcgtcgtcgggacgggccgcaccaacgcgcccccaggtgttcctggtttatcctcttattggaaatctgcaccagttaaaagatgaagaagccccataatacgtcccgcaaaatggtctgacatttatgggctgaagtacaccataaagacttgggcttccatcactcgctgtgttcaactcttctgcagtagccaacaaggctatggttgagaaatactcatccatttctactcgaaagctacctcaagctccacccgctccacgtgcatctctcgccgagagggaggaagtgaatggcacttttgctgttctttaaagaggaaaattggtagttttgctgttggtaatgacgtgtgtaaagtgacgaattggccgtgctctacagaacttcgtggaccacatgttaacctctttcgatacgttggtgactgacgacccacattctcctctgaacttcagagaagttttcaaggacgagctgttccgcctgtccttgatccagagtttaggcgaggatgtgggttcagtttatgtgaaggagtttgggagggagatatcgaaggatgaaatttaccagatcaccgtggttgacatgatgatgtgtgcaatcgatgttgattggagggatttcttcccatacctcagctggatcccaaacaagggcttcgaaacaagagttcgtaccgcagaatctaggcgaaccgcggtgatgcaagccttgatccatcaacagaaaaagagaattgcgaatggcgaggccagggcatcctatctggacttcttgctggcagagaaggcactgacagacgaacagctgatgatgctggtgtgggaggcagtcatcgaggctgcagatactactttggtgacgaccgagtgggcaatgtatgagcttgctaaaaacccagaaaaacaggatcggctctaccaggagatccgggaggtgtgcggcgacgagacggtcaccgaggatcacgtgccacggctgccgtacctcagcgccgtgtttcatgagacgctaaggttccattctcctgtcccactggtgcctccaaggtttgtccatgagaccaccaaactggccggctacgacgtcccagccggcaccgagatagtcatcaatctgttcgggtgcaacatgaacaagaaggattgggaggagcccgaggattggaggccggagaggttcatggatgggaggttcgaggccgcggacatgtacaagaccatggcattcggcgccgggaggaggtcctgcgccgggagcctgcaggcgacgaccatctcgtgcgctgccattgcgcgcttcgtgcaggactttgcctggaggctcaaggaaggcgacgaggacaaggtggacaccgtgcagctcaccagctacaagctccatccgttgtacgtgtatctctcaccgagagggaggaagtgaattaatgccagctttggtttggtaatgaggtgctggatttgctctttacaaacttggccaaacaagatggcagtatgatataagtttataatgcctaatggtttgcttgacccaaaaaaaaa

SEQ ID NO: 5242 - DNA, 2140 bp, Triticum aestivum
  Clone ID: TRIAE-23APR03-CLUSTER703_1
gctcagctccgccccagctcagtccccgaccccgagctgatcgtcccgccggcggcgagattcgaaagtggtgccggcatctcgctgaggcgggggagagagagagcgacagagagagattctcccctgtgtccactcccccgccgctccaccgagacgacctctccagccccgcctcgcctcacaggggcggcgggccgcctctgaagaaagggccctggacgtcggcggaggacgccatcctggtggactacgtgaagaagcacggcgaggggaactggaacgcggtgcagaagaacaccgggctgttccgctgcggcaagagctgccgcctccggtgggcgaaccacctcaggcccaacctcaagaagggggccttcacccccgaggaggagaggctcatcatccagctccactccaagatgggcaacaagtgggctcggatggccgctcatttgccagggcgtactgacaatgaaataaagaattactggaacactcgaataaagagatgtcagcgagctggcttgccaatatatcctgctagcgtatgcaaccaatcttcaaatgaagatcagcagggctccagcgatttcaactgcggcgaaaatctttccagtgaccttctgaatggaaatggtctttatctgccagattttacctgtgacaatttcattgctaattcagaggctttatcttatgcagcacagctttcagctgtttcaataagcagtttacttggccagagttttgcatccaaaaactgtggcttcatgggtcaagtaaaccaagcagggatgctaaaacagcctgaccctttactccctggattgagcgacaccatcaatggcgctctctcctcggtcgatcagttctcaaatgactctgagaatctcaagaaggctctgggttttgactatctccacgaagccgtttgcttggtcagagctttgcatccaaaaactgcggcttcatggggcagccatgcctttttaaatggcaccttctctacttctaggaccatcaatggtcctttgaagatggagctcccttcactccaagataccgaatctgatccgaatagctggctcaagtataccgtggctcctgcgatgcagcctacggagttggttgatccctaccttcagtctccgacagcaactccgtcagtgaagtcggagtgtgtgtcgccaaggaacagcggtctcttggaagagctgcttcatgaagctcagggactaaaatctgggaagaatcagcagctttccgtgagaagttcaagttcctctgtcagtacgccgtgtgatactacggtggttagcccagagtttgatatctgtcaggactattgggaagaacctctgaatgaatatgctcctttcagtggcaattcactcactggatccacggctcctgttagcgctgcgccgcctgatgtttttcagctctccaaaatttctcctgcacaaagcccttcgctgggatctggtgagcaggcaatggagcctgcatatgagcctggggctggggacacttcgtctcatcctgaaaacttcaggccagacgcactcttctccgggaacacaactgactcttccgtcttcaacaacgccatagccatgctcctgagcaacgacatgaacacggactgcaagcctgttttcggcgacggtatcgtgtttgatacttcctcgtggagcaacatgccacatgcttgccaaatgtcggaggaattcaaatgaattccttgccgaaccttgagcggtatcgatggagattcttggtatccctcaccctgattgttttgaggaaaaattcagagaaagcctcatcgattgtatacgctgcgtgctcgccgtcggacaggtccttgacggcgtatgcagctgctaccagaagtgctctccatgcaactaagcccccttttccccaataaagttcgtggagataagccggttatctactttttgtttgttttgtttcgaactagagaacctttttttgtcatctccgtggcatttatttgaacaatgtaaaatccgttactgcttttctggcgtactctctcttgctgaacatttccccccaatttgtcaatcaatagtagcattttttttttctccccacaaaaaaaaaaaaa

SEQ ID NO: 5243 - DNA, 1389 bp, Triticum aestivum
  unsure (1)..(1389): unsure at all n locations
  Clone ID: TRIAE-23APR03-CLUSTER7040_5
agccaaattgccagtctttaattactgaaaacaacattctcattcagtgatcagacctgttatgcgccaactactgcagcgaagtttccagagaaccatagtgcagatataactaagtatatacaaaatgttggaactggtcggtccggagtccaagttggtgccacagtttaaactgcagcatccatggaagtgcanacatgcatgtttacaagagtgtcgatcagcggcatgaaatgcaattacatgaatgataatctgccaagaaaactgttgacatgtcagtcagctgcagaaaccatctcggagtacctttctagcatcatatgctttgacaggtcagtgaaatagcccttttcaacttcaagcccttgctcctctgcaatctgctccaccagccattgaacccgatcggcgccgacgtggtctggatccagcaaaaaaacatgcgatctccgtgcaattgtcgccatggaaaangtgcaagtgcctgtactgacgggagccctccgctccgtccgtcaccctccgggtgattcttctcacggttgggacatccttgcagaatatcggcacattgtagctctcgaccaaaggttgagctccgaccatggtggcgcctctttcacgaggaacgtgaactgggcccacatctggcttcatcggtagagtatcagggagcaccgggcctgcccattggacgcccttgtggtttggccggaagtagccgagctcacgccggactgcactgacgctcttgctggtggggtgtgctgccgcatataggaacactggaacttgcaagccattgccaatgtcagaggctaccagcttagccagctgagcagcatcctctattgtgtccgcttgattcaaggggtggaatgaaatgtcatcgacgacaccaatccttggatgagttccacagtgcacttcgaggtttatggctgaaaatgcagcctcgatcatcgccagcagtaccttcctgattgggctaaatacagctccaccagtcgagctttcgttggtgatgtaggagacaagcgtgtagcggacacggttgtagtactcatcctcgaacttgttgagtagaaccacctcagggtctttctggcctatgcggctgatggcatcgacaacagccgcattttggctttcagagatgtagagcttgcaacagatcaccttcgagtgcatggtgctgagcttcgccttcacgtttgcctggtcggtgtgcttgctctccatgccttcggctcccctctccctctctctctctctcttgtggggaatggaatggagtggtagagcaacgccttcttcttatggttatatggatcaaaaagttgctttcaaggaacctttttgttccgagtaagccccaaccat

SEQ ID NO: 5244 - DNA, 1547 bp, Triticum aestivum
  Clone ID: TRIAE-23APR03-CLUSTER7047_1
atcaccaccgcggaacacagcctgccaccaagaaggctcatccccggcgctgtctcccacctggcctgcgttagctggggcgcagatcggcgtcaccccacgaaaggacaagagcgcaaaaccccaccacggaccctcgccgtcgctgtctccgtctcccatctcgccggcgctagctagggcaccggtcgccctccccctccgacgatgtcgacgccctctgatccagcggcgtccgcccagcccccctccaccgcggccacctccagcagcggcctcaccttcaagctccaccccctcgtcatcgtgaacgtctccgaccactacacccgcgtcaaggcccaggcctccttccccgccgaggccccgtcgccgggcaaggcgcaggcctcctgctccgccgaaggctccccgccccccgcggagccgccgagagtcttcgggtgcgtgatcggggtgcagcgcggccggacggtcgagatcttcaacagcttcgagctcgtcctcgaccccgtcaccggcacgctcgagcgcgccttcctggagaagaagctcgagctctataagaaggtgttccctgagttctatgtgttgggctggtactctactgggagcgatgtgcaggatactgacatcctaatccacaaggctctgatggacattaatgaaagccctgtttatcttctcttgaatcctgcaatcaaccactcccagaaggatctacctgtgacaatttatgagagtgagttgcatgttatcgatgggggcccccagctcatctttgtcaaatcaaattacacaattgagactgtagaagcagagaggatatctgtagatcatgttgcccatctgaaaccatctgatggtggctctgcagcaactcaattggctgctcatcttacaggaatacacagtgccatcaagatgctcaatagcagggtccgtgttatccagcaataccttggtgccatgcaaaagggtgatattccactggataattcactccttaggcaagtctcaagcctcgtaagaagactaccagctatggaatcggagaaattccaagatgacttcttgacggaatacaatgataccctcctcatgacttaccttgcaatgttcacgaactgttcaagcacaatgaacgagttggtcgagaagtttaacaccacctatgagagatcccctgccaggagaggaggccgaggcgctttcatgtagatgggtcctgctgccgctgaggttttgatgctggttatccgtgctgagattttgaaaatagttatcatatctagacgcaatttttgcgtgctatcagttaggtgctctatgttcccgcagtatccgagacttttcaatcttcttatcccctctgggttggatcagtgacaagacgtgcctgggatgattgattatcctcttgtcccgaagttgacatgtaaagttcggcttaatagatgttgctcaagttaactcgtaactaaaaaaaaaaaaaaaacggtcttgtcctgccttctttaaattggttatatgcttgcagaatcttg

SEQ ID NO: 5245 - DNA, 624 bp, Triticum aestivum
  Clone ID: TRIAE-23APR03-CLUSTER70707_2
agaggaggaggagggctccgtagtcgcaggggcttctcgcgagcgaggctcctcccccccgcctcgttcatcagcagctcgtcaccacctccggccgcatactattattaccaccatcacccccgcaaatcctcgttccctccccgttcgtcctccggctgattgattgattacccgccctaagaaccgaaaatcaaaaataaagatctccgctttggccgtcgatctccggtggttgattctgtgagcgtccgctgctgcttcgtccaatccgttcggccgactcctctcttcggtttcctttctcaaggttggatcgagggcattaggcaggagatggacgtggagggcaagatgaatttggagattggatccaaggacatggaggtggagagcaagaacctgaagctggaggacccactgccttcctccgcgatggacatggacgagcctgctgttgctgagagcggcgaggtggatggcagcaatggcagctccaaggagtgccccttgacccccagagattccatgacctccaatgttcctgtggccaaagagccgagatcagtcagcaccgactttggggatgagctggaccttgagcttgtgagtggagagccagag

SEQ ID NO: 5246 - DNA, 1688 bp, Triticum aestivum
  Clone ID: TRIAE-23APR03-CLUSTER70717_1
ctaccgcgcctcgcagctcccgcctcccggacgccgacacccagcagccgccgccggcgcctccgcccgacgccgacgagggcttatctctccaccgactctcttcgcgttcctcctcgcgggcgctccgtcgctgagcagctcccgccagcggcacctccagaggcaaacaaggctttatagaaaccgaggttcttaacatgctgccgcgtggacgcggcgtgaagaggaagcagctggagtagaagaagcataggattagagatgctgccgtggagagcaaggtcgctggcagacatgctatcggcttggagtgaagaagaattagatcaataagaagaaggacaaagttttagattgcgccatgaagagccagggctctgccggacatgctatcgctgaagatataggaagcaagaagattgtattggtgaagcaaaagaagaaaattaagcatgccaaagtaacaagctgttgtaccaaggctcataatttggtgactctcaatgaggatgagggaacacctaaactcaagaagaagaagagcaagaagcagctaaaggaaagcaaaagtcctgttgaggtacagagtccattggacagtaatgatgctggaacacttaagctgaagaagaagaaaaggaaggtgaaggaagggaagagctctgttgagcccaatgatgcagatgatatcctgcatgaaaatctcgatgaagaaactctaaacgctgatgtcaaccaacttccagcagagagtgaagttatggatattggggaaccagaaaaggcaaagaaacgaaagaaaaataagacagctgatgtcaaacaagttgcagaagagagtgaagttatggacattggggaaccagaaaaggcaaagaaacgaaagaaaaataagacaaagaaagtaaagcaatctggggaagtcaacaggactgatatgcaggtatcagttagagaggacaatttggaggagcatgaagttgataccgcagatgttgatgagattgcatcagtcgatgaagactgttccagaggaataaaaaaatggatcttggagtacagacagaaacggccaggcttgaaagtcttgcagcaaaatatagatgtgtttataactgcacatgaggaacaacaagagcgggagaagaaggaaagagaggcagcagctgcagaagatgggtggacagttgtgatgcatcataaaggtaggaagaagactacagatgttgaaactggaacagcggttggctctgtatctctggctgcaatgcaagagaaaatggctcagaagaaacccaaggaagttggccggaacttctacagacatcagaaacgagaagctcaaatgagtgagctggcgatgctgcagagcaagttcgagcaggacaagaagaggatacagcagctgcgggctcaaaggaaattcaagccttacggattttgaagggggctcctccatggagaggcagtgttcgttccacatcactcgagaccagccgtcgctggagtgctggcttggttgctatgttgaacgtgcaccacattcctttttttgacagaaaatgttgcatcattggacaaatgtaccatgcttgttgactgggaactgtgccagtcgtgtacaatggcttgaacattcgcagcaaatgcattattggttatctggctcaaaaaaaaaaaaaaaa

SEQ ID NO: 5247 - DNA, 2363 bp, Triticum aestivum
  unsure (1)..(2363): unsure at all n locations
  Clone ID: TRIAE-23APR03-CLUSTER7075_1
agacctgataaaataaggaaacagagacccagcaagggaaggggtccgtcggggtggttagagtccaagagccgacggcgaacgtgctctcctctcctctcctcgcctcccctccggctctctctccccctctccgcattccgtcccaccgcattccgggtatatttagccgcggcacaggagggataacctccctagaggcaggagcggggaggcgcgcgagcacccggacggccgtctccaccgtcgcttctccggccgccttccgtccagatccctcttcgcccagacggtcggtcggacaagatgatgggcggcttcgtctccaggatcctcctgctggtttttggctatgcgtatcctgcatacgagtgctacaagactgttgaactgaacaaacctgagatcgagcaactcatattctggtgtcagtactggattttagttgcccttatgacggttatggagaggtttggagatttaacaatatcatggctaccattttactcagaggcaaagctgnttgttctttatatacttgtggtaccccaggacaaaggggactacctacatttatggaactttctttaaaccatacatttcacagcatgagaatgaaattgaccggaatttgcttgagttgagagctcgggccagcgatgttgttgtcgtttatgtccagaaggttgctgctgttggacaaaataccttctttgatgttttgaagtatgttgcgttgtagtcaccatcccaatagacctgataaaataaggaaccagggactcattagaggcagggggccgacggggtgcgtcgagggaaggaggcgacgctggtcctccgctcctcccccctcctcgccgcctcccctgccccctccccccccctataccttcccgccccccacacggcagggattccctggagccgcgcaggagggggaggctcgcgagcagcgggagggcggtgccctgcgtcgtgccgcccgccggcctccggcctcgcccctccggacgccggttttcctcctccctcctcttcccggtctgccgctgtgtgccgtctccggctctgggtgtgggctctggcagattgtccgtacctgtgtgcgagcagccgcttccttcggacaagctcttggatggtgttgacctgaggaccctcttggcctggtttgtagttgtgacttgatcataacggatttcaacaccggtggtgaaactatcggacctttgataggtgtacaaccaatatcgtttaaggaggaggcattggaggagaccatccgcgtgacgcgcgccaagctaaggaggcgtgccgccgccgaggcgggcgcgtgaaacctagctgcaaaccattgttttattggcgcatggtgttgttgctcctattttttgagtcttttttagattgtcatgttgtctggtggagagaatatctgttggtcatccaattggtcgttctgtttcagaagttgtcatccgttcctttcttctttcctgtggctctcgctggcctgtttatgtgcctggaagttgtaaatatcaccgggcatgtgtatatacagcattgttggcatgtgaaatcaaagcaacaacgtcctcaggaaccacagcagtcacaaccacaaccacaggtacagcagcagcaaccacaaaggcaagcgcagcctgttatgcacagagctgcatctattgctgcacggcaagcagcaatggcacagcaagctcaagagaccaagcccatttcccccaagttcaagcgtcaagcatcagcaaaaggtggtccagcggcatccacgaaacccgccgcggctgctgcgcccacaacaaaacccgatgagaagacaaagaaaagtgaggcgaagcctgccgcggagctagtgccggctccagccgctgaagccgttgtgccaaggcccgagcctaaggcccagcctgcccctgaagccgaagtatcggacgacatggcgatcgacgaggccaacgttgctgtggagggcgcagaagaggttgaccctgcactagaggaggagacggtcatggaggagaccatccgcgtgacacgtgccaagctaaggaggcgtgccgccgccgagggccccgcatgaaacttagctgcaagccattgttttattggcgcatggtgttgttgctcctgttttttgagttttattaggttgtcatgttgtttggtggagagaatatctgttggtcgtccaattggtccttctgtttcagagttattatcacccgttcctttcttctttcctgtggctctcgctggcctgtttatgtgcctggaagttgtaaatatcaccgggcatgtgtatatacagattgttggcaaaaaaaaaaaaaaaa

SEQ ID NO: 5248 - DNA, 1145 bp, Triticum aestivum
  unsure (1)..(1145): unsure at all n locations
  Clone ID: TRIAE-23APR03-CLUSTER70835_1
atagatagcaaagcttctttcgctcccttccccttttctctcgtagacaggcgcaagggaggcgaccacatctctcccaccgaaggcccgcgaggctgtgggctctcgcctccatctgccgctccggcggtggttggaggggggagccccggtcctctgccggcttgtagataggtgtaggggtaggtttccttggggcgctgcgatggtggtggaggcagcgtcgcgtcgggctgtgtatgctgcggctcgttccccactccggcgaagctctctatggtggagccggcgggctagcggccgcgtcttctcgttggtcaagtctgaccggcgagatctgagtgcaggggctgggtcggccaggcggcggcggcgacccagtcggtgctttttgtcctccaggtccgcctccgtcttggcggtgtttcctccagcgcagctcgagggcctgggaggttgtacaggagcgaatcggccggctgttgctgcctcttttggcagtgtcgacggcgaccttcagggcgcggtgtgtttggagcagggctcgtggaagagggagggcagatctggcgttcttctccgacttcgtgggatggagccggcggatctgcagtccgttgagcacggggatgctcccccgccgacgtgccccaaggtttcggtcccgtcgttctatggcgggtcacttaatcggctcacaaagctgctccagcgatggtgcttcggcggattcgggtttgttggcagcctgtcttcccatcctccggcagtgctttggcggcgacggcggatggagacgcgtgttgaagatgttgtgtgcaagggcctccaaggactgggttgtacttttgtattttggggggtcttttgtgcaaagttccaaggacacatgtgtttctgggtccttctagtgtgtgctgcgtgtgtgcgctgtaactgttttgagctatgaacacgtggttaccttcaaatttttttttgcttaattccagcaatccgccgacatanaaaccatntctggttgtcctccggaggaaattataagccagcatgtcctcntggtaccccatggtggtgaaagtgatttctaactacaagatgactttatttgaaaacggaatccaaatacaaaaaaaaaaaaaaaa

SEQ ID NO: 5249 - DNA, 1448 bp, Triticum aestivum
  Clone ID: TRIAE-23APR03-CLUSTER71100_1
aatcggcatccagttgacaactcaatttaatccacagtgaacaacacccaagaacacactcaccggagcaagcagtccgtgaagcgatggcgcatttccagggccagcagcacggccacccggccacccgcgtcgacgagtacggcaaccctgtgccggccggccacggcgtcaccgggaccgaaggcttggggcacttcccgggccaggcccagcagcacggccacaacaccacccgcctcgacgagtacggcaacccggtgacggccggccacggcgttgggctgggatccaccggcactggagtgcacggcgggtacgggtctgccggcaccgggcacccacgacactgcgcggccacggccgccaggtgggatacggtgccactggcacgggcacccacgacgctgggggggtttggaggctccgtggaattgcccctcggcacgacaccaccggcactgggcttcacgacgccggtgggttgggcacgcggagtacaccacggccgccggacgcgacgggccagggtacacggggacgactggcactcatgggccagggtacacggggtccaccggcacaggcggggcccacggagccactgaggggacgcatgagaagaagggcgtcatggagaagatcaagcagaagctccctggcgggcacaaggacacccagccgcacaccacggctaccggcggctacggacctggcaccactggtaccactggcaccggcggctatggtactggcaccaccggcaccgcggggacgcacggcgccactgagggcacccacgagaagaaaggcatgatggagaagatcaaggagaagctccccggcggccaccactgagctgagcctagcttgcctcggcctcgggtacagagtagtgaagaataaagactcgaggaatcgccgtgtgcacaatcaagggatagtatttaagttttttttatgttatcctttttatcttcttttttttttacaaaatgttatcctttttatccgtgtgatagatgttgcagtactgtgaaatggcctagtttgtaagtacgtttgtctggttggttcgcactcggtcctccggctcaggggggccgcgaatactgggacataggccacaccgccgggtatgacgccaccggtactcatggcacagggcacacgggccgggtacggggcgaccggcactgggatcactggaacgcacggcgccactgagggcacccacgacctcatggcgggggtagccgagcaaggagaagctccccggcggccaccactgaactgagcctaacttgcctcggcctcgggttcagtccagtgaagaataaagactcgaggaaccgccgtgtgcacaatctaagggcatagtgttaagtttttcatgtcatcttttttctccgtgtgatagttgttgcagtactgtgacaaaaaaaaaa

SEQ ID NO: 5250 - DNA, 1080 bp, Triticum aestivum
  Clone ID: TRIAE-23APR03-CLUSTER71169_1
aactgcctgccggagtcctgagccctgacctcccgcaaccccttcccccgaccctccccccccaccccccccccccccccccccggcagctcgccgcccccccccaccagggccgccgccccctctacgggccgcggcgctcggccgctaggaccgcggccggtgacatcggcaagcggccaagggcccggaactggtcaccccggcacagcgcgtagcggctgcgcctccagcgggggccgcggggaggagcatcgggtggggggatgccgggggtgggggccgcgcggtcggggcggcgggtgcggcgagcggccgggcggccggtggagccgggcgtccggctggacgtgcaccccgtcgccgccgccgccgtccagcgggccatggaccccctctgggggctccccgtcgaggaggggctccgcctgcccgagggcgccgccgccccccgcgccccccccggcagcgccccccccccgccaccccccccacgaccccgaccccgcccgcccgctcctcccgctcgccgtcgccaagatcctccgcgccctcgcgctccaggagacccccggcctcctcatcctcggcaagcaggcaattgatgatgattgcaaccaaacaggacaaatgctagctgcattgctcaactggccgcagggtaccttcgcatcaaaggtgataattgacaaggataagcaaaaagctactgttgagcgagaggtcgatggtggaactgagacaatctgcttggatttacctgcagtgatcacgactgatctgagactgaaccagccccggtacgcgacgctgcccaacataatgaaggcgaagtcgaaggtgatcaagaaagtcacccccgcagacctgaacgtcgacgtcaggtcagacatggaggtgctccgggtggacgagccgccaaagaggaaagccggggtgatcctctcgtcggttgacgagctccttgacaaactgaagcacgaagcccgtgtcctgtaaatggatcacacatgtgcattcaaataaatcgcgactccagatgctcctgccatttgaaatgaaaataaggagatgctaaaa

SEQ ID NO: 5251 - DNA, 1202 bp, Triticum aestivum
  Clone ID: TRIAE-23APR03-CLUSTER71425_1
agcaagcagctgatccgagttaaccattagccaaaagtgatcttgcttttccatttcccaagagatctcagttcgtgtctgtcctccagtccagtgtttgtttgagcagcagccatggcctccaaccaggacaaggcaagctaccgcgccggcgaggccaaggcccacaccgaggagaaggccggacaggtgaccggcgcgaccaaggacaaggcgtgcgaggccaaggaccgggcgtgtgacgcgacggggaaggggcagggcgccgtgggaggccccgaagcagaaggccggcgaggcagggcaggagacgtccgagacggcccaggccgtaaaggacccggcgggcgagggccccaacccgcggcgaaacccggacaggtgaccggcgcggccaaggacgaggcgtgcgacgccaaggaccgggcgtcgggcgcggcggggcaagcgacggggaaggggcagggcgccgtggaggccacgaagcagaaggccggcgaggcggggcagaagacgtccgagacggcgcaggccggcaaggaccgggccgccgagggcaaggaccggaccggcagctacctcggccacgcgaccgaggggaccaagcagaaggcctccgaggcgacggggtacacgcaggacagggcttccgacgcggcgcagtacaccaaggactccgccgtcgccggcaaggacaagaccggcagcgtcctcagccaggccggcgagcaggtgaagaacgcggtggtcggcgcgaaagacgcggtggcgagcacgctggggatggggggagacaacacctccagcgcaaccaaggacgcgagcaccaccgagaccatcaccaagagccgtcactagattatacctgtcgcggttgcataatgctttctttccttcagttcccctcgagctccacattcctgtggtgtgtccgagtctctatgtcgaggtcgggcgagaatgtctgactgacgagagatgtatcttggtgttcagagttctcgttttaagttccacaatggtgtaataataacaataataataaagtactgcgtaccgtaagtaattccaaaaaaaaaaaaaaaagagccgatccctccccccccgggggggggcccgggccttctgccccctcggggggcgttccacaatggtgtaataataacaataataataaagtactgcgtaccgtaagtaattcc

SEQ ID NO: 5252 - DNA, 1361 bp, Triticum aestivum
  Clone ID: TRIAE-23APR03-CLUSTER71605_1
actaccgagcaaggtttccatacgtaccatggctgcccagctcctcctcctaaggtttccatacgtaccatggctgcccggctcgtcgtcctccttctagcgctcgtccacgccggcgtgtccgccgaagacgtcatccggcaggtgacggacggcggccacggccccggaggccccgttctgctcgcggaggcgcaggtcgcgccgttagtgcgccgacccggcaagcagtacgcgggcgccgagcggtacgcgcgccagcggggcctgtgcgccggccacctgggccgcccacccgcgcaccaggcgctggaccccggcccgcgccacggcgacacgcccttcgcccacgtcacccgtgagcggtccggcgggcgccgcacccgccccgcggggcgcgcgcgacgtcctgcgcggcgtgcgggggatgcccgccgcggcgccggccacggaggaggaggtcgccgcgctgcccgccagcttcgactggcgcgacaagggcgccgtcaccgatgtgaagatgcagggcgtgtgcggctcgtgctgggcgttcagcacaaccggcgtcgtggagggcgccaacttcgtcgccacggggaagctcctcaacctcagcgagcagcagctggtcgactgcgaccacacgtgcgacgcggtggcgaagaccgagtgcaacagcggctgctccggcggactgatgacgaacgcttacaagtacctgatgagctccggcgggctgatggagcaggcggcgtacccctacacgggagcgcaggggacgtgccggttcgacaggagcaaggtggcagtccgcgtggccaacttcaccgccgtgccgctcgacgaggaccagatgcgggcggcgctcgtccgcggcgggcccctggcggtgggcctgaacgcggcgttcatgcagacgtacgtcggcggcgtgtcctgcccgctcatctgcccgcgggcgctggtgaaccacggcgtgctcctcgtcggctacggcgcgcgcggcttctcggcgctgcggctcgggtaccggccctactggctcatcaagaactcgtgggggcagcagtggggggagggcgggtactacaagctctgccgcggccgcaacgtctgcggcgtcgacagcatggtctccgccgtcgccgtcgccccgtgatcggcaaacgacgacgacgaccggcgtagtacgtgttcatgtagttgttcgttagcctaacggtatattagtagggcttaatcagtggacactgcactcaataatgccacttcaaagttcaaacatactagaagcgcttgtatacgttctctcttggatgccgtggaggtctcaagtcacaaaaaaaaaaaaaaaaaagcta

SEQ ID NO: 5253 - DNA, 1769 bp, Triticum aestivum
  Clone ID: TRIAE-23APR03-CLUSTER71640_1
accacataccaatcgttctccccttccctcaatcgtgcagccccctcgctcactccccccagcgcctggacccgtccacccccctccttagagccacaccccactcctaccattaccagccccgcgcacccccccaccctcagcctcccgccgctctccgcttgccccctcgccccgccctgcccgcctgaccggtggtggaaccgtgccgtaggggcctccttgacctcattcagccctgaaaatcgcaaatctctaagagcatacaaccgtcgatggtacagttctctctgttgttgcattggatggcgcgtccagcgctcctgctcgggatgccccgttccagggtgttaatcccggttagtccataacagaagttctgcactccgcgataactggatcgggaaataagaaatggcgctctcctggtggccttgcagctttcaagggtttggctactgttaattgtctgcccctcagggcacggccaacactaattgacaaaaagaggcttaattgaagtatcctgtgcaggtacctactgactgctgttaagatgtacctcactatcgttactagaggttctcctgtgttgcatagctaaatgctcacttgcgccttattggctgattttgaggaccatgtggaagttcttacgtgctgctgctatgttctacatctcaatcttcacaaatatacagctcctttgtcatgccaatgtggacaccatcatcgtgtttggagtctgctggtgccgatatttgggaccattggggtagacactttaccgtcgaccaacctatgcccatcattcaatgacatggctctcactttccactatacttggtggaagtgtgatatatgttttcacagataaccagttcaccctgactgcttacagctgggcaatagcctatctagcgagcatgtctattgacttcgtgtacatcaaacacgtcgtcatgaccatcgggttgaacacatggggccttgtgctctacaacaaccttgaggctctgctcttgctcccccttgagctccttataatgggagggttttttcagacgaaggtggacagctccaagatgacaacaaactggctatcgttcgacgtggtccttcctgttgctctgtcatgcctgtttgggttatctatatccttctttggattctcctgcagacgggccatctctgctactggatttacggtgctcggtatagtgaacaagctcctgaccgtcgtgatcaatctgcttatctgggacaagcatgcgtcccttgtggggacaattgggctcttgatatgcatgtctggtggtgttctctaccagcaatcggccacaaagcccaaggtgcccaagatcgagccaaaggaagaggacgatgaagaggggcagaatttgctgcagattcagcccgggcatgagagcaacccaagtcaaaagcattcctcataagcttactttaccttccctcgacaacccattcgtggtatatctcagatgagaaatcttgaacatgctgtagaacatcggcgtttcaagagaaactaaatttcattctacaatacctttgttattgtatactgtttttcattggttagacaggattgtggtggtggtgtagggtaccagacacctcaacataccagggtcgaatcccatgtatactgaaccatgtatgctatttaccatattccagaaatacaaaggatgtacttattcgcttcaaaaaaaaaaaaaaaaaaaaaaaaggggggcggttttaaa

SEQ ID NO: 5254 - DNA, 1118 bp, Triticum aestivum
  Clone ID: TRIAE-23APR03-CLUSTER71733_1
cgctgctctgctgctgctctgctcatcttccttctaggctaggctagggttggcttgggattatcctcggattccgagcgaaatcctcgggcaatggcgtcggtgcagctctgcggtgccgcggccgtcggcgcggcggggttcgccgggaagggggcggccgccgtcgagcctgcgcgcgtcgccgcgccggcggcccggcggggggcgctccgcgggctcgtcgccagggccgccaccgtcgtcgcccccaagtacacgacggtcaagcccttggctgacagagtgcttctgaagaccaagactgccgagcagaagacgaccggtgggaactgcgcagtctaaacctcagagtggtgaggtggttgctgttggagagggaagaaccattggggatagcaaagtggaagtcggcattaaggttggggctcaggttgtatattcgaagtatgctggaatggaggtggagttgaatgattccaaccatctgatcctaaaagaggacgatatcataggtattctggagacagaggatgtgaaagacatgaagcctcttagcgaccgtgttcttatcaaggtagctgtagctgaagataaaactgccgggggcctgctgctgactaacagtgtccaggagaagccatctgttggaacggtggtcgctgtcggcccgggccatctggacgaggaaggcaagaggatcccgttgccggtatccacaggcaattccgttctgtactccaagtatgctggcgccgagttcaagggtgccgatggcacaaactacatcgtgctgagggtatctgacctgatggctatcctctcttgagctggtttgtagcgcaaggcgtggttttcctgatctaattgttccaaaggcaacttaaactagatgaagagaaatgagaatccccttccatgtttgtggctctgcaccaaagctggttttcctcactgatatgtactcctgcattatactctttgtgccagccaaggttgttagtagaatactcctagcaatctgatcacgaatcgacggtccaagatcttataaattcaaataaaaaaggcaaaatattccaacccaaaaaaaaaaaaaaaaaaaaaaaaaaaaaaaa

SEQ ID NO: 5255 - DNA, 1748 bp, Triticum aestivum
  unsure (1)..(1748): unsure at all n locations
  Clone ID: TRIAE-23APR03-CLUSTER71827_1
tccgccgctagctacccactcgggtcgtccgtcgtcgggcctccggccggaggcacagagcaagaaggcgcggagatgaacggcggagggggccggggcgcgcgcacccggagccgcctgcggccgcagtacgacgtgctgcgggccgggggcggggccggggtgctcgtcgcctgcctccagtccatgccggccgcggccggcggggcgggcggcggccggccccgggggagcggcctgcccgtcgcccctcgcgccccggccccggacgccggggctgccaccgcccggtctcccgtgctgcggtgccgcttcgccgcccccaacccccacaccggcggcatggcgccggccagcggcctcgccgttgcgcgcccggggggccgcgcccaccaccggcggccccccggacgcctctccgacggccgcctcctcatcgacttcatcggtgagagcctgggcacgccgcatctgcgcccgtaggacagggcgctcggctcccacctcagcaacggcgccaacttcgccatcggcggctcgacggcgacgccggggggatcccccttctcgctcgacgtgcagctgcatcagttcctctacttcagaaccaggtctttcgagctgctcaacaaaggtgagaagacgcctgtggaacgggaggggttccggaacgccatctacgccatagacatcgggcacaacgatctctctgcctatcttcacctcccctacgatcaagtgctcgccaagatccctgccatagttggtcacatcaaattcggcatggagactctgtacgcgcacggggcgaggaagttctggatccacgggacgggggcgctgggctgcctgccgcagaagctgtccatccccagggacgacgacagcgacctcgacgccaacggctgcctcaacaagtacaacaacgtcgccaaggccttcaacgagaagctcgccgagacctgcaaccagctccggcagcggatggccgacgcagccatcgtcttcaccgacctgtaccccatcaagtacgacctcgtggccaaccacagcaagtacggcgtcgagaggccgctcatggcgtgctgcggcaacggcggcccaccccacaactacaaccacttcaagatgtgcatgtcgggggagatgcagctgtgcgacatggacgcaaagttcatcagctgggacggcatccacctcaccgagttcgccaacgccatcgtcgcctccaagctgctcaccggcgactactccaagcccagggtcaggatcgccagcctcgtcaactccaccgcgcctcacgatggctagcttggcttggatcattcgtcgtgtatctgggtctgccggtgccattgatttgatttggttggcctaccactgccagagatgatgagaatgtgtgcatgatgcagcagatcagtgagtgagctgagagcaatcatctatctcttttctcaaggctcagatgagtgatttgaccaagaggggaaattcatggccgactcaatcaaggcacatttgactgacgtgtgtgtaaatgtaattcactttgaaatttgatcaaggaatcgatggagtgcatagttttcttcttgtatatatttggtcggttgacaaccatcttacacattgttgtttttttaggagaggttttattggcatactgtttgtcatatcttacaaatttgatcaattgatgtgtctacccncccaaaaaaaaaaaaaaaaaaaagaaaacatgatgc

SEQ ID NO: 5256 - DNA, 1295 bp, Triticum aestivum
  Clone ID: TRIAE-23APR03-CLUSTER71854_1
acagcagcggtggcgctgcccggccagtcaagccttccccggaaacccaaggctaaaaccctagagctcgcggagggttttatcgagatggcgacggcggagcagaaggggaagaggccgaggatggaggcggaggagggcaacagcatcgacgacgccctactgctctccatcgagaagctccaggagatccaggacgagatcgagagggttaatgaggaagccagtgataaagtcttggaggtggaacagaagtacaatgaagttcgcaggccagtttatactcgacggaatgaaattatcaaggaaattccggacttctggttgactgcgtttctaagccatcctatgcttggtgaacttctgactgaagatgatcaaaagatattcaaacacttggtgtctatcgatgtggatgagtttcaagatattaaatcaggctactccattactcttgcattctcttctaatccatattttgaagatacaaagcttacaaaaacatgttcattcagtgatgatgggaaaataactgtgaaggccaccaccatcaattggaagaatggaatggatattgcaaatggaaaggcatacatggagaatggggagaaacgactattgattgatgagagtttcttcacttggttcaatgatgcaaagaacaaaagtttttctgatggagtgatggatgaggtggcagatgttatcaaggaagaattgtggcctaatcctttgaagtattttaacaatgaggctgaagatgaatttgaagatgacaaggatgaagagggatttgatgaagacgacgatgatgaagatgaagaagaggaggaagatgatgaggagtgaagccctctttcatgctgaatttcagttggcttcgacaactcccgtgcgtgtagactgaaaagtcaaggtgactgaaaagcaaggtgtccccttttgtggtgttttgttgcttgacttagctggatctgtaggattctaagcttgatctgtgggaacttgttttgatctgctcatacatttggagtcctgcagattcccatatgtggcacttcaaagtatattgttattgtgggatgtagtagttccggatatgcaaggtgtctgtttcctgagatacagttgctttaatgacggttagtcaacaatatttaacttatatggtagcgcaaaattcatgccgcatttcagttactcctcgaccgtatcgtttttgtatcccatcattcacatttttttaaactgtttgttgatcaaagctttattccaaaaaaaaaaaaaaaaaactc

SEQ ID NO: 5257 - DNA, 1354 bp, Triticum aestivum
  Clone ID: TRIAE-23APR03-CLUSTER71899_1
atacgtagacgcagacgcaggcgcagagagaaagaaagagagaggaagctgtagccccctccttgtgtgtgcgtgtgtgtcgtccgccgtcggcgtctgtctccctcgagatgatgatgagcgaaggccagggacagcaggagatcatcagccagcagcatcagcaacagcaacagcaacagccgctggagatggacatcaccttcgggatgagcagccatcaacatcaccatgcccctccttcctcgtcctcctcctcctccatgcacgccgccgccgccagcttcgtgaccgccgcgggggcctcgggcgtgtatgacgctctgggggagctggaccagccactgtgcgtgtaccccggccacggtcacgcccccacaccgcaagcgcagcgccagaccctcaacatcttcccctaccagccgatgcatgtggagccatcaccaaaggggtagattggtcaagcacgggggagctcggtctactcctgtcgactgcgcccgcggggtccaagatgctccgcccctgcgccttgcccccctacgaggtcctaggagcggtgctttcgcacgtggacccgctgacggagcagcagatcgtggcggtgtacgggctgcagcaatcggcggtgcagacggaggaggcgctgagccagggcctggacaccctctaccaggcgctctccgacaccgtcgtctccgacgcgctcacctgctgctccacccccaacgtctccaactacatgggccagatgggcctcgccgtccacaagctcaccaccctcgaaggcttcgtcagacaggcggagaagctgaggcagcagatgctccaccggctgcaccaggtgctgacggcgcggcagatggcgcggtcgctgctcgccgtctccgactacttccaccgcctccgcgtgctcagctccttctgggtcaaccgcaacaggatggcgccccaggaccagcagctggaggccggccctcacacctagctctcaatcttatcgatccaccaccatgcgtgcctgcgtgcgtgcgtgcatctcgctcatcctatgcatatgcatgcatgcatgcgccggcatgcatgtctctgagaaagttgaaggcagcgcgcggtgaccgtgcaagcttatattagcagtgcagagggggagacaagggaccgtatctgaatgataaccctctaacaaagaatgtcctaccgttgtgtcttggatttggatttattagtagtagcagctagatagtatggtccatcgactcatgtactcctggctgatcgacctgaactgattagcttgtcttgcctccggatgaatgtgattcgactctccatcacaaaaaaaaaaaaaaaa

SEQ ID NO: 5258 - DNA, 1766 bp, Triticum aestivum
  Clone ID: TRIAE-23APR03-CLUSTER718_3
aaaatcagattcaaacccacaatcgactccacactccaccccggagtgctcgccgctcctcatcctcctcatgctgctcgccgccggcgcggcgggggcagagtcggcgaccccctcgctgcacatcggcgtcaactacggcgccaacgccgacaacctcccctccccgacctccgtcgccaccttcctcgccaccaagaccaccatcgaccgcgtcaagctcttcgacgccaaccccaccttcatctccgccttcgccggcacgcccatctccctcgccgtctccctccccaactccgccctccccgccctcgccgacaaggccaccggcctcgacgccgcgcgctcctggatccgcgccaacctctccccctacgtccccgccaccaacgtcaccctcctcctcgccggcaacgagatcctcctctccaccgacaccaacctcatcctctccctcctccccgccatgcgccgcctcgcgcaggccctcaaggccgagggcctcaccggcgtgcgcgtcaccaccccgcactacctcggcatcctcgccccctccgacggcatcccctccaacgcctccttccgggcgggctacaacaccaagctgtttccggccatgctgcagttccaccgcgacaccgggtcgcccttcatggtgaacccttacccctacttcagctaccggccggagacgctcaactacgcgctcttccgccccaacagcggcatctacgacccggccaccaagctcaactacaccagcatgctggacgcccagatggacgcaatctataccgccatgaagaagctcgggtacggagacgtcgacatcgccgtcggggaggccgggtggcccacccaggcggagcccgggcagattggcgtcggggtgcaggaggccagggacttcaacgagggcatgattcgggtgtgcagcagcggcaagggcacgccgctgatgcccaacaggacgttcgagacctacctcttctccctcttcgacgagaaccagaaaccagggccgatcgccgaaaggcactttggcctcttcaacccagacttcacgcccgtctacgacctcggactcctccgggacggcgcgtccgtggctccaaccccttcgccgaacccatcgcccaatccgagccctaagcccgcgccgtcgggaggcgggaagtggtgcgtcgccaaggacggcgccaacgggacggacctgcagaacaacatcaactacgcctgcggcttcgtagactgcaagcccatacagagcggcggcgcgtgcttcagccccaacagcctgcaggcccatgcgtcgtacgtgatgaacgcctactaccaggccaacggccacaccgacttagcgtgcgacttcaagggcaccggcatcgtcacctccagcgaccccagttacgggggttgcaagtacgtctcctgacggtacgcagcaagccacggcagtacgagggcaggggggccagcctccagcccactaccatctccagctcggagccgcggtggcggcagcgacggaggactgctcatactgccgggcttgcgccatattcttctatactcgtgtctgacagccatgctgcttcttcctttctagtcatataaatatcaatcatcgcctcttagcttagcgcacacaggcggctgtagcgtgatgttgggccgtcttgcattgcatcgcattaatttatttttcgttctcttcgactcatttttggcccaaatttaagccgagtttgcatccgtgcggatgc

SEQ ID NO: 5259 - DNA, 1911 bp, Triticum aestivum
  Clone ID: TRIAE-23APR03-CLUSTER71942_1
tttatcacacagcggcaataggtcgttgctagcggactgcccctttccagcccgtggcatttttttttttttttttcgaccatttaatcatgacgacacaatttgcagagctttcctgcattcattttcacatatcggatatcttacatacacgatgcaaaaccttcactatgccgtagctctgttcaaatttcccctccaattcatgcaaatgcacggcgtcggaaggcaaaaatgtgtagctccaagaacccagacaacggcacgacagctgctgcgtcttcgtctaccgaataatttacatgagtttacatggagcagcacaaggatgccaccaccccttgattgtcaagactcctgcgcttgtggcagagcagcctcgcgatgttcccagcatcgccggtgcacctcctccattctctctgctggattgcagacgccggagcagttccagtcgaaggatgccccacatgggttcccagcctgcgccttccattcgcagtctggaggaataccacaacaaaggcttctctcatcaacatgctcaacatccaacccaatcaaccaagaaccaaatgatacatcttcatttgtatatttgtgcaagatatgcttgtttgctgatatgtaggtcgccaagtcccttgttatagcatacagctgccgtgttgcgtgcctaaagtagttgttacccgcagtcccaaacttccaatgatctggttcgtaatatttagattcattgttagcgatcacaggtccggatttcatgcagccgatgtacacccgaggttttgacctatgtcgtgccaaaatcgatctggtaataccaatgttgacatgaacatcatcgtcaactttgacatagaaatcagcatcccacgtggacagagcacttgaaagaaacatctgaatcttcaaaggaagcccatcctggccttcaacgtgattaagtctaagaatatcattgtattctttctcttctgcatccatggcacgctccacttcactgtcaggaccaggatttgcacttcgtccaataacaaaacgcgtgacaatgcccttgtccttctccagcattcgcaaacgctcaccttgtggcatccacgtcttcctgatagagtctctgcgcctccgattatcgaatgtggtcatgatacccatgacgaaaagcaatctaggtcgcatgtttccctggtcagcggctgaatcactcggcgacacgccttggttcctcatctgcgcggctctggcggcggccaggcgcatctcgatgtccgatatcgttctgtccaacgcgatgatgacttcgcgggtttgtgcttggctcagcacggccctcgaacgcccagagttcgccttgcttgggcaatcgggtggctcgggaaccgcccagtagcggttgacgacgcagacgccgaggaggaagcaggcggcgcagagcgcggcgacgcacctcgtgggcacgcgccccggcggcgccctgtggtgcggcctggccgcggccatcgctttgcccgtgctcacctcggattcctagttcgaacgggaggagagagagggaaagccgtgtgagagggagagggagagagagagagagagagagctggtttgggaatctggctgctcggccgtgccaccggggtacaagttcaaggccgcccgcgtcgaatcactcatcggcaagagctcgttgcaagttgactgcaccttttcagccagtggcatgagctgctgggcggatcttctgaggggcgtcaccttctgcaaccccggcctcttcagtacagggctccacaataaagaatacattctcaagtttggagggtggtgcccatggtgcggtaggcttctggccgtgcctatccggacgcgtggccatgggccccttttttccccgggaaaaaaatttgg

SEQ ID NO: 5260 - DNA, 1271 bp, Triticum aestivum
  unsure (1)..(1271): unsure at all n locations
  Clone ID: TRIAE-23APR03-CLUSTER71942_2
taaatcacacatcggcaagagctcgttgcaagctgactgcaccttttcagccagtggcatgagctgctgggcggatcttctgaggggcgtcaccttctgcaaccccggcggcctcttcactacagggctccacaataaagaacacattcctcaagtttggcttctttcccctgccccaagagttggttgaaaagtccaaggatcatcgacgtagcaacagccgagtggcacggccagaagcctaccgcaccatgggcaccaccctccaaacttggtggcgtaaattccccccgttctacaatgtcaggtttgtctccatcgatggcttccttgagcccatcgatctcaaggaccgcgccgtaaccgtgtggtggctgtgccaaaaagggctcgagtggaagctggagtacaagatcagcctcgaggctctgtgggaattcaatggatttggcgatctgccaaggaatttaactccaatgtaccccctcctcagcccaaatgatcatgagatggtttattttgcacttgctgaatggcgtgaaaaccagagcaactggttgttcatcccgacatgtgcgcgatatttacttgccatcaacccacagcacaagaccgtagttgcctctgtgtgtctcgctgactattttggaaatcctaacatccctcctgacatcatcagctctgatttccagcggcacatccataccgtgagtctggatcttcacataatgttgatggaaacgatgaagcagatgtcattgacatcgttggaccctgctgaatatgatgaagaggaggctaagaagctgatgaaggaggagccatggacctggcaagaaaaactgaaggaacaagacaggcctcttcctcttcctcttccagctcggtactacaggcagccttctttggctagactcataggcaatgcagataccattctgaagctatcagattgacatgctgtctntggagttgcatggcttgaagagatatgaagaatcacaaagagagccatgtgtcacagcgcttgtagaacaaatataggggtgtcgatgaaattgcncaacttagtttctttccgtcattacctttgttggtaagaataatgtgtaatataatttgtcatgacttgatacttcagagatgagcaactgagtatgaattattgcacttggaagttggcttgatacttcacaatgttgcaatgcaagtcttgtagtactgttgatgttgtatggtgttgttgttgtagtctgcaagcttgctgttgt

SEQ ID NO: 5261 - DNA, 1626 bp, Triticum aestivum
  unsure (1)..(1626): unsure at all n locations
  Clone ID: TRIAE-23APR03-CLUSTER71948_1
acaccatcccccgcccccaaaaaacaatcgcggcagagcctactcgtgtgactactcctaccaatccgcccagcagagccggcgcggggggaacacgcacgctcgctcgcgccgcgttgcatgcgccgggccgccgccgccaccgccaccaggaccaggatcgggatggcggcggaggaggtcaggcaggcgtccgcggccgccacggcggccgaggccgcgtccgcgtcggtgccggcccccgcgggctcccggtgggcgcgggtctggccctccgcgctgcgctggatccccacctccaccgaacgcatcatcgccgccgagaagcgcctcctctccatcctcaaaactgggtatgtccaagaacaagtcaacattggctctgctccacctgggtcaaaagtaaaatggtttaggtcatcaagtgatgagccaaggttcatcaatacagtgacatttgatagcaaggagaatgctcccacccttgtcatggtccatggttatggtgcctcacgggggttattcttaacaaactttgatgcccttgcactccctctccgggtgattgccatagcccaactaggttgcggcgcgtcaggcagacctgactttgactgtagaagtactgaagaaaccgaggcttggttcatagattcttttgaggaatggcgcaaagcaaaaaacctcagtaattttatattgcttggtcattctttcggaggatatgttgcggcaaagtatgccttacagcatcctgaacatgttcagcacttgattttggttggttctgctggcttttcgtcagaaacagatcatagttctgagtggttaaccaagttccgtgcaacgtggaaaggcatgctagtaaaccatctttgggagtccaatttcactcctcaaagaattgtgagaggattaggtccttggggcccagatttagttcggagatataccactgctaggtttggctcacattcaacaggtgaattactaacagaaaacgagtcctccttgctgacagattacatttaccacactttagctgccaaagctagtggagagctgtgcttaaaacatattttttccttgggggcatttgcaaggaaaccacttctgcacagtgcatccgactggaaagtgccaactactttcatatatggtcatgacgattggatgaattaccaaggggcgcagcaagcacgcaaggacatgaaagttccttgcgaaatcatcagagtcccacagggaggacattttgtgtttatagataaccctgtgggtttccactcagcgatcttctacgcgtgccggaaatttttatctggagatgcaggggagggtctctctcttcctgatggcttgatatctgcatgaggcgtcatctcgtgtaatctcataccgagtagcggtatgggcataaaccaaacctatacgattatagaaatgttcaatgactgctggcgtcgccaatttgtttttgtatgtatgaattctgtgaatatgtcattcatatgtgcttgcgtaccaacaacactagtgagacaattatgtttttgttgcgggtctagatataattatgtcatatactccagtcagtttttaggccaatctcaggcacttagttnn

SEQ ID NO: 5262 - DNA, 874 bp, Triticum aestivum
  unsure (1)..(874): unsure at all n locations
  Clone ID: TRIAE-23APR03-CLUSTER71_33
gactgcgtagtggaacgagtaaacagatctgctctctccctctctttctctctcgtccgcggcgatacgatccgagatggcgatgagggcgtggaggcggagcgcggcggcgagggccccggcgcacctgtgcctgtggctggcgctcgtcgccgccaccctggtgctcgcccaggtgctcatccacctcggcaagaaatccaacctttctgaggtgacgcacaaggtctacttcgacatcgagatcgacggcaagcccgcaggtcgggttgtcatgggacttttcggcaaggctgttcctaaaaccgcagagaacttcagagcactctgcacaggagagaaaggtatgggcaacagcggcaaacctctccactacaaggggagttcgttccacagaattatccccagcttcatgatccaaggaggcgacttcactcttggtgatggaaggggtggtgaatcaatctacggcacaaagttcggcgatgagaacttcaagctcaagcacactggaccaggctacctttccatggccaatgctgggagagataccaacggatcccagttcttcatcaccactgtaactacgagctggttggatggcaagcacgtcgtgttcggcaaggtgttgtctggaatggacgtggtctacaaggtcgaggccgagggcaagcagaacgggacaccaaagacaaatttcattgctgacancggggaagtccgctgtatgactgaaacggtctctggtggaaactacgtgacnatttcgttgtaaagnttatatccggacgtttcggtactcctgnaattaacgnaattttcccntacanaaaagtcatgatncttacggattggtggacttgagnaaaaaaaa

SEQ ID NO: 5263 - DNA, 1058 bp, Triticum aestivum
  Clone ID: TRIAE-23APR03-CLUSTER71_37
cctaccattctcctcattccccttccgcttctcctcctgtcccgatctctccctctctcgctcgctcgctcgttcgaggctcggccatggcggactaccacttcgtgtacaaggacgtggagggggcgaccacgcagtgggacgacatccagcgcaagctcgggaacctgcccgagaagccggcgcccttcaagccgccgcccttcgcccccagggccgacgccgacgagcagcccaggtccaaggagtggctcgacgcgcgcgaccccgacgagctcgaggagctcgaggacgacctcgacgatgaccgcttcctcgagcagtacaggaggatgaggcttgcagagttcaaggaggcagcaaaaactgccagatttggcacaatacaacccatcacaggctctgattttgtgcgtgaggtttcgcaggctccaccggatgtctgggttgtggtcttcctctacaaggatgcgataccagaatgtgggctgcttgagacttgcctggaggaactggcgacaaaatatgcagaaaccaagttcgttaaaattatttccacggactgtattcccaactacccagataggaatgtccctacaatactggtgtacaacaacagtgctgtcaaagggacttatgttggtctacagaagttcggtggaaagaaatgcacacctgaatctgttgcattggcgctttgccactcagacccagtactgaatgatggacaaggtggtaacaatgtcatggaaggcgttcgcaggaagttcatagaaaaggttgtctcccagcttgaaacgcgagaagacgaagatgatagcgactaaaatttacacctttctgctagttttgttttggttcagtgatatcatttggatctacggatagtcttgcctttcctgatcttatttggttgtttgtgtgtgaaaaacctgaaagctgttttgacgaggttctgtataaactttgttccagtaacttatatgatacacgtggttgtaatgtatcttggtgttctggttctgagagatgattatggaacaaaaaaaaaaaaaaaa

SEQ ID NO: 5264 - DNA, 1547 bp, Triticum aestivum
  unsure (1)..(1547): unsure at all n locations
  Clone ID: TRIAE-23APR03-CLUSTER71_39
tcttatcccctcgcccccctccattcattcactcccctcgttccatggccatggcctccccgttctccccggcctcggccgccgccgcctcgccggccctcttctccgtctccacctcccgccctctctccctcaccaccgccgcgaccgccgccgtctcagcccgggctccgtgcaggggcagcagaggattccgccgcggccgcttcgccgtctgcaatgtcgccgccccctccgccgccgtgcaggagaccaagccggcggcggctgcgaaggagagccagcggccggtgtacccgttcccggcgatcgtggggcaggacgagatgaagctctgcctgctgctcaacgtcatcgaccccaagatcggcggcgtcatgatcatgggcgaccggggcaccggcaagtccaccaccgtccgctccctcgtcgacctgctcccggacatcagcgtcgttgtcggcgaccgttcaactcygacccctacgaccccgaggtcatgggccccgaggtccgtgaccgcctcctcaagggcgaggaccttcccgtgaccaccaccaagatcaccatggtcgacctgcccctcggcgccaccgaggacagggtgtgcggcaccatcgacattgagaaggcgctcaccgaaggtgtcaaggcgttcgagccaggcctgcttgccaaggccaacagggggatactgtatgtggacgaggtcaatctgctggatgaccatctggtggatgttctgctggattccgcggcgtctgggtggaacacggtggagagggagggcatctccatctcccaccctgcacggttcatcctcattgggtccggtaacccggaggaaggcgagctccggccgcagctgctggaccggttcgggatgcacgcgcaggttggcacggtcagggacgcggagctgagggtgaagattgtggaggagagggctcggttcgacaaggacccaaaaacgttccggcagtcctacttggaggagcaagggaagctccaggaccagatcacatccgctcggagcaacctgggctctgtgcagctcgaccatgatctccgggttaagatatcccaggtgtgttccgagctgaatgtggatggactgagaggagacattgtcactaacagggcggccaaggcgttggctgccttgaaaggaagggacattgtgacagtcgaggacattgccactgtgatccccaactgtttgaggcatcggctccgtaaagacccactcgaatcgatcgactcgggcttgcttgtagttgagaagttttatgaagtctttggctagattactctcgaggtaaatgtttttctgtcacaaagtaaggcaggaggctttttgttcggctgtaaacttttatagcaccttccgtaaatcatcttttatcgaactatatcctgcattgtatagaaaacagtgttaccgatcgttaattatggtgacttaagggggggccggtaccaattcgcctatagtagcgatnacggcgctactgccgcgttacacgcgtactggaaacctgcgtacc

SEQ ID NO: 5265 - DNA, 1533 bp, Triticum aestivum
  Clone ID: TRIAE-23APR03-CLUSTER71_43
atcccctcgccccctccatccatccactcccctcgtcctcgtcccatggccatggcctccccgttctcccaggcgtcggccgccgccgcctcgccggccctccccttctccgtctccacctcccgccctctctccctcaccaccgccgcaaccgccgccgtctcagcccgggctccgtgcaggggcagcagaggattccgccgcggccgcttcgccgtctgcaatgtcgctgccccctccgccgccgagctggagaccaagccggcggcggccgcgaaggagagccagcggccggtgtacccgttcccggcgatcgtggggcaggacgagatgaagctctgcctgctgctcaacgtcatcgaccccaagatcggcggcgtcatgataatgggcgaccggggcaccggcaagtccaccaccgtccgctccctcgtcgacctgctcccggacatcagcgtcgtggtcggcgacccgttcaactccgaccccttcgaccccgaggtcatgggccccgaggtccgcgaccgcctcctcaagggcgaggaccttcccgtcaccaccaccaagatcaccatggtcgacctgcccctcggcgccaccgaggacagggtgtgcggcaccatcgacattgagaaggcgctcaccgaaggtgtcaaggcgttcgagccaggcctgctcgccaaggccaacagggggatactgtatgtggacgaggtcaatctgctggacgaccatctggtggatgttctgctggattccgcggcttccgggtggaacacggtggagagggagggcatctccatctcccaccctgcgcggttcatcctcattgggtccggtaacccggaggaaggcgagctccggccgcagctgctggaccggttcgggatgcacgcgcaggtcggcacggtcagggacgcggagctgagggtgaagattgtggaggagagggctcggttcgacaaggacccgaaaacgttccggcagtcctacttggaggagcaagggaagctccaggaccagatcacacccgctcggagcaacctcggttctgtgcagctcgaccatgatctccgggttaagatatcccaggtgtgttctgagctgaatgtggatgggctgagaggagacattgtcactaacagggctgccaaggcgttggctgccctaaagggaagggacatcgtgacagtggaggacattgccaccgtgattcccaactgtttgaggcatcggctccgtaaagacccactcgaatcgatcgactcgggcttgcttgtagttgagaagttttatgaagtctttggctagattgctctcgaggtaaatgtttctctgtcacaatgtaaggcagaaggctttttgttcggctgtaaacttttatagcacctttcgtaaatcatcttttatcgaactatattctgcattgtatagaaaacagtggtaccgagcgttaattatggtgaactttgttatgttgttctgagcttgggctcatattagcactttccccgatcaaaaaaaaaaaaaaaa

SEQ ID NO: 5266 - DNA, 2379 bp, Triticum aestivum
  Clone ID: TRIAE-23APR03-CLUSTER7216_1
ctcccttcgcctccgagaagctcggtctcacctcacgcaccaccaacgcggcgttctcctctccaccgtgccgaccaccggaccgagcggcgccgcggctgacccagcgtgatgtggcgccatgcggcggcccggcggtcggcgcagatccgccggctcctttccacgtccgccccgtcggcgggcgccggctccgtcctgcgcggcccctccatcgtgcacaagcgcggcaccgacatcctccacgccccctggtacaacaaggacacggcgttccccctcacggagcgggaccgcctcagcctccgggggttcccccccacgcagcgcgtgcggctcgggctccagggcgtgctcttgatgcggttcaacaagtcggaggagcactaccagcgtctcgtaaccgggtccccactgctggtgcccaagccgcagtcgccgcccctgctggtggtctcgatcgcgacgtgggaggccccgacctggatgcacgacagcaaagaagcgtggcacagtaggatacgaagtactacgtgcctgggatgcggtggcaccatgtttacagccaactcgtccacggcaaataatgtccgcagaagcacacccgggacagacgtatcggtgacatacaatttgttctgatcagtggaatacttggctatttcggtttagctgctctacttgggagtatttcagcagattgtgcttccaggtatactggctctattgttgactcattttgtttatgtggcagctgctggtatcaacccacagattgttgtcccaataatgcttgatgtgggaacaaatcatgaagaactccttgaagacaagctatatttaggattgaggcaacctaggttggaaggagaggaatacttagctgttgtagatgagttcatggaagctgttcatgcacgctggccgaaagcaattgtgcagtttgaagacttccaaatgaaatgggcatttgaaactcttcagaggtatcggagccgattttgcatgttcaatgatgacgtgcaggggacagcaggagttgctctagctggtctacttggagctgttagagcacaaggtcgaccgctcgcagattttactaagcagaagatagttgtggtgggagctggaagtgctgggataggtgtgcttaacatggctaaacatgcaatgttaaggatgccagggacccataaaattggagaactgggtgaaggacacaatcaattctgggttctggacaaagatggccttattaccaaaagtagaaaagatctggatccagctgttgctcgttttgctagaggttatggtcctgaagaggtcgaagatctccatgagggggctagtcttgttgaagtggtcaagaaagtgaagcctcatgtccttttaggactatctggagttggcgggatatttaacgaggaggttctcaaggctatgaaagaatctgactccccctgccctgcaatttttgcaatgtccaacccaactactaaagctgaatgtacgcctgaagatgtattcaagcatgttggagaaaatgcagtatttgccagtggaagccctttcagtaatgttactttaagcaatggtagaaaaggctatgctaatcaagcaaacaacatgtatctgtttcctgggattggtttaggagcccttctgtcaggtgctcggcatatttcggatggcatgctccatgctgcagctgagtgccttgcttcatacatcacagatgatgcgattcgaaaaggaatcctctttccttcaatttcaagtatcaggcacatcaccgcacgtgtcggcgctgcagtcgcccgtgctgccgttgatgaagatctggccgagggatgctctgacttggatcctcgggacctcaggagcatgtcagagtcggatacggtggattacgtggctcggaagatgtggtaccctgtttacagcccactcgtcaacgacaaatagtgttcgacgaagcacacccgaagagacgtatcaggcacatacatttgttctgatcagtgaatacttcgctatttcggtttacctgctctacttgggagtatttcagcagatactgctgccacgtctactggctatattgttgcctcatttgtttacgttgacaggttcatcaaacattgctcaattttgagacccgttgagctatagttatgtccatgtggtaggacttgaataaatgtcagatgttggcagtctgtctcctgcatcgtcgttgttggcgtatgtctcttgcatcgccaggtaatacgagattgcaaaccgattttgtgttcgtggtgctgtactctcagaagctcactagttcataccactcgcctggcttctcttttttgtggggcgtgggggggggtggcg

SEQ ID NO: 5267 - DNA, 1150 bp, Triticum aestivum
  Clone ID: TRIAE-23APR03-CLUSTER7229_1
actgccgcagcaaaactccacccagattccctcttcactccacgccgcccctctcccccgtctccccgatcgccgtctccgtctccatcctcccgctgccgccgccgccatggacggcgtcatcggccagatcttggagaagcaagtgctgtcggccgcgaaggcggtcgaggacaagctagatccacccagttcccctcttcactccacgccgtgctccctctctttcccctctccccgatctccgtctccgtctccgtcctcccgccgctgccgccatggacggcgtcatcggccagatcttggagaagcaggtcctgtcggccgcgaaggcggtcgaggacaagctagatgagcagatcgccgcgctcgagcggctcgacccggacgacatcgaggcgctccgcgagcgccggatgctgcagatgcgccgcgcggccgagcgccgggccaagtggcgcgccctggggcacggcgagtatacggaggtccccgagaaagagttcttctccaccgccaaggccagcgagcgcatggtgtgccacttctaccgcgacaactggccgtgcaaggttatggacaaacacatgtcgattctcgctaaacagcatgtagaaacacggtttatcaaagtccatgctgaaaaggctccctttctgaccgaaaaactaagggttgttgtgctcccaactcttgccctagtgaagaatgccaaggttgaggattatgtggttggatttgatgagctgggtggtaaagatgacttcagcactgaggatctggaggaacgcattgccaaagctcaagtgatcttcctcgacggagaggggcctgcaaatccttccaagcaagctgctgccagcaagcgaagcgttcgacaatcagatactggcaactcagactcagactagttctgttcctgtattgaaggcgtgtgcgccaaggatttttatatataggatttatgccaagctgttatgctatccttactagtaataggaaagaagtttgtgtttcgatggcgatttgaaccgcaattgtcactgttgtagagtgctcttgtttttaccatgcgtccatacctggtttggtttgtttatttgagtggaaatgtttttcgttgctaaaaaaaaaaaaaaaaaagcttatc

SEQ ID NO: 5268 - DNA, 2216 bp, Triticum aestivum
  Clone ID: TRIAE-23APR03-CLUSTER7233_1
cacatattactcaactcttagtgtagatcaaatttttttttttttttttcgctaacaaagtatgaacgtatatcaaggtagtatatagcacatagtctgcaacaatctaacacacacaattctgatacactgcaaagtaaatgttagcaggcatacctcactgggaggtgccatggtcctaatgtttctgtactggtcattttcagctacaagaaatgagaaatacatactcaggttttctcagctgaggtgagatgccccagtttttttgtcatctgttcgatgctgctcttgtccaaccaaaaacttccgcggtctcctgctgttgtttgatttgcttctctgtctcgccgttctgcattgggcctcctggtgtgcatgggatccaacccaggctgctcggtaacgaaactgctgccaaaatccatcatttgcgtcagcaggaaggtcttgggtgggttgttgatctctcgatggaccattttctgtaacagcaggttctaaattgacatctatctcggagaccttagctcgtgaatctgcacgagaatgagcttggggaagcagaggactctctggacagctggcggactctgctatatcacgagaagagtgtgaatctcctacaccagctgaacaagtatgcatcatggacggaggtgattgcgcgtgggggtcactctccccagttgaatggagctctgtaagaacaacagctgaagaatgacctgggacatcaccatcagatgaaacatcattaccaaatgcctcactcgcttctttgaagaaattctccaaggaatttaaggatgattccattttgtcaaatgatgacctaaaaagttcatgagctggtgagttgaccaagtcacaatgcataatctggttcccctgagtacaagcatcatcatggaatgaaattggtttaggcagtctcctcttctttccatgatgatcagattgttctacgaagctagaaagaaatccaggtgcattcacaatttctctgacataagatataagatttttctgctgatcctcaatagcaaatagtttgtcttccaaagccttcattttactctccatatcagttttcttcctctcaagctgtaaatttagtgatgcattatcacacttgagcctctcaatttcctcctcatagtccctcctttcactatcagctaatggtccggcaccctgagtgtgtgatgaatggctgaatattggcttgcgtctatggatatttttcaaccgatgccgctgatctcgtaggaattcttcatttgcaaattcccattgttctggatctaccttcctaaagccgtaggtgttgagctggcgcacgaagctggagaagttgttgtgcttgaagtacttggggagaaggtcccgggcgaactccgccggccgccacaccacgaacgtcgacccgtcctcgccccacgagatcacgtcgtccaccgccgggtcctccaccagctggtacgtcttggtcaggaacggcgtcggcagcgacctctgccccgccgcgtccgccgacgccaccagccccggcatcggcgccgggggaggaggctccgccccagccccgtccgccgccgcggcgccatgctcggccgacatcacgccggcgcctcctctgcccctcccggccggatctggcccggggaaccccgtagtagcttccagatgcggtagagggccacctcaccaaagaaaggaacgtacggaagaagccttctggaagcttcccacgcgggattatgagacttatacccaacgggaggaggagaacgaggataaaaataagggaaatttctctttgacaggggaacggtgagcggcgtgggcgatccggtcgcccataaggagctcccccaggggttcagcgctcttctttctccctccctttggcccgcagtatgggaggctgtagtagctgaaaggcagttctgtctcgatggatgtgagcgagttcacctttgctcctatctcctcgccttgccggtacgtgtgcatgtaactacctggcaagtagaacgcctcacaagcaggagccatcacaagagacaccaccagcaaagcagagaatatccagcccttggccatgattgccagttcccagcaacctctgcctaacacctggcaccggagattgaggcgacggtgggaggagatgctcgtcggcgtgagcggcacatttgcagcagcgaacc

SEQ ID NO: 5269 - DNA, 1278 bp, Triticum aestivum
  Clone ID: TRIAE-23APR03-CLUSTER7270_1
acgaacgtaataaatcacccggcttccctgctccttccgattggtcgagtagtggaatccccttcccctccaccatcaaaaccctatttccggcgggcctcgtactgggtgcggtgctggcgatggccgacggcgtcgtctcgtctgccgtccacccgaacgggcactccccggagttcgtcttccggcagtaccgcggccgccgcgccggcattgtgaaggccctcaccgaagatgtggaggagttctacgagcagtcgaccccgacgagaaggccttgtgcctctttggactgcctgatgggacctgggaagtgagtcaactacctgaggagatccctgttcaacttcctgagccagtatgtgggataaactttgctcgtgatgttacacccaagaaaagtttggctatctatgatagctattcatagtgatgcatggttaatgtccatagcattttaccacgcgggtcgtgtctcatttgacggggacatgaggtggatttgtacacctgcaggcaaccgaatatggtgctccatttttgaattatgacaccgtttcaaaacaaaacaaacacacccaacggcggctgggtacttgggtcccgctccctgccccctatgcaattcacttctaactgcaagcccggtgacaccgggccctgccgatgcccaaggaagattactacgccaatttcaacagctggaaggtaatggaggaccggccaatgctcaaggaggaggatggtggcaaagagggtgggggcggcgaggatcaagctataaccaagtgtgccggttgcgacgagatctacagcgctaacgacgggcacctatggattggctgcgaccactgtcagaggtggttccacggcaagtgtgttggcgtgactgctgagatggcgaacggaatcgaggactacatgtgccctggttgcagctacaaagccacgacgaaagcttctgactcgatatagcggtgatgatgaaagcttccgactcgtgatggtggtgactggtgatgcttgaaccatgggaaatctctcatttcccaacgatgctgtttgctccgctgttgcgttatcttggtgacatgttaggattttggctggtgatggggacaggaggtggatttgtacaggccgttggcttgggttcaaacatcccaatgtggtgctcctttttttgaattttgacaccgtttcaaatcaaaatcatctgaggggacatagtgcaggtagtacgttgtactatgttggtggtaaaaacacgccatctgc

SEQ ID NO: 5270 - DNA, 1795 bp, Triticum aestivum
  Clone ID: TRIAE-23APR03-CLUSTER7277_1
gctctgccgggcatgatgctcgaggtctggatacgcccgtgcgcccagcacccccagcccgccccccgccgccgctcctccggccgtcgccgctcgtacgcgcagccatattcttctgcggaggggtagcgtccaacgccatcgacacggcccccggctcgtccccgcccggcgccgctcctgctcccagacccacgtctctctagacctcgctccatgttccgtcttcacctgggctcgtcgatcatcagggaagtcgggtgatacagctgcacttcggcctagaatcgaggccaaacccccatccgattcttggcgtcgatcctaggataaaaagaaaaaatgatggaggacaaggattaaaattcaggaaggatcatatagaggtgatctgatcgatgaaatgtagacgagtttatggttgggaagttgttgactacatatggaatcattcttttacaccatgggtattgatcaattctgaaaagcatcatttgctaatagcgaagccaattctaaacagttcacagcacaaactgaaaacagcagaacttatgtttgggaagtacaaagtgctaggtctgtgcctaacaaaaaatgcggtttgcacatcttttgcatctggacgtgctacatctctagtggttgacagtggtggtgggtctaatttggtttatgctgttcaacccggttcttttttggaaaattccggggctacttctctttgaggctgtgaattcttgactgactgtatgatgaaaagcttgtagcggaatagcgatgtgtgatgttcacgttattcatgcattactaaggaagtgagccctttctcgtatcgggttataaatcttgattttccgaaaaccacgagagagggagaggttgtacgacatgagagctattgctagcgacatcaaggagacggtttgtagagttccagatactcccttcgatgaagtggcatatgcaaatgttcctacaacttcatacgagcttccagacgggcaaactattgaagttggtgcagagagattcaagattcctgacattttgttcaacccattcctttctcagactattcctgggatcgatggatttggagattccacttcgattcgtggacttccacgaatggtccttgaaagtgtaaataggtgtgatgttgacattcgcaaggagctactcagcagcatcttgctttctggtggctcatcatcaattctgcagttaaaggaccgtctagaaaaagaagtactggaggagtcccctcaaaatgctcgggtaaaggttttggcaagtggaaattcaacggagaggcgattcagtgtctggattggagggagcatccttgcatcccttgggtcgttccagcaaatgtggttctccaaggcagagtacgaagagcacggcgtttcctatatccagaggaaatgcccatgaaatggcgaagcatgcatgcagcccaagctttgtgttgccgaaagatgtgtgtgggcaacagttagatgcaggcgaccgactatctttaggtccgtgagtgcagctctagaacaaactcagctgatacttgtacgtgcgtgccgaaagatgtgcgttggtcgccacctttgttatctgggggatatttatattgttgtcgttaccgaattatctttagctccacgagtcccttgagaacccaaagatgtgcgttggttgccacctttgttatctgggggatattcatgtggtgatttttctcgtctgtgatgcagaatgtgcaacagtttactctccagactccaaaaaaaaaaaa

SEQ ID NO: 5271 - DNA, 951 bp, Triticum aestivum
  unsure (1)..(951): unsure at all n locations
  Clone ID: TRIAE-23APR03-CLUSTER730_1062
ctcctccccttccggttcgggttctggttcggttcgggtccgagagtagctagcctagtctagggtttccgtagagaggaagggagagggagatccatccatggcggagacggagtaccgctgcttcgtgggcggcctcgcctgggccaccgacgacaacaacctccagcaggccttcagccagtacggcgagatcctcgacgccaagatcatcaacgaccgcgagacggggaggtcccgcgggttcggcttcgtcacgttcggcagcgaggagtcgatgcgccaggccatcgaggagatgaacggcaaggagctcgacgggcgcaacatcaccgtcaacgaggcccagtcccgccgctcgggcggagggggcggcggcggcggcggctacggcggccagcgcggcggtggcggaggctacggcggcggcggcggctacggaggcggcggcggcggctacggcggccagggcggtggcggctacggcggccagcgcggtggcggcggcggctacggcggcggcggcggctacggcggtggtggcggctacggcggccagcgcggcggtggcggcggcgactccggcggccagtggaggaactgagcctcgaatctcccagttatcgatctatctaccgtgtcgtcgtcgtcgtcttcgttagcaagttatcttcggtgtcgtcgtgttcctgtgtcagtctgagtcgtcgtgtgtgtggtgtttttgatcgcgagctcgagtgtcgctctgtccggggttaattagagctggttacgcgaggaagaaacaacatgtgttactatctttcagtcggtcggtcggtcggtcagtcggtgatgcagcaatccccttctgtcatggattgggatgtgatgttggaatatcctatgtttgaacaagtttaaatggatgaagaaaatgcaagtcatagctgcgaaaaaaaaaanaaa

SEQ ID NO: 5272 - DNA, 1105 bp, Triticum aestivum
  unsure (1)..(1105): unsure at all n locations
  Clone ID: TRIAE-23APR03-CLUSTER730_1224
cccactgctccagagcgccgatcaagaggcaccagatcaaaaatggcgctcctcccgctggtcctcgcggtcctcatcgtctcctgcgccgcgcagcagccaccggtgcagccgccgccaactcccaacgcgccgcctgccggcaacccgcctcctgctcccaacgcgcctccggccggcaacccgcccccagctcccaccgtgcccccggccggcaaccctcctccagctcccagcgctcctccggcacccaccacgcctcctcaggcgccacaggccccggccacgccccctccggccccgcaggcccctgccacccctcctccggctcccancaccccgccggccacccctccacctgctcccaccaccccgcccccggctcccccgacgcagcctccgcccgctcccaccaccccgccgccgtcgcccccggccaccccgcctccagcgcccgccaccccgccgccatcaccgcccatgtcgccaccacccgccacacctcctccgatggcgaccccgccggcgatggcgcccacgacctccccgaccgtcgccccgacgacatcgcccacgcgcgacgccgtcgatgtctccgaccagccccaagactacctccccgacaagctcaccgacttcgtctcccacgctggcgcccgcaggcacgccggtgacggacagcagcgcctccagcgcgcgcgcggccggcgtcgcggcgctggtggccttggcgagcgcgggcctcgccgtcttcctctgagcagcaggccggtgcacctgtgtcctccttcccgcgcgtcgctgctgcatttttcttgtttcgtgtcgttatttaatttttaccggtggtactacggtcgatcgattcttgatgatgtactgctacgatgatgcattggttgtccgtcccgtcccgtcccgttttccttttgatgatcggcggggggtggttggttaagtttagtgcatgttctacttctgctctgtactgtacgtgagttaccgctccattttggttatatagagaggattttgtgtatattttcagtgtacgtactccattatcatttccgtgcattcaataaattctccacgcagcttattc

SEQ ID NO: 5273 - DNA, 1349 bp, Triticum aestivum
  Clone ID: TRIAE-23APR03-CLUSTER730_1266
tatggttagttcataatatttgctaaaacttgaatgctggcatttcatgtttacaataacaagagcaaacagagtttataaaagttgttctttatcactttcagtttatcaactgaattgcttgaagacaaggtaaggtttaagcttgggggagttgatacgtctccaagtatctacttttccaaacacttttgcccttgttttggactctaacttgcatgatttgatgctaattgatttacttggtggaagatcatatgttcagatcctttatgcatattattactcctctgattatgaacatgaatatgctttgtgagtggttacgtttgttcctgaggacatgggtgaagtcttgctattagtagtcatgtgaacttggtattcgttcgatattttgatgagatgtatgttgtctttcctctagtggtgttatgtgaacgtcgactacctgacacttcatcattgtttgggcctagaggaaggcattgggaagtaataagtagatgatgggttgatagagtgacagaagcttagaccctaatttatgcgttgcttcgtaaggggctgatttggatccatatgtttcatgctatggttaggtttaccttaatacttcttttgtagttgtggatgcttgcaataggggttaatcataagtgggatgcttttccaagaaagggacagcacccaagcaccggtcaacccacataccaaattatcaaagtaatgaacgcgaatcatatgagcgtgatgaaaactagcttgacagtaattcccatgtgtcctcgggagcgttttcccttatataagagtttgttcaggcttgtcctttgctacaaaaaggattgggccatcttgctgcaccttatttactttcattacttgttacccgttacaaattaccttatcacaaaactatctgttaccgataatttcagtgcttgcagagagtaccttactgaaaaccgcttgtcatttccttctgctcctcgttgggttcgacactcttacttatcgaaaaggctacgatagatcccctacacttgtgggtcatcagaaacctccatcagtagttctctgtttagccttttgtggtgtttgaatgagaatgttgtggtcgtagagaagtattcccttcgggtgcaaccgatcactacccacaccactagtcgtattgttggcctcgtcatcccttaatagatgcttattattcttggcgattacaacatcttcgatatagtggctattttacaagtggtgttggtactactactaagctaactgagagtgctctggatgctgctcttcttgctcgaagctctggactacatctcttctgtgtgtgt

SEQ ID NO: 5274 - DNA, 1264 bp, Triticum aestivum
  unsure (1)..(1264): unsure at all n locations
  Clone ID: TRIAE-23APR03-CLUSTER730_1279
ttgcttcgcgggcctaaaaactcgtcattaaccactggagtacggcattcgccagcggccgagtgatggcagcaaccttctcctttgcccgtgtggttgctctcttcttcctggtcgctgcccatccccatggatgctgcggctgcggttatctgcctgatctgttctgctacccacctccaccacctgcccccaccaccaatgtccccgccaccaacgtccctgcatccaatatccccgcccccaactccaactccagctccgacgagggctggctcgatgcccgggccacctggtacggcgctcccaatggcgccggcccctacgacaacggtggtgcttgcgggttcaagaacgtcaactggccgcctttctcgtcgatgacgtcgtgcggcaaccagcccatcttcaaggacggcaaggggtgcggctcatgctaccagatcaggtgcgtggcccatcgtgcctgctccggcgtccnggagacggtgatcatcacggacatgaactactacccggtctcccgctaccacttcgacctcagcggcaccgccttcggcggcatggccaagtacggccgccacgacgagctccgccacgccgggcatcatcgacatgcagttcaagagggtgccctgccagtacccggggctaacggtgacgttccgggtgcagcacgggtccaaccccaactacctggcgatcctggtggagtacraggacggcgccggcracgtgtcgcaggtggacataatggagtcgcggctgccggacagggcgccgacggggtactggacgccgatgagggagtcgtggggctccatctggcgcctggacaggctccgcccgctgcaggggcccttctcgctgcgcgtcaccgacgagtccggcaggtcgctcgtcgccgaccaggtcatcccggcctactggcagcccaatgccgcctacagatccctggtccagttcgatgagacgttgcccatgtcgcttgtcacatccgctgccacgagccgtcctcgtcttgttctacctatgatgtattcggcggcgcttacgtatgtgtggccttgtgtgcgttggatactggccgtgtgatcatytgcactgcactgcaggaagaagaaacaaaagattgaacctggagtatggttgtctctgttgtagtagtatgtgagtaggaaaraaagcttgtgtttagatgcctgcattaggctcgttcgatgcaacgatcagttgtcattgcacgcaactatgttaatgcaag

SEQ ID NO: 5275 - DNA, 1537 bp, Triticum aestivum
  Clone ID: TRIAE-23APR03-CLUSTER730_1285
cacccactgccgcctgccctctcgtttccatctgccgccgaggcaccctgcttccacccgccgccactagcccccgtgcttccacccgccgtcggcggcccccttgcttccccccgccgccacgcccccgcctgccacatccggcgacaggccgcgcccaccgccgaacgtgttcagcgatggctccgacgcccccaccctagcttgcccagtcgtggactatggttccctcctggctgccggcagaaacgccgctcttgtacccacggacgtcgtgctccccgacctgacgcggtgcggctgcctccccagcgacccctccagccgacgccagtggtcagaaccgcaaaactcccatcccctctcgatctcacattcttgttgttgtactgctgctgcctcttctttggaagagatcagtcattgtcccctgcagatggcaacctgaacgatgaagagaatttggtttgcctcctgctgtgtcggcagctcatggccacacccatctacaattcagcatggcttgccaaggcagtcaaggtttatatgaagagggagaatgccggcagctggaattctgggctggaaaatgagcaaatattagagacctattatgcvcaactccaaaaagtcctgaaacttcatgaagacactttttggaattaataaaaaatactggcaaaagaatcaaccagagggggcccacaccctgaacacgagggtggagggcgccctaccccctgggcgcgcccattgtytcatggccccccctggcaggccttcggtgcgcatctttcgctatatgaagtcttcgcccaggaaaaaataagaaggaagcttttgggacaaaccgccgccgtctcgaggcggaaccttggcagaaccaatytagggctcaggcagagttgttctgtcggggaaacatccctctgggagggggaaaccatcaccattgtcatcaccaggagggggtcaatctccatcaacatyttcaccatcaccatctcctctcaaaccctagttcatctcttgtatccggtctttgtctcaaaacctcagattggtacctgtgggttgctagtagtgttgattactccttgtagttgattgctacctcttgagcatgtgttggttttcccttgaagaggaaaggatgatgtagcaaagtagcgtaagtatttccctcagtttttgagaaccaaggtatcaatccagtaggaggctcctcaaaagtcccacgcacctacacaaacaaactgagaaatcgcaaccaacgcaataaaggggttgtcaatcccttcacggccactagcgaaagtgagatctaataaagatagtatgataagatagatatatttttggtattttataatatagatgcaaaaagtaaagatgcaaataaaagtagatagaaagcaaatatgataagagatagacccgggggccataggtttcactagtggcttctctcaagatagcattagtattacggtgggtgaacaaattactgtcgagcaattgatagaaaagcgcatag

SEQ ID NO: 5276 - DNA, 846 bp, Triticum aestivum
  Clone ID: TRIAE-23APR03-CLUSTER730_1298
tgcacgaggcccggtctgatcaccatgtcgacggagaagaagcagttgaacacgatgcgggagatcaaggtgcagaagctcgtgctcaacatctccgtcggcgagagcggcgatcgcctcactcgagctgccagggtgttggagcagctgagcgggcagtcgccagttttctccaaggcgaggtacactgtcaggtctttcggcattcggcgtaatgagaagattgcctgctacgtgacaatcaggggtgagaaggcaatgcagcttctcgagagtgggctgaaggtgaaggagtacgagctcctgaggaggaacttcagtgacactggttgctttgggtttggtattcaggagcacattgatcttggcatgaagtaagataacctttcctgtactctgttctgcttgcattttatatatccgaattatgtatatacttaggactgtaaatttggttcactggataacttgattgtgagattggtttgcaacataaagtttcttgtgacatacatgcattactgactgtggatgccggttctataaaagtttcttgtgtgacatacacacattgtgcaagtatcacagtggaatcctgatgtccatgttgtcataatcttaacgcaaaatggtggaacttttatcatcacaagtattttgtaatgcactgtctttaaaagtttgcaatacataataattataaatactttagtatgcattgctattgctgcctacgtttttgtttatcattgcaagtcactttagtaagtgttgccccagtctgaaattatttttctgtgatggatatgaagcactggtcctgatgtgttggacaatgtgtttctc

SEQ ID NO: 5277 - DNA, 574 bp, Triticum aestivum
  Clone ID: TRIAE-23APR03-CLUSTER730_1332
aggcggcagcctctcctcctcctctcctccctcgccgtcgccgtcgccttcgtctccgcctccaaccggcggccgcgccaccagctcgtctcctccgatggcgactgtgccagttaaccccaagccgttcttgcaaaacctaacagggaagatggtcatcgtcaagctgaaatggggcatggagtacaaaggatatcttgtttcagtggactcctacatgaatctgcagctaagtggtactgaggaatacattgatgggcaatgctctggaaatttgggagacatactgataagatgcaacaatgtgatgtatctccgaggtgttccagaggaggacacggacattccagatgcggcctgaagagcacatggactgttcctggttgatgcttgctgttcactgctgaaaaagaacttcctagttcgtctccatttgcgcctactggactgtattacgtacaggcgttgaactcatgttaactctagttctgcatcctggatgaatgaatgattaacttgcatgtttgaaacggatgattgcttattgctgattggtcctgatcctgccgttgga

SEQ ID NO: 5278 - DNA, 811 bp, Triticum aestivum
  Clone ID: TRIAE-23APR03-CLUSTER730_1341
agttagacagacccataccgcgcaccggaccatggtttcccaggccgccagctccagtgcaccaataatggcctccccttgctccatttcccccatatataccagccctcccccatcgcaccgctgcaccaaactcacccactttcctcccgccaagagcagcagcgagctgtgagctctagctctgaagctcgagcttgctagaagagccacacagcaataccatggcggcatcagtagcctgcgccttcttcttcgacgccgagccggccggcgagcccggcaagcacgcgctggacgcgtgcgcgctctgcgccaagcggctggcgcgcgacagcgacgtcttcatgtacagaggggacacgcccttctgcagcgaggagtgccgccacgagcagatgtacctcgacgccgtctgcgccaggcgggccgcccggaggccgcagcgcttctcggcggagacggagacggagtcccaccgtgggcagcggcagtccaggaaggtgtccatcgccagctagccgcggaaagttttgtttggatccacaagatctgaatgaattctgaagaaacaaccgctgtattctgaagaaccatcgacgttgtttcgggacgcagtgcagggcaaagcatccggtggtaggtgactgtagcttcccataagtgtccatggcaagctaattaagctggccgtgtgcctgtagattcttggttgatctgtgctgtgccgttgattcgattttgttggaaacgaagtagaaaacgccatggatctgaaggaagcaatcaaacacgattcacgatttgttcc

SEQ ID NO: 5279 - DNA, 778 bp, Triticum aestivum
  Clone ID: TRIAE-23APR03-CLUSTER730_1353
aatcagcggaactcggaaaaagatctccgctttgccctgcctgcctgcgccggacggagccaccgcacccaccgaagcgaccggaccggcgagcggcggagagatggcggcgacgggggaggagacggtgcgggcgtcgcacatcctgatcaagcacgaggggtcccggcgcaaggcgtcctggaaggaccccgagggccgggtcatctccgccaccacgcgcgccgacsscgccgcgcgcctcggcgaccttcgcgcccagatcctcgccggccgcgcctccttcgccgacctcgccgcgcagcactccgactgctcctccgcccgccgcggcggcgacctaggcacctttgggaggaggcagatacagaagcccttcgaggacgccacstacgctctcaaggtgggggagatcagcgacatcatcgacaccgagagcggggttcacatcattctgcgtaccgcataaggaggaagaagcccacgccgtcaccgtcacagcaccctctgatgttatttagcccttttccttcttccagggcctgcggctcttctcattctggcagcccgaaacttgaatgaatgaagaaaaattgtcttgtatcgtctcaccattttgctacggccatttgagctggttgatacatgcttacatcacaggtcaatgtttgagcttatgatgtcttgatcaggagatgttctcttttcttcattacatttgtgataaatcatttcaaatgaatgttgtgtgcatcatgaaaaaaaaaaaaaaaaaaaa

SEQ ID NO: 5280 - DNA, 1486 bp, Triticum aestivum
  unsure (1)..(1486): unsure at all n locations
  Clone ID: TRIAE-23APR03-CLUSTER730_1371
cttacaaggattcccatcatctcacactcgaagctagctagcccccaagtagctgctagctctgcagtacagcactgcgtacaaaggtagcaactgcagctcgtggtgcactggtagatcgagcagcacgatggggcagctcagcaagaagcttctgctggcgtccatggtggcggcggtgctggccgtggcagcggtggagctgtgcagcgccatcccgctggaggacaacgacctggagtcggaggaggcgctctgggacctgtacgagcggtggcagaccgcgcaccgcgtgccccgccaccacgccgagaagcaccgccgcttcggcaccttcaagtccaacgtccacttcatccactcccacaacaagcgcggcgaccgcccctaccgtctccgcctcaaccgcttcggcgacatggaccaggccgagttccgcgccaccttcgccggctcccgcgtcagcgaccgccgacgcgacggccccgccacgccaccgntccgtcccggggttcatgtacgccgccgtgaacgtgtcggacctgccgcggtccgtggactggcgccagaagggcgccgtgacgggcgtcaagaaccagggcaagtgcggcagctgctgggctttctccaccgtggtgtccgtggaaggcatcaacgccatccggaccgggaagctccgtgtcgctgtcggagcaggagctcatcgactgcgacacggcggacaacgacgggtgcgagggcgggctcatggacaacgccttcgagtacgtcaagaaaaacggcgggctcaccaccgaggccgcctacccgtaccgggccgccaacggcacctgcaaagccgccaagagctcccccgtggtggtgcgcatcgacggacaccaggacgtgccggccaacagcgaggaggcgctggccaaggccgtggcgaaccagcccgtctccgtggccatcgatgccagcgggaaggcgttcatgttctactccgagggggtgttcaccggtgactgtggaacagacctggaccacggcgtcgcggtggtcgggtacggggtggcggaggacggcaaggcgtactggacggtgaagaactcgtgggggccgtcatggggggagaaggggtacatcagggtggagaaggattccggtgccgaaggcgggctctgcggcatcgccatggaggcatcctaccccgtcaaggcggacagcaaacccaagcccaagcccaggcgcgcgctcggcgcatgggagtcgcagtgatcgacccgtctgcttgtctgaattatttctacgatcattcctagttaaattagggtgaaaataaattacagctgaatcaagtgcttctctgtccacacgcaagaattaggtgtgtgtagcgtgggaccaggacgatccacataatttgtttggatttatgaaagtaatgtaaaatgtaataatgtaatgtactggtaatgtttgtaagcttgcaaaaaaaaaaaaaaaa

SEQ ID NO: 5281 - DNA, 1819 bp, Triticum aestivum
  Clone ID: TRIAE-23APR03-CLUSTER730_1373
ttttttttttttttttggccaaccaacagtctttgtcaccgtcataatcatcacacaacgatgggcaaaaacagtgtttaacacgattgacatttgtatggcgaaccctatcgtcgatacattaagattaagttttaactttgtacgaacaaactaactgctgactcgctttcccgcttggtttattccaactctttagatgctagtgccccatacagaaacggagagacccaccgtcccgctcacgattgccaagtccgcccgcccttggtcggcaaagaagcttcgacatgatggactcgagaccagggctggctctgacggacggcaatcccccaacaaggcttaaccgctgccaggttcggtgacgatgcaatcctcctcctacgcctccgtctgcccctccttggtgatgtggaagccttcgattttacgggcgacctcatttgccaccgcggcggactttggtttgccgttggcgttgggtgcctcggggtcttcggtgtttgcggggttcagcggccagatccggatggtgccgtcttctgatcctgatgcgtatgattcgccaacaggcgcgaaccggacgcagtggacggggccatgatgacctttgttgcaggctatttcttcaccagtgaagaaatcatatacatgaacccacatatcttcccctccagtgatgaacttactcccagactttggttcaagtgaagctgactccacagtgcatgacatatcatagcttttaacaagcccaaaatggttcgcatcccaaaatttaacacttgacccatcagctgtagtgatgaacctgccgtcctggcttacttctgcactggtgacaggtgccttggtttcaagagtttggacaatttttccacttctcacatcccataacctcactccacccatatcagagcaggaacttagaatagattggtcactgtgaagccaagcaacagttcgtacagaaccaggtgttttgtcaagttctcttggagctgcatctggacgattcatgtcatatatacgcaaaatcttctccacacctccagtgagcaacatgtgtgtatcctcagaaaaggcacatgcacggactatatgcttgtgctcaaacgaatgtagctcatttcctgttagtgcatcccatattttggctgagaagtccgcagaaccggaggcagcacggagagcatttgtgtctagacaagagctccaaactgcacccttatgaccttcaaaagtcccaatccaatctccagtatcaccattacgaagcataggatttgagtccttgctggcgctgatgaggaagtagccgtcgggcgtgacggggctgtagaacaggtcgaccaccggccgcgagtggccgtggcacaccttggagacggccaccttcttcttctccatttctcccggcccccctcccgctcgcttccccgggcggcccggctcgtcgactccggcggcgccctcctccccgacgccctaaccctagccccgatcggagaaaaaaaataccagggggggtcgagggtaaaaaaatcgcgctgcggggcgcgggatcggctgatccggatccctggagcttgatctgtacaggagttttattggataatagaggtagcaatggggtgtgggaggagcgacaccttgacaataccattggcatcaatgtcaaaagtgacctcgatctgtggcatacccctcggggctggtggaataccttcaagctggaattcaccaagaagcttgttatctgtggccatctccctctcaccctgaagcaccttgattccaggtcgacgcggccgcg

SEQ ID NO: 5282 - DNA, 1481 bp, Triticum aestivum
  Clone ID: TRIAE-23APR03-CLUSTER730_1390
cctaatcgaaaaatagatctcacactccaagctagccaacaccagctactgctcggtgaactagtttggtacgtagcagctagcacgatggggcagcttagcaagaaccttctggtggcggccgtgctggccgtggcggcggtggagctgtgcggcgccatcccgctggaggacaaggacctggagtcggaggaggcgctgtgggacctgtacgagcggtggcagaccgcgcaccgcgtgccccgccaccacgccgagaagcaccgccgcttcggcaccttcaagtccaacgcccacttcgtccactcccacaacaagcgcggcgaccgcccctaccgcctccgcctcaaccgcttcggcgacatgagccaggccgagttccgcgccaccttcgtcggcgacttccgccgcgacaccctggccacgccgccgtccgtccccggattcatgtacgccgccgtgaacgtgtccgacctgccgccgtccgtggactggcggcagaagggcgccgtgacgggcgtcaaggaccagggcaagtgcggtagctgctgggccttctccacggtggtgtccgtggaaggcatcaacgccatccgcacgggcagcctcgtgtccctctcggagcaggagctcatcgactgcgacacggcggacaacgaagggtgccagggcgggctcatggacaacgccttcgagtacatcaagagcaacggcgggctcatcaccgaggctgcctacccgtaccgcgccgcccaaggcacctgcaacgtcgcgagagcggcccagaattcccccgtggtggtgcacatcgacgggcaccaggacgtgccggccaacagcgaggaggcgctggcccaggcggtggcgaaccagcccgtgtccgtggccgtcgaggccagcgggaaggcgttcatgttctactccgagggggtcttcaccggcagctgcggcacggagctggaccacggcgtcgcggtggtcgggtacggcgtggcagaggacggcaaggcgtactggacggtgaagaactcgtgggggccgtcgtggggggagcagggctacatcagggtggagaaggattccggcgtcgcgggcgggctctgcggcatcgccatggaggcgtcctaccccgtcaagaccgacagcaagcccaagcccacgccgacgcccaggcgcgccctcggagccagggagtcacagtgatgcggcggaattattgctactactactatcgttcctagttaaattaagggtgaaataagttaagattgaattaaatggttctgcgtgggcacgcggcaagaattaagtgtcacgtgggacaaggtcgatcgatatctatttggattttctgaatgtaatgtaaaatataatgtgatgtaatgtattgctggttacagtgtatgaaagcttgctaatatattgagttctgttcagagaaaaaaaaaaaaaaaaaaaaagaaaaaaaaaaaaaaaaaagc

SEQ ID NO: 5283 - DNA, 474 bp, Triticum aestivum
  Clone ID: TRIAE-23APR03-CLUSTER730_1397
tgcgcagccgacctccgttttccaccatgccgaagcagatccacgagatcaaggacttcctgctgacggcgcggcggaaggacgcgcggtcggtgcggatcaagaggaccaaggacgccgtcaagttcaaggtccgctgctccaggtacctctacaccctctgcgtccacgacaccgacaaggccaacaagctcaagcagtccctccccccaggtttgaacgtccaggaggtttaagaatcatcaagccagatcatgcctttactcttgtagccggaatgttggatttagcagcgtctgtctgtgtccagtaaacgagtttaccatgagtatgttctagactgaaatgtaatgtttgggacctgtgaggattctgtgttatttcacttgctggagaatggagatatgttactcccttattatatcctatataaattgattgcacactaaaaaaaaaaaaaactcgagacctcgg

SEQ ID NO: 5284 - DNA, 824 bp, Triticum aestivum
  Clone ID: TRIAE-23APR03-CLUSTER730_1410
ttttttttttttttttggtccataatacatcaactgccattgcatacatgcttataaggctttgttacataaagttggaaggacacgcccattcactgggtacgcatataagaaacaatggattctagccctctcttgttgaaggagcgatcgattctactcctctcttgttgaggggggcatccctgctgatgggctgtccgcaaaatactctggatgtttcagattaacaccatgctcacgcaatgcttttgaaagatcatccatggtcaatacaaggcgtctatccttcggttgtttgctcttgttatctttgataggtgctgcaaccctggctttgcagtgctgaagagagtcgcttgcaatgtctgaaatgaacttttgagcagctacagcaaccagccttgttaggcgtatgtcggggcagtggaagccgcttcggccgaggtagtgctccacgagctcgtccgggatcgtgggattgtagtccatgagggaggagaggaactcggtgagcacggcctcgtcgtcatgccgcccgtcgctgccgccggcccccgtgcccggggccatccctccccctccccctgcgccgccggggttgttgcttcccatcatcctcccgtccgccgccttgctgctgagctgggtcgagtggtggagaagacgaagtcgcgctggaggtgaggacgatggcggcttggaagaggggtcgccgggggtccgacgacgggagacgagaggggagcagcgggccgaatccggcttcgcacctgcgcggactagtgaaatcaccagccgagatcaacactaactagaccgat

SEQ ID NO: 5285 - DNA, 1523 bp, Triticum aestivum
  unsure (1)..(1523): unsure at all n locations
  Clone ID: TRIAE-23APR03-CLUSTER730_1419
ccccgatccaccaccacacaagagcagagcagaggagaggagatcgaaatccagccgaccttcccctgcgccgacgaccccctcccgatccccctcgccggcgacgaccgaccatggcgacgcggtactggatcgccgcgctccccgtcgccgacgacaacgtcgccgccggcaagacggccctctgggcgcgcctccaggacgccatctcccgccactccttcgacaccccgctctaccgcttcaccgtcccggatctccgccccggcacgctcgactccctgctcgccctcagcgacgacctcgtcaagtccaacatcttcatcgagggcgtctcgcacaagatccgccggcagatcgaggacctggagcgcgccggaggggtcgagcccggcaccctcaccgtcgacggcgtccccgtcgacagctacctcaccaggttcgtgtgggacgagggcaagtaccccgtcaacgccccgctcaaggagaccgtcgccagcatccagtcccaggtcgccaagatcgaggacgacatgaaggttagagttgctgaatacggtaatgttaagagccagcttggcgcaatcaacaggaagcaaactgggagtttagcagttcgtgacctttccaacctcataaagccagaggatatggtcacttcggaacatctagtgacacttatttctattgtgccaaagtattcccaaaaagactggttatcaagctacgagtcacttgatacgtttgtggttccgagatcatcaaaaaagcttcacgaggacaatgagtatgctctctacactgtaacattattcgccaaggttgttgacaactttaaggtccatgctcgtgagaaaggtttccagatccgtgactttgagtatagtcctgaagcacaggagagtcggaagcaagagctagaaaagctgctgcaagaccaggaagttatgaggacctctctattgcaatggtgctatgcaagctacagtgaggtatttagctcctggatgcatttctctgctgttcgtgtcttcgtagagagtattctgagatatggtctgcctgcacggttcctgtctgttgtcctagcaccatctacaaagagcgagaagaaagtaaggaacatcttggaagggctatgcggcaatgctaacagcagctactggagatccgaagacgacgtgggcatggctgctggcctgggaggcgagacasagtctcacccttacgtctccttcaccataaactttgtctgagggtgtttgatgtatattattttgtgacatcaattctttcatggtatgtcggtttcggtttatacttcggtagtagatgatccgcgccgatcaataatgtagtctttcagagaaccttgaacgtatcctggcacaaactgggacttctctttttttgttctgctacggtgttgcaactgtttacttcttgtgcagtgttgtattactgggtacattattgtaattttgagtaaccaggttccataataataaaatcaggnaataagc

SEQ ID NO: 5286 - DNA, 1933 bp, Triticum aestivum
  unsure (1)..(1933): unsure at all n locations
  Clone ID: TRIAE-23APR03-CLUSTER730_1424
actcctcaagctgctcacaacacttcagccagccgctagcaagagatggctctacttgctgccgctaccctgaatcccaccacccaccttagccttagaagccgtgcaggacgcaacagtgagaacctatggctccggtctgctgcttcatcacagaagagcaagggaaggttctgtaacctcaccgtcagggcaggcacaccgtcaaagccagcagagcccattgggcctgtgttcactaagctcaagccctggcaaatccctaaaagggactggttcgacaaggacttcctctttggtgcctccacttcagcgtaccagattgaaggcgcttggaatgaagatggcaaggggccaagcacttgggaccacttctgccacaaatatcctgagcgcatatccgacgggaccaatggggacgttgcagcagactcctaccatctgtatgaagaggatgtcaaagcgctgaaggacatgggcatgaaagtgtataggttctccatctcttggtcgagaatactgccaaatgggacgggagaagtaaaccaggcaggcatcgactactacaataagctgatcaactcactgataagccacgacatagtgccatatgttacaatttggcactgggacacccctcaagcactggaagacaagtacggcggcttcttagatctgcagattgtagatgattacaaacaattcgccaaggtgtgctttgagagcttcggcgacagggtgaagaactggtccacctttaacgagccacatacgtattgttgtttctcctatggagaggggattcatgctcctgggaggtgctcgccggggatggattgtgccgtcccagaaggagactcgctcagagagccatacactgctggtcaccacatcctcttagctcacgctgaggctgttgagatgttccgaacgcattacaacatgcatggagattccaagatagggatggcttttgacgtaatgggttacgagccataccaagactccttcctcgacgatcaggcccgggaaagatccatcgactacaacctcggatggttcctggagccagtggttcgtggtgactaccccttctccatgagatcactgatcggagatcgtctacccgtgttcactaaggaggagcaagagaagctagcctcgtcatgtgacatcatggggctcaattattacacctccaggttctccaagcatgttgacatttcaccggacgttacgccaaagctgaacaccgacgacgcttacgccagttcagaaactacagggagtgacgggaatgacatcggtcctataactgggacttattggatttacatgtacccaaaaggcctaacggacctccttctgatcatgaaggagaaatacggaaacccacccatcttcatcactgagaacggaatcgctgacgtggacggcgacgaaaccatgccagatccgttggatgactggaaaaggctagactacctccagcgccacatctcagcagtcaaggacgcaatagaccaaggcgcagacgtacggggccacttcacctggggtttgattgacaacttcgagtggggcagcggctacagctcacgtttcggcctcgtctacattgacaaaaatgacggcttcaagcgcaagctcaagaagtcagccaagtggttcgccaagttcaacgccgtcccaaaacacttgcttgggtactaccaagccaactgggcaactcccgtgtgacggagaacatgttatgttcaaataatatcaatgctcaatgcatggtatcatttgaagaataatatccatggtgcaataaaatgaagattggacatttacaccgggatttgattagtacatgacccaaggtgtacctcaacatccgctctggctcggttgtttcttaagttgggctactgttgcaccancaaat

SEQ ID NO: 5287 - DNA, 787 bp, Triticum aestivum
  Clone ID: TRIAE-23APR03-CLUSTER730_1441
actcggaaaaagatctccgctttgccctgcctgcctgcgccggacggagccaccccacccaccaaagcgatccgccggaccggcgagcggcgagcggcggagcaagggagagatggcggcgacgggggaggagacggtgcgtgcgtcgcacatcctgatcaagcacgaggggtcccggcgcaaggcgtcctggaaggaccccgagggccgggtcatctccgccaccacgcgcgccgacgccgccgcgcgcctcggcgacctccgcgcccagatcctcgccggccgcggctccttcgccgacctcgccgcgcagcactccgactgctcctccgcccgccgcggcggcgacctaggcacctttgggaggaggcagatgcagaagcccttcgaggacgccacgtatgctctcaaggtgggggagatcagcgacatcatcgacaccgagagcggggttcacatcatcctgcgtaccgcataaggagaaagaagaagcccacgccgtcaccgtcacagcaccctctgatgttatctagcccttttccttcttccagggcctgcggctcttctcattctggcagccccaagcttgaatgaagaaaaatgtcttgtatcgtctcaccattttgctacggccatttgagctggttgataccatcatcacaggtcaatgtttgagcttatgatgtcttgatcgggaaatgtggaaatgttttctttttcttccccaacagcctttactaacacaaaaaaaaagctttaccgataccggcgaccccgagggggggcc

SEQ ID NO: 5288 - DNA, 1164 bp, Triticum aestivum
  Clone ID: TRIAE-23APR03-CLUSTER730_1446
aacatcaaagcatagttgagcctcccagcccgacctggtcacagtgcgctggtacactacccccacaagctcgaagaagcagtggtactttgacatggctcctctttcgtccaaggccgttgcactcgttgcactgttctccctcctcgtcacctacgccgccggcgccgggaacttcaacgactccgccttcaccgccgaccccaactgggaggacgccagggccacctggtacggcgcccccaccggcgccggccctgacgacgatggtggtgcctgcgggttcaagaacaccaaccagtaccccttctcctccatgacatcgtgcggcaacgagcccatcttcaaggacggcaagggtgcggctcctgctaccagatacgatgcaccaacgaccagtcctgctccggcaacccggagacggtggtcatcaccgacatgaactactacccggttgccaagtaccacttcgacctgagcggcaccgccttcggcgccatggccaagcccggcctcagcgagaagctccgccactcgggcatcatcgacatccagttcaagagggtgccgtgcgagttccccggtctcaaggtgaccttccacgtggagcaggggtcgaacccggtgtacttcgcggtgctggtggagtacgaggacggcgacggcgacgtggtgcaggtggacctcatggaggccaactccgggacgtggacgccgatgcgcgagtcatggggctccatctggcggctcgactccggccaccgcctccaggcgcccttctccatgcgcatcaccaacgagtccggcaagacgctggtggccgacaaggtcatcccggccaactgggcgcccagcaccttctaccgctccatcgtccagtacagctgaagctgctgaactgaaccgaactcatcatttggaatcatgcatgcattggcttgatttggtatctgtactatcatggatcgttttgcatgggtactaccgaggaggtttttgattaattaaggttgggtcgtcgggtgtcatgtaggcgtcgtcgtgcatgtgtgtcttgaatacgtcggtgggatatggaggaggggcacttttgcatgtgcactcccgcgcccactgtcactgtaccagtgtgtaagcagaccataagttattactgtttgtgtg

SEQ ID NO: 5289 - DNA, 1669 bp, Triticum aestivum
  Clone ID: TRIAE-23APR03-CLUSTER730_1451
ctccagtccagatcggaaagcgcaagaacacaagagctagctacgagcagcacacgcccgggaaatctttactagcactagctaaagctcaatagagcgctgtgccaagaagcagctaaagatgtgcagccatggccatgcggagccggcgacggcgtgcgtcacgtgcccgccgccgtcgcaggggcggctcatcacggtgctcagcatcgacggcggcggcatccgcggtctcatcccctccaccatcctcgcctgcctcgagtccaagctccaggagctggacgggccggacgcgcgcatcgcagactacttcgacgtgatcgccgggacgagcacgggcgcgctggtcacgtccatgctggccgcgcccggcgagaacaagcggccgctcttcgaggccaaggaaatcaacaagttctacctcgacaacgggcccaagatcttcccccagaggagctggggattgctgaccccgatagggaacatgttcggcgccgtcatgggtcccaagtacgacggcaagttcctgcacgacaagatcaagagcctcaccaacgacgtcaccgtcgccgacaccgttaccaacatcatcgtcccgacgttcgacgttaagtacctgcagccgatcatcttcaatacctatgaggccaaggtggacccgctcaagaacgcgcacctctccgacatctgcatcagcacgtccgccgcgcccacctacttccccgcgcactacttcaccacccgcgaccccgcgggcaagctgcccggaccgcgagtatcacctcatcgacggcggcgtggccgccaacaaccccaccatggccgccatgtccatgatcaccaaggaggtgctgcgccgcaaccccgacttcacgcacgggcaagccccgccgagtacggcaactacctcatcatctccatcggcacggggtccgccaaaatggcccgagaagtacaccgcgcccgattgcgccaagtggggcgtcctccgctggctctatgacggtggcttcaccccgctcatcgacatcttctcccatgcgagcgccgacatggtcgacatccacgccgccgtgctgtttcaggccctccgcatcgagaagaactacctacgcatccaggacgactcgctcacggggcacacgtcctcggtcgatatcgccaccaaagagaacatggaggcgctcatcgggatcggtaagaatcttctcaagaagaatgtgtcccgggtgaacattgacacagggatgtatgagtccgtcgacggcgagggcaccaacgaagaggcgctcgcgcgcttcgcccggaaactctccgtcgagcgtaagctgcgccaaaccaacctcaactctaaatagagaagaggtcggttcgaaagagaagacagatgaagaagcaccatctgctatgcttggagatgcagacggacgcgcggcggaagatacgcaaacctttgttattttaataattgtgcttgttataattatgctttcgtggacaaaagtcgacgaatgttgatttgcatctctgcctatgttaggtcgaccaaccgagagttgtaatataatgtaatgtgggtgagtaattatttttctaaataaaatctgggttgttcttcggtaaaaaaaaaaaaaaaaaaaaaaaaaaaaaaactcgagactagctc

SEQ ID NO: 5290 - DNA, 1298 bp, Triticum aestivum
  unsure (1)..(1298): unsure at all n locations
  Clone ID: TRIAE-23APR03-CLUSTER730_1470
ggagcattaaactgaaatgtatacagatttcagagatgtttcaaaaaatcacaaactacaagcatctttaaacatatgtagtatgtaaacatgttcgctatagtgttatgaaaaccctgctgttacattgtagcgcctgtctcaataatggagcaatttctatttgggccgaagtaacacaaaaatgtccttcctctcatcagttcacagaaagttcatagatgctccagcctgcagggggtatctttgtgtcgcatggaaccaatgaactggaagaccaacacaatatttccatttgagacaatacttacaagtacagcaaaacgtataacaggacgcgggtgttacaagatggaaggaactaaacaggaatgagtaattgcagttcataagaagtatttcatcctgttatctcttctcatggcgcgatatacagcctggacctgctcacttgaagccacgcgtattggcccaatttttacagaaacatattttcccctagaagatattttctgacttacttggccctttggaatcgattcttgaagaaccgattcaacagcatcaaccatagaatggacaaaatcttcacctccagtaccaattgctgtaaatcctctgtctgtgggatatgtattcaccttctgatccagaacaagccattcatcacttgaatcatctgtaacagtgccacttgagatggcctcgagcacggcctcctgcggcggctgtccctgctccccgggcccgcccccactggagctggagcagcagcggaggttgcggcggcggcggcgacaaggaaacggcgccgccggggccgacgcggcggcgcggaggctgaggtggtggagggggtcggggagcagcagggtgcggagcgcgagggctcggcacgccatcgtcgccttcgattccttccttagtccggtcgccgcggccgcgagcagcgagagagattcagtggatatttttcgcttggtttgggtttgcggtcttgtccatcacatcattctcctaatgatgtgatcccgttatcaacgacatccaatgtccatagccaggaaaccatgactatctgttgatcacaatgagctagtcaactaagaggctcactanggacatattgtgggtctatgtattcacacgtgtattacgatttcccgggataatacattatagcatgaataaaagactattatcatgaacanagaatataataataacacttttaatatgcctccnanggatatttccaaaatctcccactncactagatcaataaccaattaacacac

SEQ ID NO: 5291 - DNA, 1357 bp, Triticum aestivum
  Clone ID: TRIAE-23APR03-CLUSTER730_1474
atccccctccctcctacccacacccagccaaacgcagccaactgaacggcacgctacgctacaagctgagtgtgagccggtagtgtcactagtgagcgagtgagggaaatggggaagccgcagctcacgctcctgggagtggcggcggtgctgctgctctcctcctccctccacggcgccagggcggaggaggagtccgccggcctggacacgggcgtcgccggcgagcccggcgtgctcaactccagcgccgtgtccatcgggcagtcgggcgtcgcccgggccacctggtacggcgcgcccaatggcgccggcccctacgacaacggcggcgcttgcgggttcaagaacgtgaaccggtacccgttcatggccatgacctcctgcggtaaccagccgctgttcaaggacggcaagggctgcggcgcatgctacaagatcaagtgcacgaagcacaaggcgtgctctgggcggcaggagacggtggtgatcacggacatgaactactacccggtggcgccctaccacttcgacctcagcggcaccgccttcggcaagctcgccaagcccggccgcaacgacgagctccgccacgccggcatcatcgacatccagttcaccagggtgccttgcgagttcccggggctcaaggtggggttccacgtggaggaggggtccaacgcggtgtacatggcgatcctggtggagtacgagaacggcgacggcgacgtggtgcaggtggacctcatggagtccggccgccggggagggggaggcgggcggtggacgcggatgcgcgagtcgtggggctccatctggcgcctcgactccaaccaccgcctgcaggcgcccttctccctccgcatccgcaacgagtccggcaagacgctcgtcgcccgcaacgtcatccccaagaactggaggcccaacaccttctaccgctccatcgtccagtacagctagacctctccctccattgacgagagctctgttttggcttggcgggagtcgatgcatgctgttttggcgggagttttcaattaattaattaattcatattctcaagttgtatcgtgggaaatagaggaggcaccctaccgtgttcaagcacgctggctctcccgcccactttattagtcgtcgtcgtcctcgtcgtattaacgttttcagactttgcggatgcatctgcaagcatgctctgtatccatgatcacatttatgtatgtgtgaatcatgcatcatccatgatgtgtcatcacatcggtcggatcagactgagcaaggctatgtataaatgttcctggcttttaatttcgttcggtactacttttctactcaaaaaaaaaaaaaaaaaagc

SEQ ID NO: 5292 - DNA, 988 bp, Triticum aestivum
  Clone ID: TRIAE-23APR03-CLUSTER730_1481
aaaagctggttatatagatagcaccggtcgcctaccccctcgcctcatcttatccccctccgtccccgcttcctcctcctcttcctcccgctcactcccgaagcgaagcctcgagaggtcccaatggcttccaccacattctcctccgccttctccatcctctctctcccctcctcctcaccatccccctccgcctcggcccccaggaccctacccgtcgccaaccgccgccgccgcgccgtcgccgtcgcctccactgccacggagtccccgaaggtccttgagctcggcgacgccattgccgggctcacccttgaggaggctcgcaaccttgtcgaccatctccaagaacgtcttggcgtctctgccgcctcctttgctcccgctgccgcggtcgcggctcccgccgcagcggcggccgaggaggcaccggtcgagaagacggagttcgatgtggtcatcgaggaggtgcccagcagcgcgcgtatcgcaaccatcaaggttgtgcgcgcactgaccaacctggcgctgaaggaggccaaggatcttatcgaggggctcccaaagaagctcaaggaggccgtgagcaaggacgaggccgaggaggccaagaagcagctcgagggagtcggcgccaaggtgtccatagcgtgagactaggtatactaggctcctttttttcccattacatttatgtttcatatcaatcttttgtattcctcttgtaattgccgtggactgttgtttcatacagtatgagattagttcgcatgtggaattattagttcattttcgtgtgttgtattcaatcttgtataattactggatgttgcattctttagattcctaatgggtactattggttttggatatgatactgtcatgtttgtagagattgtgcattgccagttttagagtttgtattggagcaatagaacagcatatctctcgttttgatctttgaaaaaaaataaaaaaaaaaaaaaaa

SEQ ID NO: 5293 - DNA, 963 bp, Triticum aestivum
  Clone ID: TRIAE-23APR03-CLUSTER730_1485
cccctcccattccgcctcctgttgcttcgaactatggcagcagcagctgccggtgctgcatcggccgccgccgcgccagctacgcatcacgccgaccactccatgaacgccctccgctccaccgccttccgccgctccaccctccattgggacgccgccgcggccttcttttccccgcccttccgctctcgccgctgccaccgacgtgtcttgctccctcctgccgcggcgctgcccgcgaagtcccgctccagggccaaggctaagctcctggcggacgcgggggctgtggacccctggctcgcctccctctccctgctccccgccggcggcggcggctacggcggccagcgcggcggtggcggaggctacggcggcggcggcggctacggaggcggcggcggctacggcggtggtggcggctacggcggccagcgcggcggtggcggcggcgactccggcggccagtggaggaactgagcctcgaatctcccagttatcgatctatctaccgtgtcgtcgtcgtcgtcgtcgtcttcgtcagcaagttatcttcggtgtcgtcgtgttcctgtgtcagtctgagtcgtcgtgtgtgtggtgtttttgatcgcgagctcgagtgtcgctctgtccggggttaattagagctggttacgcgaggaagaaacaacatgtgttactatctttcagtcggtcggtcggtcggtcagtcggtgatgcagcaatccccttctgtcatggattgggatgtgatgttggaatatcctatgtttgaacaagtttaaatggatgaagaaaatgcaagtcatagctgcgaaatatcctctctctttgttccttaaatttctcttgttctgaagcatccattcatctttcttcaagctataaggattgaattgctctgtgaagcatgcaaaacttgctgccaattcagcatagtctttcacaaaaaaaaaaaaa

SEQ ID NO: 5294 - DNA, 3243 bp, Triticum aestivum
  Clone ID: TRIAE-23APR03-CLUSTER730_1490
agttctcttctatctattcctccacccgaattcctgttccgccagccgtacacagcacaccactgcctgcctgcctgcctgcgccgcgcgccgcggccatggcggacgcgccggtggagctgccgggccggctcgccatactgccgttccgcaacaaggtgctcctcccgggcgccatcgtgcggatccgatgcaccaaccccagcagtgtcaagctggtggagcaggagctctggcaaagggaggacaagggtctgatcggagttcttcctgtgcgggactcggaggctgcagctgttggttcgatcctgtcgcctggcgtgggcagtgattcaggtgaaggaggccgcaggtcgcctggtggttctgggggagagtcaaccaaacaggatgcaaagagtgggaaggagcccattcactggcacagccggggagttgctgctagagctctgcacctttcaagaggggtggagaaaccaagtggaagggttacatacattgttgttctcgaaggcttatgtaggttcagtgttgaagaactcaatgcaagagggtcgtatcatgttgcccgtgtttcacgacttgacatgacaaagactgagttggagcaggcagagcaagacccagatctaattgctctttcgaggcaatttaaagcaactgccatggaactaatttccgtcttagagcagaagcagaagacggttggtaggactaaggtgctacttgagacagttcctgtatacaggctagcctgatatttttgttgctagctttgaaataagctttgaggagcagcttgctatgctggattcagttgacttgaaagtgagactttccaaggcaacagaacttgtagacaggcacctgcagtcaattcttgtagcggagaaaataacacagaaggtggaggggcagctatcaaaatcccaaaaagaatttctgctgcgccagcagatgagggctatcaaagacgaacttggtgataatgatgatgatgaagatgacattgctgcattggaaaggaagatgcagaatgcaggaatgccagctaatatttggaagcatgcccaaagggagttgaggcgcttgaggaagatgcaacctcagcaacctggatatagtagctctcgagcttatttggaacttattgcggaccttccttggcaaaaagtaagtgaagaaagggaacttgaccttagagctgcaaaggagagtcttgatcgtgatcattacgggctgaccaaagttaagcaaaggattattgagtatttggctgtccgtaagctcaaaccggatgccagaggtccagtgctgtgttttgtggggccacctggtgttggaaagacatctttggctacatccatagcaaaggccctaaataggaagttcataagaatctctcttggtggtgtaaaggatgaggctgatattaggggccatcgaagaacatacattggaagcatgccagggcgcctcattgatggactaaagagggtatctgtcaacaacccagtgatgctccttgacgaaattgacaagactggttctgatgtacgtggggatccagcatcagcactgctagaagtacttgaccctgagcagaacaaaacattcaatgaccactatttgaatgttccatttgacctgtcaaaggttgtatttgttgcaactgccaacaggatgcaacctattccccctgccctgttagataggatggaagtcattgagttaccaggctacacgcctgaagaaaagctgaaaatagccatgaaacatctcctaccaagggtattggaacagcatggcttgagctccgcatatcttcagattcctgaggctgtagtcaaacttatcatcgagagatacacacgggaagctggtgtgcgtaatcttgaaagaaacctagctgcattggctcgtgcagctgctgtcaaggttgcagagctagatagtacgcttagacttggcaaggaaatgcagccaataactacaactctactggactcgagactcgccgatggtggtgaagttgaaatggaagttattcctatgggccaggacatatcaaatacatatgaaaattcatcacccatgattgttgatgaggctatgctagaaaaagtgcttgggcctcctagatttgatgacagagaggctgcggatcgggtgtcattcccaggagtgtcagttgggctcgtctggacttcttttggtggggaagttcagtttgtagaggctgcggccatggcgggtaagggtgacttgcatctgacaggacaacttggtgatgtaattaaggaatcagcacagttagctctgacatgggtgagagcaagatctgctgacctcaatctgtcacctacttctgatattaacatattggagagccgtgatattcacatacattttcctgctggtgctgtgccgaaggatggtccttctgcaggagtcacattggtaacatcactagtgtcattgtttagtaaccggaaagtcagagcagacactgcaatgacaggagagatgactcttaggggcctagtgttgccagttggtggtgttaaggataaggtgcttgctgcgcatcgatatggcatcaagagagtaatattaccagaaagaaacttgaaggacttggctgagattccagctccgatcctcgctggcattgagattctgctcgtgaagcgcattgaggaagtacttggccatgcttttgagaatggattccctttgaggctacactccagtctatagcacgggcaaataccaattggcgcctgatgtggcatttcctcggtggccatttactcgttttgaagattcgtcgctattcaccgcccagatatctacaaatgagcgttgagcgtaggcgagcaattgctccgttggagcgaaatctcatgacgccagcgttgctcgtccaactcagttaagctaatatgcggaatgtgtatatggatacttgctatccacaaaagcggcagggagatctgctctggtctttgtgattgtatttatagagggatgctcatctatctatgctcggtttgctatggtagcaaggaggtccacctgttgttgtcggtttgggtgtatatgtaacctatttcagccagggagaattgaatgttgcagtatcataaataaaaaagagatagcacaagtaatcatcgtaaaaaaaaaaaaaaaaaaaaaactcgaacctcggccgcgaccacgctaatcactagtgaattc

SEQ ID NO: 5295 - DNA, 1446 bp, Triticum aestivum
  Clone ID: TRIAE-23APR03-CLUSTER730_1504
gctactgactgcctactggcaacattcacgcctgcgctgcgcttccgtcccgtgacttgcctgccttcccctgccgccgcggctgcgagcttcagggcgccatggcgcaaaccccaccgattccccgcgtcagcctcggcacccaaggactggaggtgtccaagctggggttcgggtgcatgggcctcacaggctcctacaactccccggtcgaggacgacgccggcgtcgccgtcatcacgcacgccttccgccgcggcgtcaccttcttcgacacctccgacgtctacgggccccacgccaacgagatcctcctcggcaaggcgctgaagcagctgccgcgggagcaggttcaggtggccaccaagtttgggattcagcgggatgcccagggcaagagcaccatctgcggccgcccggagtacgtgcgcgcctgctgcgaggccagcctgcaccgcctcggcgtcgaccacatcgacctctactaccagcaccgcatcgacaccaccatccccatcgaggacacgattggtgagctcaagaagcttgtggaggaggggaaggtcaagtacattgggttatcggaggctagcccggacaccatccggcgtgctcacgctgtgcaccccatctctgccgtgcagatggagtggtctctgtgggctcgcgacatcgagcccgagatcgtgcctctytgcagggagctagggattggaattgttccctacagcccgattgcccgtgggtttttcggtggaaggggagtgacmcaacaagtgtctgctgaatytagtctgaaaggccatccacgtttttcggctgaaaacctggagaagaacaagcaactctatctgaaaatggaagaactggccaagaagcaccagtgcagccctgctcagctagctttatcctgggttytgcatcaaggggatgatgtggttccgataccagggactactaagatcaagaatytagactccaacattgactccttgaaggtgaggctcacggaagatgacctcaaagagattagcaacgagatacgcgaagaagatgttgccggtgggaggcagtatacttygtttgcgaaattcacctggaattatgcggatacgccaaaraagtgaaactacaaaagattgtggagacggtgaaacaagcatgccatgctatgtgctcgtgtgatgaatggtgccccctgtatyttcatcttgtgaattgtcccgtgaataagaacatgtgcmctgtctccacctgccgtgtaaatttatgtgtgcctgtataacagaagactgagactgtgctagctatgtttgtggctctctagtcttaccggctttccgtgacagcaattacactgttggaaaatgtatctgctcaaagagatattcagaagcatatcaagacgtttgaaaaaaaaaaaaaaaaaaaaaaaaaaaaaaaaaa

SEQ ID NO: 5296 - DNA, 2223 bp, Triticum aestivum
  Clone ID: TRIAE-23APR03-CLUSTER730_1540
cactcctcaagctgctcacaacactccagccagctgctagcaagagatggctctacttgctgctgctaccctgaatcccaccacccaccttagccttagaagccgtgcaggacgcaacagtgagaacctatggctccggtctgctgcttcatcacagaagagcaagggaaggttctgtaacctcaccatcagggcaggcacaccgtcaaagccagcagagcccattgggcctgtgttcactaagctcaagccgtggcaaatccctaaaagggactggttcgacaaggacttcctatttggtgcctccacttcagcgtaccagattgaaggtgcttggaatgaagatggcaaggggccaagcacttgggaccacttctgccacacatatcctgagcgcatatccgacatgaccaatggggacgttgcagcaaactcctaccatctatatgaagaggatgtcaaagcgctcaaggacatgggcatgaaagtgtataggttctccatctcttggtcgagaatactgccagatgggacgggaaaagtaaaccaggcaggcatcgactactacaataagctgatcaactcgctgatagataacgacatagtgccatatgttacaatttggcactgggacacccctcaagcactggaagacaagtacggcggcttcttaaataggcagattgtagatgattacaaacaattcgccgaggtgtgctttaagaacttcggtgacagggtgaagaactggttcacctttaacgagccacatacatattgttgtttctcctacggagaggggattcatgctcctgggaggtgctcgccggggatggattgtgccgtcccagaaggagactcgctcagagagccatacactgctggtcaccacatcctcctagctcatgctgaggctgttcagctgttcaaagctcgttacaacatgcatggagattccaaaataggaatggcttttgacgtaatgggttacgagccataccaagactccttcctcgacgaccaggcccgggaaagatccattgactacaacatgggatggttcctggagccagtggttcgtgggtgactaccccttctccatgagatcactgatcggagatcgtctacccatgttcaccaaggaggagcaagagaaactagcgtcgtcatgtgacatcatggggctcaactattacacctccagattctccaagcatgttgacatgtcaccagactttacgccaacgctgaacaccgacgacgcttacgccagttcagaaactacaggaagtgatgggaatgacatcggtcctataaccgggacttattggatctacatgtacccaaaaggcctaacagacctccttctgatcatgaaggagaaatacggaaacccacccgtcttcatcactgagaacggaatcgctgatgtggaaggtgacgaaagcatgccggatccattggatgactggaagaggctagactacctccagcgccacatctcagccgtcaaggacgcaatagaccagggcgcggacgtgcgggggccacttcacgtggggtctgatcgacaacttcgaatggagcctcggctacagctcacggttcggccttgtctacatcgacaagaatgacgggcaacaagcgcaagctcaagaagtcggccaagtggttctccaagttcaattccgtcccaaaacccttgcttaagaccaccaataacaacgcaaccatgacagctgcttccgtttctgtatgatggagaacgaagtggtgctatgttcgaacaaataatccaaggctggatgcatggcatgcagttagtttgaaaaaattaataatcggatgggtgcaataaaatgaagggaggatgtggccgtttcagttcactgccggggatgttgaattagtagcctcgatcgattctgtaatggcgaatgctcgctttgcgtcgggatcacggcggattggatgggctccttcttggcctccggagggtgtggctcgccagcttccggttccggcgggctctgtaggttgtgttctttttctttatgtcgggcttatctgtgctgccgccccagcccgaactatttcccttttgcttgctgaacgtttgtgttcaataatcatgttcttgtggaactcgtcgatttatttatataaagtgagaccttgtgcttgttttctaatgtttttaagatcagaatatggcaagggaat

SEQ ID NO: 5297 - DNA, 1663 bp, Triticum aestivum
  Clone ID: TRIAE-23APR03-CLUSTER730_1607
ttttttttttttttttggactttctaatgcattgaagagatgaacttgtaacaattcttacatctcacattgcaagcccttggctcagtgaccactcaatcccatcatggtttgctactttctgaatcacacaagaaagcaacaaaacaaccatttatagctactggtagctttagcctaagctcacattactcatcaatctcatagaaacctcaagcttactaacaaaactagtggcctcctcgcccttgcaggggaggttacatacgtatattcaggagatcagaacagcacgagaacgatgacactagccatggcaataagcagcgcaatacttgccttcaacccagcagccccattcaagccccagacacggacgtcgtctatcaccggcccgcagagcgagctgtggtcgtcgcttctcgtgttgtagtagacgctgtagagcgcaacgcgtgtcctctcggcgcgcgccgtgaagttcacgttcacggcctggctcgtggcgttgcccatgggggagtagtggaagttctgggcctggtcgccggcgaatgccatgacagccattggcggctggcacgagtcgcctgccgagcccagcgtgaacgtcagggtgtacgccttctgaggggtcgtctccaccatctgcgagatgatgccctccttgccggagagaagctcgatggcgcgcttcccctggggcacggtgtactggtcggagtcgacgaagcggactgcgcggttcgactcgatcatccaccctggcaaggccgatgtctgctcgtcaaggttcgtcgggagcaggacaccgaagcttgtgtttgcaaacatccatggcccctcctcaaagtctccattgatcaccatgttctcctttgctttgtcgggggagaagagcttcttgatggccacgttgtcaaggataggcccacaggtcgggtcgtcctccatgccagggttcctaaactcaatgctggcctgctcatccactgcttggaaagccagtgcatatgcatcccagccttctatgctgtaaagtgtctgcaagtcgactgtctgtgatacgctcccggcggagatgttcagtgactccagctgcgcgcaggtccgggcggcactgaatgtgatcgcgtactctgagcccttctcaacctccaccacctgcccaatgcctgcatcattccctagccgcacagcatgatccccttgtggaacaataaggatcatgccaccctggtgctggcctgcggaaatgagctcaactgttccattgatcgtccagcttgggatcgccgcgccctcggaaactgaagccgatttgacgaaaccgccaggtggtgctgtctcgaaatcaccattcatgagcaggccgtcctccaccggagcggccgaggcgagacgacgagagggcgccagcagaagaagcgccagccccagacccagcaatgcgagccctcgctccatcccctcctccgcctagcagctagccccctcaggcccccggctccctcaccaccctttcgtcctcgatgtgtagaagagtggggggtgggagggggagtgggagtgaggtgagtggagattgcaggctgacgaagaagggggcaccggtgacgggtgcagccaagagactctgcttgtttttcgattaggatgttct

SEQ ID NO: 5298 - DNA, 2869 bp, Triticum aestivum
  Clone ID: TRIAE-23APR03-CLUSTER730_1608
aatctatacataacccctcggccatcccccctaccccccgtcccaccccaccccacccacctcgccatctccgccgtcctccgccacacaccgccatggcagcgcactccgtcgccgccgcgcacgccaccatcgcggcccgcgcgggcgccgccccctcctccccggcggcggccccggccgagcgcctgggcttccgcctcagctcgctcgccggccgcgccctccgctcgccgctcccggcgcgccgggccgcggcggccgccgccgcctccccctcctcccgcaggagcggcagccagcgcgtgcgcgcctccgcggccgtcgagaccgtcgaggcggccgccacggggcgagctgctcgacaagtcggtcaacgcgatccggttcctggccatcgacgccgtcgagaaggccgtgtccggccaccccggcctccccatggggtgcgcgcccatgggccacatcttgtatgacgaggtcatgcgctacaaccccaagaacccctactggttcaaccgcgaccgcttcgtcctctccgccggccacggctgcatgctccagtacgccctcctccacctcgccggctacgacgccgtcaaggaagaggacctgaagcagttcagacagtggggaagctccacccccggccaccctgagaacttcgagactcctggagttgaagtcaccactggtcctcttggccagggtatcgcgaatgccgtcgggttggcgcttgctgagaagcacctggctgctcgtttcaacaagcccgacagtgaaatcgttgaccactacacgtactgtattgtgggagatgggtgcaacatggagggtatcttgactgaagcttgctctttggctgggcattggggtcttggcaagctaattgttttctacgacgacaaccacatctccattgacggagacacggagattgcttttacagaggatgtgagtggccgctttgaggctcttgggtggcacaccctctgggttaagaatggcaacgatggttatgacgagatccgtaaagccattcaggaagcaaaatcagttactgacaagcccacaatgatcaaggtgactaccacaatcggttttggatctcccaacaaggccaactcatacgctgtgcacggagctgcattgggcaccagcgaggtcgaagcaaccagggcaaaccttggatggccatatgagccattctttgtgcccgaggatgtcaagagccactggagccgccatattccccaaggtgccgctcttgaggctgactgggatgctaagtttgcacagtacgagcagaagtacccagaagatgccgccaccttgaaaagcatcatcacaggagagttgcccgctggctgggccgatgctcttcctcaatacaccacagagagcccagcagacgccaccaggaatctctcccagcaatgcttgaatgcacttgctaaagttgtgcctggtcttattggaggcagtgctgatcttgcgtcctccaacatgacattgcttaagatgtttggcgacttccagaaggatacccctgaggagcgcaatgtccgctttggagtcagggagcacggaatgggcgccatttgcaacggcattgcgctgcacaccccagggctcattccatactgtgcaaccttctttgttttcactgactacatgagaggtgccatgaggatctcagccttgtctgaagctggagttatctatgtcatgacccatgactctattggtctgggtgaagacggtccgacccatcaacccattgagcacttggtgagcttccgcgcaatgccaaacatgctgatgttccgtcctgctgatggcaaggagactgccggggcatacaaggtggctgtcctcaacaggaagaggccatctattctggctctctccaggcaaaagcttcctcatctgcctggtacctcaattgagggcgttgcgaagggtggatacaccatctctgacaactcgaccgacaacaagcctgactacatcataatgagcactggttctgaggtagagattgctgtgaaggctgccgaagagttgacgaaggaggggaagaccgtccgtgttgtgtcatttgtttgctgggaactcttcgacgagcagtcagatgagtacaaggagagcgtgctccctgaggccgtcaccgcaaggatcagcattgaggctggctctaccctcggatggcaaaagtatgtcggatccaagggcaagaccatcggcatcgacaagttcggcgccagcgctcccgccccgaagatctacaaggagtacggcatcaccgcggagaacgtcatcgccgcagccaagagcctgtaagatcagcacactcgtcgaggttctgtcatcgttgatgccaaagaacaaacgacaccacacttgaaggtctcgtgcccagaagcttggaataacggagggagaggaggatatgcctgcgtcggagcgtgagtggtatttttaggcctgtaataaacaatgccttttccatttgcgttgtcttacattcgatatatatcgccccccttagatgaattcgcggagggggcgagcctgatcaaattggggactggttttttgtatttgtttacatcgaactgatggtcgtgcttgcgatgcttctttctctccccgagatcgtcgcctccatgggttttatgctttgatgcgcccttttagtccttggtagtttgctcatcttccccttcccccatacaaacggtttgatgcatagtatcatcagtgcaataaacatagagtgttttccatcagcgtgggggaggctttgcgtcggccaaggccgggaaggaaaagttgttgtagggattggggccgcgggtggggggga

SEQ ID NO: 5299 - DNA, 1665 bp, Triticum aestivum
  Clone ID: TRIAE-23APR03-CLUSTER730_1616
ttgtttttttttttttacctttagtaacagaagtaatataatttacaaggaagtcatcatgtgttcaaatgcgagttctctgctgtaatatacatggcaaaaacacaaaatgagagaaggttacgggcttacataaataggttacagactacacaaatgcaacagtcgtcctcagagctactaataaatactccctccgtttttattcagtctgcatattaggtttgaccgaagtcaaactttgcaaagtttgaccaaatttatagaaaaatatataaacatttaccataacaaatctatatgatgtgaaagtacattcaataatgaatctagtggtattgattttttattgtatatgttaatatttttgtttataaacttagtcaaagtttacaaagcttgactttgaccaaagctaatatgcggactaaataaaaacggagggagtactatcatatagaattgcacacaatacttctatcgttgcggatgcaagatagctgcacctcaaatgtacagggggaatatacatggatctgacatgcaacttggttatgagtcgggactctttgatgatggattgaatggcacttggtcggcacaatccaagttatctccagagtgctgagcaccaactcccatcaaatcaagataatgttgatagtgggatataatgccattcatattatcaatggaccctttaccacagatggcatcaccatacaaaatgttcattgtcgcaccgaagccaggatacctcttggacaaagtgtctttcttggttggtttccagttgccaacaaaggcatcatgggctgatggctgcttcctcttcattggagtcatccacctccagatcgctgcttcaaatgctagagtggcattttgttccaataactctgggtggttcaacagatcctgcttgatacccttacccacgataccatagttgtagttccagtaaacaggaagggcgcctcgaccatagtactcaactccttcagcacaacggtataattcgttgctgtcgtcacagtagctctggcttgggctcatttcatggttgtagcaaagaccccaagccaatgaaccaccgtcagctagactatatccacacgaggtcttggcgccgacgtggccgaggaaggcggcgacctccttcatgctcatctccctgccgccggtggtgccgaacccacgaggctcgtagagggccgcggcggtgatgaaggccttgtagtcccagaagccggcggcgtgggcgagggagttgttgcgcttggcgaagagctcctcgaactggtaggccttgaagtagtcggtgatggtctcgttgcagcagaacctgctgccgctgcactcccaccccttgtcgcaggccgtctcgccgcccttctgcctccttgcgtccgccgccgcgagcaacgccaacaggagcagaaaccacgccgcccgcaccatccccatggccgccgcaggaccggcgccggaggaggggaagctggaagagaaggaggagtttgtcggtggtgggcttcgttccctcgccgcgtgatctgctggggaggtgagaggaggaaggggagctggttggtggccgtcgatgcagagggcatggcggtgcgcggcagctgttcgggggcatttttttcgattaggatgttc

SEQ ID NO: 5300 - DNA, 763 bp, Triticum aestivum
  Clone ID: TRIAE-23APR03-CLUSTER730_967
aagcctccactcgtacccacgcactcctcccagtcttcacttcctctgctcctgcaccccccttcccgagctcagcagctagccatggcgcagggaagcggcagcgctaccgccgtgctcgtgctggtcctcctctgcgtgctcctccacggcgacttcgccgagtccaaggtgtacaccgtcggcgaccgcgccggctgggccctcagctccggcggctggcccaggggcaagcgcttccgcgccggcgacgtgctgctgttcaggtacgggcgcggggctcacaacgtggtggcggtgagcgcggcggcgtacaagtcgtgcagcgcggcgaggggcggcaggacgtacaactccggcagcgaccgcgtcacgctctcccgcggcaccaactacttcatctgcagcgtccccggccactgccaggccggcatgaagatggccgtcaccgccgcgtgatccgtctctccgaccaccggccagccggccggccggtgcttattaatcaactttagtttactttccgtcttcgatttactgaagctacgaactgcatgatgcgtagtacgtgttcaaataaaatgcccgcgtcccggctctcgagttcgtgggtgttgggccgtctggccgcttggtactagctcgagagaaattaatagagcgtgttttgtgtgcagtgcacgtgagcaaaggaataactctggtgttccggttgtgtgtgctttaatgcttgtatatcagatttttgagttgttgtgtgatt

SEQ ID NO: 5301 - DNA, 1076 bp, Triticum aestivum
  Clone ID: TRIAE-23APR03-CLUSTER730_988
tgtacctatctcttgctggccaagagaagataacacacaacctagcagcaagtactaaataaaagctacaacaaccgactcaaaatagtttattagccctgctcctcgccgtcctcggcagctgcgacttccctctcctccgcggcagcaaccatacagctcgtcgaagttctcagtcttgcccaacactatctcaatcttggacttctgcatcgggcggccccttgattcatcgttgacatcaacagtggatgtcatgatcttcttctcaacagcaaggccattatttttcaaaatttcgacaactgtcaccacagtggcgatagccatgccaagggcggacagatccccctcgtgatgcatctgcatgtacctcttgtcgaggttgacatataacataatcgccttcttcgtgatggagacctgcatccggctcctcttgtggcggctccgtcacggtccagagttcattgaccccctcatccttaccccccatctcgatagactcccctcctccagatccaaccgcgtccgacgccgtcgtcgccagggttgccctcgccggcatggctaccctcctccccgatgcctaaggacatgtccctccgccccgccgtggtctgcttcgtcgcctggatccacgagaccaagatggagagccccacatcgcggggatcgagctctccttcctccttcggacgtcgccgttcgtcaacgactccggcgctgtcgatcctccccgagcccgcctttgcacccctacgggatcccaatgacggatcccaggagccagacgacgccagtgatgactaccactacccggaggatgcctactactacgtgacaaccgctgacgatttggagtagttaggaggctcccaggcaggaggccttgccttttcgatcgttgctgcttttgtgctagccttcttaaggcaaccttgtttaactcatgtctgtactgagatattgttgcttccgttgactcttgtgttttcgagcttatgtattcgagcccttgaggcccctgcttgtaatataaagcttgtattattttcaaaaaaaaaaaaaaaaaa

SEQ ID NO: 5302 - DNA, 2188 bp, Triticum aestivum
  Clone ID: TRIAE-23APR03-CLUSTER7327_1
cgccaattcgcctcggacgcctcctgctccccagcctcagttgacaacaccagacagagttctcgtacgttcatggaggttgttctagaagtctttaagcatggctctgcacatggtgcccgtgcggctataagagctgaccagaagagttacagccttgtccagcttatttcgtccgcactggatgtgcacaatattttgcgcatgaaaacatgatggaaaagattcttatgtcaatggagcaaatgcgacaggattcctttgtggtgctcgtattggcatcgtggctagaccctgtgctgaatttattgctgggatattttgaacctggcgttctggtggaattgcagtaccccgagcactaagatatcttgaagttgaactcctgcaggttaggaatgacttgaacatttctaaggtgtcaagctttatagtgctgcgcccctcgaagcatggtatctctaccatatgttccactcgttattcagttcttccaactgtggatattttacctcgaaagatagatgcccaagaatctttaagtagtggattgacttctgcagtttatggcttaatggcagatattgacactttaaagaaaattaaagcagatggacatgctcgtatcctttacaaaagtggcacaactggtaaaccgaaaggagtagtccacactcatgaggcgatactttctcaaggtcaaattctgacagaggcatggggatatcacagtgaagatcagtttctccactgtcttccactgcaccatgtgcatggtcttttcaatgctctatttgtcgcccctctattcaggatcagtggtcgagtttttgccaaaattcagtgtgaggggagtgtggcagagatggcgtgagtcatatcccaatgacggcagtaaaaatgatgaggctattacagtatttactggagttccgacagtgtacacacgcctactgcaacgctatgatagtatgaacccttcttatcaggctgcctgtttttgtctcacaatgttgaggacactagtgctgtgtggcccaccaacgattccttcgccggtagtgaaacggtgacatattgtggcatgccatcgtctgaccgagctttaccccacgccggctactcccatgcacctggcgcggaaagaaggtacagtcggtaaacctcttccacgtgttgaggccaagatcattatggatgatggtactgaaactaaaactggagtcggtgagctctgtattaaaagtccgtcccttttcaaggatgtactggaaaagaccggaggttacagcagaatcatttatacagcagaatcatttattgatggtgggttcttcaagactggtgatacggtaaccgtagatgaggacggggccctcatatgccgagggcgcgcaagtgcggggttcctggttgtcggcggttgtaagtgggccgcgtctgttagtgcatgacactgtactagagtgtgctgttcactggagtgtgctgttcttggcttgcccgatgaagcttatggggaggctatatgtgcaataattgtgcctaaggaggatgcaaaggaaaaggctgaacaggcttcaaagccagcactaaccttagaagcattgacaagttggtcaaaagataaacttgctccatacaagattccaacaagattgcacttatgggattctcttcctcggaatgccatgggaaaggttaacaagaaggagcttaagaaattattagaggtgtagctgtagaagtgcacgctctagccaatgcaaccaaaagaccgatctgatggaagagactaggcagcacattatacgtcaacactccccttcacgtgtggctccctcaggcctaaacgtggatcgaaagtgggctgcaatttaattgcgccagctgggtcttgaactcaagacctcttggctctgatatcatgtagaagtgcatgctctagccagtgcaatcaaaaaaccgatttgatggaagagactaggcagcacattatacgtcaacagtagccacatttacattgatgtacctatttttccatctcacccttctacgagggagacatatagcagtgtcagctaataattttgtcctggacaacaataatgataatttagagcaactgtgcaagtaaatagtgcacactatccaaaaaaaaaaaaaaaaaccaaaaaaaaaaaaaaaa

SEQ ID NO: 5303 - DNA, 1309 bp, Triticum aestivum
  Clone ID: TRIAE-23APR03-CLUSTER73299_1
ttttttttttttttttcgaaggctcgacggcatccttaagtttttttttttttttttggccaacaattttttttttttttttcaggccaacaattttttattcatatctgaaatcggttacagtatgacttgatagtcggtacattgaggacttgcttagctcaaagcttcacccacacacacacaagagttcactaaccaatgttactcgtcggaaactgcaactttaactcaccaagacgccaatgcctaagaatccaattcagccaagattaattttacaagagagtcagcatagtctccaaacgctaggcagctcacaagattactgtgtgtatcgacaagttcaattctactcctttttcctgctacaagccgggtagcaaacgggcgttttgcattttgcggcgagtgcgttttacgctctgtctcgtgccggaattgcagtacatgagtttccttttttggctcatctgcttcactttgatttattgaaaatgccctttatttacttaaacccttaacttaggaccaggtgtggatgtagtgtaactatgccgtacacatcttaacaaggtttttgctgcctagctagatggagactctgctgacactcttgtaaaattactaatgactgaaagggattcaaagaacactagaaatcttggtgattaagtgcagaacctagagatgcaaagattaaatgaaactcatgtgtgcatggtttaggaagcaactaaaagactagcaagggcgtaataccactggacgcacccaaggaattggttgcttccttggtgctgcagcggtgacacggttcagcggcggcccgttgccgctcagaatcttgcagctgagctcccccatcccacttttgccggggggcgccggccaccccctgagcgcacttgctcccaccggcgttagggttccgccggcgggtgaaccggacgggggagccaccctgcgacaccccgcgccgggccccccccctgcgcgcagagtcgagcctactgctgtcatcttcttcttctcgatcagttcgcgcatgctgatctgcggcttcggttgcacactgggcgcagcagcagtggcaggcagtggtgtagagccgacgaaagagcaagccttggaagcgacctgacgagagaccttcttcacaggcgcagcagcagtactcctacaaatttgcaactagattacatagttggcaacttgtagcttgcaactagattcctctgctccctctgcttttctcactgccgactcttctcctctgatgtaagactaccaccaagaagctcggacg

SEQ ID NO: 5304 - DNA, 1022 bp, Triticum aestivum
  Clone ID: TRIAE-23APR03-CLUSTER732_192
agagtgcttcttttctttgaggaagaaaaactcgactccaggaagccttcactcctcccaccatcccatcgattatctgtggcggccatgcgggtaggctccagggtggtcgtcctcgtccgagactccgccggctacggcgcagccctcgctgacgcgctccggccgtcgccggggctcacgaggggttcctcgcccttcgatctgcctctcgataagtacggcctcaatggcgagaaggcctccggcgaagctcgttagcttctctgactccagtggctctcctcaggtgtccttttttgttctgcctgactataggcctcctgttgctgcatgtgctatgaatgagattttagcattgatttcttctgaagctccctccatccagccaattctgattgtaccattcatcacaagaccatcaggctgcttccatggaatggttaatgcaacaaaaactgggcagttaactacacttcacgctgctgaaataggggcatcaaatgagtttactcacttgttggttgacggaattattaaacctcccccatctttgcaaatacgcggtgaaccaatacaatgtttgctggaaatggtgcgggtattgaagataccgacagttcttcttgtcacatcaggtgggcagcaccaaggcaaaagttcttcagactctgaccttgaggtgctgcagtgcgtgggagatcacgtagccaagcacatcaacttggagttctccaaagaaactgtcattgagacaggggttgagaaatcagcaagcattcaagaaccctggcgtgaactgtatctgtgacgattctaaaacgtatcgttttgtgcccttataaatagacatcttaacattttagattcggacgtacttttttttcttctttttttgcgggtggaacgtattctgttcacggtgtgctagtgatgaattatgtgatttgtgcaaggggcttgtaacacgagccacactttgttttcctttacatccaacttgttaagaagtgcaatgtcgc

SEQ ID NO: 5305 - DNA, 2086 bp, Triticum aestivum
  Clone ID: TRIAE-23APR03-CLUSTER732_205
ctcactgacaaaatatcttgaatggaaggtcacatttcaagccattacacttataaaacccaaccctgttgtcatttaaattgcaaattaatcatcaataatgcacaataacttatgacccacaaacgatttggagcccaaaaaggagaaaatatcaatgcaaataaatacacacgtagtaagatgcattgcaatagccatattacttgaatttgtaagctggccagcaaaatcagatcaatcatgcatagtacacaaaagagacaaagctttaaccataattggcgcttaaccttcttgctcctgctaatgattttggccatgaaggcatcagagtaaggggaggaagaacgggacggcgcctgccggaagttgccgatgggtgttgacggcctggccaagccatctccctccatgataggtggcagttggcagaaaggtgtaaatatgacgagatgtgaaaataagctcgaggaaattaatatggaccagcaaactgacaaaagcagaatataacataattatattctggattaaactaatagcacaacaatttacagggttagaatgcagtgcacatatatcttagtggcgcaaaaactatttagccaacttcactaacaatttagaaattggcttcagtgtactaaaatagttattttggatataagcaatcaaccacgaatttaacatcagagatatctgaccattttaagtaacgaaaaaagagcccaatagcaagatagcacaacatggagctgcattgaccagccccttttaaagaaaggctttaggatcagaagttgtgtagttgatcaacttggaaatataaaagcatttccttcaaatcagtacaacacctccgacaaatgtgatgtgataagaaagcaatgaaaatatacactgctcccacacttagttttgtatgtaaaaagaaagcccatggcagatgttttttttggatcacagaaacccagcctcaatacatctgaatgatataatcaatttttgaaatgtttggcaggcacaagaaaaacacacgtgtaaaaataataatatatgattggtatctgtatttgatccacctgggtacatgcacatcctaaaagcaacaaacaagctgccatgcaacctgatgtgcagcttatcacatggtacacagaacttcacaaattatcaggacatcaatcaagtattaaaatgcatgagcaagcagataaacttactccaataacttgtttcccaaagtacttacaacacgctgaccacaatataaagccggtgacctatactgatccgcaccactacatcattgtaatataccaggcttgtttcccgaagtacttacaacacgctgacaacaatatcatcagtgtataagtaaatgatgaagctagacaacatagaagcgccaatagagtcaatcggtgttgtcaacccattcttatagttgggtgttcaatccaaacaaacaaccaactctttaggtaagctattctgacaaaaaaaatcttctgggggagacaactattggcacataccagactaatttacaaccatatcatcatcagtatttaagtaaaggatgaatctgcatgacaaggaagcacctcatagtgtcaatcagaagtatcacaaaataatcaaaagaaagatcatatgtataatcaattagtagaaacgtgatcatgcttatggagcaatgggaccaagaaaaggaacactttctttagtaagtataagtttttgctatgaagcaccatataacaacacagatacgacgatatggaaacaagcacataggatacggcttgtaaaaacagcagtacaaagatacaacaagtatatatgaataattaataaaatatgtatgcaaagaagacaataaataatcaatgcatgagatgaaataagatcagaatactgccccatttgttgactgaatgatcattaatttccccaatcaacataactgaatatctcctgtgtctttatgtcattgaacttcccttgctggggacgggattcctggcggcagcggtgcagttgactcgcggttgcggcttgagacggcagtcagggtgac

SEQ ID NO: 5306 - DNA, 849 bp, Triticum aestivum
  Clone ID: TRIAE-23APR03-CLUSTER732_220
ctccccttccccccccccaaacatactacaccaccaccacaccccccctccccaattgcgtccggtgcccccctcgaggtctatggcatcgataagcttttttttttttttttttcggaagtatcgaagtattgtagtaaaaaaggggcagccccagtgcatgtagctcccgcttgcgcagggtctggggaagggtccgaccacttaaagttctgtcaggctacctcttaaagttactaatgttcgaattatttaaccatgaaggaactcttgcagctgcagcctccaacagcacttggattggttgaaaccacaaatgctgagcttatcaattcctctacataatcgattgttgaacctttcacgaagtcgtatgagacattgtcgacaaccaacttaacaccattcttctcgaagaccctatcatcagcattttccttgctatccagtgagaaggtgtactggaatccagaacagccaccagcttcaacgctcaagcgcaacatgttgcccttagcagatggttctttagtatgcaactctttgagtctacggacgcagttatccgtcatgctgacgacctccggctcctccggcgccggcgtctcggtggtggcggtgccggctgcggcggcggtggggtaggaggaggtggaggtggaggcggaggcgaggaagcggttgttggcgcggatgcggctgttaagcagcagcgcgaggcggcggagagggggcctaaccgaggccatcgccgcccaatgtcgccgctgatatgcgccgcgcctccagggggattggggaacggaggaaggaggtgcgtgggctccacgcctccacgcgtagatgctt

SEQ ID NO: 5307 - DNA, 1445 bp, Triticum aestivum
  Clone ID: TRIAE-23APR03-CLUSTER732_227
ttttttttcacctcttgggcatacgaggctagagacgatcttcgattcgattccttggaattccaagtgaaattcagataggtttttggcgaaatacacggttcccaggaggactgaacactatggcgttctaaaggattagatacaacacggacccaacatacatacgtatttattaaagattgttgatgaaactagcatatccttcacttcaatggaagcacgcatcatatgttcataacactgcggaatgtgcacggagtagggttcttatgagaccgagggcaggccaagcatagtagactagaccccgtgtgtcaagccacaggatggtccttgaggaagccaaggaggagctcattgaccttgtccggaaattgctcctgaacgaaatggcttccttcagggatgtaagtgatcttcagatctggcgcaaacttctccatggtgccatttttcaagacggcctcgaccccggggaacttgatcacgtagtctttctcccccatgacgacgaacaccgggacttcaaattttgggtcttcgattggatgcctcttatggagagacctgtatggcatctgcagtggatacacgaaacctgatttctcatagagggacgtgtagactgcaagatcctcctcggtgaaccactctggaaggggagtccacaggtccgcgagatccatgatttcttgatcttccttcgctgtcgggatttcgcttctacagaagagaatgtagatggtgcgcacgactcgcttgacgtcatacctgccaaagtctgcctctgctcttcctggttcccgcccaacgcagtatatagaaagccttcgggcatggccagtgaaggaggagccaccgtgaagaaaagggatacccaaacacataacaccgcatgtgcggttggggtgacgaagagcaaaatcataagctggcatggctccgaaatcctttgccacaaggtaagccttgggaacggatagtgcatccaggacggcaaggagatcctctgtcaggtcgcggtacaccgccgcctctggctccggtggctggtcggagaggccatacccccgccagtccggcgcgatggcgcggtacccggcggcggccacggccagcatctggtggcgccacgagtaccatatctccgggaagccgtgcaggaacagcaccgtcccgagctcgcctgtgcctgcttgcgctacgtggaggctgaggcctctgatggcgaggtggctgtgctcgatctgctgctgctgctccaccgtggccatggcttgcgccgccctctgctcctctcccgcgtcacttcttggaagagaaggctttctgattgcccgtttctttctttagagcttgtggatggagactgccggctggttggtaacaacgacagtaggcggagatgctgccgaagaacagagagcaccagttttgtctgt

SEQ ID NO: 5308 - DNA, 1155 bp, Triticum aestivum
  Clone ID: TRIAE-23APR03-CLUSTER732_242
cgagttttttttttttttttttcagttcgagattcgcttgcaaacgtgttcttattccgagctatgattcattatccagtagtacaagagcagcacatgccatgaccagctgataaggcttacgacaattcaaataaaagggacaagaagacattattagcaatggtccgaagctgttgcatgctgacagtaatacctgcttggtccatataaggttccacaagtgcttctccatgtggaggccgtaaacgaccagtccaacacgacaagaatattggatcaggcaagggtgttcacacctgggacaacacgatggtagctatgatctaaatgtagactgcgatggctggttgatacgctgtcaggcgcacaaccagatagaatgatcgtcccttcatctactgtgagccccaggaaccaggagtgccccatgattgttgtggctgcggagttgcccctcccatctgcggcggtggtctgggtctagcatattcggcaaaaataacccatccatccagaaactggtgcatgtagctcccgcttgcgcagggtccagggaagggtccgaccactttgggtctatagtacgcagcctttccctacatttctgtaagaggctgtttccaggacttgaacccatgacctcatggtcacaaggcagcagctttaccactgcgccaaggctcccttttccatccattccttctattcctttagctgcatcttcaaccgtaacataccttacaaagccaaaccccttagaaaaaccagtgacacgatctgtgacaactcgagcgtgttcaacttccccaaactttgcaaaagcttctctaagtccatcagttgttgtacgcttgcttagcccggagacgaagaggttgggggaggggtcggccttcgggggaggcgtgggcaggctcggcggcgcgaaggccgagatggagaacatgcgcgcgttcggcgtcgcgaagtcggcgatggagaacatgcgtcggagcccgaaccttgccgccaccgcctgtggtttctaacagtcaccaaaggtcaatctcgagacgaacggctgccggcggcggcggcggcggcggccgccgccggagaatgggtgaaaaggcttgcgtgcgtgaggggttagtgattgatttttcgattagt

SEQ ID NO: 5309 - DNA, 1193 bp, Triticum aestivum
  unsure (1)..(1193): unsure at all n locations
  Clone ID: TRIAE-23APR03-CLUSTER7330_1
agggaaagccagatctcgcgtgccccgcggctgagaccgaccaccagagcaagcaggcagcagcagcggcggcagatcgcgagcagcagaggaggagaggaaggagggagcggggaggacggagaggggcaagcgggcttccccacgccgccggccaagcgccggcgcgccgccccccccgccccgccactctccgcccattgtcaccgccgaatcattaagtggcagcaaatggatatggaatacacattatgtcaaatgtttcctcactgtacttcaccagcagacgaataaccacacgccaacaaagaaccagtgagctagggacaatcctgtatttatggtcatgcttattctgtcactcttattttctaccttatgttagtgagcacagcttagagtgcgtgagccgcatgctgcgttaacaatgatcttttatctatttgttcggttgtttttgtccatttttggtttgctcggctagttttggccacactttgctggtttcttaccaattcttatctgagggaggaacctaatagccatgtggtcgaacaacgtgtcgaatggctgtatgcgtttgatgttcactgcaactcgttcttccctgcattcgtcatcctatatgtgcttcagtactttttgtcgcctctgttgatcgcacatggattcttgcctgccctattatcaaacctcctgttcatggtggcaatttcttattatcactatctgaactttctaggatatgatgttcttccatttttggaccgaacgacatttttcttgtacccaatcggacttgtcatcatactatcgccactcatgatactcatagggtttaatccaacacgatactttctgagcttgtacttccggtaagagtggtaactagtaaaagaagactggtgacaaaactaatggcagattgggacatacagtttgaagtagcattttagatctcttgtgctatcagggaagagcgagcctcaaaaaagttcagatcatatttggtgcctgtggaaggccttcagctagtgccttttaaatggcgtccattttggtgccaacttgttcatatatgtgttgtttcctttgatttaagcccaaggaccgagtgtacaattttattgtgaagtacagtatcatattaaaaggcatcaacagccttnccatgnatctttcttccatcaact

SEQ ID NO: 5310 - DNA, 2213 bp, Triticum aestivum
  unsure (1)..(2213): unsure at all n locations
  Clone ID: TRIAE-23APR03-CLUSTER733_1
acggacggcacgggtctcccccgcgccgcactagcgatcaaccagcgaggccagtcagtcggcactagccggcccactgcccacgcgcacccggtcgcggtcacgctagcctcgcttcgcctcctccgtccgccgcgccgtcgtttccgcggacgtggcgcgcccccctccccccgacctccacactgccggagaatccgaaccccccgcggctccgccggaaagcaggggattcgacgaggagctcaccctcgccggcgaggacggcgactgggtcgtcagattcgagcagtccttcaacgtattcctcacggatactgtcatctttatactcgatattctgtaccgcgaccgcgactacgcaaggttcttcgtgctcgagaccatcggcccgggtgccctattttgcgtttatatcggtgcttcacttgtacgagacctttggctggctctgagaaagagctgataacatcaaagtgcactttgctgaaagcatgaatgagttccatcacctcttaatcatggaggcattgggtggcaactctgtatggcttgatcgctttcttgcgcggtttagcgcctttttttactacttcgtcactgttggcatgtacatgctgagcccaagaatggcataccacttttctgaatgtgttgagaggcatgcatactcaacttatgacaagttccttaagctcaatggagaggagttgaaaaaactaccagctccagaggtggctgtaaactattacatgaatgaggatctctacatgtttgatgagtttcaaacatcaagagctccaaattctaggaggcctaaagttgataacttgtatgatgtattcgtgaatgtacgggacgatgaggcggagcattgcaagacaatgaaggcctgtcaaacgcatgaaaccctccgttctcctcatgccgtgcagagctcagtagaagctgatgcagaatgattctgtcaagaagtcccttggaaatgaagactgaccggttgtacgtacctccgtgctagagcgtcgtagagtatcatactaaattttggtgatatattgtattccatcctttttctcccttctcttcgtatgtagacattagccagactttcgtacttgtgaatcttacatagagaatataggtttataaatgcatcacagatttacaatgagagatgtgcaccgttggtcaggcattaccgggggccatgaacggtgtaatccagctgtgttgtggtgtgtgtaacatcaagggttttgatgccggttgacaggcaagaccagctgctgtttgcagtggaatccagctgtgtagaggtgtgtgtcacatcaagcgttgtgatgcttgttgaaggaaaagtcttgatgttttgctgattcatcgtcgccgcggtccattctcttctgcacgaactcctcgtcgtaaagcccaccgctctccttgtagacgttgccgacgacgccgtcgaagtcggagtagaagttgcggagctggaggctggcgttgaccatgggccagatggggttcaccttgtccccgttgaggccctccacccagttggccccgatctccacgttgagcccgccgaagttgtgcttgtgcatccgcccgcccacgcgccccgtcgcctccaggatcagcaggtccctcgggtaccccggcgaacgactgccacatcccgtagtagccgctcgtgccgagctggcgtagacgaagaactgcttcccggggcccgttggccagaacttcctggggaacttgaggaagatcttggtgtacacgcnccatgtcaaatcggtagatggcaaggatcttccatgccggcagctgaggcttgaactgtatgaggtcgctttgcaggacccctatgctggcggacacgatcacgtagtctgcgctgtacgctgagttgtcctccgtagtcaccaccacgcctctctggtcgtaggagatctcacgcaccaccttgttgagcttgaccctaggatctacgatgttcccggacttgtcggaacgcaggtactggccggcgatgtgatatatgagggtctcgaatccccgctgatcggcgacaaagttggcgtcatccccgaagtcggcgaaggtggccgtcggctcggtgccctgcaggctggtgacgcgcggcggctcggcgaactcgtagtcgtacctgaagtagtcgagcaccatgtccaccggcgtcgccggcc

SEQ ID NO: 5311 - DNA, 952 bp, Triticum aestivum
  Clone ID: TRIAE-23APR03-CLUSTER73540_1
cctgcacagactcggtgccgagtacctcgctggtcccgacccgctcgccttttcgctgttcagcgagcttgtataatcaggcatcacgcattcaccagacaggtttctcctttctctcataaatagttcatcatttatttaactatccattactcagtgaacagaggtggtttccccgccctctgtgcctagaccatacaacacaccagcatatttctcagttaatccgccgaagtatgactccttgagcttgttgaaggagagcgcggtgagcagagaatcggagcctgcctgatggcagatcccgacccgctcgacgtcgagcagctcagcgagcttgttcgccccggaagttgaactgccgagacgctaggggcggccgtccgggccgagggcggggaggccgccgcgctcgtcggagaaggtgaggccgagctggatgagcttgagcatgtcgacgttggccttgagcgtggcgtagttgaagtcggcgttggacttgaaggtgccgagcgggcggcagacgacgccggggaactcggtgtccatggcgacgtaggggtagtcgtcgacgatctcccggatcacggcgaactcggcctcgaggttctccgcccacacctcgcggatctccaccccgtcgggcttctctacggtcggcgtcgccatcgggtgccgggcatcaaagattcgagcttctcctcccctctccttcctggaagcctcggagctgggtggtgcggcggagcgggaggcggcggggcccacgggcgagcggcgaggggcggcggggctcccgtgggcggggaggtgggggcggggcgggaggaggagatccaggggaggggactggagtggagtgctactttttactactaggtggggggtgctttgcgcggagtccgcgtgacgtgggcttaataaaagtgttgtcacgacgtaccccagcccc

SEQ ID NO: 5312 - DNA, 3068 bp, Triticum aestivum
  Clone ID: TRIAE-23APR03-CLUSTER735_1
acaaggatcactggtacagatatcgaattcggcacgagattgtggaatatgcataccagcggacgaagaattttgagaggctgacttttctgtatcttattactggttacatggacaaggtgggcttcatgtgcaaaattgccggacagaataacaatttgatgggtcagttccacaatgcattgtatcttggggatgctaggaagcgagctgagatcctggagaatgctggacagcttcctcttgcctatgtcactgccgccactcatgggctcactgaaattgctgaaaggcttgcttctgagttgggtgagaatgttccttctctacctgaaggaaaaactcgctcactgttgattctgcccgcacgcctcatatcaaccgttgattggagattgctccgggtgaggcgtggcatgtcttggaggggactggatacaggtgggagagcagactggtgaactaagacttcagtaaacccgttcgtcgtctgcggggccgccttggtcccgatctaccgtgggcagaaggacgtctcctgcccctactgcgcgtcccgggtcgtgccctcggtcgagggtctggctgtgcagcatatgcgaggctactcggtagttcgggagcggaccgcctcgggcctcctctgctcccctacacaatcgagctaagataagtggcgacgacttcgcctctgtgttcatcatgtttgtatctccagttcgaaaactgttgtgtcagttatattctacctaccagagatttttatcacccaacttgcgaggaataagtatagtataattccgtcgtttcttcccccttttttactgtcatcgatgggtcgtggcctgatggctgtgatcggtcaatcaacaaacggtgtaggatttttggacagatccattttttagggctcaatgatgatgtatttaaatcgggttttggttacaaaatctatagttttcactttctgactaatgtaaggcaggctcatgttatccttctaagcaacaaaaaaaaggaagatccaagaaacgctgagccaattcctcaaaaaattgcataccattcccctgatcgtggtggactcgccgagagaagttgatgaagtgaaggagttgatcgagatagtgagggagtatgttcttggtctaagaatggaactcaagaggaaggaattgaaggacaacgtcaaccggcaacaggaactggcggcctacttcaccaactgcaagctccagagggttcacatgaggcttgtgctctcaaacgccatggctctatgctacaagcagaagaactttgcgaccgcggagcactttgcaaggctgctcctcgagaacagccccaacgaggtccaagcgaagaaggctcggcaggtgcagcagcagtgcaacggcaagcaggacagccattgagctcaactacgactacagaaatccgttcgtcggtctgtggctcgacgtatgttcccattctaccgcgggccaaaaggatatctcgtgcgcatactgcggatcccggtttgttcctaccattgaagggtagctttgtaccatatgcgagctggctgtggtcggcgcggacgcctcgggcctcctgtgctcccctacacaaatgagatgagcggaagaggctagtcgttagagctcccctatattctttctagtctcgtaaagtcttgtcttatattttaccaggaggtttactgaatgtgtaaggaataagcataatagtacatggttttgtcagagtttttctcatacttcttctatctctctaacccccgttttttttccttgagatgctgttacatgcttgagcttatcatgatcaactcatgcaaactttgcctctgcagctgggaattttgacacagcaatgcgtctgcttagccgccagttgggcatcaagaactttgctcctttgaaggccttgtttcttgatgcgcatatgggcagtcacacctttctgcgtgcgtttgcaagtgctccagtgatacctattgctgttgagaaaggctggagtgaatctgccagtcccaatgtgaggggcccacctgcacttgtgttcagctttgcgcaaatggacgacaagctgaaggctgcctacaaagccacaaccgagggcaagttcccagaggcactgaggcagttcctcaacatcctatacaccatcccgctcctcgtcgtggactcgcggagagaggtcgatgaggtgaaggagcttatcgagatcgtgagggagtacgtccttggtctcaggatggaagtcaagaggaaggagctgaaaagcgacgccacccggcagcaggagctggcggcatacttcaccaactgcaagctgcagaaggtccacatgcgcctcgtcctcaccagcgccatgggcctctgcttcaagggcgggaactacgccaccgcggcaaactttgcccgcatgctcctggacaacggcccgaacgaggcccaggcgaagaaggcccggcaggtcctgcaggcctgcggcgacaggaaggacgcccaccagctcaactacgacttcagaaacccgtttgtcgtctgcggggccaccttcgtcccgatctaccgcgggcagaaggacgtctcgtgcccctactgcgcgtcccggttcgtgccctcggtcgagggtcagttgtgcagcatatgcgagctctcggtggtcggggcggacgcctcgggcctcctctgctcccctacacaatcgagataagataagtggcgacgacttcgcccccgtgttcatcatgtttgtattatctccagttcgaagactgttgtgtcagttatattctacctaccagagatttttatcaccaacttgcgaggaataagtatagtataattgcgtcgtttcttccccctttttttctgtcatcgatcggtcgtggcctgatgcggctgcggtcggtcaatcaacaaacggtgtaggatttttggacagacacattttttagggcacaatgatgatgtatttaaatcgggatttcgttatatgatgtactgcctagctagtttgtgtaatgtttggctggttttcattgctttttaatc

SEQ ID NO: 5313 - DNA, 815 bp, Triticum aestivum
  Clone ID: TRIAE-23APR03-CLUSTER7391_2
acaacagcaaaccaaatcccccaagaccaaaaaaggccccagcaacccaagcgcgtcgaccccatccacagttgaatctctgagtttactttcagagaagattttagtcgagatggcgcaggcgatcgaggctcagagggagggcgcggaggtgtaccacggcgcggcgctgtgcgcggagaaggcggtggagctgctggccgagaccaacatgccgctgggcctgctgccgctggcagacatcgaggaggtgggctacaaccgcgccaccggcttcgtctggctgcgccagaagaaggcgctcacgcacaccttcaagcagatcgggcggcaggtctcgtacggcaccgaggtgacggccttcgtcgaggaccgcaagatgaagcgcatgaccggggtcaagagcaaggagctcctcatctggatcaccctctgcgacatgtacatcgagaaggacgatccctccaagatcaccttcaagacgcccacagggctggggaggaccttccccgtctccgccttcgagaagcaggacgacggcaaggccaaggccgcggctgccgacggcaaggaggccgtcgtggccaagtaggtgaggacggccggcatactctacaaagtttggatgaagagtcctcgagtccaatattaactatatacaaagtttggatgaagagtactatttgcttttatctttataataaactacggattatataaggggttgtaatactctgctccggtgttttgccgagggttgtatcatgcatatgatcgtgcgatctttataatcttatatgtgctgttcgctgctt

SEQ ID NO: 5314 - DNA, 1231 bp, Triticum aestivum
  Clone ID: TRIAE-23APR03-CLUSTER7396_1
tctatcccgccccagccgttcccaactactcctcctctccaatcgcggcacgccaagtatccgggccccgccctccccgtgatgaaggaggtcgagggccttcctcgagcgcgggcggctctgtgtccagccagcagcgggcctcggcaggtacctgcttggtggctcggtttccctagagtcgcgccaatcagtcgaggacggccggtccgtagaggcaggaaggcaagcggcagggactgcggcggcggggagggggcgaggccgaacgggcatgccggcgacggcggggacccggccgagtggaagaaggtgcccgggcggcggcgcgggggcaaggcccgagtcgccgcagccgagggcgaggcgggccgcgtgctggggccgggccagcgctcccgtgacggcaacgtcggcaaggcggcggcgatgttcctcaagcccctcccacggacgcgagccagccagccgcggggatccatcaccgacgccccggtgcgcggcgagctcgtgcaggacaagctctacgtgcagggcttcgacagcgccggccgccccctggtctacctcttcggccaccgcctcgtcgccgccggccgccccctcgtcgacctcttccgctaccgcctcttcgcccccgaccgcgcccgcgcggagttcaagcgctacgttgtctacattctcgacaacacctgcaccaagttgccggcgggcccggactacgacatccgggcaaagctggcggcgttggggggcttgcccaactgcgacccgcggccgctgcgcgcggcgttggagatcatggtgccttacgtgttcatgccggcgtggaagatggtgtaccccttcatcgacgacaacaccaagaagaagttcgttttcgtagctgacaaggacctcgacgccacgctccgggacgccatcgtacgtgtctcagctgcccgagcagtacggcggcaagctcagacttgaggggtacaagagctcgtcgacatgcaactgatccatggattatggatgtccaattgtgcgcaagtatgtaacattgccacgctatggatgtccaattgtgcgcaagtatgtaacattgccacgcttgataagtataagtaatacttctccattcatctaatgcaaggccgtttatcttgtcttaaaaaaaaaaaatgaaaaaaaaaaataaagggtaaaaaaaaaaaagaaaaagaaaaaaaaaaataaaagtagaaaa

SEQ ID NO: 5315 - DNA, 1629 bp, Triticum aestivum
  Clone ID: TRIAE-23APR03-CLUSTER74218_1
taggtttcgtcagcaccaaccagctcgacccccggctggaagaaactgccaagctttaccaaaataaagctccaagcggcctagtctgccacgctccgatggtaatccaacggtatcgataagcttttttttttttttttttcagtacgattacaaatactattgcaatcatgccaagtatttctcacattcttgaaatgaaatttggcaacgcgcaggacatcatctactccaaaccagttacacttacaaatatgacttttgaggccctctacaatacacacataattcaagagactggtaacattttacaaatattaagctccagtcggcataaccagcaacactactgatggtaaacatggcaagtgcaatctacaaaacgactcggctaaacatcagggaatccactaggcttttctcctctacttagagcaaggctcacaaccaaattccaccagaaacagaacaagcagaagatggaaaattcacttttatagggcccctggactgcacattgcatgacccatcgacaacacttccgatgattttggaaaacacacagctcacacaccagcattacagctcgcaccagacatgtaaaattttgggcaattccaagttcatccattattctcagcataacatcatgcataaccacaaaaacctccagttaatagggtgatattgcgccggatactcagcttggggcacagccgagccagatgctgaagaagattttcgctcaccgagctcaaccaacgcattgtcgttttattccaaggtacacccaaatacatatctgaattgcatatacgatgctattaacggctaggtatataatgctcaacttatcggtggggagactcctagcctgatggtatatttctgcccagaaaagaacaagtaaggtgtaggccgagaagaacaacaagccggggaggtctagtaacaccaacttataaacttttgtttggaggaggaagacataagcatggaatccgaatacaacggcacgaaccccattgacgacgaagttcatgaggtggaacaccttctgcgtggtccagccgaactcgggcactctgcgctggatcctcaccagctgaatcagcgcgacggcggagacgagggcgtaggcggcggtgagggagaagaaggcgccgtcctgccacgctggcgactcgttgacctcctcccaccatccccggagcgccgcgtggcccgcggcgacgagggccgcggtgggggaggaggtggaggaggagaccagctccctcatctttccctcagcttgacgctcttggcgttctcacacattctctggggggagcatgaggtggaacaccttctgcgtggtccagccgaactcgggcactctgcgctggatcctcaccagctgaatcagcgcgacggcggagacgagggcgtaggcggcggtgagggagaagaaggcgccgtcctgccacgccggcgactcgttgacctcctcccaccatccccggagcgccgcgtggccggcggcgacgagggccgcggtgggggaggaggtggaggaggagaccagctccctcatctttccctcagcttgacgctcttggcgttctcactttctgtggggggagacgg

SEQ ID NO: 5316 - DNA, 1268 bp, Triticum aestivum
  Clone ID: TRIAE-23APR03-CLUSTER7435_1
cccacgggcacgacacacgcgcccagccgctgcagacgcgcgaccggcggccatggcgacgcgccgacccgatgcccgccccgacctacgccgcccatggcggtccccccaccgacgccggatccgcccccgagcctcctttccccccccccggtcccccctgccccactgccactgtacccgtgacgagctgctgctgctaagggacacgcgcgcgcgcgtacacgcgaacagcagtgtcacgagcacgaccgacggccatggcgagcggcgacccgaagccggacgaaaactactcctccgatggcggtgacaccaccgacgccgagtcctccgacgagtccccgcatcagccgcggaggggcccccgcgccaaccccatactgacgcgcctctccgtgtcgcggaatccgagcccgctctccgccgccaccgcggcgcctggggtctgcctcctccgcttcgcctgggagtcggccgccggttccctcgtcggcgccgtcgttggatatggaaaaggtttggttactacaaaagggtttaaaggctcatttgctgacgctgcctcttctgctaagatatttgctgttcttgccggcgttcaaagcttggtttcttgctctttgagaaagctacgtggcaaagatgacgttattaacgcaggagttgcaggctgttgcactggccttgctttgagttttccaggtgcaccgcaaactctgattcagagctgtctggcctttggaactttctcgtacatcatagaaaagctcaataggcagcaacctgcgcttgcgctaccgtcagccgctggcctgaaggatctgaaggctggcccgagtgttcttccccccttcacgcttaacatgccgcacgatgcgatggaaggtttttcttcgtttcaaaactttttgtcaaagttccgagaaagctgaaggacctgggggcatgatactttgatatctgtccatgtaaatgcatcgagctgagctttttgtttccagtttagtgtatcgcgaaggatgatcattctactctgcctttgaacagttttgcaaattaccctccagaaggaaatcagcttagctggtgtccaacctgatgaataatcgtgtataacctgggcagcagattgcctgaacctttgtgatagtcctttactagcgaatgctcttgtatatgacgggtactcggtaatgtttcatcaggtctcagaataagactagactgataactaaaaaaaaaaaaaaaattatttaaaaaaaaaa

SEQ ID NO: 5317 - DNA, 1392 bp, Triticum aestivum
  Clone ID: TRIAE-23APR03-CLUSTER7494_1
gcgctggcctggcgccatattcattctatctatctccggctcccctttcccctccttccttccttccttcctaatactcatcctttctccctaccctccttccctcctacctaatcctagaggagcatagctagggttcgtccccgcagccgtcgcctcctctcctctcctcaccccgccgccgccggccaacgagatccagccagcgagatccgaccgacgccgtctccgtctccgtctccgcctcgccgccgccgcctgcttcggcatgtcgcattccaacgaagtaaggtacaccgcgcgctccatcacgcctccggcagacagggacagcggctccaagtcgcccccaccacggaggcgcgcggcttccaagtcgccactcccctgcctccccctccccctttccctcccaagggggtgcgcaccatctcgaggtcgcctccacctagtagtagaagacgcagcgtctcgaggtcccctccaccaaagaggcgcggcaggtccaggtccaggtccaggtccaggaacaggagccgctccaggagcagagacaaagacgatgtgaggaatcctggcaacaacctctatgtcactggactgtccacacggacgcaggaaactgacctggagaagttcttcagcaaagagggcaaggttaaagactgccgtgtcgttatcgatcctcgtacgaaagaatcacgtggctttgcgttcgtgaccatggagaatgttgaggatgcaaggcgctgcatcaagtacctgcaccgtactgtacttgaaggccgcctcatcagtgtggcaaaggcaaagagaactcgtgagaggacccctacccctggagaatactgtggtccgagaggcgggcgctcccgggtggagccgcggcggagccgttctccacgccgttccagcaggtcgtcgagggaccggtcaaggtcgccggccgcaaggagggacagggacagcagggacaggaagcgcgactgaatgaaacaaggcaaggggagaaacaaaatgatgctaaaatcacatatcgccgcgagttgtcgagtatgaatgtgtcttggattctttgttgctgaatgaatgtttgtttgatgaaggaggactctagtcagtatttctgctggatgctttctttagataagcagctgatttgtcttgtctttctgttttatcagaggagaggatttccctaacattcatttctttttaggttttgtgttgtgtatggacgatgaaggcgcatttcgtgtttttaaggtttctcgctatcgaatcggatgcgtctatttggttgtatgagcacctttgtcttgtcttggctggatgctaacattattattattattattatgtctgtgatggtatgcaaaaaaaaaaaaaaaa

SEQ ID NO: 5318 - DNA, 1699 bp, Triticum aestivum
  Clone ID: TRIAE-23APR03-CLUSTER74_2
gggcggcgggtcggcgctctcaccaagcagcagtggtggacaccggcggtttgcgcggcgcgccggcggctaccagcggcagatcgaccgtgcggccgcaggccatcgggctccgtcaaggttgctaaaatggataagctcaagggctctgcacgtcttatgattgtttcagatctcgatcacacaatggttgatcatcatgacgaagagaacttgtctttgcttaggtttggggccctttgggagtctgtttactgtcaggattctcttcttgtcttttcaacaggaagatcacctactctgtataaggaattgaggaaagagaagcctatgctaactccagacatcactattttgtctgtgggctctgagataacttatggtgaagccatggtccctgatcatggctgggaggaatatctgaacaataagtgggacaggaatattgttcttgaggagacagctaagttttctgagctgaagcttcaggtagagtcagaacagcgtccacataaggtcagctttttggttgacaagaagaacgctcagggagtgatcaagtctctctcggagaagtttgagaaacgtggggtagatgcgaaaataatctacagtggtggccaggatcttgacatattagctcaaggggctggaaagggtcaagcacttgcatatttgctcaagaagttaggttcatgcggaaaaacacccaacaatactcttgcttgtggtgactctggtaatgatgcagaattattcagtatccctggtgtacatggtgtcatggttagcaatgcccaagaggaactactccagtggcatgcagaaaatgcgaaggataatcctaagataattcatgcaactgagaggtgtgctgctggtattattcaagctattgggcacttcaagctaggacctaatgtttctccaagagacgttgagtttccttacatcaaggaggaccctttcaagcctacagcggccattgtgaagttctatgttctgtacgaaaagtggcgtagagctgatgttccaaaggctgattcagttatacagtacttcaaaaacatcacagatgcaaatggagttattattcatccgtctggggtcgaactttcgatccattcggccattgatgagctcgcttcatgttatggtgacaaacaagggaaaaagtaccggtcatgggtggacagactagttatcttgcagactgcttctgacagttggcttgtgagattcgacttgtgggaggcagaaggtgctgcgtgggcgtgctgttttacaactcttgcgctgaatgtaaagcctgaaacccctgggggttttgtggtaacacacatccacaagacatggcgtaaagaatatcccggggtcgagcagtcatgcaaactctagactggatagctaccgccggcgcattttcctcttgaggatcaaataagaaatcgtgtaccgaaagcatgggaatttctttcacttgttcataatgttgttaataagtgctcccagacacacatactggactggatgacgtctcttgatgcctttgcctaatgcttgtatctcgtcgttactgtcatgagaggctaaactaaagtaaataacaccagtcccagtccagtatatactagtagttcgatgtgcaaaaaaaaaaaaaaaaaatttgttctcccaaacacaaaaaaaaaactgatag

SEQ ID NO: 5319 - DNA, 1499 bp, Triticum aestivum
  Clone ID: TRIAE-23APR03-CLUSTER7519_1
atagtcggagatcggaagggaatcaaaaccgtaccggcggctaccgcccgaggtcggggagtcggcggcggaggcaggcagccagccagcccgtgccttggtggaagcagaaatggcgatgcgcaggaggctgccgcagttccaggccatcctcgcgcagcaagccgtccgcagcgccatccccaaacccagacccctagccaacccccacagccgcctcctccactgcgcctccccgccagtagccgcctcccgctgcccgctgtcacactccctctggcgcagcccaggcagcgccggaacgctcctgccggtgagcgcggcggccgttgcgtcggccgcccgggccgccgccaagcggtggctgaccgcgcgcgccgccgggtcgcttgagctcttctcgctgcagcggaggcggtccccgggcttgctctcttcgtcctccacattcctccgccgcgtaccctgggggcgctggctaccatcagcggacgggatggtgttgatgcttatgggcgcgaatgtggccgtcttcatgctctggcaaatggccagtccggatttcatgagggatcatttctcgatttcgctggacaatctcaagagcgggcggttgcacacattgctcactaatgccttcagccactatgactcaggtcacctcttcggcaatatgatgagtctctacttcttcggttcaaatatttcgagcgcgtttggccctgcttttctgttgaagctgtacatagcaggagcacttgttggatccacattcttcttgggtagataaggcttttatagctccaaggagacagatttatgcgggatgggacgtgttaagaagtaacgcgcttggtgcaagtgctgcagttaatgccattgtgcttcttcacatttttctcaaaccaaagggactaatctacctttacatggtcattcctgttccagctgccttagtgggggttgcttggattggtcttgatttgtggagggtgaacaagggtcagggtcagacatcaggtgcttctcatttagggggtaccctagtggctgctcttgtgtgggctcgaattaggaagggctggatctgatcatgcagcttgttcatatggagcaaatccgaccgactttccccagctggtggtctctccgtttgaaatttgttgttacccgagaaagttcttgtgggtggagggaatactctgctgcttatcatccaagtttctgatctagaactcctcaaacaaattctagatagcatcatggcagatattgccaactgattggccggaatttacaatcttattattgcagcttgcaggagcaataacataccacaactagattgcaatatcggttgctatacagatatccaatttggctcccgggagcacacgcgcccgggagcgttattgtggatatttaatttggctcccggaatttacaatcttattattgcagcttgcaggcgcaataacataccacaactagattgcaat

SEQ ID NO: 5320 - DNA, 1033 bp, Triticum aestivum
  Clone ID: TRIAE-23APR03-CLUSTER75395_1
aaaatgaaagcgatatctgtacagtacagttagataggggagctggatagcttggcagacgcgcagcggtgaaagtcccaaatcaaggaaaggaaagcgatatctagtctcatccccgaacccccaccaaattccacatccaccattcttccgttgccctgattgattctctgacgccatggccgcccacggcaagcccaagcccaagccgcccggtgcccccgcgccgccgccgccgcccccgccaccgacggcggcagaggcgaagaagggcttcatgcgccggatgttccccttcctcctcgccgtcaacgccttcgtcggcgcctacatgctcgtcaggacctactacaaggactccccggccaagaccgccgacgctgcctctgcaactgcaacggcgtccaccgccgtctgagtcccaggagcctgttgccgccggcgcgcccgtcaagccggtgcttccgccgatccccgaggacgagcagcgccgggtctacaagtggatgctggaggagaagcgcaaggtgaagccgcgcgacgccgcagagaagaagaggcttcgacgacgagaaggccctgctgcaagcacatcatccgcggccgacaccctcccggtgctctgaaacaggagaagctcaccacaccgacaccccgatgggaatgagctgctacgggaacaatggcgctggcactgcctgtgcctcattgatggtttgattggatttagttagttagttgattgtgtcgtgtgctactcttatttttatcctcttataaggtactcctagtttgatgccaagaggcccatctcgagctgctttatttatgtggatgcaggcagactggtcttgttgcttgtgttgctctatgcttcttaagataaggatttatgaagaaagtaagacgccaagatgcccatctcgagctgctttatttatgtggatttcttgcttgtgttgctctatgcttcttcaagataaggatttggttcgtctcgaacaagatattcaaaaaaaaagcttatcgatac

SEQ ID NO: 5321 - DNA, 806 bp, Triticum aestivum
  Clone ID: TRIAE-23APR03-CLUSTER75553_2
aaaagagagagaggcatcccgatcccctttccccttcgtcgtcacccacacctccggcggacaccgggcgctcccgcggcagacgttgcacttcccggcaagcaggcgcaaccagggcggaggcggtggacggctggggctcgtcgggttcgatttttcgccgtcggcagcgggagcgagcgagatctcaggtgagtaccaggccgcttcgccctcctggtggccggcgagatggcctcagcagcgtacctcgagacggacgagaacctggaggccctcatcagccgcatcgagcagaagtcccgcaagatcgagaccctcctcaagcagtccaagccggtggaggccctcaagacggcgctcgaggggtcgcccctcaagacccgcgacgagcgatgcaagttggcgaactggatcgtggtgcaccgcgccatgatggcgatcagggacatcgacggcatgttcaactcactggacaccgagtactacgacatcctcatgaagtacctgtacagaggtttgtccactggcgaccggccgacgtgcgaccagtgcctcaaaatccatgagaagctgacggagagagctggcttaggatgcatactgcggtcactcgccgacactgtaaacaccgtgtgaacctccttcgtcttcattaagttcctatgctgtgaagatcccgtcaggtcgaattagttctatggactttataaatgcagaaggtgattgttgacctcttctctttgctgtttggcagcttcatggatactctctctataaactaatataagagcgtttagatcatt

SEQ ID NO: 5322 - DNA, 1976 bp, Triticum aestivum
  Clone ID: TRIAE-23APR03-CLUSTER75577_1
atctcctggttcgtcctagagggtcccctcgccgccgcggtaccctggagcctggtcaccgggaaaaaagggagagcgtagcgggaggccggccaaccgggttgcggcggcgaccgtgctccgacgacggactaaccagtgatggagggggagggtatggagtttctaattgacgctgttgacaggttccccgtgcgtgaggaatttgcggacagccttacaacccagatccagttccactactttttctgctggagaaggggagtgcgactgaggatgtgggtgaggtcgatggcgtcactgagctgactcaaatggaggatgtaggagcagcagcggcaacgcaacaaggtggccatgctttacgagctgaatctccaacgaggtctgctcaatcaacaggcagagtgaatccacaagcccccggttggacaaaaaggctccagcttggaagtgcaccacctgaccgggtggcttgcccgtcgaggatgagcgcactagaaatttcaatccgcaagtatgcagagcaacctgataagagcgtcgttaaacctgagctgggacttagttttgattcgttgggcaaggcatatagtttggcagcgggaacaatctgggcatccccgttgccgtgctggactgcaaatccatgccccgctgggtgccatcccgcttgatgctgcgcagcaaggatctgctcgtgggtcatcctcctgcagtacgcgcgctggaactcaaagaaacgtcactgaagggcgtcatagcgaatgcacttgtagaaacgatgaccagcctggttactagtcctcgcgaaggcggtcacgacctcgtcgctgcagagagggcatgccatcaaagggagcagccaatcggctgggacaggaagggaagatgaagacgatgcggacatggcagcgcggacgagattgaacaatggcgatggccaagcaggggcgagctcgggagagtaaatggagatgggtggtgtgctggctagagtgaatgagctggttgggctggtgagcatttatggagctggcgctccgacgccgtttgtgctgtgaatcttgcgtcatacggctcatgcaggctcagatgtggtgccgagccgtcgcacctccaacggggccgcgacgtgccgtctccataaatgcacctctgacacgcgagccagaaaagagatatacggcctgaaaatacatgaagacacacagatcttggcgcagaccatcggtgtggatttcgggagcagctgagcccgagctcagaatcgaattttcgctgatgaaaggtctacatgtgagcagcttttgtcacacccattcatcaagaggtatgaggaagcccggtgtcgacttggcggcatacgtcgggggtgttgtgaatccaacagaaaggttgaagcaaatagcagagatgcttgttgttcattattaccttctgttcaatggctctgatggatcctggcatcatatgaagacaccgtacatggaagaatcatctttccgcttctcagggaatgtgtatgtcgggcaaagtgccatatttgatactttgtcaaccataagaaacaagtttaaaggtgatcagcctagtggggggatttttcatgttgttgagaagatacattgtggtgcagatggggaaagagagatcaccgttcgtgtgtctggatcattcattgtgggcaaccaatttctaatacttggtgaagggctgcaagctgaagggatgcccagcccagacgagctcgcaattgacattccaagcaatcgggcaggccagttccgggagcagttcatcatgcagccagggatttccatggaatgctactacataccaagacaagatctctccatcagctagtcccgacaagatttgtaatttgtaagacttcttgggctagtttagcttaaacttatctgctcacaaaaacaacactgaaaattagtattcgagaaattacaatcaatttc

SEQ ID NO: 5323 - DNA, 1179 bp, Triticum aestivum
  Clone ID: TRIAE-23APR03-CLUSTER7560_1
gaaaagaaatcacgggggaaattcgtcctcggcgctgccatcttttgtcctcctcctccgttgctcggcagttggctcgctcgctcgcttgctgctggctgctgcaggggagtgctggtggagctccaatcggggagaaggagcgaggcgggggtggtagatccggcgacaaggtgggtgggggagtggtggacggggagggtatggggggaagtaagggggtggagcggacgctcgtggtcgtgcgcgcgctcgtcggcttcctccgcggcctctccgccgcgctcggattcgccgccgtggccacccgcgtcaaggtttcagatgtgcaaaccgactcttctccaggtgaatgcatatatcgcagtaagccccgcgctgacgccttgcgttgatgtctccagttgcctatctggtcagatgcgctctgcttcatctgttagaggcttccgtgtgcttcagacaccatccaggatctctggctccgatctcatacttcgtatcttgggtcactttcataatccgcgttccttctcctgctgaccggaagccgccctgaacgaccaaagcggcccaggcgaaccatgtacttcggccagcttctgctacgtcggtctaagcctgggggtcgttctccgggaggggcggtgctctccctcgcgagcgtggccctggccatagtctactacgtggccctgacgtcgtcgaaaggcccgccgagctggggcccgcagcagaaccagggcatctccatgggccagcccgtgatcccgcagcagagcagcgagccggtgttcgtccatgaggacacctacaaccggcaacagttcccatgagtgatcacagccatattcaagccagccatttcgagggtcgcccatgaggacacttgcaaccggcagcagttcccgtgatcgcagtcgtagtacctaagccgtttcgacggcccgcatgaacgctatgttggcgagtttggtttgtatagccctgcaggttagaacaatagcagcagcttggttaccgttattattagctaggttcatcagtcttctctttttctttgtttgagacttgagaaaggcggcggcatgcctgtttcgtcggtatggatatttgaattttaaatgaactgggtaatgttgagtttgaaaccgtcttgcttgtctgcaagccttttta

SEQ ID NO: 5324 - DNA, 1319 bp, Triticum aestivum
  Clone ID: TRIAE-23APR03-CLUSTER7564_1
gacattcacgtcacgcacgcgacattttttattagttctggacgaagcagtggctgtgtacgagtcgagcacgtcacgcacgcggccaggctgtgctgggagcttcgtccccctccactcccgtcagctccccgggcctgccccgccccgcccccactccgccgccgactgcgagagaagcctgtcatgtcaaacattgggaaatcaactaatattctatggcatgactgcccaattggacaaactgagcgacagaaattgctggggcaaaaaggatgtgtcatatggatcacaggactcagcggttcagggaaaagtaccgttgcctgtgcactgagtcgggaattacactacagaggccaccacacgtatgtccttgatggtgacaacctcagacatggcctcaatcgagatctaagcttcaaggcagaagaccgtacagaaaatatacgaagagttggtgaagtggcaaagctttttgcagatgctggtaccatatgcattgctagtttgatatctccatacaggagagaccgtgatgcatgccgagctctacttccagattctagatttattgaagtatttatggatttgccactagaattatgtgaagctcgtgatcctaaagggttatacaagcttgcacgcacaggaaagattaaagggttcaccggagttgatgatccatacgaatcaccagtgaatagtgagatagtaattaagatggaaggtggggaatgcccttcaccgaaagcaatggcccagcaagttctatcctaccttgagaagaatggatatttgcaggcttagcacacatactccagatccagaagattgatcttattcttctgtgtccataactcatggacacaggtacaatccatttggtccatccggaataaaaggtgctgttatcgaagcaacaagctgcctttttcacgaggaaagggacgcagatcgatgatcagtttgattgttcggcattgctcctctcctgtgtgttgtgctattttagctgtagtttatacttactcatttcggctgaaatggtgtgctgtgctgtgtttatctctactcctaatggacgacttggtgaatagtcttcgcgtctttaaaaaaaaaaaaaaaaaaaaaccaaaaagggggaacccgggcccccaaccccccccaagggggaaaaaaaaagaaaaagtttttttgtccccccccccccccggggggggggcccgaccccccttccccccaaatggggggggtatatacccgcccccccggggccctttttttaaacacggggaggggaaaacccccgggccccc

SEQ ID NO: 5325 - DNA, 1431 bp, Triticum aestivum
  Clone ID: TRIAE-23APR03-CLUSTER75670_1
acccccctggcagtgacaggcttagcggaaagaaacccttttagctcctggcctcttcccggcccatggccatcgattcgctgatacgacgctcgcggacagcagccaccgctcgaatctccgcgccggctccggccacggaagtgttctcccccaccatcaccatggctcaggctccaggccgcgccgcctcctccatgcggctcttcgacgcgcactgccacctgcaggacccccgcatcgcggcggccgcccccgccctcatacgcgccgccacagcctccggcgtcggccggttcgcggtcaacggcacctccgagaaagactggcacctggtgaagcagatggcccaggagcacccggctgtcatcccctgcttcggcctccacccatggtgggtgccggagaggtcgcctgattggatggattcgctccggcagttcttctcggagaccccagaggcggctgttggagagactggtctcgacaagggatcgcatggaaaaactattgacttcagagaacaggttgaagtattccaacgacaacttgaacttgctaaggaattggagaaacctgtttctgttcattgtgtacgtgccttcggcgatcttctggaaatactaaagcgtactgggcctttcccagcaggtgtgctgttgcattcttatctggggtctgcagaaatggtgcccggccttgcaaatttaggttgttacttttcgttgtctggtttccttacaggcatgaaatctactaaggcaaagaaaatgctcaaagcaatacccttggacaggattctgttagagacagatgcaccagatgcagtaccaaagttggacaatgtttctctagttacagtccctgtggacatttcaaatgcagatattgaaaaattccacggcgattctacctcttcaaaagaatccttgaatcatccagctaacatccacattgttttgaagtatgtggcatcactgcttgaaatgccggaagcagaactcgccgaggcgagctacaggaacgccaccaaactgttctcctaccctggatccaaagttcatcccgaagctgaaactgtgtgaatggggtggtgcggatggccatccaatacgaaccatgctcatcggaatcctggtgcgttctgcctctggatgtttgcctgtataccgcatgtatattgttgtactagtatatataatcggcctaagacaaagtaacaatcagagaagaaataataaagcggttcatggctggccgtgccatgttgccaaaaaaaaaaaaaaaagcttcccctcgcaatattactctactccctccattcactattagaagatgtcaatatgaactacatagactgaaatgagtaaacaaacacactaaaacatgctccaagtagaacatcttgtaattcagaactactagttttac

SEQ ID NO: 5326 - DNA, 1451 bp, Triticum aestivum
  Clone ID: TRIAE-23APR03-CLUSTER75736_1
agcccaaaaactcgcctcctctgctcagaagagagagagagagagagaaaagcctcacatccccaagcatctctctgtctcttcgagtggtgggccccatgtcgtcgtcggcggcgcaccagaaggcggccgcggcggctcccgtcgaggaggaggccggggagcacgggcctttccccatcgagcaactccaggcatctggaatagctgcagttgatgtgaaaaagctcaaagatgctggtctttgcacagtggagtctgtagcttactctccaaggaaagatcttttgcaaattaaagggattagtgaagccaaagtcgataagataattgaagcagcttcgaagttggttccactgggatttactagtgctacccaacttcatgcgcagaggctcgagattatccaagttacaacaggatcaagagaacttgataaaatattggagggaggaatagaaacaggatctatcacggagctttatggtgaatttaggtctggaaagactcagttgtgccatactctctgtgtcacatgtcagctcccactggaccaaggtggtggtgaaggaaaggctctttatattgacgcagaaggcacattcagaccacaaagactcctgcagatagcagacaggtttggactgaatggtgctgatgtacttgagaatgtagcttatgctagagcatataatactgatcatcaatcaagacttctgctggaagcagcttccatgatggtggagacaaggtttgcgcttatggttatagatagtgccacagccttatacagaaattagcggatgagttcggggtggcagtggtaatctccaaccaggtagtggcccattctcatgggcctgcaatgtttgctgggccacagatcaaacccattggagggaacatcatggctcatgcttccacgacgaggctttatctccgtaagggaagggcggaggagcggatctgtaaggtggtgagctctccctgcctggctgaagctgaagcaaggtttcagatatcacctgaaggcgtcacagatgttaaggattgagagtgctctttgcttgtcatgggatacatcgtgtatcggacagcctgctgtttgcatcttcagcaacagatgctagcttgtgccgatgaaagaaggcccttctgtacagcaaacaccctgcagctgcagtggcaccataggggctccctggaaggaaatgttgtacagctaatctcccatagtttgcttgttctatcttttttagtggtcttagtatgcactgttctcatcaagatctgtatggttatggctgagtgatgggaaaatgtagttgctcactttgtttcaaaaatccttggtcttctaggacattgacattgtctcctatgtgatattggaccaccaatttctttgacaatatgttacataaaaaacaaattatataggcacacaattt

SEQ ID NO: 5327 - DNA, 2049 bp, Triticum aestivum
  Clone ID: TRIAE-23APR03-CLUSTER757_1
ctccattcttctaccattccccggtgtctgcccgctcgcagcttcccacccccacaaccaccacccacgtcggccgtcccctcattctactgcatcagcaccatgcgttgtttccttcttctcctccctcgttcggttgctggttgcttgattcatctgacgcgccgttcggtcgctggtccggcgtttctttcatcttcctgtctcagggaaaccaccagccacccgtctttctccagccatcgcctcccgcatcacggagcgcgcgctctccaccttcgcggccgcagccaagccacccggaggcgggccgcccgcgcggccgcagccacgcgggccgggcgcggccgttcgcccgccgccggcgccgaggcggtagccggtgccgtcggccggcgcaaccaccagcgggccttacatcggggagtttgcacgggctcgggggaggcccttcaccgggccgcgccgtccatggctctggtgggcacgctcgcggcgctgcacttggtgtcggcgggcccgctggtggacgtgggcctcgcggcgctgcggtcgccgacggtcgccgccggcggggtagtccggggatgaggcccgcgccacgggggcaacgcacctgtgcgccgcggagagcgccgatatgcccgcggaccgcatggagcgactccggcgcagtgccatgcccgcgatcctaacgtcgccggcttcctcgccgccgtcgacctcgccgccgcgccgccgccgggatcggcgaccggccgttgtagacgtcgcccgctcgctgcccccgggatcggcgagcgtgcgtcttaacatcagcgcgcgcagcccgatcgcgctgctggagaagacgagcgacctgctgcggtggcagcacaagaacccgtcggtgcacctgccgtggaagcagcacgccttcccgatcctgtccgactcgagcccgctgtacctgacgccgtcggagccggcggcgctgacggcggaggaggagcgcgagctgcagctggcgcacgaccggctgctggccgtgggcgcgcggtgcgcggagcacgacatcccgctgctggtggacgccgagtacgcgtcggtacagccgtccatcgactacttcacgttcgtgggcgcgctggcgtgcaacggcggcgggcggcctatcgtgcacggcaccgtccaggcgtacctccgcgacgcgcgcgaccggctggaggccatggtgcgcgcggccgaggaggagcgcgtgtgcctcggggtcaagatcgtccgcggcgcctacctcacccgggaggcccggctggcggagtcgctgggcgtgccgtcgcccatccacggcagcatccaggacacccacgactgctacaacggctgcgcggccttcctcctggagcgcgtccgccgcgggtcggcctccgtgatgctggccacccacaacgtggagtccgggcagctggcggcggcgagggcgcaggagctgggcatcggcaagggcgaccggaacctgcagttcgcgcagctgatgggcatggcggacgggctgtccctggggctccgcaacgccgggttccaggtgagcaagtacctgccctacggccccgtggagcacatcatcccctacctcatccggcgggccgaggagaacagaggactgctctccgcttccgccttcgaccggcagctgctccggaaggagctcgtcaggaggttcaagaacgcggtgatgggacgggagtgaggaggccggcgggaggttcacgtacgggagagaagcgacggagttagaagttgtaaatatgcattgttgtatcgcgacctgaatgaatggaataaacgaaataacgctgttgttcaatcgtcaggctccggttcagtactgcaccaagctgttatttttgcctttttgaaaagaagcacgtgctgctgtgtttatttatgtttttatctacggaaaggaccaaacaccaacaaaaaaaaaaaaaaaaaaaaaacaaaaaaaaatacaaaaaataaaagaaaaaaaaataaatttagcgtcaatacgacgtcatacctctt

SEQ ID NO: 5328 - DNA, 2929 bp, Triticum aestivum
  unsure (1)..(2929): unsure at all n locations
  Clone ID: TRIAE-23APR03-CLUSTER75828_1
tagtgtcggcaaaaccaaaaccctcccctcttcctctccttccgccgtcgccgccagcgccagcgcctcctcctcccgccgccctcggtctccgatggccgacgcaccggagcagcctacgccagacccgcccacaccgccacaggaggccatccaaaggcctaagaaaaataagaaaggccgcaggaagaaaccgaagaaagtcgccgccgccactgccgccccctcctcctctggcgccaccatggtcgaggaccccttcctcgtcctcgccggcggcaaggaaggagggttcctggagctggaggagatcgacggggccgacttcgggatctttgggagcgtcgtggaagacgtgggagcaagtgagaagaaagcgtggaatgaccagaagaagaagaagaagaaaaagaaacgcaagcgaggggatgccaagcgcttggacggcgatgtgggcggcgatggtgatggtgatggcgattgtgcaggcgattcggtagctgagagcgaggagggcggtgagaagggtgagaagaagggaaagaggaagaagaggaacagggactggaggatggtggaggttctggatgcggaggcctgggtggtcgtggctgtggtcgtcgcgggggttgggctggttgacgtgcggctgctgcatcatcacgccactgcggtgccgcgattccgtgcgggtgtgcttgccgccgcgcttgagcttggcttgcatccccttcgtagcatggctgtgctcgggcttgggtgccaggggccatctcctccgcggttggctggcgttcctgcgggggctctccgccccagcggtgtttgtggagcagctgagacaggttctggcaagacacttgcttttggtctccctattttgcagcgccttcttgaagaacgagagaagaccacaagattacatgtagaagatgaaaaagcggcggagggaagttctacaggaggcccactcagagcacttattttgacacccaccagagaacttgccaaacaggtctgtgatcatctaaaagaagcagctcagttcttaggaattcatgttgttcctattgttggtggtttatccatggaaaagcaagaacgacttttgaaaaagaaacctgaaattgttgttggaactccaggaagattatgggagctaatgtcatcaggcaatcagcacttagttgagcttcattcattgtcattcttcgtgttggacgaggctgatagaatgatagagcgtggtcattttaaagaagtgcaatctataattgagatgcttccattatccaatagttctgatgagcaaactgtaaaagccacgtcaagctgtgaaactgtagcaaatttgcaaataaagaagaggcaaacctttgtcttctcggcaacgcttgcgctttcagctaattttcgtaagaagttgaagcgtgggctttctacttcaaagacagcgacggctgatgatcttagttctattgaagcactttcaaagcaggctggtatgaaacctaatgcagaaatagttgatttgacaaatgcttcgatcttgcctgagaaacttgaagaatcattcatcgagtgtagtgatgatgataaggatgccaacctttattatatattgagtgttcatgggcaaggccgcacgatagtattttgcacatcgatttccgcactgcgccacatttcttccttattacgcactcttggaataaatgtcttgacaaatcatgctcaaatgcaacaaagggctcgcatgaaggctgtggatcgtttccgtgaaggtgagaactccgttttggtcgcgactgatggttttgcaaggggcatggactttgataatgttcgaactgttatccattatcaactgccacactcaagtgatgtttatatccacaggagtggaaggacagcgcgtaaatcattgactggctgcagtattgcattaatctcccctgccgacaaagccaagttttactctctttgcaagtcattttcaaaggagaacctgcagcagtttcctgttgatcagggcctacatgcctgcaataatgaataggctctcccttgctccggcagattgacaagatatcaagtaaaagttcaaaggaaaatgctaacaaatcctggcttcagaaggaatgctgaatccatgggtttgatattggaggctagtgacagcgaggaagaacgtgtacggggccacaagcaacgaaaggcgacttcggcacagctccagaaacttcagcaggatttgaatgaactcttgcaacatcccttgcagcctaagacattctcacgccgctatttggctggggctggtatttcaccattgcttcaaaagcaactagaagagttgtccaaaaggaatgtaaacagtaatagcagtaatgacaataataaaggatcgcggtttgttattattggccaggatcgtgtggaaccattgcaagctcttcaagattctgggcaagagatttgtgtgaacatggacaagcaaaaggagaagagaagacttgctgagaactggaggcgaaagaaacacgaagagaagaaaagcacacgggaacaaaagagaaaggacaggagaagtgctaaagagagggactgaataataaatgaaatactgaaagaggagccatgtgctgttttgagattgtttgtnctcgggggcttgggatgggtaaatgtgccgggctgcttcatcatcaggccacttcagttccacgattcctttcgagaatgcatgccttcgctgatgattttgtcacgacagatgattgaagaatatgtcagttggaggaaacgagatcagaggccatgtattnccgtgttttgcagttgaaggtaagttagaactgagccctagcagagaatgaacgccgtacaattgactcctctnctgtaacatgtgtacgttatcacagtt

SEQ ID NO: 5329 - DNA, 1891 bp, Triticum aestivum
  Clone ID: TRIAE-23APR03-CLUSTER7584_1
gaccttggccgcgcccactcgccatcaaacctccgtcatcctcccacatggccggagccgcctcgggatcgccatggccctgagatcctcgacagcgacgtcgctgctctccagaaccctccgcctcctcgaaccttccgcgcaccgggtcccgcgggtcgaatcgagagccgcgtcgtcgtcgactggcggtggggatccgtcgggccaggagccggcgccggcgcccatggactccccgatcaaggtgttctccgatctccgcggcggcggggcccgcggcgcggcgatcgacgcgggcgggtcggcgcggaagccggtcagcctgtggcccgggatgcaccactcgccggtcaccaacgcgctgtgggaggcgcggtccagcatcttcgagcgcaagatggacgccgggggcaacgccgacgcgggcccgcagacggacctgctcaccaggacccccgcgcagagccggacctccatcgtctacaagttcgccgccgacgacatcctccgcgagcagtaccgcgacccctggaacgaggtgcgcgtcggcaagctgctcgaggacctcgacgccctcgccggcaccatcgccgtcaagcactgttctgatggcgatagcacaacaagacctcttttgttagttactgcttctggggataagatggtcttaatgaagccacttcgtctggacactgaagtaaagattattggggctgttacttacgttggccgctcttcgattgatatacagattgaagtgactcaggttgatcaagatggtgatgtgcagtcagacccaattgcattgacggctaacttcacatttgttgcacgagattcagtaaccggaaaatctgctcctgtgaaccgcctttcaccagaaaccgagagagagaagcagttatatgcagagacagaagcacaggataaggtgaagaaaaggaaaagggaagaacagaagggagtgcttgagaagggggtacagaagcttggtgctgaggctgagaggctgaaggctttactggcagagggtcgtgttttctctgattttcctgctttggctgatagggatagcatattgatgaaggatactcgcctggagacctctatgatctgccaacctcaacagcgaaacttgtatggacggatatttggaggtttcttgatgcaccgagcatttgagcttgctttctcgactgcctatgcctttgttggacagagaccgtgttttcttgaggtcgaccatgtcgacttcttaaagccggtggatgttggagacttccttcgattcaaatcatgtgtcttgtttacccagcttgagaataaatggcagcccctggtaaatgtcgaagtcgtcgctcatgtaacaaggcccgagctccgaaaaagcgagatctccaacacattccacttcaccttctcagtcggcagcgacgctctgaagaatggagtgaacatccgcaacgttgttccctcaaccgaagaagaggcacgccgtatattaaaccgcatggatgcagagggtttgttcgattgatccttcggcggggtcactggttccagccataattttagcaactttttactggccatgttaactagtgggagatgtaccctatgatttgaatgaacatcagcagcagataagaagcatgctggcagcagaccggcgaaagtgtagctttttggcgtttcttttgggaaattatttggagtatagtagtataggatatataataaccccaacctcgagacccaaaaaatgtgccttttgtgagggcactgtccattaattatatatgtaattgcttttttgttccagcatgtaaacaaagatagaggccattgccttcaggtcagaggggaatgcagagataattctcttgtc

SEQ ID NO: 5330 - DNA, 1598 bp, Triticum aestivum
  Clone ID: TRIAE-23APR03-CLUSTER7631_1
aaaaaaatcctactcgatactcgatagctcccagatcccccccccccacccctacccccaccctccgcaacggggagctgacgtcgccatccccccgccgccgccccaccgaaaccggggcgaagtaacgccgaacctggccctgcacgccgacgggacgcgcttgcctcacctccccgccctgcagcgcctcggcccccgcgtccaagacctcctcatccccgcacgtcacgtcccgctcttcgactacaacctcgaccccaacgactgcggcaggaagtacgtggagggctcgctcttcgtggtgaggaggcacacacaggcgaggtgctcgttgttcgtcattgaacagacgcaataacggatgttctcgtttgaggattttgaagaggcgaattagaataagacttccagcctctttattttgttgttttcagaacgaactacaagcaccttatttgttgtaccggaatgatgcaaaagaagtaaatagtttttgcttttacaatctgcaggactatggaacgcttacgcgaaagtgcccacggatacgaaagggccatcgctaaaatgcctccaagaggcttaagtgcccttcaccaaaagctagtccgaggaattggcagcctgtacctacgtccgttgttatagatggcccccatgaatcgccgccagcttccactctcatttctgcatacgcctggtaaatcccttgctaattactgtgggggcgctcccacccaccggctgtgttcgtttcttcctacggcgtgaagatgtctttcatctcctgtgcccacacacattacccgtgcgccatctgttcctccaccacccccccaccacaattatacaccctctccgctcgtcggcacatctagctccaccactgcttgtcccggggccatcctcttcctcctcgtcattgcacccggtttcttcctcgagccctattgcgtcacctcttcatctaaacttccacaccaagccaaggcccaccacatcgtaccccacttcttcaaccctttccaccaccacctcctcctgtaccccatacccctccactccatgatggacctgttctttctaatggaaaaagttaaggataccctccccacccttgttcagagtcacgaggtcatcgacttcgatctaccgggtagttgctgaatgcttgctagccctttcttaagaatttttttgtcgcaaaaatgaagggagtgcgtctttttcttctgagttttttatgcctccttagcctttagtcctcaaactcactggataggtttgtccctacggcttgaagtagggttctttactcctttgaagctattgttcggggtatttcgcggtatcccttgttttctatttctttgttgttgtagagtatttttattttagtgaagacaccgagaactaacaggttttgttgcagacagaggaccatgacaatgatataacatatatttgtaattgcaaaaacggagtttgtaaggatgttatggtatcatcattttcgtgtgttttactgagcaaaaaaaaaaaaaaaactcgagactagacctgcccgggcggcccccggattcattagtgaattc

SEQ ID NO: 5331 - DNA, 1078 bp, Triticum aestivum
  Clone ID: TRIAE-23APR03-CLUSTER76575_1
gcgacagcgcccccctcatctccctccgccgaagctcgccacccccgagaaatttctccccatcagccccgccgtcggcttcttctcccccgtggcactggactggagtggagttggcacccctccgggctcgattcgtttcttgcgggctcgcgtggcggctaaccttcttccaggaggttccggcggcgtttggccgcgcactgaggaaccatgctcaacgtcaagaccgaacctgcaactgcaatggatgcagtgggtgaaccggaaattgaggagcatgaacagaaggtaaacagataccaagctgaacttgcagcacgcattaaggccaaatacttctctaataaggcttctgacggaggaaaaatctttgaagaagaaactattgttgaaggcgaaaccatccattcaagcaggtggccatgcacaagttcgtatgcgaacccggcaaattttctccgagagaagaacaaccatgaaaggagggattctccatcagcagcagattcctctgcgaagaacgattctccatctgtggtagctgaagcctcgccaaaaaataatgcaggtgttccggcaacagaaaacaatctaacacctgccaagagacaggtatccaaggagacctgatgggataacagtaggctggtgggtcgttgtatgttctcaagtccgaagactacaacaacccgaagcatgcaagtatcaggaaataaaaatccgtccagcagatgtatgtaggcgatgcttgattcatttcatcgaaccggtttcagcatctgttgggaacaattttttgtcttaagtctcaaggtatatgctacctgaagtttttttttttaaactgccttacttgtttgtaggcgatgctacattcatttcattgaatctgtttcagtattacctgttgggaagaattgtattcttggtatttttgccctgcttgtttgtaggcgatgctacattcatttcattgaatctgtttcagcattacctgttgcgaagaattgttgtattttggatatgttatttggttgcttagtatttgtgataaaacacaaaaaaaaaaaaaaaa

SEQ ID NO: 5332 - DNA, 1695 bp, Triticum aestivum
  unsure (1)..(1695): unsure at all n locations
  Clone ID: TRIAE-23APR03-CLUSTER7679_1
gcacaatatcccgtggaggcccaggggacggccaggctcaccccagcacgaggatgactcagctccaaccccgcccgctcagaaccctagccctctcccgccggcggggcgccggcgcggcggcgcggccgatggcgggctccgtgcggtgctccgccgcggccaggagttacagcattacgctcctccccggcgacggcatcggccccgaggtcgtcgccgtcgccaaggacgtcctctccgtcgccggctccaaggaaggcgtcgagctccgcttccaggagatgctgatgggcggcgcggcgctggacgcggctggcgtgccgctccccgacgagacgctcgcggcggcgcgggcctcggacgccatcctcctcggcgcgattggagggtataagtgggataacaatgagaagcatctcaagcccgagaccgggctgctcaacatccgtgccgggcttggcgtgtttgccaatctgcggccagcctaccgtgttaccgcagttagaggtagctgaaggagttgacaacatggttgttagagagcttactggagggatctacttcggcaaacctaggggttttggaaccaacgacaagggggatgtaactaccgacaacagtgaagaggaaactggcttcaacactgaaatatattcagctgctgagattgatcgtattgctcgtgttgcatttgaggttgctcgcaagagaggagggaaactttgctcggtggacaaggcgaatgtgcttgaggcatctatgctatggaggaaacgggtaactgcaatagcttccgaattccccgacgttgagctacgctgcaatgcagcttattaggaatcctaaccagtttgacacaattgtgacaaacaatatttttggtgaaataatattgtttgtggcatcatattatacgacgaagcatcgatgaccgcaggcagcattggaatgctaccagctgccggtgttggtgaatcgggaccgggtctttttgaaccccatcgctgccctgctcctgacattgctggccaggacaaggcaaacccgttagctacaattcttagtgcggcgatgctattaaaatatggccttggtgtagaaagtgctgcaaagagaatcgaagctgcagttacagagacactggacaatggattccgaactggggacatatattctgctggaacgacattggttggatgcaagcgaatgggagaggaagtcctgaaggctctggagtcgcagaagtaaacagcaaaccgatagccatgagtacggaggtttgaagaagcctgcatcatgggatggtcgaaagcgcaccgggatctgatctgaccttaccccgccaaagatcgtcgatattgcccctggattgcgtgattttgtttttctttgcctgcttccgcccttgtagttgggtgcaggaatttagcggatcgtcttttccctttctcgttggaaagatttttgtgtgccttgattgaatgaattgtgtcggtgatggatagaaaaatggggatggttccctttgcacctggctggaatgaaaaagatattggattttgtggcactatcatttgggataagtcagtacattcctgtcatgtcccatctaatgtatcttaaaaaaaacgagtggataacagaagtaatcatcaactagattttggggttccnccaaaaaaaaaaaaaaaa

SEQ ID NO: 5333 - DNA, 1610 bp, Triticum aestivum
  Clone ID: TRIAE-23APR03-CLUSTER76_1
atcgtaatcgaaacaccaaaccctagccttttttgctctcccactgctcgcccctcctgctcggctgctgcttccccacaccgcccaggtagctccaccgccggtggctcgctatacccaccacctccgccgcttccttcgcctgcgtggaagggacgtaaagccctacccttatcccgccaggcgacctcgcatggtgcccccctctgatgcgcaagccacgcccgccgctcccgccgccgcggccttggcggcgccgccggcccgctctcagtcgcacgcagagtggcccgcgtacatgcagtctttgggcccctccggcggccctacgcccgcggacccgcccagggagcgagggatggcggcgggggcttcgtgaggtgcaacggagggcccgcccatgcagcaccccacgtccccggcggcggacgggctggcgacgtacggcgccgcgagcattgccgaagctgatgtctacaggactgccgaggctcgtgctcacgcacactgggcatgagcatcgcagcgcccaaagtgcagcaccacgatgatgagggtaaccttcataagaaggctaataataacagcaacgggaagtacgtaggtggcagccacaaactggaggcgtaaccctaggtgagaagaccccacgagggagtgacagagatgagatgtggtgttcctttatctaaccacaatcacccatcatcgattcaaggtgcttttagcaaagatgatgttttagtacacttctcacagctcaccgggggccctgtagagttgccccgtcgcaggcatgttccagtttctgcgcctgggcgggcagcacttcccaatgccacgccaaatctgaacatagggattgatctttggagtgcttctcaatccttagctgtgatcccagtgcagggggaagcaaatcctgggttggcccttgcccgatgtgatggtgttttggtcagctggatgagcgtgaaattaagagggagaggcgaaaacaatctaatagggagtctgcgaggagatcaaggttacgcaagcagcaagagtgcgaggaattatccaggaaggttgctgagctgacaacagagaacaacgccctcagaactgagcttgaccagcttaagaaggcctgtgaagatatggaagcacaaaatgcacgactaatgtctcaggaacctgctgcggtcacaaccacactgggcatgagcatcgcagcgcccaaagtgcagcagcacgatgatgagggtaagcttcataagaaggctaataataacagcaacgggaagtacgtaggtggcagccgcaaactggaggctaaccctaggtgagagaccccacgagggagtgacagagatgagatgtggtgttcctttatctaaccataacacccatcatcgattcagtgtgctttttagcaaagatgatgttttagtccacttctcacagccctgtagagttgccccgtcgcagccatgtattatttatggctcgtcgccgagaagaatgtgtaaattgattggtgtacctagagcttagaaattttatgtttgctaacttttcatgaggattcatataacctgcaaatttgatggcctgatcggctgatc

SEQ ID NO: 5334 - DNA, 1586 bp, Triticum aestivum
  Clone ID: TRIAE-23APR03-CLUSTER770_1
tcgctccccgttttagctgtagcaggaaggaggaaaattccgccgagccgcattcgcattcccccaccagctagcttccacaaacctcccgttcgttcgttccttcgattcgctggcggtccgcgagcgatgggggagtcgcgcgcgcgggcggatgcccgctcgccggggtcccagtcgcttttgcccctcgtggggttccaggcagccgtgttccttgcggcggtccactccttcgctcggttcgacgccggctcgcgaggcctcggagacgacaccctccaggccgcgagccggcgccttgggcgcccccgtctcgcgcagctgccggggcggcacgccgccatgtgcttcgcggcgccctccgcgctcggcacggaccgctgcgggtcgctcggccgccggcgtcccgcggcgtgggagtcccccctccacggcccgtggccggccccgtcgccccccgcttccacggccgtccccctccacgtcctcgccttcgtcgaccgcaaggtggacgacgcggtgcaggagctgggccggcacctcccgccggcggtgaagtccgcgtcggcgaaggcgtgccacgcggtccacgccgtgccggagctggccagggagattgccgacggggcgaggcggtccggcgtgaagggcgtggccaaggacgtgtacggcatggtccagccggtggccaagggcctctacgtgcgctgcgagccggtggccaaggacctctacgtgcgctacgagccggcggccgagcacctcgccgtctccgcctggcgctcgctcaacgggctgccggtgttcccgcaggtggcgcacatcgtcgtgcccaccgccgcctactggtgcgagaagtacaacagggtgatctcgttcgcggccgggcgtgggttccccggcgcacggttcctccccggcatccccatcgagcgcatcgccaaggcgttcgggccgagctcggcaggcgagcgctcgccggttgccatgccgacgcaacctgatgccgagacgcccaagccgcgctcggcggatgtgaagccgacggcgctgaatggcgggacttcgaagcagcgctcatgggatgccaagcctatggggccggatagaccgaccgggagggagagctggtctggggccaagcctgtgagacctggggcgcggcccggggaggcgaccttgccggaatccaagcctgttgaatctgatgcccaggcctccggggagagccagccggaggcggccaagactatggatcttggggcacaggcctaggtgtgcctctaatgataatgatgttgtacgtagctactatgcttatgtgtggtgcgcgtctctaatgttctccgtgcttttgtacaaaagttgcttgatgtcgccttcgtcgacttgatccaatgcaattgggttcgtccttctatggattcgcgagttcgtctctgtggactgtggccactagttaagcactgttttggttttggtgcgtccaaaaaaaaaaaaaaagtagctcatcgctcccgccgccgttttacaacgtcgtgactgggaaaaccctgcgttacccaacttaatcgcttgcagca

SEQ ID NO: 5335 - DNA, 1989 bp, Triticum aestivum
  unsure (1)..(1989): unsure at all n locations
  Clone ID: TRIAE-23APR03-CLUSTER77422_1
ccacgcgtccgcccacgccgccgcccccccgccccctctcctcccccgctcatctgcggcgccgctccgactgtatatgctctataacagcgtgtctttattcctccgaacacacgacccccaagccagcaccgccgccctaccctaatcggcgccgccgccgtcgcgcgctgagctgcaaatcctcctctctattcgacgtttcctcttacgccgccacccccctgcctccaatgcaccgcctctcatcttcttcgcgacttcccatctctttcatggcatctgccccgcctcgctggtggccattagcgcttgcgcgacaaattatcccactcttggcggctccaaatccaccggcccgtcgtctttccagatttcctcatggatctcagaacctggccaccgtcagtcgagtacaaggcgatgaatctggtaaaccatataaacgactgcccatctcgatcgctcaaatgatgaaaaacatgaagactgacaatttaaaaaaattgaaaaatattgggacgaggggcactgtctcggaggttatagatgaagatgagaggaaaagtgataaagatgcttttaggacaacatcagaggttatggatgacaaaagtgatacatggggccaaaatgtgaacttacctggttttgaggaagaccaaagtagcgcagccaagaatcacattactgaaatcgctgtcagtgaggatgaaggactcagtgatgatgaaggatatagtgtgaacggtatacttgcaaaaagcagacaccgtgatggttctatatacagggatatggatttatatgattggaaaaaacattatcgcattgcagaccgtattgagactcggttggaggcaatgacattatcagatcctgctgcaaattgcaacgttcacgatggaatttgtactagacattttgctcgtagcatgctgcaaatttactcactagagttggctaaaattcctgtggatggcttagtagagttgtatggatatgtagcagtgcgggatgatctggatccattgcttaattatgttgtcaatattagcagagatgatcccgtcatcgtggagcagggttctctcatcaacatgattgggccccaagcgagggatagatatggcagatcatgctcctacttngaatatgacatgaagatcaagtcaggtgaacaagaaaaaaatgacctacagctgattgatggtgcatcattcataggccccttaggcccatgggatcaaccatgcacatttcacattgctggtgattgtggctcagttgacataactttgtcaccccttttaaaagcagttgaggcgaccgtagaggttctcatattggaagtgaaaagcagtttcagtttgtccgtcggatgtttagccagtgggtttaatgaagaaatccagctctttgatggcaccatcgctgattcacaaggcctaaagaggtccgtggttgctgtaatgaaaaactcttcgatagatttgaagttcaaggtaggcgcactgtcatccagttccgaccaacattgctgttctttcaaggcgaaaatgcacgggcatgatattgaagaaataaagactgattttgcattaatcttagtgaaggtgatttggtcgaccttgcctaggggcttttccgccatgtgtgatgggctggctcgtgattaacttggagtgtaataatcaaaactatcctagcaattctttgctaagtgtaataatcaaaacgacaagtctttgcatactcagtcgatgctccgagtcgttaagtgtaccagtggctgggttaagtgtactagtggatggggtgcgcctcgtgaggtgtaagtgtgcggtacttgtcatgctgttaaacttgttaatgtgtttgtacagcccatgggcgcgagttgcatcaaaacaacatactgtatattttactagtagcaagcagagcaagtaggtttttttttaaaaaaaaaaaaaaaaaaaaaaaaaa

SEQ ID NO: 5336 - DNA, 950 bp, Triticum aestivum
  unsure (1)..(950): unsure at all n locations
  Clone ID: TRIAE-23APR03-CLUSTER77511_1
ctaacccccatcctctcctccgttccctcagccgccacagccgtcgctcccgattcgagcgattccggcggatattgccggggtggagcacaccaccgagctcgcctcgctcggatccatccttccctccggcaagatttccccctatcgacctcaactgcttgcccaaaaccacttcccgtgctagggtttcttcggcatccggcatcgccttcatcgtcggcccttctacggccgcctatggcgcctcttctccgtcgtctacagcgcccccacgcgcgccctcgcttcctgatggtccacctcgagcagggcagcacggaggacctcatcccgtaggatccatggacgcggcgcaccctgtagccgcccgtccgggatgagggtgggcaccgtggcttgccctgctcgacgacagctgcggcgagtgcgtgtgctgctcctcatcctcaaactccaagcagaggagcgggcatccattaagcgctctctgcccctgaggaatgggaatagcgagacggtcctccgcctggcccctgtgtcctattgcgcgtggataagctcaataatgggtttgggggccttccctcgtacagtagtggcgagcttctggacgccctcctcgaagcggccatccccgacgagctctcttcgccggaggagatggagcagcaagtccagcacccgcttggcccctgtgtcctatctcgcgtggacaagctcaccaatggttgcgtcttccttccctcctagcgtgatattggtttatggagcattttcagcaacgaagacatttgttctcacgactttggtgtggaggggtggatataatgtctaggaacgttggatgacttgtgggtgacgtncgacgagcgttgggcctcgctttgatgactacgatgctggttgtggagcancatagtggtcttaagaagggcttggaaaataat

SEQ ID NO: 5337 - DNA, 1852 bp, Triticum aestivum
  Clone ID: TRIAE-23APR03-CLUSTER7758_1
acacgccgcaccgcgaaacacagaggtcgcgacaggaacaatggcggctatatagcggaggagcaggagcagaggtttttgtttgttttcttgcggagaagtactgcgatggggcgcgctcgcggcggcaggcgcagcggttcttgcgtgtctccttgcgtggagctgctgcgccgaggcggccgcgcggcggcaggcggcgccggccccgcgccgcccgctgcggggccctgcgcctccgtgccggctgcgcggcgcaaggggagcgcgacgctggcccccccgtggcggcggatgggccgcaggccccgatgggggaccggcatctaaccgaacaacagaggttcttgtttgttttcttgcggagaagtaccgtgatgggtcgtgctcgcggcggaaggctgctccctgtcctcgccgcgctgttcgtggcgctgctcctcatctccggctgcgcggcggaaggggaggacgaggagggctcaccggtgccggcggaggagccggaggcgcccatggaggacaaggagaaggcggccctgtacgccgccatcgggagcttcgtcggcaaggcgtggaacggctccggcctcttccctgacccctgcggccagactcccatccagggggtgtcatgtgacctcttcaatggcgtgtggtacccaacggtggtcagcatcggtccggtgctcgacaactcgctgcagtgcgccccggacgcaaggttcagcccccagctgttcgacctccggcgcctcaagagcctcaccttctacgcctgcttcccggcggccaaccccacgacgatcccggccgctagctgggacaagctctccggcaccctcgagacgctcgagttccgctcgaacccgggcctgtccggcgccatcccggcgtccctcggccgcctggccagcctgcggtccctggtcctcgtcgacaacaacctcaccggcgccgtgccgtcggagctcggcgggctggcgaagctgcggcggctcgtgctgtccgggaacgggctgtcgggcccggtgccggcgacgctcggtgggctcaaggggctgctcaagatggacctcagcaacaaccgcctcgacggccgcatcccgccggagctcgcggggctcgagagcctcacgctgctcgacctccggaacaacagcctcaccggcgggctccccgatttcgtgctggccatgccggccctgcaggacctgctgctctccagcaacccgctgctgggaggcaccctgatgcagcgcggctgggagaagatggcgagcctggcgacgctggacctgtccaacgtcggcctcgccggcgccatcccggagtccatggcggcgatgcccaggctgcggttcctggcgctggaccacaaccggctctccggcaccgtgccggccaagctggccgcgctgccgagcatcggcgccatgtacctcaacggcaacaacctgacgggggcgctggagttctcggcccggttctaccagaggatgggcagcaggttcgcctcctgggacaaccccggcctgtgcacggcggagacggccggcggcgcgccgaccggcgtggccgtgtgcaaggacgcgcaggaaccgccccgcgtcggcgtgagggacgggatggatgggggcgggaggaggcccgaggcgagctcgagcctcccggcgtcctcctcgtcgtctgccatctcggccgtgctctggtggtcggtgctggctcaggggatggcgatggcgttgtaggcagcaacaagttcagatcgattaatgctgattctgcataaaacatcatatacccgcataaaccacaaaaaaaaaaaaaaaaccgcaaaaaaaaaaaaaaa

SEQ ID NO: 5338 - DNA, 1466 bp, Triticum aestivum
  unsure (1)..(1466): unsure at all n locations
  Clone ID: TRIAE-23APR03-CLUSTER77697_1
tctttctccttccccaacgagcaattgacacatcgtttcccccaaatctcacccccggtgctactcccgttcttccgccatcgccatggaggacgccgcgaacgccacccagaccacctccaccacctcgtcggtggccgccgtagccgcggcggcccagcaccagcagcttcagcgccagctctttctcatgcagcaggctcaggctcaggcgcaggcccagccccacccgcaggcgcagcagctgtcgcagcaggccatgtcccgcttcccgtccaacatcgacgcccacctccgccccctcggaccgcaccgcttccagcagccggcgccgtcgcagctccaaaccccaccccagccgcactcgcaggggcagccgcatccccagccgtccccgcagcaagcggcgcaggctagggtccggagccccgaggtggagatggcgcttcaggacgccatgcgggtctgcaacccggacatcaagacgcctttccattctctcgaggacgccgttagcaggttattgccttaccatgttgttgctgactacgaggctgaagaagatgacaggatccttgacagcgacgcaactggccagattccctctcgtcttcagcaatgggatcataacattctggtaaaaattgctgagttcacaacaacttttgagaagcaagtgttggcatacaacataatgaccaagaaaagggccattggtgagtttcgatcggaggagcgactcatgctagagcaagctttgttacaggaggagaagcaggcttcgatggaactaagagcagagatagaatctagggagaaagcaggccgcgaggctgctgaagctaagatgcgtatggccatggctgagcatgctcgagtggaagctcaagcacacgctgaggtgattggtcatggccctttgagggccaatgctgctgcttcccaaggcgatgatggtcctagtcatgacatggcacaagaacaggttgaagatggatgggaaaacactcaaagggatgatgatgatccatccgaggatttcctcaatgatgagaatgagccagagaatggaaactctgatatgcaagaggagtggcggcgatcgggggaatttgatctaaactctaggtaagactgcaagggatacggcgtcgatggtggcaatctgatctgaactctaggtaagacaggtgcactcgacttgagaaaaggcttgaggatgcatcatctggtgcctggtaacttgtctctagttatctgattatatatgttttgaagataacttgtcctgtcattgtggctgtaaacacgcaatttaaaactagtattatttagcttttttttttttggaggaaactagtactccctccttaaactaatataagagcgctactcatgtgttcaaacagtgtttagaatgttgagtgacctctgtatgatgtaaantaacttctaaaaaaaaaaaa

SEQ ID NO: 5339 - DNA, 1780 bp, Triticum aestivum
  Clone ID: TRIAE-23APR03-CLUSTER77779_1
atcgatcagacaccgcaacctcccgtcgcgtgtcggatcttttcctctcgacaggcggtggggtccgtcccgcccgctgcgcgcggcggcagcatctcgccacccaatccgcacccaaatctcgcgtcggcgtccctcggaaaagcagccgccgcacaccacttcccgtctcggccaaccgccggcgcgggagagcaagggtaagggcggctctcagctcagctcgcggccttcgcccgaacccccctccccgctgccccccctaccatgcgcgtctccgaccgcgacgacctcccgagtaccgcgcccagctccagctcccagctcacgtccccagatggtgaaccgcgacaaggccggctgccccacggccgcggccacgctgcccctcgaccgtctcctggcctcgctcgccgccaaccgcggagcagctggggaagaggtgggagatcgccgtccgcgaccggagggccagagcggccgagcggaggatggaggcggatgcggcgccgccggtgcagctgcacacgccgctcttctatgccacctgcgccctcggcgggggcctcagcaccggcactcacccacctcgcagtcacgccgctcgacctcgtcaagtgcaatatgcaggttgaccctagcaagtacagggacatctcgtctggcttcggtgtgctgctccaagagcaaggtcttggtgggttcttcaaaggctggatggccacgctggttgggtatagtagccagggagcttgcaagtttggtttctacgagtacttcaagaagtgttactcggacattgctggccccgagaatgctgacaggttgaagaccgtcatctacctcgctgcatcggcgtcggctgaggtaattgcagatttagctctcacgcccacggaagccgtcaaggttcgaatccagacccagccgggattcgctcgatgcctaaccgatgggcttccgaagcttgtccggtccgaaggtgcctttgggctttacaagggaacccttactctctttggcattcaaattgcttacactatgatgaaatttgcatgctttgagaccattgttgagatggtgtacaagcatgctgtgccaaaaccaaaagatcaatgcagtaaaccattgcagctagcagtgagttttgcaggggggtacattgctggagtcttgtgtgctgctgtctctcatcctgcagacaacctggtgtcttttctcaacaatgcaaagggagccactgtggcagatgctataacaaccattgggctgtggggccttttcactcgtggccttccactccgtattatcatggtcggtactcttaccggagcgcaatgggcaacatacgacgcgtttaaagtatttgttgggctaccaaccaccgggggagtcagctctagttgtcatgctgccactactttgcaccgagtagatcatgagaagcagaactgaccgcaccagggaaggtcttgtgctgagttatctgtaaccggagtagatgtataaaccggcacccccggagctgctctgattcttgcaagagctccagcattggaggatgaagtgttgaatgtacaccgtgagactttcttttagccggttaggaaatttcacattcaaggggtttttgtttgttgctacccccttggacgttggagaacatacaaggaacgaaacaagcttcagagattgatttgtctggcgcattggcgtaatcatctgaatacatcttgcacatggcccgtgtcggcctggcctgtttatgcagcctaaaaac

SEQ ID NO: 5340 - DNA, 1826 bp, Triticum aestivum
  Clone ID: TRIAE-23APR03-CLUSTER7790_1
ccctctccgcatccatggccgccaccaaaccctagcccagcccgcccgcccgccaccccccactccgccccccgggcggatccccgcccggccagatctaggtgctccctgcctccccgcacctctcgccgccggatgaaccatcaccttcaaagtagtgattaccagaagctcttctgtaggaggatggattctgctgagctccagactccccttctacatggtcttccagatgaaatcgctcttctttgcctggcaagggttcctcggcagtatcacaatgctctcagatgtgtctcgaggggatggaaggcattgttatgtagtgaagagtgccattcttcccgcatgaggaacaccttggatgagtcctggatatatgtgatctgtagggctacaggcttcctatggtgtttccttgctcctgagcctatgccccggcgctagaaagtcagccccaccttggcgcagtcccgtcagatccgatgggcatgcacgcacccccacaaggatgaaccatcaccttgaaagtggtgattaccagaagctattctgtaggaagatggaatctgctgagctccatactccacttctacatggtcttccggacgagatcgctcttctttgcctggcaagggttcctcgccagtatcacaatgctcttagatgtgtctcgaggggatggaagacattgttatgtagtgaagagtggcactcttaccgcaagaggaacaacttggatgagtcctggatatatgtgatctgtaggggtacaggcttcaaatgctatgttcttgttcctgaccctacgacccggtgcttgaaagtcatccaagtcatggaacctccatgctcagggcgggaaggcgtttccatagagaccttggacaggaggttatttctcatgggtggttgtagttggctaaaggatgctactgatgaagtgtattgttatgatgctgcttcaaatcactggagcaaagcagcaccaatgcctactgctaggtgcttctttgtaacagcagctctgaacaacaagatttatgttactggaggacttggactgacagacaaatcacctaattcttgggacatctacgacaaagccacggactcctggttctcgcataagaacccgatgctcactcctgacatcgtcaaatttgtcgcattggatgatgagctggtgaccatccacaaggcgtcctggaacaggatgtactttgcgggtatatacgacccggtcgaccagtcctggaggggcaaggagaatgagattgccctgtgctggtctggcccgacggtcgtcgttgacgggacgctctacatgctcgaccagtccctcggcaccaagctgatgatgtggattaacgagaccaaggagtgggtgatggtcggcaggctgtcggacaagcttacacgcccaccctgcgagcttgtggccatcggcaggaagatctatgtgatcggcaaggggctgagcacggtgaccatcgacatggacatggcagccagggtggacgggttcctggtctcctcgtcaaccgggccgctgatggagcatgacttctcgccggagaagtgcagtgtcatcaccatctgaagaccgccacctgctgggttgcttgtaccgtgaactgaaataactctggacgttttggcttttcttgtggctgtatatcgacttctgtattttggtgggatggctgtacatcgattgacttttaactgtaacatgagggaagaaaagcacagtttgtttattcctcggtgagtcgagtgtgaataaattctgattgtaaaactgaaaaaaaaaaaaaaaaaaa

SEQ ID NO: 5341 - DNA, 2288 bp, Triticum aestivum
  Clone ID: TRIAE-23APR03-CLUSTER77_29
acacgcgaaaagaggaggcggaggaagaattccatcgacagcgctccctcggaactatcggatctcgggaagaagatatatccatcgctggcacccgtcgtcttcctcctccgcccgcccccatcccatctccatccaagccacaatccaccggcgagctcgccattaatcccactccactcggctccaggagcgccagcggcctccggtcgaaggaaggtcccccttctgccccccgttaagatgatgcggtgcgctgtgaggggcggcggtgctcacgtcgtcatcggcgagcggaggtcgccgtcgtcgtcgtcgcccggcagcggaaggagcgtcgtgcggatgtcggaggggcgcggcgggctctgctgcggcggcgtgaggtcgcgcgcggcggatctcgcggggctcgagatgggcaggcccagcgccggcgccgcggggctcttccggagcacgcgctacggccgcgtgcgcgccacggcctcagctgaccccgaggatattccatctgacaagcttcaagctaaatcttctgggagtgttctgccgtacgttggcgttgcttgcttgggggcaattctgtttggctaccatcttggtgtggtcaatggcgcacttgaatatctctcgaaagatcttgggattgctgaaaatgctgtgttacaaggatgggtggttagcacaaccctggctggcgcgacagtaggttcttttactggaggggctttggctgataaattagggagaacacggacatttatcctagatgcaatccctcttgctgtatgcgcattcttgagtgcaacatctcaagatgtccgtacaatgattattggtcgattacttgctgggattggtattgggatctcttccgctcttgtgccgctttacatatctgagatctcaccaactgaaatacgtggagcacttggtacgattaatcaactttttatctgcattggaattcttgcagctttggtagctggrttgccattagcacaaaatcctgcatggtggaggacaatgtttggaatttcagtagttccatctattttgctggctctaggaatggctgtttcacctgaaagccctcgctggctattccagcaaggaaagatttctcaagcggaagcagctataaaaaaattgtatgggaaagagaaggttactgaagttatgtatgacctaaaggctagtgggcaaggatctaatgagccagatgccagctggtttgatctattcagcaaacgctattggaaaattgtgagcgtgggagcggcactgtttttgttgcagcaacttgctggcataaatgctgttcgtgtactactctacatcagtgttccgcagtgcaggcattgcatctgatgttgcagcgagtgctcttgttggtgctgccaatgtttttggcaccatgattgcatcttcactgatggacaagcaagggaggaagagccttctcataacaagcttttctggaatggcggcgtcgatgttactcttgtcattgtccttcacctggaaggctttggcaccttattctggcactcttgctgttgttggcactgtcctgtatgtgctgtcattcgctcttggagctggccctgttccagctttgctccttcctgaaatatttgcctccagaataagggccaaggctgtagcattatcaatgggcatgcactgggtatccaacttcttcatcggcctgtacttcctgagcgtcgtcaacaagtttggaatcagcaccgtgtacttgggattcgcgtccgtgtgtgctctcgcggtcctgtacattgccgggaatgtggtcgagaccaaggggcgatccctggaagagattgagcgggagctaagcccgcccaataaagccgatgctaatgctttcttggtgagtgatcaatgagcaccgagcagaaaccatccttggacctggggatgttgtctctgccttttatgagtagttcctgaaagagtaactcttcctgaaataagtgagccgcaagatcacctgacgccatgcaaaccgcctggtgctcagggtgttgtggcaccagtaaagctcagctatttcttgttacatctcaaaatcaaagagcttatgtgtcattgctccgggaggtgcaagatttaggctggctgttagcccttggatgtcatcgtttttgagtgtacagatgatctccttgtatgtgtcggaaataaaactccgatttgccgaatttcaaagcgtgatgtgtaattatgcttaccaattgaaaatgccctatctcgtactgtgt

SEQ ID NO: 5342 - DNA, 1844 bp, Triticum aestivum
  Clone ID: TRIAE-23APR03-CLUSTER77_30
gtccaaaaccttctcccatttcgcgcagcggggccgtgcgcggacggcgacgtccgccctgccccgcccgaccccgtcctctcctctcgtctccttccccaaactctatcggcaatcgcagcggcctatcctcccccgcgcgcgtctccgccacccaaatccctccgctcccacccataaacttatccaaaaccgcccgccccatcccgctccagcccagccccgcgcccaacgcgatcgccccaggctccccgcgctgctgcagcaatgccggccctcgggacgctctccgccggcggcgccgccgccggcgtcgcgggcctgctccgcctccgccgcggccccgccctcgcctcgcccctgccggccgccgcccgcgccggcgccgtccacgacgccggccagctcgtctggggccgccagctccgcccggccctcgtcctccccgccggcckgctcccgmtccaggcctccaagaggctcacgctccgaccgcccgccgcctccgccgagcccgccggggaggccaagtgcgccagggttgctggagaagtaccctgcaatcaccaccggcttcttcttcttcatgtggtacttcctgaacgtcatattcaacatccttaacaagaagatctacaactacttcccctacccatactttgtctccgtgatccatctacttgtgggagttgtgtactgcctcctcagctgggccgtcggtctcccgaagcgtgcgcctatcaatgcaacgctcctgaagctgctctttcctgtggcattgtgccatgctcttggtcatgtcacaagcaacgtgtcctttgctactgttgcagtctcgtttgcccacactattaaagctttggagcccttcttcaatgcagctgctacccagtttgtccttggacagacagttcccttgtctctgtggttgtctcttgcccctgttgtgcttggtgtttcaatggcatccctcactgaactgtcgtttagctggaagggtttcatcaatgctatgatctctaacatctcattcacttaccggagtatttattccaagaaagccatgactgacatggatagcaccaacgtgtatgcttacatctcaataattgctctagttgtctgcataccgcctgcacttattattgaaggaccacagctaatgcagtatggattaaacgatgcaattgcaaaagtaggaatgacaaaatttgtatcagatcttttcctggtgggattgttctaccatctctataatcagattgctacaaacactttggaacgggtggcccctctgacacatgctgttggcaatgtgttgaaaagggttttcgtcattggtttctcgatcatcatttttggcaacaaaattaccacacagactggaatcggaacttgcattgcaatagctggtgttgccctgtactcgtacatcaaagctaaaatcgaggaggaaaaaagggcgaaggccgcgtgatgaggcgactgatgtgaatatggtctgatggtttccggcgctcgagttgcattgcctcggagacgacatggacgaatctcttcttcggttatttgttatttgtttttcagttatctgctaaagtgttcccttgtgaggtcgaacagctacattgcagatggtaagactggttgtttccatcagatgagagagctcagatgtgcagtaataaacgctcgtacttgtaaaggcttttcgttttgtgtgtgaggactgagttatcttctttgtacccttcctttcgttagttcttgtgctatgcaatgttggactctcagaccatcaagtcttctgtgctgtgtcaaaaaaaaaaaaaaaggaccctaaa

SEQ ID NO: 5343 - DNA, 1908 bp, Triticum aestivum
  Clone ID: TRIAE-23APR03-CLUSTER77_36
acagccgcagctcccccgcctcctcctgctcgctcctcggycctcttccgtccctccctcctgccagttgctaccttccttgctcttcaatggaatatacctgacctgggagctttcacactcctcgactcgtcgtacaagttactgaatagtcagcttgcytcagtagtggctactaatggttcatgtcatggcaggcttgtcttgaattaataaatctgctggtgacwagatgaaaatggctggctctgctgtgctgctcatttcgctcctatcggctatcgcccccytaccctctgaagccctcaacgtgggaggtcatctgctgaamtcaaagacgttccgttctccgcccatcttactggggcctggatcagtctcaaacaagtactaccatgacgtcgacttcccccgaggccaccttgcagtcaagagctttaatgctgaggtcgtcgatgaagaatggcgtccctgtcccgctccatgcagacttacctgcatcacttggggttgcagtaccatactatgctctcaaggacaaccagagctctgatggcgcaaaaggttcccggcaatgctttaaaggggaatggatggagtgtgcaagagagcactaacccagtacttcgggctcggttccgagactcgccacaccgccacatgggttcctgatccttatggaattgagaccggcaaccaagagaaggcccctgaaggctatgaggagaaatggctgctcaatattcatgccatcgacacgaggggcgtggccgacaagcctagctgcaccgagtgcaagtgcgacttctacaatgtcacaattgatgagtatgggcgcacagtctcgaagaactacactggtgggttgctttgctgctatgatcagacccagtgtcggctcaaagcagggttcaacgccgaggtgcgggaaggtgttcttgcagtacaccgtgacttggctcgactggactgatgcggtggtgcctgtcaagatctacatatttgacgttacggataccgctatgctcgacgggactcatgaacactcttgcaaggttgagtatcaagttgaggaatgcagcgcggaaaaccgagccaacaatgagtgcatccatactaagactaccagagcggtcttgccgcgtggaggagatatcgtgtacagtgttgcacaccagcactctggaggagtcggtgcttctctgcatggccaggatggacgccttctatgtgaatcgcttccaacttacggcacagggaaggaggcagggaacgaggcaaactacattgtcggcatgtcgagttgctaccctaagccaggatccatcaaggtcagcaacggcgaggtgctgaccatcgtctccaactacagcagcgaccgagagcacaccggcgtcatgggcctggtctacatcctcgtggccgagccgcagcagccggctccggcgccatccctgtgcttcagttttccggccccatggtgcctaccggcatggatgtctagcaacatgtgaagagtagattatcatctacctgcaatacaaatggtgaggccagaagaagctgaaccaatcaccctggatcaatcatcgtcatagttataagatggatgtgtttttgtcatactattactagctaatatacagaagcagtcaccggtcagtgagcaatgtcatttcgatggaccatcagtttctgatgctttgtaattagttattatcagtagtagtgtatgaagctgagttgtatgagttgatcaccgccataagaaaaactagagtcgatataatagtaaggagaagtacttcggtacaaccccaacgtataaggggtagtattgtccatactaaaaaaaaaaaaaaaaaaaaaacctgcccgggcggccgctcgaaatcacttagtgaattc

SEQ ID NO: 5344 - DNA, 1377 bp, Triticum aestivum
  Clone ID: TRIAE-23APR03-CLUSTER7800_1
acaccggtctcagtctcacacatacaagtaagccagcaagcaagggtcaaaatgtggaggtccatcttgctcgtggtggtggtcgcgctggcgctggcgccggcgccggcgctggggatcccgttcaccgagaaggacctcgcctcggaggagaacctgcgggggctctacgagaggtggaggagccactacacggtgtcgcggaggggcctcggcgccgacgcggaggagcgccggttcaacgtgttcaaggagaacgcgcggtacgtccacgagggcaacaagaaggacaggcccttcaggctggcgctcaacaagttcgccgacatgaccacggacgagttccggcgcacgtacgccgggtccagggtgcggcaccacctttccctcagcggcggccgccggggcgacggctgcctcaggtacgacgacgccgacaacctgccgccggcggtgcgactggcggcagaagggtcgcggctcaccgccatcaaggagccaagggcaggtgcgggagctgctgggcgttctcgacgatcgtggcggtggagggcatcaacaagatcaggacggggaagctggtgtcgctgtcggagcaggagctcatggactgcgacaacgtcaacaaccagggctgcgacggcggcctcatggactacgccttcccagttcatccacaagaacgggatcaccaccgagtccaactacccgtatcaaggcgagcagggcagctgcgacctggcaaaggaaaaggctcatgccgtgacaatcgacggctacgaggatgtccccgccaacgatgagtctgccctacagaaagccgtcgcaggccagcccgtgtccgtggcaatagatgccagcggcaacgacttccagttctactcagagggcgtcttcaccggagaatgcagcacggatctcgaccacggcgtcgccgccgtcgggtacggcactaccagggatggcaccaaatactggatcgtgaagaactcgtggggagaggactggggtgagaagggctacatcaggatgcagcgcggggtgtcgcaggcagaggggcagtgtggcatcgccatgcaggcgtcgtacccaactaagtcggcaccacgtgctagggcagtcagggaagggtctcatactgatgagctctgatggcacacatacgatcattcggagtgcaacctctgcgttgaggagaactgaatctcccactgttgtgttatttactttatgcaagatgttactatgaatgtaataaacgtaggcaaaggacattatagcaaaagaattgcaactaatttgtcaaatcaaatgaattaagtgaaattcaagattgggttgtattcggattggtaaaaaaataaaaaaaaaaaaaaa

SEQ ID NO: 5345 - DNA, 1930 bp, Triticum aestivum
  Clone ID: TRIAE-23APR03-CLUSTER7814_1
acgcacgcaccactttcgtcgaaatcgtcagacgggacagcgcgagaactgcagagagaggaagaaaataaaggaagagcaaaaaggagaaacccggaggccggaatcccaatcgatcgaaggaagcagagctgggggatcgcggcgccggcggccggcggggggagaaccggaggggagccgtggagcgatcaggggggcatctgcgcccgatgtgggcgtggggcctcgccgagcgcgccatcgccggcctcctcggccccgccggcgcgaatggcggtcgctggaacaccgccgtcgccgtcggggtcacggccgcggccggcatcgcgctagtcgccatcgtcgtctcctcccgcaggggcgggatcaaatcgccgtggcggcggcggaggaagcgcgcgcttgggcccaaggaatggcgcagcttgttcacgccggaggggaagttttacgacggcggcgtcaagctactgaagagagttcggaacggaggggttgagccgagcatcagagcagaggtctggccgttccttctgggagtttatagcctgaatagttcagaagctgaaagggaagcaattaaggcccataacaggaagggatatctgctcttgaggaaacattgcctgcgaaaaaacaataaagaaagcgtggatgatcatatcacgagtgaggaagaaaatccttgtgtcatttcagagcaagaaatgcaggataagacaggtaaagcaattccagagaatcaggcggatgaaagcctctgttcatctagttcacgtgatgaggatgagagtgagaaaagtgatgtgaccgatgtggaagcatcccgtgatgatgtcgcctctgtggaccagtcttcagttgaggatgaagaagaaagtatgcccctgcccaaatattcaaacacaggaggaaatatagaaactgaaactaagctatctaaggttgcccgtcctgtgaagtctgcacggacagttgaggattttgagacatggcagcggataattcgtttggatgcagttcgtgcgaataatgaatgggtttcctactctccatcgcaagctgcggttaccagggagaaggcaattgaatctgcttcatctgtttgtctcaaagactatgagcacttggaagcacacaggatccatcatgcgtcacgtcttgttgcaatacttgaggcgtacgcaacctatgacccagaaatcggttattgccagggcatgagtgacctccttgcacctctccttgctgtgctggaggaagacgatgaagccttctggtgctttgccggtttcatgaggaaagcccgccacaacttcagactcgacgaagtgggtattcgcaggcaactcaacatggtctccaagataataaaaaccaaggacttccatctttacgtccgcttggagatgcttgaagctgcagactgcttcttcgtctatagaatggtggttgtgatgttccggagggagctcaccttcgagcagaccctcagcctgtgggaggcgatgtgggccgatcaggcagcgaggcgggctgggatcacaagatcatcctggagaaaacttcagcttggagcccctccaactgatgacctgctgctgtatgcaattgcagccagtgtactggagaagaggaaattgataatagagagctatagcagcatggatgagatcattagggactgtaacagcatggccgggcagctggacatttggaagctcctggacgacgcccatgatttagtggtgaccgtacaagacaggatcgagtagctgggatctgcccatgcttatatctgtatgattggtcctggcagttatcacgttatcatatgtctgttatatacaatatcttgtatgaggttatggatagaaacatttttgtcttgttttcaaaaaaaaaaaaaaaaaaaaaaaaaaaaaaa

SEQ ID NO: 5346 - DNA, 2692 bp, Triticum aestivum
  Clone ID: TRIAE-23APR03-CLUSTER7856_1
atcgaaccatcctttcctccccccacctccccccccccccctcccgtcctcctctccctccccataaactgcccgcccgcccgcgccggccccacgggacgcgccgtgaggggcgaggcgcgccgggcgggcggcggaggtgggcggcgcgtgctcccagggactgctagaagcacacggcacgtgctcctcgaccacccggcgggggacagggtgtgcactgagtgcgtccgcgtcgtccacggtcagccccgagtccggcctcgtgcgcgaggcaccttccgtcgacgggccctccgagtgccgcacctctccccaccagtccaaccccccaccgactcctcccccgtcggcgggccctcccaccggccaccgcccaacgccgccatgtccgccgtcacggccaacttccactcctccctcgctgacccgccggcaacatcgcgaagccacccccgaccgctccctccttgtcccccagggtgggccttgcgaccattagtaaggccttggaccatgtattcaataataaggtgcgagccatcaagaactacaagggaaaggaggaagacaagataatcgcgggtagaccatatgatgctagtcgacctgcttgcttgtcttttgcactttaaaagaaagttcctcatttgcccagggaaaaacaaatagcgcggttgctcaatggaaggaactcatggtagaacagcggcaaggcaaaatggtccaatttattgagatggcagccatgttaagctggggatttcctgaggagattcgatccaactcttcggatgaattacagtgccgttacagttgatctctagggaatgaacaatactgctgttaaagatgctcaggaggcacttcattcactcgcgaggaccttcatttaaatgaggagccctctttcagagtagcggctgctgtcataaatatgataacccagctttcagggaggacaaaaagccgcttaaagatatttccttggcccacaggagtaggcagggagggcaccatcaaggaattcagtacaaggggacctgtaccccgtcacgcggcgaggctcatcgccgaactcgtgacaccaaggaggaagacctgaacgaacctgtgcaccccaataggagccgagtcgcagccatttcttccttttctctcgctctttttcttgtaacagtaacttttgaaaattagatttgtcggagaggagtttcgttgttgtgagttgcttcaccgggcccatgtatatcccccgcctaattttatgtgcatggacctgtcggattcgggacgaagctaagttataagatgtggctttccttacgggtcagcccatgcatgcaatccatgggcatgggtactttggggatgaacatgagacatggaactattcctatgctcaacaacgctttgcccaggcccaaatgaggccgcagcaagcgtcgcagcaagctgcactatctccgcagaagggggttgctcaaggcttgtcgagaacagcatcgatcacaggattaaactcacaactgcctggagtgtcacaaaatgggcagatgatgcaaatgtcaccttcgcaacaacagcagcagtggttgaagcaaatgcaatcatctttggcctcgccatctcaacatcaaattcagcagcagcacaggatgctattgatgcaacaacttcagaaaggactgactccacaccagattgcacaagcccaacaacagcattcaccgcatctcaatgcccagcagttgatgcaacagcagcacattatgcagcagcttcagcagcagcaacagcaacaatctcttcagcatctggctcccagaagtctgcaaacttgacaggatcgcagccgggcacgcctttgtcaggggggactatggctggtggaagtggaagtcaggagcagagaactaccttcttgggaagagaaaaatacaagacttggttgcacaggtggatcccctcggcaaacttgatccagaagtggaagatttggttttagagattgctgatgacttcattgaatcgtgactgcatttgcgtgtaccctggcaaagcacaggaagtcatccgttctggaagccaaggatgtgttgctgcacttacagagaaattggcatctgacagttcctggtttttccaaggaagacaagaatccacagagaaattatgtaaaggcagtagtggatccccaacagccagagtgtgacgctgctggagttagaagcgcaagcaataaattagttgctaataattcaattgccaaccatcagacaagaggtccggttgcagatccttaccaaatctgtgggtcctcgcaaaagttccccgtttctgagctctgtgttcccctcggtggaaggctctaggacatacaactcaccaatggtctaactcaagggacggaagcacagtggatcagcatgacaaaacgatggccgatcgtttacctgtccaaaccggatgcttgctcaaagtcgaaggaaaaaaaaaacagttgctagctgactgggtcattcgcaacgggcaattgcatgagtcgcctgtaaccttgttatccatgaatctttgtagctccccctcttcgttgtacatagcgttttgcaaacggggcagccccttctttttccgttttgaaaaagcttttatgcagacatggaggctatacatatatatattcgtgtgc

SEQ ID NO: 5347 - DNA, 2418 bp, Triticum aestivum
  Clone ID: TRIAE-23APR03-CLUSTER785_1
aaacggccattatttcctcgccatccatccaatccatcctcccttccttccccccgtccccggtcgtcgccaccaccataaaaccccactccccggagccggcggccgcgcattagttcccgccgcgcgcccgcagctccgcattcactccgcccctgcccccgcccgcggagaggggccaagaaaccgacccgggaccgatcagatgggcggcggatccggcggcagggggaaggggatgccgcgcgcgatggcgccggtggaggaggtggacgtcgccgccgtccggtacaagccggcggagctgcaggcgccgcacctcacgggcttcccgctccgggccttcgtctggctcctcgagtccccgctcctcggccccctcgtcacctccatcctcaagaagcagaacaacatgacccagatgctgcagcacacggtgatcccggagcggcccatgttctacccggagtacccgccgcaggagcctgaacgaggggttgtgaccctgggggacgacagggaccctgtggacagagttgaggaagcactgagttgcctcgccccgtatgacccgtcggggcgtttcacatcggccgatgagaataaccccttcctcggtcggacacttcgggacattatgttgcctctcaacgcctgaggagaaggatgatgtactatcacagggaagctttcaggaaggttggcgtcatagcaacccctacagccggcattactgctcctggtataccaccaagcgctcggactggggaggctggctgatgcgtccccgctgagttgtgacaatgcatggttgcggggaattttcttggctttcctgccataactgttcctgttggtcatgacaatgcaaggccttcctatcggcttgcaactgataggccgtccatggggtgaggctagcttactgagggtggcttcggcagtagaggagcatctgcctgaagagaaggaatcgtccgtccacattctaggacatcctaaaggtcctgaagcatcatcagtatgtaatatcaatagtatgtaagatcagtcgatagttatactggtggttcttcatctggtccagctgcacttgtctcatcagggttatgctcaggagcaattggaacagacggcggaggctcagttcgaataccatcctccctatgtggcattgttggtttgaagacaacattcgggcgcacagatatgactggggtcgtttgtgatgctgggacagttgaagttgcttcacctcttacatcatcagtggaggattctgtgctattgtattctgcactagcaggctctagacctatggacaaacttacgctgagaccttccccgctgtgtgttcctaacttggtgtcctccgagaatagcaagatcctgcaatcagtgaaagtgggaaaatatacagagtggtttcatgatgtccctgataatgaggtctcaaatacatgtgaagatgcacttaacctcctatgcagcacctttggatgtcagatagaagagataatcttaccagagcttgaggaaatgcgtacagcccatcttgtctctattggctcagaagcattctcagacatgaatgctcattaccaagcagggaggcgaactgaaatgacgttagatactcgagcaagtttggcactttttaagtcattcacttcagcagattatgttgctgctcaatgtctgaggagaaggataatgtactatcacatggaagctttcaagaaggttgacgtcatagcaacccctacaaccggcatgaccgcgccaaaaataccaccaagtgctctgaaaggagagtctgattatgttgtatcagccaagctgatgcaattcatttttgccgggaaccttcttggcttgcctgccatttctgttcctgttggtcatgacaagcaaggccttcctatcggcttgcaactgataggccgtccgtggggcgaggctagcttattgagggtggcttcggcagtagaggagctctgcctgaagagaagaagtcggccatccacattctacgacatcctgaagacctgaaacatcatcagtatgcaatatcaatagtatgtcagaggtttgtcatttgtcagtgactcaggatagacacagcaaacccttccccagtttataaaaaactgagaaaataattttaccagagatattgtagcagcaataagcaagtgaggtacagtagtatataaaaaaaatttgtttggacgtttggggtatatctgccgttttttcttgttgtgattcatttgttcgtaatgttcttgatctggcccgtctctgcccgtcgagaaagtggagacagagatgtaaccgagatatccattactgacaaatgtgagtgaattatgaatttgtatctcgataaaaaaaaacttgatgataggtccaaaa

SEQ ID NO: 5348 - DNA, 981 bp, Triticum aestivum
  Clone ID: TRIAE-23APR03-CLUSTER78672_1
ttttttcttttgtttttttccttgaatccctcttttgagtctctaagccaatattttttttttgggtaactccagaagttcaatctacatagcaatcaagcaaagcaaaagagcagctttagctctgcagcacatgcgtagcttgcctgatgaaacaacgcagtcatgtgacatagaatcaacacaaggcgacttcacctacatgttagctatttgtagtacaaacataacaataagtgctcatctcattctcgataaagtttcgtattttggctcttgctgttcaatatccttactgcccagtagatgagttagaatcaaagcctaatagtctggaatggccgcaaaggtgaaccctggtgctcctctccatgaatagtatgcaactcgggtctcataaaatccaggaagaaaggcaaggatacccaggaacaatagaccatacacctgagagctatcaccctccatgtgacccgtggatataaaatatgaaaggaagagaagagagcttcccaggaagaggaggaacaatgctaaggcaatcgacttccacgggatcctcctcaaggattttggagtgtatgtgaaccggcggtcaacattgtcttcatccctgtcctccgtaggaagaacagaataaggaatgttccgtctggtcgccatactgctgtccgtgctcctttgaagtaagtcgccggtcgctggtcgccggccgccggagggcgcgcctttgccggctggtgcgtactggaggaagtcttgtccgagagagccagagaggtgaggggaacgatcagagatgagaagcagacggccggcgacgtggggactggcgaggttaagggttaggggaggtggccggcatccgccgtcgcgcgcgagcggccgcctccgctctgcccggctggaggagcagtggatgcgttggttgggaagggatcgagcgggggtggtggacggcgaagtggggagatgaccggc

SEQ ID NO: 5349 - DNA, 1036 bp, Triticum aestivum
  Clone ID: TRIAE-23APR03-CLUSTER7877_2
cacttttcagcctccggaacccacgacgcagctgccgccagaggtacagaccaatggcggccgccgcaggcgacggcggcagcgtcccgccgaagaccccaatagcggagtcgcctcccgcttctcgtccgcacgtgacccgcaatgccatgccgtgggagaagtgcgtcgccggcgttcaattggctctcaaagacccgaaggtggtgttcctgagggagcagatcgagaaagccgggtgcaccgtatggccgacgcttttccgggcggccatctgcaggagcggcgggaactacgcaagcggcatgggggtagtagtttgctgtaatcacatgcgaaggcaagatgagataactcaggtcataattcatgagttagtacatgcttatgatgactgtgttgtcaagaacatcgactggaaaaactgcgctgaccacgcttgctctgagattcgagctaatcatcttagtggcgattgccattacaaacgtgaactgatgaaaggcttcctgaagataaaggggcatgagcccgattgtgtcaaaagacgggcgctgctttcttgtcaaggtgaacccgcactgttccaaaaaaagatgcaaaacctgcaattgaagaagtgtggggaaatgtggttaaaacgaaccccccccccgttggataaggctctaataaagtgaaaacttgggaagggccagattttggttaactcctcagaagggggtttctatcaagggggattcctgggggcgaaaaggtccaaatttttcggttagtttcccttaagatgggctccatggagtacaagcctgtagggacagtttagtatcgcttcagatggcacttcagcagagcatcacaacaaaatccggaaatttggcgctgaaccaaaactttgaatgtatattagtccaaacaatgtaacagattattccatgcaattgaattcttttgcctggcacattgtgacagagttcactgagctcaaaataaaactgggcgtaactgataaaaaaaaaaaaaaaaaaggcccctg

SEQ ID NO: 5350 - DNA, 2173 bp, Triticum aestivum
  Clone ID: TRIAE-23APR03-CLUSTER7896_1
atgggaagcaatggaatgtgggcatgggcaaactttgattaaaagttaatcgaatcgggtggtatcgtttttcgatttcaaaaaccagcccccctcctccgcttgccccctgcctgcccgtttccgcctgctccccgccgcatcctagggtttccggccccccgaaatcgccccgcgccccccgccgccggcgagaatgccggccagcgccgcgcccgagaaggccgcggggtccggcggggagctgctctactgcggcgccaccaacttcgaccgccatcaaccagaagccggccggcgggatgcagggcaacctcgtctcccccgacgcgcctgcgctcgctcatgggcgtcgacatcgcatccgtcgccgtccggctgcaccgcttgccattgtgttgctttgggtgctgatgggcgttactatacatggggtcgcaatgagaaggggcagttgggacatgaggcatactcttcaacgtaagctagcgactgttgatctctgaactattaaaattataaaagtaattaaagcaagtgtttggaaaaaaatcatacacgtggttgtaactgatgacgggaagtccttcgcatttggccacaacaaatttggacagttggggacaggttccctaaagaatgaaattgaggcatcaccagtgccctgtcttgtgacggaagtgactggtgttgcttgtggtggtgattttactgtctggctgtcgtcagtcgagggctctactatactttcagcaggccttcctcagtatggccaacttggtcatggaaccgacaatgagtacaataccaaagattcgtcagtaaagctatcatatgatcctcagccccgtcctagggcaatagctgcattatctgagaaaactattgtcaaagttgcatgcggaacaaaccatacagttgcagttgattcgagtggctttgtttacacatgggggtatggcggatatggaaggttgggccacagagaacagaaggacgagtggcaacctcgcctcgttgaaatatttcaaaggcacaatgttctgcctcccaatgctattctgtcagctggttctgcaaattgtgcatgcactgctggcggggggcagttgtacatgtggggaaagatgaagactacaggcgatgacacgatgtatccgaagccactaatggatttgagtggttggaacatccgctgcatggcttctggtaccatgcaccacgttgttggtgcagatgattcttgcataagctggggtaatgcccaatatggagagcttggttacggtcctatgggacagaagtcatctgcgaatcctaagaaggttgacagtcttgaaggaatgcatgttacaggtgttggttgtggattcggactgtctctgattattgtggacagagcaaaagctggtgataagcttgatcagctggatatttatgatggtgatgcctccaccccagtagaagagaccgtggagccaaaggtgaccaagaaggcgcctgctagcgccaattccaagtccaacaagcggaagaaaaccaaggacctctccgaatcagaagaggaggacgaggacgatgatgatagcgaagacgaggagaatggcgatgcaaggggtgcgaagggcaagcgtggccgcaaaccatcgggcaggggcagaggcaggggagccaagaaggctaccccagagccgaagtcatctggaaggggcagaggccgcccaaagaaaaccgagaccccggctgaaagctcgggacgaggcgggaagagaggccgaggcagaccccggaagtcctagacctctggcgagcctttttgctgaaatcaggtcaagcgatatctaacacctgatgtgatgtgatccagcccagccattcgagagttctctctgactgcctgctattcgagggatattttccgtgtagtggtaatcttgtgattgtgagcctgtaatgttaacatgcgcaaccgtattattcattggtgatagtgagtgaaattaaaagaaaaatcgtacggaatccgctctcccaagcagttgttggcttagttttttccgatgctgctgagtatatggaacatcccaccataacttttgtccgaaaaagaaaaaaaaaaaatgaaagagttgaagaggaatataaaatggtgatagcaagtagtatggagagt

SEQ ID NO: 5351 - DNA, 2522 bp, Triticum aestivum
  Clone ID: TRIAE-23APR03-CLUSTER7941_1
gcccgcggcccccccctcgccgccgaccaaactcacccacgagctcccgcgcgggttcatgtccatctcccctacagaatccaccagaggattccacccgcccgctccgcgcgcctcgaaccctagccccagccctcgccatggcaccgcctctcgccgcggcagtcgctcttcccctcgggcctctgccgccgcgcctggcgtcggcagggacggcgcaagccccgactcagtgggttttatcggccaatctgttgatacatcccaagcggtagtcggatttagaatagctggtcaagaggatgatccgtacgcccaagaggttagtgatgtttctgaatgccagtcttctggaacacgggagtttgagtctgacaagtgcacaagtggcggctcagttcaggcagatgttcacgagacttgagttgggtggggtccctagagattgtccactgtcctgatggacttcatggtattggagctctgttggcttctagaaagagtaaggctgggaatgcaacctatctcctgaattcccgccatgaaccgttttcttttccccgatgtcacagccctaggacttcgcgtctgaactggactcgcaacctttggcctcacaaaatggacatactcctaaagaaataacatgggttcaaggtgttggatgcaggatcttatcagactgttgcaatggaccttgctaagacgctccagtgggaagatatcatctgtgtaagatattgtagaccttctgaggtgcgatgtccaatttgtttggaaagcccgctgtgcccgcagattacatcatgcggtcatatctattgctttccatgcattttgcattatttactaatggggtaaagaggattacagaggtgagtggctggaagaagtgcccactgtgtttcatgatgatatctgcaaaagggttgaccaccatctttgtcactcaacttcagcatttccatattggcgacaatgtgaccttcgcacttctagggcggccaaaaaattcactcactccttttcttaggaattcgtctagtgaatattcttctttagtcgaccatccgtccgatgttttctccaagttcattttgacatctgatgttgagctctccgttagaggggcaaaatcagatctcagtaattggttgcagatggctgacttaggccttgttgatgacttggagaaacttccatatgtttccgctgctttggagcaactggaagaaaggatgaaatactggtctgagttcagatattacagtagcagcccccctctaaaaaatagctcctctcctatctctagtaacaaattgaagaactctgataatccgaaaacttcacatacgaacagtgggcataaactctcccctctttcagatggagatattattaccggtgtttcagggctttctgtttcacccctatatattaactccaaaaagggagtgccacaaaaaatggaagagcgacgtgctgttgcagttgattcaaatgaacaagactcatacacattttaccaggtgattgatggtcagcacctaattcttcatccattgaacatgaaatgccttcttaaccattttggaaattctgatatgcttccaccaagagtgactggaaaaatcttggagttggaaactataacacagtccgaggcttcaagaaaacgctaccgcttcttaagccacttctcattaactacaacgttccagttctgcgaaattgacctgagtgatatgctacctcctatctcattggctccattcatggatgaaatcaaaaggcgcgagaaacaaagaatgcaaactgccaagaaggaagaaaaggacagggtgaaggccgaagtagctgctgctgcgcaggaatctgctatgcgttttgaatatacaaatttctctcgtactcagagcgatgttatgttctctctcgatgactttgaagctctgggaaataatgctgctggaccatcaacgagtccaccggccggtgaacgtaaacttttctccgatgttacacggcttggtttcgcgtctgcgcaagactcgcctcctctgagagctgaaactggagacgccaataatgaaatcacaagggatcaagggccggtatcagcgtcttccgtgtcctttgccagcatcttatcttccaccagagctgctgcggacagcagcgtcgagacgcctaaaccaaatggagtcggaaaggcgggcaagaagcgcaccaaggtgctcttatcgaccggtggtggccgccgatactagaggaacgctatgctggaaaacattttaccatttcctttatagctcatgaacaatgtgtatagtgcagaagttggatttcttattatactgctaaaggagtgttggtgtttgtacatacctaattttatttttgtgatgcgagtcctcccatccccccttctctgcacggaaaataattacgcccacgcatgcagtccgaaactaggaaaatcaccaagtaggtaaaaccactccgacacatcgggcaatcgt

SEQ ID NO: 5352 - DNA, 1399 bp, Triticum aestivum
  Clone ID: TRIAE-23APR03-CLUSTER7962_1
gcgctaatggcgaccactcctcccgccacgcgcctctccctatcccttccccctatccattcccctctctgctctccaaaaccctaaaccccacctccacctccaagctctctcctgcgcactccctctccctctccctcctcaccaccccagcgcccctcctcctcccccgcaggcagggccggcggcagcgtgacatctcggcggcgtacggtgacggcgacatggacgacgacttcggcgatgcgggcgacttcgacctcgacggagacgacggtgtgggggacgacgacgacctcgacaacgagcaggactacgacgtcgactacgaccgcctcctcgcccccgtcaagcctcggccgcagctctccggggttggcagcggaggcgaggaaggggagggggacatcgccatggtcgcggccgagagcttcgtgtccactggggcgtccgcctccgacaccgtcgtcgactacaccgtcgacgaagatgagttccacaagattcgcctgctccactgcgacttcttcatccgcaaggtgcccgatcctgaccaagacgtctacgacttccgagagatgtatgtcacaccgcctgacactgacatctactccattccaagggttcttgccccgatgccacagaagtacgtgaggtgcgtgaagaaaaactttggccgctaccatgtaagtgagccaccggttgagcatctgcgtgatcccctgtacaagacagagagggagatcatgaaggttttcttaacaaaacactacagaaacaggcggttcagcgatacagattttttccttgattttgaggagatttatgtcattgactcaaaaacaaggtcaatcacaagggcaaaagtagtggtgaatgtccctgaaggaaaaaggagagataggagaaatgacctgctactcatacgggacggaggggagtctttcagaataactgacaagtctcaaagagacgacgccagcactatcatccagagagaagagtggacgaaatcgagacaggatgtggagaagcatttccggaagctcagagattttgactactcgaattggttctgaagaaactggcgtcgagcttcgtctatgcagcgattttgttgtttctttagctgctgcttgtgctagagctaattaaccgtggtggtcaagtgagaactgatattttatatgtggtacgtgtagcatcgtagcaagtaccgtagaatcgagatgtatgcatttgagcagtatgtctccgaaaattcagattagctaagctaatgggtattttacgttggcttgaggcaaaaaaaaaaaaaaagaatctagatctatgcatttgagcagtatgtctgtacgaaaattcagagtagctctgtacgaaaaaaaaaaaaaaaaaa

SEQ ID NO: 5353 - DNA, 897 bp, Triticum aestivum
  Clone ID: TRIAE-23APR03-CLUSTER7969_1
aacccccgtggctgatgatgtgtgtcatataccaaagggccaaggtgcatgctctcaccgcgagccagtcgaagctgctgctgaagaaccaccactaactggatacaccaatccaagggagagtgaacatttggggtacaatccagttgcaaaggaagctaatgtgcatgccatgatgggaggccacaatgaaactagacaattcgatcctgatcaaccccctgaatatgatgaatggccgtttgaaattgttgagggtgatgttgtacccacagcccacttgtggcctgctcaccctacacccattgctgcagtcgctcagggatctccagttatgctgcgccaacaatttgctatggttcaagtgggaacaccaactaaattacccatgccacctaaatgtaccatcagccccaatactcctcggtcaggcagttgctaccggtgccatgaagtgtgacattggatcatgaactgccctaagaacggcacttgttaccactgtggtatggttgggcactttgtgaaggattgccctggagcacgcaccgagaaatgaattgtaagaagcatatgagggtctcattatgccttttgtgcaaatgactgtcaaaagtaagcactgaggctagcgatctacttctgcatgataattggcttaaccgtggctgttggtttatggtttaggattgaatgtacggcgccggatacctgctaaacttaaacttgtggtgcctgactgtaaggttactaatgcccattatgtgattggttgatcactagtagcatatgcagaagggcagtaaactcgtaactcgtatgttctgcatatgcagtagcggatgcatttgtagtactgactggtaatgttttgcatatgcagtagcgtatctgtaa

SEQ ID NO: 5354 - DNA, 1305 bp, Triticum aestivum
  unsure (1)..(1305): unsure at all n locations
  Clone ID: TRIAE-23APR03-CLUSTER796_1
ccacaaggcacatgggatgacaatgtntgagtacaacaaaacaaacgcgtactagtacaccagccgcagcaaacccggtggaggcagaggcagctaatgggctccatggccgcggaaatgactgccgtcgaggaggaggcgtgcatctacgccatgcagctgtcttccacggctgtcctgccgctcacgctcaagaacgccatcgagctgggcatgctcgaggtcttgatgggcgccggcggcaagatgctgtcaccgtctgaggtggccgcgcggctgccgccgacgacgaccaacccggacgcgccggccatggtcgaccgcatgctgcacctgctggcatcctacaaggtggtgtcgtgcgaggtggaggaaggcacgcacgcccggcggtacggccccacgcccgtgtgcaagtggttcacgcccaaccaggacggcatctccatggccccgctgctcctcctcaccaacgacaaggtccctatggagagcttgtatcatttgaaggatgcggtgcttgatggtggcctcccattccacaaggcacataggaatacccacaaacgaatacacacaagaacccgcgcgccctcaacacatgcttcgcgaatgcagctccaagtacccgcacatcaaggggatcaacttcgacctggcccacgtcatcgcggaggcgccgcattcacccggcgtggagcacgtcgccggcgacatgttcaagaacgtgcccagcggcgacgccatcgtcctcaagtggatcctccacaactggaccgacgagcactgcacgaccctgctaaggaactgctacaacgcgctgcctgcgcacggcaaggttgtcgtcgtggaaggcatcctgccggtcgaaccggaggcgacgtccagggggcagcaggcgtccctcagcgacatgatcatgctcacgcacacggcaggcggcaaggagaggaaccagagggagttcgagcagcttgccaaggccgcggggttcaccggtgttaagaccgcctacatatacagcaacacctgggtcattgaactcaccaaatagctagatccgtcgtgtcatatctcttctcgttggttgttcctctccaaatctgcatgatgcgtaccttatctccttgatcctgaatggcgcataataaagggatttgctacggatttgtcaaaaaacagacctctatacctatactagtgtcggcccccccgcgattccgatgtcaattagattttatgaaccgttaatnctcatgggaccgaattattacggcatagnatcaacgcttgttgctattaaat

SEQ ID NO: 5355 - DNA, 950 bp, Triticum aestivum
  unsure (1)..(950): unsure at all n locations
  Clone ID: TRIAE-23APR03-CLUSTER7970_1
aaatcagccaagacagagtggcatctgcggcgccgcgctccggcagcctccaaatcagacaaaacacgatggcatcagcagcgccattctccggcaccggcagtctccttcgcctgacaaaaccaggaacgccacagccccagttcttctcccctccgccgtctcgctcccacttccaccttcgaacccgccccgccaaggcaaagagcccaatcgccggagccatcgcctcctcttccatggcggcagcccagccccagacgtgcgacggccaacaacaacgggcggaggaggccatgaagctgctgttcgtcgagatgggcgtcgggtacgaccagcacggacaggacatcacctccgccgcggtgcgcgcctgcaaggatgccatctcctccaactccatccccgccttccgccgcgggtcgataccaggggtgaacagtgaacagatgaaactgcagatcaagctgggtgtcccgaggccggtgcagcatctgttggactttgagagaatcaaggccgtcttcccctatggtgagatcaccagctgcgaggtcattgacggcgggatgatctgttcaagtggaacatgcatcgaagcaatgggagataaaaacgatgactgctacattgtcaatgctgcagtttacgtcggttactaatgctagcctggaggaattgttgtattggaacagtggaaaacttgaaaaaaaaacctggccgggagaggggaactggaaattctcgtaggcaataagtatgtataactgttatgaacagagaaagggtcaaaatagggggaggccatgaagcctcccggtagtccagctgaaaaaagaaaaaaccctggcactaagaggctaagaaggcgatctcgcggtgagctccatcctcgtagttctctgaaatggcccggtacattgtcatctcgtgttatatnagtatgggga

SEQ ID NO: 5356 - DNA, 1308 bp, Triticum aestivum
  Clone ID: TRIAE-23APR03-CLUSTER79_1
cacacacaatcctgcctatagccaccatgtctcctcagcctaccttagccaccaccaccacgcctgctactgggcctaacccttcctattaccaaacagctcctgttagccaagagagtatccagcgaacggaggttcttctccacctgtacgcctaccagcacacccaaggaaaaccaaatgctaaccagactgtcatagtggatccaaagctccccgcgtgtttcggtgcccttgctgctaatgactggaccatatatgatggcacttgcaccaatgcaaaccttgttgcgcacgctcaaggtttgcacattggtgctggtatgaccaaagaaaattggttcatttgtttcaacatggtgtttgtggaccgaaggtttatgggttccagcttcaaggtgatgggagattttcgaggaaacgaaggtgaatgggcaattgttggtgggacgggagagtttgcatatgcacaaggtgtcataacctttaacaagacctggtcggcccaggcaaatgtcagggagcttcatgttcgtgctttgtgtctgtccttctcaaaagcaccggaaacaccgtgctcaaggacaccacggcagagctctgtcaccaagatcggcccatggggtaaaataagtggagaatttcttgacgttcccacgacaccacaacgtctagagtgtgtgaccattcgccatggagttgtcattgattcacttgcattttccttcgtcgaccaagctggtggacaacataacgttggcccatggggtgggccatgcggggacaacaaggacacgattaaacttggtccatcggagattgtgacagaagtctctggaacgattggtgtatttggagcagccaatgtcgagtacaatgccataacatcactaaccattaccacaaatgtccgcacgtacgggccctttggagaaccgcagtgtactcgtttcagtgttcccgtgcaggacaaaagcagcatcgtgggtttcttcgtgtgcgctaggaaatacgtggaggcgctcggggtttacgtgtgtccacctatttcaaactagtcccgaagtgcttcacactcggtgtgccttccacctttctatgttgtgccaataaagtaggttatatacttttggtgtaatgctatgccccccccccaagtgtgatggttttcatatcagcaagaagtttctcttgctactatatgcaaaataaggttgtgtctttgtcgaggtaaattttaccacgcttgccatattgtactttattggaaaaataaataatgaggcagaggcatgcaaatattttatg

SEQ ID NO: 5357 - DNA, 2909 bp, Triticum aestivum
  Clone ID: TRIAE-23APR03-CLUSTER802_1
agaaaactccccagaggaaagtagaccgagccccaaaccagaaatcaaatcgagaggagagaagaaagagagaggagcacgcgccgccgccaggccaagcacatcgccatggccgcctcctgccgccgcgcgtcccagatgctgggccccgccgcctcccgcctcctccattcgcgtggctacgcggccgccgccgccgcgccctccccggcggtgttcgtcgacaagagcacccgcgtgatctgccagggcatcaccgggaagaacggcaccttccacaccgagcaggccatcgagtacggcaccaacatggtaggtggagttactcccaagaaaggtggaactgagcacctaggccttccagttttcaactcggtagcagaagctaaggccgagacaaaggccaatgcatctgttatatatgttccaccaccatttgctgccgctgcaataatggaggcattggaagcagagcttgaccttgttgtctgcattactgaagggatacgtcagcatgacatggtgaaagcgtaacctgaggtaagcggtggcgaggctgccctttggtggggtccactcgccccactgagaattaggcttgggtagctgaatgacgaacaatcgctggtcaacactgttgacatggattcgggtggaagaatagaaggaataggggtgttgagacagagggtcccagttgctgtattaaagacgccatacggggggtgggaaataatgagtagatctgtgcatgaactccattcagctgaccttggtttggtgagaagcacgtacaatgtagggttgtttcttggactagggctaagaggttgataggacaagaatgacacgtgcggagaggcgactgcagctatacgagacagagagagaagaaaactttagactctctgttcgaggacttgatagatttatcagtttaacaagccatacttcggctgatgctggtaacaaccgctcggggctgcggactgttgcttctgacgaaacatctggatcaaagcaaatatgcggacgatgcggtggtcgtcccatcttgttttgaacccgcgaacaatgtttaaattgtctgagctggtttgtcattgccgggtttcatgggaagggagagcaccgatgttacagcatgagagagttccctcctttgctcggttttgggggaacaacctaaaaaacgacgttaccccgcggtatcgggtcgctgagatgacatgggagatgagatggtgcctgatggtttgccccttcggaaggacgattgtgtgctttgcctgatattttgggttgggttgatttctgacgacgaatcattacagagcattattgacatgacttctgactggacaaaggaagaaagagagatgttgagacggaaggtgccagtaactggtttgaagacgccattccgggatgggtatgtaagagatttagctgaagatgttctccagttagctaagaatggattagaaagaagaggatacaaggaggttggtttcctgagagaagtcgacgaagttgttagaacaggagtgacacctgccgagaagcttctgaatctatacgagatgaagtggcagcgcagcgtggaccctgtgttcgaggagttgttatattgatatgctgatatcgtatataacttcggtggaagctggacaaggtggacagggtcttcagattgtatccccatacaaaatcccgtccccaattctacaagccacctgaccagggaagcctactctctggtctcgcggctgcgaataattttgagctcggaacactctgtttgtggcttgccgcctttctttctttggctgtgtggaccttttacagcttctgatttttctcgcatctccagggagccggaacaagcacctgtttgtaccgatccctttttcatcttttcctgatgaacggcttgtattccgaataaatccatctcgcgtgatgatggaaggaacctgatttccagaaataataattcagagtgtttgagacgttacctcagcatgacatggtgaaagtgaaagctgctctgaacaggcaatcaaaaaccagattgatcggaccaaactgccctggtatcattaagccaggtgaatgtaagattggaatcatgccaggttacatccacaaaccgggacgcattggaatagtatctcgttctggtaccttgacatatgaagcggtgtttcaaacaacagccgtaggattggggcagtcaacttgtgtgggcatgggtggtgacccctttaacggcactaattttgttgactgccttgaaaagtttgttgatgatcctcagacagaaggtattgttctcattggagaaattggaggtactgctgaggaggatgctgcagcctttatccaggagagcaaaacagaaaagcctgtcgttgcattcatagctggacttactgcacccccgggccgtcgcatgggccatgctggagcaattgtgtcaggggggaagggtaccgcccaagacaagatcaaggcactcagggatgctggggttactgttgtcgagtcaccagctaagatcggttcaaccatgttcgaacttttcaagcagcgcggaatggtagagtagagagaaggaatggtacagtagaaaagaaaacattgggaaacttctttttgttgctcgttggttaatagcgagcaatacgtcggtagggccccatcgctggtcgctgagttgagctactcagtcccttttttccttttcctttccccgtcttaagtgtgagactggcctttacatgtgctcatttcaaatgttcaataagacaaattctcgacatgcaaaaaaaaaaaaaaaatattgcttggagttggaattcatggggtacctatgctctttcaagtttttcttaatggcaatcttc

SEQ ID NO: 5358 - DNA, 979 bp, Triticum aestivum
  Clone ID: TRIAE-23APR03-CLUSTER803_4
aacccagcacaaaccagagctcctcaggaagagctaagcaatcgcattgcatccgatcaccaatccattcctagcttactagctagctgatcctaatggcgagcagcaccgctctctcctgcctggccgcgctcctgctcctcgcggccgccgcggcgcccgcgtcggctgcggaggagacccggctgcgggtgtactggcacgacgtcgtgagcggcgggccgaacgcgagggtggtgcaggtggcgcaggcgccgtcctccaacgcctccgccacgggctttggcactgtgctcgtcatcgacgacccgctcaccgaggggcccaacctgacgtcgaggctcctcggccgcgcgcaaggcatgtacatcagcgccggcaaggacagcctgtcgctgctcatggccatgaacttcgtcttcgtcgacggcgcctacaacgggagcagcatcgccatcatcgggcccaatcaggcggaccgggccgtcagggagatgcccgtcgtcggcggcaccggcgtctttcggttcgcgcgcggctactgccagttgcggacccactggttcgacgccaagaccggcgacgccaccgtcgagtacaagatccatctccgccacgactgatgcattgtcagctggactagaataaacttgttgttctgttaaacttaagaagttgggaactggaggggtgaaaggagttgagacggccttgagcgccttggccttgtgcctgtcgtcgtgcacgtccagcttcagcacaaccttcttcatggcggcgagcgaccggggagtgtgcttcaacggcggcgaactgctcggggcgagccggcgggagctgagcaacgggacaaggcgggagggcggagcgaaatggaacggccggagtgcgtcgtgtactgtgtatctctctcttggctttggtgatgatttttgtggtcactggcgacggacaaatggtacccacgcgtccgcggacg

SEQ ID NO: 5359 - DNA, 1696 bp, Triticum aestivum
  Clone ID: TRIAE-23APR03-CLUSTER8048_1
agcaacggcacatttcctcttcttcccgaggtcgcggccggcgcccccaaaaccctcgagatctcggcagtctgcacacctctccacagacaccccaacctccagctctcgatcccagcccggcggagccaccggcaccggaggcgcgcccgagatgagccccaacatcatcacggaggctggggtttcaactaggctgaaccagtggtggagcagcaccccgttcattacctccggcgttaccataatatgtgcggccatatatctggtgtgcttgttggttggatatgactcctacgccgagatatgcttcttgccttctgcagtggcctcacattttcaagtgtacaggttctacacatctgttctgtttcatggctctttgcttcatgtgctattcaacatgctgacctttgtacccttggggaccgagttggagagaattatgggatcagtccgtctcttgttcctgatgttccttcttgcaacaactaatgcaattttccatctcatcgtggccttcttggtggattataatcctttataccacgtctcatatcttgtggatgaatgttcgattggcttttctggagttagattctcaatgatagtgattgggatgagcctgagtggagtgcaatatcgaagtgtcttcggtctcttcaatgtccctgcaaaatggtatgcatggattttgctgatactgtttcagtttctcgctagtaatgtttcattactggggcacctctctggcatcttgtctggatttgcatacacttatgggctgttcaactacttgctgcctggaccatcattttactcttctattgaaggcttgtccatgctatctgtttgtgttaggcgtcctggctttattctctgtactggaggaacaacatatggccagcttcctacacattctaacatgtccactccacccagcgctctgataaatgcaaatttcttgagaaatatttcgtcatggatgccaagtaggcggacatccactgttcagacgtctactaatcaggaacaagaagacccgagatttccagggagagggcggacgcttgcttctacaggaactgaaccaactgcaagggaggccaatgcaaatttgcatgctaggttgttggataactcaaccccaagcgaacttctaacaaattcacagcatacggcagcaaacactgtccgagctgatgcaacagtaacagctgaccagactgatacatttgatgaagagcttaagaagctggttgggatgggctttgaaaggactcaggctgaagttgctcttgccgctgcggacggagatccaaatgttgccattgagattctcatgagccagcaggattagggattagccacacaattctatatcaaagtgagtgcagttatcgagcagcatatctcttgcttatctggaggttaggttcagactgtggatggatagtggactttgtagaggagatgttggtgacagagtggttttcagaaaatgtgccattgattatgcagtttgtataggcgcagaagctactgcgtagtgcctgcttgcatttgtccaagcttatgtagtacttgaacatggaagtgtcaagggctccagttccaggcatcagttgactgatttcatcaccgcgcgcgtataacctcagactcgaaagtattgtccaaaatgatgacgctgatt

SEQ ID NO: 5360 - DNA, 1088 bp, Triticum aestivum
  unsure (1)..(1088): unsure at all n locations
  Clone ID: TRIAE-23APR03-CLUSTER80497_1
ctcacttattagggggaattgggtaccgggccccccctcgtggttttttttttttttttttttctcattcccatcatcatcacacaggtaatcgatttcacacatgcgatgcagtgcaaattaggccaatcaaacaccggaggaaaacgagcattcccatcatcatcagacaggtatcgatctcacacatgcgatgcggatactcatgacactactctagtaaaccacactgaatgtacggactagctcagcacatatagcagctctcggaaccaaaactaccaccagctcaaggcaatcccttcattggatcagccgtcttcccagacctggcgtcagaccacgctttggctattgggcgcttcatatcttcatcaccttcctcatacatgcccttcattaaatccataattcctgacatgggatccttctctttgtccatgcttggcttaaacttgtcttccttgtagtgtagatccaaccaattgccggaagaagctttccacagggtgatgacaatcttcgtaggcttgaccacaaccttgcatttctcaggaactatttctttgttcagttttgggatggcacacctatagttcttgcctttaacatcatgaaacttgatgtccgctgacattggcttgaaagtagtctccaccttctcttggtcgacattctcaaggaatacgtagaccctgatcttctcattgtcctggtcccagctgaatgaccccagcgtgacatagctcagaccagcaggggccgccgccgcgaccgcgaccgcctgcggcgcgggcgtcggcacaggcacaggcgcagcccgcgaggccagcttggcgtcgacgctgcggatctcgttggagaggagggagacgacgcgggggcgcttggcgaggccctccagccgcagcagctcctccaggtccagccgcaactcgtccgccgacatctccggagctctctctgtttctcgtgccttcgggtggggggaggctgagtttggctcgtgcgaggaggtttgtagggctgagtttggcccctgcgaggaggtttgtagggnggnntcnntnggnangaaangaaggnga

SEQ ID NO: 5361 - DNA, 994 bp, Triticum aestivum
  Clone ID: TRIAE-23APR03-CLUSTER8066_1
ctcttaccttgtctcccccgccgctgccgcttcatcctcagccatcgcccaccgcctcgccggtgacctcccccgtccaccgcccccccgcctgcgagttcgttcagggagatgtcgtcaaggcgcgagaacgggtcggaaggcgacgggctcggagccgagggaggcgtgcctccgtcgcctctgtacgccgctccggtcgtctgcctcctccggtctgccggggacttcggcgccggcgccttcgttggaggcgtcgttggatacgggcaaggtttgatcactaagaagggcttcaagggctcactcagcaatgcaggctctgctgccaagacttttgcagttctctccggcgtccagagttttattgtgtgcttattgaaaaagctacgcggaaaagatgatcttgtcaattctggcattgctggatgttgcactggccttgccttgagctttccaggaacacctcaagcgttgattcagagctgcgccaccttcgcagcgttctcttgcataatggaggggctgaacaagcagcaggctgcaatggcccacacgctcggcggaaacgctctgacctttgggcacgggaaaggcggcgtcctcccccctttcacgctaccaccaatcctcgacgcatcagatgctctagcttcatgctgccagaccttagtgaagcccaagcactaggcaacatcatggggagagaaagagagagagagagagatgatcagtaaaaaccttagcaccagacttccttagcgtatggaaattcgtttctggacttgtcaagagtgtgtagttttgcttccttgccagtctttttcttgatgcgttctgcagcatgtgctcctttgacatggcagataaaaatcctgaaaaaccttcgcattttgttctcctgttaacatctgagacatggttttgtgacaagtacagtaagaatgaagtgattgcagttcttcacattctgaaaaaaaaaaaaaaaaaaaaa

SEQ ID NO: 5362 - DNA, 1752 bp, Triticum aestivum
  Clone ID: TRIAE-23APR03-CLUSTER8110_2
acttgctcacactcacggtggagcaaaaactcacagtggagcactggagcagcagaactgagcgagcgagtgagatcgagagggagggagagcggagagcatgggctcaatggcgaccagcgtagaggagatcggcgcggcggtggcgccacaggcggtggagcgccgcctgggcgagctgcgcgcgaccttcgagagcggcaggacccggcccctgtcgtggcggcagtcccagctgcgcggcctcctccggctcctcgccgacaaggaggaggaggcgttccgcgcgctccacgacgacctcggcaagcaccgcgccgaggcctacagagacgaggtcggcgtgctcaccaagtcggccaacgccgcgctgcgggagatcgggaaatgggcggcgccggagaaggtctgggtgccgctggtggcgttcccggcgagcgcgcaggtggtgccggagccgctcggggtcgtcctcatcttctcctgctggaacttccccctgggtctgtctctggagccgctgatcggggccatagcggccgggaacgccgtggcgctgaagccgtcggagctggcgccggccacggccaggttcctggaggagaacataggcgagtacctggacgccacggcggtgaaggtcatccagggcggccccgcggtgggggagcagctcatggagcacagatgggacaaggtcctcttcaccgggtgcccgcgcgtggcgcgcgtggtgatggcggcggcggcgaagcacctgacgcccgtggcgctggagctgggcgggaagtgcccctgcatcttcgacgccgtcgccggcaggaggaacctccagacctcggtgaaccgcgtgatcttcgccaagtggtcgtcctgcgccggccaggcctgcatcgccatcgactacgtgctcgtcgaggagcgattcgcgcccaccctgatcaaggtgctcaagtcgacgctgaagaggttcatcgccgactcggaccagatggcgcggatcgtcaacgggcggcatttccagcggctgagtaacctcctcaaggacccggcggtggcggcatccgtcctgcacggcggcggcttggacgccaagaacctgtccatcgagccgacaatactgctgaacccgccgctggactccgcgatcatgaccgaggagatcttcggccctctgctccccatcatcacggtgaagaagatcgaggacagcatcgcgttcgtgagggcgcggccgaagccgctggccgtgtacgccttcaccgacagcgcgccgctgaagcgccggatcgtggaggagacgtcgtcggggagcgtcaccttcaacgacgccgtcgtacagttcggggtggacacgctgccgttcggcggcgtggggcagagcgggttcgggcagtaccacggcaagtactccttcgagatgttcagccacaagaaggcggtgctgcggcggggattcctggtggaggccatgctgaggtacccgccgtgggacgagcagaagatcgccatgatgcgccacctcttccgctacgactacgtccgcttcatcttcaccttcctcggcctgcggagatgaatacggccatgcccaggaaattaattaattattatttgatgagcgagtggatgaacaagtacatgaataataaacataccacgttagtttgtactactaggattgcgtagcaggtttgcacttggtacttgctagtgtgccaataatagaagaagaatgttctttttgcaaaa

SEQ ID NO: 5363 - DNA, 1319 bp, Triticum aestivum
  Clone ID: TRIAE-23APR03-CLUSTER81190_1
acaagacttttctgtgtggcttccctgtggttgcttgccaacggtcaccactaccctttttcttttttgagggaataggtcacgactacacacaatctacagtatggtgcaatacagaaaggcgccaagcttgaaacccgtgggaaatacattactccaagtcacataacagctaaagtgctaaactcaacacgagcatctgccttctttattttgctggcgatgcaacagaagctccagttcatcttatacgataactaaagagtacatccagtttgcctttttcgcggcctgcctgcgtaagtgacagcgtttctgaagcatgttgacattggacgtcgggtgaatctacggtcttcgctgtcacgacccaaaaacctccttgttgcaaacggggcataccttgttgatcttcaaccatttggcaacacaagttcgatggtactgatgctgacagggcaatgtagtcagcttatcgcggttcttgtaagccatacagcatatcacacattcatcatgtttttcctttcttgagaatatcccaactttgtatgttgaagacttaaggagagctatcacatcttctggcaaccctttactttcagtcccaatagtttcccctaattgttgtagttcctcataagtcatattatcaggatcaacttcatccttcgttaatacctgagaagatctgctcacagaagtattgccattgttggatgttgaagaacttacgggctttcttccttcttttctcttcttgtcatctatcgttgccctagcaatttggtcctccatcgcctgcaagtctctagctaaagcttcatcgacagctagctgtgactcataatttgcgcctcttgttaatcttcgcccactcgatttttgtggatggccacaactagaaccaggatctgaatgagtcctggataaaccacttccatcatttccttggattaattgatacactatttcctgatcttgaagaacttgtgcaagatcaacatcatcttcaaagaagcatcccccgaaattctcttcaattgcatatggcaagggggcatccatatagtacacaaccgcttccttcttccctgttgtatcatgtagcacctccatgctcatgagaacctaggaacgaaccggggaatgggggatttcggaggatgcgaggggggctgccgaatgagaggggaggatcgacgggcggtccgggagccgccttgctcggtccccttttcgcctccgggcttcgctgtgtggagcgcacagctgatatcatagtcgggggagagagaatcaaatcatggtggtctctc

SEQ ID NO: 5364 - DNA, 2497 bp, Triticum aestivum
  Clone ID: TRIAE-23APR03-CLUSTER8180_1
agatctcaccatttggttgttgtttcgaacgcactccactcctcctctaccggcttccgctgccggccgcggccgtccccacccaccaccaccaccaccgcaaccagcaatgcggagcgcaacaacctcggggcctccggcgagcacagacgcccggaggaggggggagcgaggatgagcggggcggcgctgtgcgcggcgctgacggagctggggttcgacggggaggacccgctggacgcggacgcgctcgagtggcccttccagtacgaggaggcgcgcccgctgctcgcctggatctgctcctgcctccgcccctccaacgtcctctccccgtcccacctctcgcagtatgagcaactcgtggaagagggaagactgctagagggtgaggatttggactctgcttttgatagtatttcagccttttcaagcaagaaagacaatcaagaggctgtctttgaagcagaagaaactattcttgacattcgagaagcaaaactagcatatagagctgaagtttttgagttgcagaggcagcttgcacggcagcaagcacaatttgatatgcttgcagggcaagcatcttcgcttattcaaggcagacgagcacgtgtatcagctatgtctgcagttagcgtgcaacttatatcactagatgagatactttcatccagaaacttggagatgaatgcagttcttggaagaattactgctacaacccaagaattggcacattatcattcaggagatgaggacagtatatacttggcatattcagacttccatccgtatgttattggggatttggcttgtacaaaggagctaaaccggtggttctcgaagcaatttgagaaggggccatttcgacttgttgccgaggagggaaaatcgaaatgttcctgggtgagtcttgatgacatcacaaatggcctgacaagaggagattctgaaaaatctcatcatcaccaacgtgtgactgagttgcaacgacttcgttcgatatttgctacaagtgaaagacaatggattgaagcacaagttgagaatgctaaacaacaggccatactccaaattttaaaatctcaagtatcctccgacgaggctcacatacatagggatatacattctcttaggagaaaaagttctgagcttgctggagaattctcaacacttactcaaaaggtgcagcctttcatatctgagaccataccatgcctttgttcggaacttgctcaacttcaaggcacatatattttgcaaggtgattacgatttaaaggtcatgcgccaggaatactatatcaacaggcagaaaactttcatcaaccacttggttaatcagcttgctagacaccaatttctgaagattgcttgccaacttgaaaggaagcacatagccagtgcccacgcattgcttagagtcatagaatctgagctacatagctacttatcggcagtcaacgcccgtctgggccattgcaattcattaattcaagctgcgtctgaggtacgtgaacaaggagcaattgatgatcgtgacactttcctccatgcagtgcgagatctactatgtattcactcaaattcccaagcagcagtaccaacatacatgtcagcacatgctttagttcagcagatatcggcacttcaatctgacttgctttctcttcagtctgaacttgaaactactcttccagctgacaggaaaagatgtatcaatgagctatgcactctgattcaaacagttgaacaacttctatttgcatcgtcaacaactgcagaaccagtattgacgccctggccactgatgcgagcacttgatgatatggaaaatgcaaatgctcaagttgaagttgctgttgaagaagtaaccaaggctcgcactcaaaagataaagatctttgaaaatcgcgcacatgaggtggggagggaaaggcaggtgtttgttgattttttcagcaaccacgagcgtctcaagaatcaagtcagagagctgacctcccgcgtgaaagctctccaggaatgaagccgttttctcccgggcggtcttaagaaaaatcagaagcaatggcccaaagctcacatctcctgtgtggcaattctatttcttgtagagagctccagtgcaaaattgggcatgtgtgtggtgccggtatgcaacatcgagtgatttagatggatatttaggacataggagtatatgccagtggccacctgaatggttggcgtcattgttgtatttatgcttctttgtatgttgtaaaatatgctagagatcacgagcaagcttggactaggttgtgggggtggtgtgtaaaatacaattgatttagtttgtattaggtggttgatttaggttttttttttagtttggtggctgatttagttgagccaacatctcatgtgtcaaatgttgaaagttacttcagttcagaatcactataaacctaactgcggctgaaactactccgatcagctcaaaaaaaaaaaaaaaa

SEQ ID NO: 5365 - DNA, 1963 bp, Triticum aestivum
  Clone ID: TRIAE-23APR03-CLUSTER81858_1
tcacacggattctcccaccgcttcacccaccgcctccccaacttcctcgtcccctccgctgtcctcgtctgccccacctgcagcttctcccgctgccgctgcttcttccgcaccttgggcttcgtcggattggcctcctttttccactgcaggcaattcgacgcgcagggctggacattactgcttgatactagtaaaacgattaagaggaccaggattttagggcaatgttcaaacgatgaaacggtttatactagtacggtaaggagccaggtactgaatgattcatagtacactattatggagattatcgccggatgaaccagacaacacaaatcaaaaaagaagaatctgattactggaacatcaagaattatgcatccttccaaccctagtctctaaggattccattaagcgtcagattcgacccattgttatatttgagccatagcaatttatattaacgactcaggtccttcgagccattacgatttttagtaactattagccttcaagattatgccaacgttaagtccaactattggctaggattgggagacagcatcggcctgttgcaccacagtcgcacctgcacgctaccatccagcgcatgtcccctcagcggccaattgcctttcttctgctttacgccacaaggggattgtgatcaatactgtgctttaatccctggcttgccagaagacctggcaaagatatgtcttgcccttgttcctcgaactcatttccctgtcatgggtggagtttccaagaggtggatgtcattcctagagagcaaagaattaattgctgtaaggaaagaggttcagaagcttgacgagtgtgtgtatgtcttgaccgctgatgctcaagcaaagggttctcattgggaggttttgggatgtcaggggcaaaagaacacccctcttccgcttatgcctggaccaaccaaagctgggtttggtgtggttgtccttgacgggaagctcatcgtcattgctggctatgctgctgaccatggcaaggaatgtgtttctgatgaggtttaccagtatgattgtttcctcaacaggtggaccgccctttctaagatgaatgtcgctcgttgcgacttcgcgtgtgcagaggtcaacggtgtgatatatgttgctggtggatttggtcccagtggtgatagtttatcaagtgtcgaagtttatgacccagaacaaaataaatggacgttgatcgggggccttcgcaggccgagatggggttgctttgggtgtagctttgaaggcaagatgtacgtcatgggtggccgttcgagcttcacaattggtaactcccgtttcattgacgtgtacgatacaaatagccatgcctggggtgaatttaggaatggctgtgtgatggtcacggctcatgctgttcttggtgagaagctcttctgcatcgagtggaagaaccagaggtctctggcgattttcgacccagcagacaattcctggcagaaggtcccagtgccgcttactggtagttccagcacgcgtttttctctcgggacacatgatgggaagctgctgctcttctcactggaggaagaacccgggtatcagacgctgatgtatgatcctgccgcgccaaaaggctctgaatggtgcacgtctaagctcaggccatcgggattatgcttgtgcactgtgaccatcaaagcctgacgctctagctcgggggtcactgtaggatgatacctaagtttactacctgcctcatcttccgcagttaagatcaggctttgtttggtttatcatcctacttgctagggtttatatctgcttgttgctccacccaataatagaatgttcatgcttcagttcattcggttgcttgctgacagcgaaccttgccataatgtactctgttctcagttgtattgaaatactatttgatcatagaaccttcaatttaaaaaaaaaacagctta

SEQ ID NO: 5366 - DNA, 1616 bp, Triticum aestivum
  Clone ID: TRIAE-23APR03-CLUSTER82071_1
agaccgcaattatataaccaccgccgcttccaccttcccagtactttttgcccccctccccacctctcgttcccccctcccctccccacgcgcgcgcgccggcgagatctgcccagggtggacccccggcgaggatgagcagcccccatggcggcctcgacgaccagatcgagcgcctcatgcagtgcaagcccctccccgaggccgaggttagagcactgtgcgagaaggccaaggagattttgatggaggagagcaatgttcagcctgtaaggagtcctgttacaatctgtggtgatattcacgggcagtttcacgatcttgcggaactgttccgaattggtggaaagtgtccggatacaaattacttgtttatgggtgattatgtagatcgtggctactattctgtcgaaactgtcacgctgttggtgtctttgaaagttcgttatcctcagcgaatcaccattcttagaggaaaccatgaaagccgacagatcactcaagtttatggattctacgatgagtgcttaaggaagtatggaaatgcaactgtgtggaaaacctttgttcgactacttccccttgacagcattggttgagtcggaaatattttgcttgcacggtggattatcaccatccattgagacacttgataacatacgtaactttgaccgcacgcaagaagttcctcatgaagggcccatgtgtgatcttctgtggtctgatcccgatgatcgatgcggttggggtatttctcctcgaggcgctggatataccttcggacaggatatatcagagcagttcaatcataccaataacttaagacttattgctagagctcaccagttggtgatggagggattcaactgggctcatgagcaaaaagtggtcaccatatttagtgcacctaattattgctaccgctgtggaaacatggcatcaatcttggaagttgatgattgtcgggagcatactttcatccagtttgagccggccccgagaaggggagagccagacgtaactcgtagaacgccagactatttcctgtgatgatgcggaatcggtgtcgacctctgcaccaaaggtctgataactagctgaagtttcctggctgcagataaatctttttgctgaaaatcatcaacctcctgtgtgttattcttcttaatttttccgcccatgatgcccctggctgtttgcgagccgcttcgccgcatcgtgatcaaagtgtatacctacctacctacagctggaagggtccattgtgttactcacctctctaactgagcttgagcatcgagcagcgtttgtattgtgatgacaggaagccatttcatttcccccctgtattcataattttttccccgttcgcacatttcgcctaatttttcattttgatgattatttgttgtagagatggacaatgtagttgtatggttatggttcccttaggtgttgtgaacccgtattgattttccgtatagaatacttgtagcatgttgagcactgtctgtgtggtgttggctgtggtatgaatgtttgtatggttagtggatattttttgtttaggatggtgccaaggtggggggggtttcccccaaggagaacagacatta

SEQ ID NO: 5367 - DNA, 1628 bp, Triticum aestivum
  unsure (1)..(1628): unsure at all n locations
  Clone ID: TRIAE-23APR03-CLUSTER8208_1
aagggacctgtttcatttgcctttggtcttgtgatgagatgatgatgggaacggagcagccgcggccgcgaggcgtagccatagatttcctcgcagcacgacatgctgctcctcatccaccatgccatccgactccgagcctccctccctgtctgtacccacccgtagcccggtaaacataagtcgccgccagccccagccccagcatccgaatcttcccttgcaacaatcatccgtaaggccgtcatcgccttccgccccgcggccgcggggagacgcgatgcagggactccaccgccgctaccgatggatcaaggagtgggttccgcaggacctcgtcatcgccggcggcccgtgcgcgctttacaagtgggtgcgagaggataggttggctgctcttaagtccaaggacaaggaagaaggggcatgcactgcaaagcctgaccctgccactgaggttcttttcttatgcagctatgatggctgtgggaaaacttttgttgatgcaggtgctcttaggaaacatgcccacgtgcatggggagaggcagtatgtctgtcactacgagggatgtgggaagaaatttttagatagctctaagttgaagaggcattttcttattcatacaggcgagaagaacttcgtctgccctcatgaaggttgtggcaaggctttctcattggattttaatttgaaggcacacatgaaaacccattttgcggataactatcatatgtgtccatacccagaatgtggtcgaagatttacacaggaatctaaactaagggctcatttcagggcacagcatgagaagaatccaggtgggcctgtaatgaacccgcaatgcactaggagatcaccctcataacacagcgaaatctctggtaacaccaccagttccatcagctgatcgtccgtatgtctgcccttacgatgggtgtgccaaggcatacattcacgagtacaaacttaacctccatttgaagaaagagcaccccaaccactattcagatgctggtgctcaagctggtccgtcgaggggcacagtatcgaagaattcccgtagaagcaagccaaacctcacaaccagcatgccactcgccaagatctctaagcgcagcggttatacggtgccatctccagctgtcagtatccctgaggagcatcagtggccaaggaaggtgttgtacgaagatgatagtgaggagaccgaggaagagggagataaccttgaggaggggggattgagatacagagctgctagcgacggcgatgacgatgaggagacggaggaagaagaatgagagctatgggttgctgtgcacatagtttatgatcaccggactggattatagttctgcatacatgtaacaatacatattaagggtggctagttaggcagaaacttgtgggctgcatgtaggtgtctcaatttaaggctattaattaacttattaagaagggtaatagatcatcacgcttccgtgctgagaatccaaaaaaaaaaaaaaaaacccctatatacgaccgccctcgaccccgggccggggcgcccctgcagcccagtagggcgtcgaggggagcccaattacccccggccccctgggcccgcgtttttaaaaccngcc

SEQ ID NO: 5368 - DNA, 1702 bp, Triticum aestivum
  Clone ID: TRIAE-23APR03-CLUSTER82473_1
gactttcggccaaaacatcgcttcctagtccctggagccgactttcagtgcaaacatccattcttcctctcagccttaagcgaaaaaaccctagcactggacgacctccaaaaccctagagccgtccccaatggcgagccacgaaaccgacccgtcccctgccgccccctccaagaagaagaagaggcactccaagaagcgcaaggccatcgaagtcactgtagatgcctcctttcctggcgccgccgcccccgtcgtcggctactttccgacgggctacgacccccttgcggccgcagagcccccacgtgcgcggttgttccgccacgagaagcaccataaccgcgtcgagctagtggtccgcgcccctggtggaggccccgacttcgtcggccggagctacgccggcgaggccgctgcgccgcagctctgcggctacgccctcggcgtcctcgacaaggccaccagcactctgaagattgtccccatcgcctccaacaagattttgaggctagagccacactttgaagtgcagcaaccggctcattcacaacagtcagcagcagaagcaggttcttctgtagcagatactgaattgaacagacaagatcttacccaggcttatgggaccaagaaagataaggataaggataataagtggaagtcactaaaagaacaaaggaatgacccttctgcttatttggaccttgatcttggagagtccaagaccactgcagatgccactgatagtcaggcatcaatggaagttcgcaacattccaccttatgatcctgctgcagatacatctgaaaaggcatatctttttgatgagatcattccaaaaaatatacggccacaccttcttgatattgtgggacactttgaatcgggagaatttggtttgaaaggctatgggagttttgtctcgaatcgtgtgaataagttgcaggaacttcagggtgaagatcaggaaaggcttgcttggatactatcctatatcacacatctcctgtccttgttggcgcgcaacagctccatgtccaagcagaaaagaaaagaaaaagaccagaccatccgtggaccaatgatcccacaggcggtgcaccgcaagctgttgctgatgttcacggagccagggtcttcttccttgtcgacagagaaacacgagcttctgatcaattacattttagtactcacactttttgctgatgacttcagatctgaacctacggatatatgtgcggacttgaaaatgaaccgccagatgcttaaaccatattatgaccagctgggatgcaagtccgtgtcaacaggtgcttttaaaccagtttttatgacacttccagcacccctcaagttcccacaacaagtcacaaggagaaggcggcgaaaataaccatcttagttattggtttccatttgatatggttgtgataggaaaggtatgcattgccaccgtcgaacctatgtgccctcagctcagtttcaccaatgtagtggagaaaatgatgaaggtggttgttctgtttttgttttctattgtcacttgggaattgctacgagaggaaccatattactgatatataatttgcttgctaccgaaatttgttttttgatgctaaaaaaaaaaaaaaaaaagcttatcgataccgtcgacctgtttaaacacaataaagttggaactggaggggtgaaaggagtt

SEQ ID NO: 5369 - DNA, 1680 bp, Triticum aestivum
  Clone ID: TRIAE-23APR03-CLUSTER825_1
agatcgtgcccctcgcctccatcactcactctcacagccccccagctagctagtgccctctgcatctcgtgctcggagaacttagatcagcacagagcgagggtcgattagcagctgatcggcagatcatgggcgtggagggctgctgcaacaagaaggtgatggaggaggaggccctggtgaagaagatcaccggcctcgccgcggccatcggcgagctgccctcgctgagcccctcgccggcggtgaacgcgctcttcaccgagctggtgacgtcctgcatcccggcgagcaccgtcgacgtcgacgcgctgggcccggaggcgcaggagatgcgcgcccgcctcatccgcctctgcgccgacgccgcgcgccgcctgcatcgcccaccactccgacctcccggtcctgcgcacaacccgcccgattaatattctgcacgattaatccgcgaccgatacatacatgcatggtgataattcccttgccggcagcgcatggatcgatgtgcgtacctatttaccaccataattattagtcccttgcctgcgtatgggtggctgggattcttccttttcaaccttacttgtgccgcgcctgtttcagcaagccccacgcatccgccgcatgcctccgggtttaacatagaggaggaggatgatatgtgtcgtgttgtgttgtggtgagatcgagtcgagtcgagttgcctgcctgctgttgtaataagtgattttgacactctatatgactgaagtgatcatcaccaatgcaaggagtgcgacacctaggcggccgtagagaaggcgcgcctggtggagcacctcgggaggcacatggcccccggcgcggcgctcgtggtgcggagcgcgcacggcgcgcgcgggttcctgtacccggtgggtgcaccccgaggagatccggccgacggcgggttgcgaggtgctacaccgtcgcaacacccggcaggaccgagggtgatgaagctccgtcagtcatcgcgcagcaacggcggcagcgccacgcaaccgcggcccgccgacggggagcgtgccggtgaaccagccggcggcatgcctggcccattggcgcggtggggcgccggacgatccgggcgtgggcctgggaggagatggaggcgtaggccggccggcactccggcagacaccgtcaccgtcatcgcccagagcacggtgatgcatgaactcacccaccgattaatatttgcccgattaatcaccgaccgatacatacatgcatggtaataattggtttgtcctcatgcatggatggatggacgtggctacttatttaccataattattaatccttgcctgcgtatggctggctggattatttattttctaccgtaatcgtgccgtgtttgttttagcaatcgtctgacagctgctatatgcctccgggtttaacatagaggagggggatgatatgtgtcgtgttgtggtgtggtgagatcgagtcgagtcgagttgcctgcctgctagctgttgttgtaataagtgtttttgacactctatatgactcaagtgatccatcatcaccaaactcaagtgattcatcaccaatgcaagaagtgtaacaccgtacctaactacctatgcttgcttaattgattcccttgtttcaacgccttgtcttaactcgagactagttctctctctc

SEQ ID NO: 5370 - DNA, 1350 bp, Triticum aestivum
  Clone ID: TRIAE-23APR03-CLUSTER82600_1
catagcggatcgcccggcccgactgttgcagatcgcccccgagaaacccaccaaattcgcagaacctacaccgggtcactcacgcggccccacccggcagcgaggggggcaagggcaaaggcggaggcagtttgcaggaaagcccccgtactattctgcctcgcctcgcgcttccttccttgctgccgttgctgcctgcctcctcgtcctcctccctctcgtcgcctcgcctcggcccagggacggcgacgccaaccggcgagcgggcgggcgggctcatcccatctcctctcctctcttgccggcggggagggtctgcgcggccggccgccattgccgcgtcttcccgagtgtagctctgattggggaagagtggaagatggttgtcaaggagttcaccgttgatctcaaccagcctcttgttttccaggttggccatctcgaggaacattaccaggaatgggttcaccagcctatcgtcagcaaagaaggtccgcgctttttcgcaaatgataccatggagttcttgacacgcacaaagtggtgggctgtgccagtcatatggctacctgtcgtctgctggctgtttgccaagtcgattcggatgggtcacaccattcaggaagtaatcctgatggccctatttggagtgtttgtttggacgttcattgagtacgctttgcaccgcttccttttccacatcgagacgaaaagctattggtcgaacaccgcacactaccttatccatggatgccaccataagcatcctatggactcactcaggctcgtattccctcctgctggggcagcgatcatatgtgtgccgttctggaatgttgtggcattcttcgccagtccatctaccactcctgcgctgttcgccggtggcctgctggggtacgtgatgtatgactgcacgcactactacctgcaccatggacagccatccaaagatccagcgaagcatctcaagcggtaccacctcagccaccatttcagaatccaggacaagggcttcggcatcacctcgtcgctctgggacgccgtttttgggacgctgccttcatccaatatcgttgcgaagctcagctgacacgcacaaacatgttctttgcatgaggaatttcagtagagtctgtagacttaggttagggacaaagctcatcttgcctttctgccatgggttcgcatgtcttctccagtggtgtgtgctgatgtctgttacgacgtgaagacgtttggttgcctcaacttttaatcgacagaaatagggtattcgtgtcgtggtagtcgatgttgggataaatagtcacattcctcggttcagttgtgacaaaaaaaaaaaaaaaa

SEQ ID NO: 5371 - DNA, 1721 bp, Triticum aestivum
  unsure (1)..(1721): unsure at all n locations
  Clone ID: TRIAE-23APR03-CLUSTER82864_1
gaactgcaccctcaccgccacgcttcaaggctagctagctcgatcgcacagcgaaaatggcgggtagattagttctgtcggtggtggtgactctgctagctgcggccggggcagccgcggcggagtcgtcgtgcccggcgacgccgccggacgcggggccgatgctgcaggtgtcgcacgcgttcgggccgtgctcgccgctgggaaacgcggccgcagcgccgtcgtgggcggggttcctcgcggaccagtcctcccgggacgcgtcgcggctgctgtacctcgactccctcgccgtggccgggcgcgcgtacgcgccgatcgcgtccgggcggcagctgctgcagacgccgacgtacgtggtgcgcgcgcgcctcggcaccccgccgcagcagctcctgctcgccgtcgacaccagcaacgacgccgcgtggatcccctgctccggctgcgcgggctgccccaccaccacgcccttcaagccagccgcgtccacctcgtaccgcgccgtgccgtgcggctcgccggcgtgctcgcgggcgccgaacccgtcctgctcgctcaacaccaagtcctgcgggttcagcctcacctacgccgactcctcgctggaggccgcgctgtcccaggactccctcgccgtcgccaacgacgtcgtgaagagctacaccttcggatgtctccagaaggccaccggcacggcggcgccgccgcagggcctcctcgggctcggccgcgggccgctgtcgttcctgtcgcagaccaaggacatgtacgagggcaccttctcctactgcctcccgagcttcaagtccctcaacttctccggcacgctcaggctcggccgcaagggccaaccgctgcgcatcaagacgacgccgctgctcgtcaacccgcaccgctcctcgctctactacgtgggcatgaccggcatccgcgtgggcaagaaggtggtgcccatcccgccctccgcgctggcgttcgacccggcgacgggcgccggcacggtgctcgactccgggacgatgttcaccaggctggtggcgccggcgtacgtggcggtgcgcgacgaggtccgccaccgcatccgcggcgccaacggccgcgtcggcttcgcccgcgagcagtgcaccgcggcttgacaccgattgattatccctctgccggtagctgggaaccgaggctgcggcctgcgccactgttgcctgtccgttggtgtcggacctgcatgcatccatgctggtgatttaattattttgtagcctagtgagtgtgtcgtctccatcggtgtgcaagatcttgtgtctttctttcttgtttgtgtaatatcatgtgtgtctctaaaaaaaaaaaaaaaagagcagtgcaccgcggcttgagacggattgattatccctctgccggtagctgggaacctaggccggaccagccgctgcggcctgcgccactgttgcctgtccgttggtgtcggacctgcatgctggtgatttaattattttgtagcctagtgagcgtgctgtctccatcggtgtgcaagatcttgtgtttttctttcttgtttgtgtaatatcatgtgtgcctcacgggtttctagtaatttcatgtggtttaaggttgggcctgttagggtttaagaggggtagtgcgtttgcatctactgtaccccgtaagtaattgttggttgcacaataacgctaggcttgagaaagttnaananaaaa

SEQ ID NO: 5372 - DNA, 726 bp, Triticum aestivum
  Clone ID: TRIAE-23APR03-CLUSTER8288_2
aacaatcattccagtagcaccgaccggtcgagcaacctcccaatcagctaaggagcatgcagcagcgctcggtgtgctacttgcgcgacatggccggcagcaggaaggcgctggcgctgacggtcctcctcgtcgtcgccctcgcggcgacggcgcaggcggtgtgcgacatggacaacgacgacttcatggcgtgccagccggcggcggcggcgacgacggacccgcagccggcgccgtcggaggcgtgctgcgcgacgctggggaaggcggacctgcgctgcctctgctcctacaagaactcgccctggctcagcctctacaacatcgaccccaagcgcgccatggagctgccggccaagtgcggcctcaccacgccgcccgactgctagatccacccaccctcccaacatctgtcctcctcgtgtcccggccccggggtgggttgatgatgcatgcggtgcaaatggcaagagcccggaggtatagtatacatgtactgagccgtatatacatgtgctcatcttgtcgtacgtactacgtatctgtcggtgtgtgaaagtgtgtgctgccacgcatgtcccctcttggcagtgactgtgtccgtgtgtaacattgccactacttcaaatgtgtgcactttagtacatgtgtatgtggtttctgtaaacaatctacttcggggttaattaacccaccgacagaactacagctatcttatcgctt

SEQ ID NO: 5373 - DNA, 1704 bp, Triticum aestivum
  unsure (1)..(1704): unsure at all n locations
  Clone ID: TRIAE-23APR03-CLUSTER83095_1
gacgccaccggagcctgccgtccccgtcgcagctcgccgacgacttcgaccgcttggctccactccgccccgtccgccgctggagctcgccgacgccagcgattcttcctctcctcctccctctcgaggtgccggaacctttcttccgcacggcgcgtctcctccctgaccggcgtactccggcgggtggaaaggaagagctaggaacgtactcgcgaggtggaggcggggaccgggaaccatggggacctcagcgggcgagggaacggatctctggaagcaaatagacgacgccgagtgctatctggtcagcggatcgttcgaccaagcggttttgactgcattgtctgtgtctgatcaaattcgagcggctaatagagaaagagtgtgcgaagatgatgagcttttggagatgctcgaattagttggaattgtactcgttcaagcacttaaagagctcagaaggacaactgagatgtttgttcagcttaaagctatgtatggttcagtggcatcaataccggtgaaggttttcctgacaggggctaccatgctaatggcagaaggttctgggcctgaccttcgaccaatctttgaggacttccttgctaaatggagatacacagatgatcaagtttatgttttgaacggagaacaggaaagatcttcaaatggtctgattgttacatcaactatggcaactgaagagtatttggaggtggtagaattttatacagttacattccttagcattgcctctggtgagcctgaaaatgccatctcatgggtagagaaggcagaattaattgagcaagatcgacaggagctacttgaaaaactttatgcattacaagcagctgcaaatgaaaagtcatccactgctagaggagcaaaacaatcagcagagaggaactttcccgcgtctgacaaaggcccaacaccagcaacacacgaggatggtccgacaagcgccacacgtgcacccaatgtgaaaacaaacggcttaccaaagtccattgagccttcccttcagcgcgtcgcaaataactttgatcccatgttttggtggttccattcggtgcgcgtaaagtttggtagaatgcacattgttctaccaagtggtaagctaatgcttctgttctcgctgttgttctcgacagtctatgttctacggaggaaaggcgccggcttgaaaagggttgtactacaacatgcttcgtccctgcgacgggcgttcctcgacgccctccaactcgccttctccgtccagatgaacccactagcggctgttcaacaaacgccgcaagcccctcgaggaagctggtgatacaccgatacaatgtagttacccatcccaacatgtaactagcaataccgggaattgaagttggacatatgggatactggtcgttttttgtgctactgatgaatgtattggaatataaagcaagtctgttaaatacatcatgggctcatggcaatgtttnttatcggcatccccggtttgagaattttagttganaggctttgttcttgctctgttggttcaggcgggtttagtttcagtaaagttgcagctatcaagtgagcttggactgaanaattgtatgcncccnttctgctngtatntactgnacgtcctacacatgtttcncaaataatgtagagtgagaagctgtttcacatcgaaaaaaaaaaaaaaaa

SEQ ID NO: 5374 - DNA, 2200 bp, Triticum aestivum
  Clone ID: TRIAE-23APR03-CLUSTER8313_1
cgatcgacagcaatagcggcggtcaaaagcctctcctgcgacgactcctccaacccccgtccgtgtcttcttggacgctcctcccccctctcgtagtctccacgaaggagcagcgcaggcaccggagcggcctcttctcctctggttgccgcggccaagctgagtcgccacggatctcgcggcggagaagggggagcgctggaggggcccatgagcctcgccggctccgccctggaggcggccctgcaggcggtggggcgcggcctcgacgccgccggcgaccaccgcctgctctactgcaagggcgccgggaggctcgtcacgctcgacgaggcccgcgcgcgggacctgcccatcggcggcggcgtcctctgcggcgtgccccccgacgtcgaggtagaggcctaccgcggcaaccccgagcgcagccgcccgcccccccctggtgccgcccccgacgagcccttcgtctgcagcttcgataagatggcggagcatttcaacaggaaggcgagcttgctggaaacagtcccgctgggttccttcaactcgctcttcagctttactggttcttggaagaatgatgcagccgcgacaaaggcccttgcagttgatggctactctgttccgctatatagagttaaaataactagtgatgaactgattctgcaagagagtgtaaagcgcgcaattccatatacttgggatccaccagcattggctaggtcagtagctttatcgagaattacggcacacatattattacttctgtaatggttggcggtaaggatgaagtatacataaagcagcattcatcccaattatctgaaatggagttcagaaattatgtcagagaaattgggaacgagaggttctcagatgtggagaacaagtcaaatgcaccccccatcaattatagcgaaaaggacatgacagtaatcttcagaaggaggggaggttgcgatcttgttcagaattctgttgagtggataaaaactgtttcctcagcgccagatgtcataggcatgacatttctccctattgtttcactcgtcgatgatatacctgggaagaagcacattgctcgtgccattgatctatacttgacatacaaacctccaattgaagagttacaatacttcttagatttccaagttccactagtttgggctccggtaccactgggtattgctggacaaaatagaaaagagcctgtgtgcccgtcacttcagttcagcttgatgggcccaaagctatttgttagcacagaacaggtatctgttgggcgtcgaccaatcactggcctgaggctgtgcttggaaggaacaaaacagaaccgtctggctattcatttgcagcaccttggctcgttaccaaagatatttctacctcactgggactcgcatatcacgatcgggccaccaaaatggcaagggcctgaagagcaggatagccgatggttcgaaccaatcaagtggaagaattttgctcatgtcagcactgcgcccatagagtacaccgaaacaaatatcacggatctgtctggcgtttatattgtcacgggagcacagttaggagtgtgggattttggtgcaaagagcgtgctccaccttaaacttttgttctccagagttcctgggtgcacaatcaggagatcagtgtgggaccacagtccaagttctgcgatgcatagaacagatgaagcttcatcgtcctcaagtgacaatgctaaacttgtgaagattgtcgacatgacagagacgttgaagggcccacaagacgcacctggccattggctggtcacaggagcaaaattaggcgtggagaagggcaggattattgtacgtgcaaaatactccttattgaactattgaccaaagtgttgagagcattcattcattcgctctgctatggagcaccatgtttaaagatagcattgttcttttgttcatgtatggtactgtatgtaacatgtctggaatcatgcttcttgcgttgatgctatgagcgaagtagcatggacaacgttttttttgtccagttcaaaaatatttcatctggccctggtcatttccttccgaatcatcatagcccgccaatggaatttaatgtattgtgtgttttctgcatcagcgatattgttgcttgctttgtggtgatctgatttcaatgttgtgtttaaaagagtaaaaaaaaaaaa

SEQ ID NO: 5375 - DNA, 2056 bp, Triticum aestivum
  Clone ID: TRIAE-23APR03-CLUSTER8326_1
attcttttcttttttcccccctgatcccaccgcggccgcgccgccgtgccccgcccccgccgccgacccccccatccccccccccccccacccgcgggggcccgccggccaccgccccccctcctcctccccggcggctccccgtcgtttccccgtcggccagtcatcagccgccgtgggggggttgctgctcctcctgtcctattatcatctccttgtggggggatgatcgggcgtggtagaagggggggcctgctgtattgtatgcggtcttgtggatcatcaatgatagtagcatgagaagaagatcagaaaataccatcaaggcttcgtcgtcgatggcgggcggcgcggcagggaacaccgcacccggccaacaggatggtcgtctcagttccatcatgcagtcttcctttgcaacacgtggtcagtcatcccccggctactccccccccttcttcggccctctgtctgacttctcccgccctgctgacgacattgccgagaacccctgtgccttcctgccgtcaggtccgcgttattgcagctttgggcagcttagtggacacagctgatggagttcctccccgtacacaaccatgatggtgtcgattgttgtgtatgaatgttacatgtctgaccgtctcagttcttcctctattcagggagccattttggtccatgcttaaagcagcagctcgtcaccgccgatctcacttccatcataattcagctcatctcaactgccggctccatgcttccttccatgaagaccccgctccttagcagcaatccagcggtcaggcagctcaacacgcctggttctcccatgggctttggctcgatcgtgaatcagcggccaagcacaatcagggaggaggtggttaatgacattagcaagacctctgactatgaggagctgatgaatacccttaacacagcccatgatgaaaaggatgatctgatcaaatgcccaaatccttgtgtcggggaaggacctgagccggttccgatggaagaccatgacgtgaaggagagcgatgatggtggcgaggcagagcacctcccccctggttcttatgtggtcttgcaattggagaaggaggaaattctagcaccacacactcatttctgtgtgatatgtggcaagggtttcaagagggatgctaacctaaggatgcacatgaggggccatggagacgagtacaagactcccgcagctcttgccaaacccatgagagattctggctcagatcctacaccagttacaaggtactcgtgcccatatgtcggttgcaagcggaacaaagagcacaggaagttccagcctctcaagacaatcttgtgtgtgaagaaccactacaagagaagccactgtgacaagaggtatacctgcagccgatgcaacaccaagaagttctcagtcattgctgacttgaagactcatgagaagcactgcgggcgtgacaagtggctctgctcatgtggaacgaccttctcaagaaaagacaagctgttcgggcatgtcgcgcttttccaagggcacacacctgctcttccaatggatgatatcaaagcatcaggagcattggagcagcctcaggggagccaggcgatggacgacatggtggcgagcacagggtataacttcccaggcagcacgtctgatggtattccgaatctagacatgaaagttgccgatgacacacgtggttatttctcgcccttgaacttcgacccgtgcttcggtgccctcgatgactttgctcgccctggattcgacatctctgagaaccccttctccttcctgccttcaggaccggggtcgtgcagttttgggcagcttagtggcgacagctaatggagctcgtcaccgttgacaaccatgatggtgtcgatcgttatgtatgaatgttatatgtatgaccgtcttagttcttcctctattcagggagccattttggtccatgccttctttcttaagtgtacttttagtttgtggtcatcaataatgatcaagtacttacatatagatttgagaaaaaaaaaaaaaaaa

SEQ ID NO: 5376 - DNA, 1359 bp, Triticum aestivum
  unsure (1)..(1359): unsure at all n locations
  Clone ID: TRIAE-23APR03-CLUSTER832_1
accaccaacaacacaagcaggaagctcgctggccgtacatcacttgcaaccaccgttaagtgcagcaaagtacagtaattgcctcacacccatcgactaacgcgggctgccttgcggtgctgtgccgtgcctgtcctctcctctccgctgctcctcgtccccgcccaccacgccgcctgtcgccacagtggtccgaccgctctgcgccgactccacacgtagcgcgaggaatagaaggtggtgcaggctgttgcggcggaggccgtggtggcagagaccagtggtctcgctgccctcgtctggctgcttttccatggtttgtgacgcatgggggctagtgcgtcactgctgctgtaacaacagcaagaacgggtccaacgcggagcggacctccctccacaggtactaggtcattgaccggatcaaggtcgcccttgagacagcctgccccggtactgtctcctgcgccgatatcctcgccctcgccgcccgtgaccctactgtcccttgttggtggcccttactgggacgtgccactcggccgcagggactctctgggcgcaatgcatccaggggatcaaacaatgacatccctgcccccaacaaccacccctacccaccatcatcaccaagttcaatcgcctcggtctcaacgtcgtcgatgtcgtcgccctctcaggtggccacaccatcggcttgtcccgctgcaccagcttccggcagaggctgtacaaccagtccggacaacggcctggcacacagcccactggcatgtctcctacgctgcgcaactcagggaggggtggccccgctccggccggcgcacaacaatctcttcccacttctacctcgtcagctcgaccagctccaccaagttcgacaactaaaaaatccccaacaccctggggctccccagggctctccagagctcccgcggagcgagcgcccaaaaacggcgagacgggggcgggggctcaagacatacgcgcaactccgcgcaccgcaccttccagtccatcgcgtattcgagggccatcatgggccacagcccgcctcacaccgggcagcaggggcgagaggcaagaagaagtaacaactgcctcagaaactacaactactactagttgtggggaagttaaattcaaagctgcgctatttgctgtgtgtgtcttgagttgtcgtttctctctctctctctctctctatctcttgctttctgtgactttgtaattacataggtttcattgtatgcctagatataacaagattgtacttgttgactataatcaaaataaaaaaaaaaaaaaagaggcggccggtcccgattcgcctanaggagtctataagccccnaacnggn

SEQ ID NO: 5377 - DNA, 1862 bp, Triticum aestivum
  Clone ID: TRIAE-23APR03-CLUSTER83384_1
agaatttcaaaaatttcaaaaaactcaacaaactcggccgtccagcttcctcctcctcctcctccccctccttccgttcgccctgtcggtcacctccgtctgccttctccgccgaatctccccgggagtccggcatagccccatagccactctggcgtcgacccttggccgctgggtcgcgcaagatcgttggctcgggttcgcgagctcgtgcgctcgcggacggaatgattgggcgggagtgagtgattgagagggggtgagggggagcggatgaaggggaggcgcggggcggtcggcgggaggtcgtctgctgcgtctaggctgctgctgctctgcgccttcagctctgggctcggcatgctcctcaacaaccccatatccacatcaccacctaacacaggagacaagacgacgagacgcagcttgtgtcagagggttgcaatacaaagaggaagcatggggagcacaaggatataatgggagaggtaaccaggacccatggagccatacaattgttggcataagtcaatctcaacgctgcagatggagcttgcagcaaagcgaagcacgttggaactggtccgttctggtgtgccagtaacttcagaaactagtcaatcaaggaaaaaagcattcgttgtcgttggagttaacaccgctttcagtagccgcaagcgtcgtgattcagtcagggagacatggatgcctcaaggtgagaagctgctgcagcttgaagaacagaagggaatagttatacgcttcactataggccatagtgctacatccaatagtatattggacaaagcaatagatgcagaagatgcacaacatcatgactttcttagactggaccatgtcgaggggtatcatgaactctccgcaaagacaaaaatcttcttctccacgtccgtgggcatttgggatgctgacttcttacgtcaaggtcgatgatgatgtgcatgtgaacttaggaatgcttgccactacccttgcgaggcataaagcgaaaccaagaacttatattggctgcatgaagtcaggcccagttctggctgacaagaatctgaagtaccatgaacctgaggcctggaaatttggggaggacggaaacaagtattttcgccatgctactggacagatatatgccatctcaaaagatcttgcgacctatatctcaataaatcaacctatcttacacaagtatgcgaacgaagatgtatcacttgggtcatggtttatcgggttagaggttaatcatattgatgaaaggaacatgtgctgcggaactccaccagactgtgagtggaaagggcaagctggcaatatctgcgtggcatcctttgattggagctgcagcggcatatgcaagtccgtcgagaggctcaaggatgtacatgctcgatgcggcgaaggcgattcttctgtttggagtgatctaatctagctaataccctccctggcgtaaatatgtagcatcctcagtaaaccctgacgatcgtgcctcagtggctacaactgaaatgaccgaaattgcacaacaggtccgcagatggactatatttctggtagttcggtctgaggcaacacatgtagtgtagatgatacttgttcagtcgttgagagatctcagtagatgggaattgctttgtgccatcacctgtgacgtcagtagtgttagaagagagaccaaagcgagcgagttacacagctgctgtgtaccacagattaggggaaaacatctactgcaaattttgatcaattcttttgatgtcggttctttttgttatcctttgcgcgtacccctgaaagtaggatttcaattttgtcttgaaaattcaatgcaacataccataaaaaag

SEQ ID NO: 5378 - DNA, 2220 bp, Triticum aestivum
  Clone ID: TRIAE-23APR03-CLUSTER8352_1
gagatctctttttctcgttgtccatttttccccaaacacgcggacgaaggaatcacccctaaaccctcctctccccgccgccgaagccgacatggccgttcaccaccctcctccgccgcgggatctctggtgggtctcccctccaccctctgcgcggcctcctcgtatcgcaggagctcggtcggcgtcaggcgagctcggcggcggcgggggacgcggtggccgagctgaggggcgcgcgggaggacgtcaagcaggctgctgaaggtctatccttgtccttttttcccggatcacgcggacgagggaatcacccctaaaccctcctctcgccgacgccgaagctgacatggccgtccacctgctcctccgccgctggggatctctggtgggtctcccctccaaccctctgcgcggcctcctcctcgtatcggcaggagctgcgggctggcgtcaggcgagctcggggcggcggccgggggacgcagtggctgagctgaggggcgcgcgggaggacgtcaagcagctgctgaaggagaagtcctgccatcccatcctggttcgcttgggttggcatgatgctggtacttacgacaagaacattagtgagtggccccagtgtggtggagctaatggtagcttgaggtttgaaattgagttaaaacatgcggctaatgctggtcttgtgaatgctttgaagcttattcaagccatcaaggacaaatatgcaggtgttacttatgcggatctgtttcagcttgccagtgctacagctgtcgaggaagctggtggccccaaaatccccatgatctatggaagggttgatgtttctgcccctgatcaatgcccaccagaggggagactccctgctgctggtccgccttcacctgctgaacatttgcgagaagtattctacagaatgggcctgaatgacaaggaaattgttgcattgtcaggagcacacacacttggacgatcaagaccagagcgcagcggctggggtaaacctgaaacgaaatacactaaaaatggacctggtgcacctggggggcaatcttggacatcacagtggctcaagtttgataacagctatttcaaggatgtcaaagaacgacgagacgaggaccttctagttctgcctactgatgctgtgctctttgaggattcatcattcaagatttatgctgaaaagtatgctgaggaccaggatacattttttgaagactatgctgaagctcatgctaaattgagcaatcttgggtctaagtttgaccctcctaagggtgtatcactagactagctgatatttgctgctgatgaactgcattttggtgagtgaagatgacaaggctctgtttcttcaaactatttttgaggtgtaacaaattcggatccactgaagcagtattttgagttgtgtgctccattaccagaaataaaagcagcattggacagttcccggaccgaacatttatgatacttacatgttgtatcttcaaggtgatcaaatataaaacaatactaccaggctgttgcccctttgcgatatgtctgaaacagaacggtgcctagcaagcacactatgggatattttatttatctttttgtttgatcggtctccataacaccgccctcgatgaccttgatgcagatgccgaaaacaaacagaggcagaaggaaaaaaaaaagcgaaaacgttgctggtgccccctcagccggcttcagcgcaacggcgttgccggcggcgatcgcaccgatgaccgggtccagggacagcaagagagggtagttccaggcggagatgacgagcacgaggccgaggggctctggcgtaatcctcgccgtcgaggggaaattcatgagctttgcaggaaccttctggggtttcatccatttcttgagattcttcaaggcaaacaagcacgacgacttgatcagagatagctcatggacgtgtgcttcggtcttgggcttgccgaggtcggcgtggagggcgtcgcatatctccgcctccatctccgtggccatccgcagaacccctcgcagctgcgccgcccgccactccgccggccgcgtctgccccgccgcgaacctcgcccggagctcctgcacagccgccgccggggactccaccatgttatatatgtaatctagctagctcctggtgaattacctgcaagcaagccagtaaggtcggtgatatggagggaaggaggaggc

SEQ ID NO: 5379 - DNA, 1471 bp, Triticum aestivum
  Clone ID: TRIAE-23APR03-CLUSTER8377_1
gcggccggctcgggcgttccgccacctggaggaatcagactgctgttacctacacaaaaaataacacctggtccggccgtccgagcgaaagaattgtgataatggtcatcacacgattcagtcggccgctgatccgccgttcgttgacagagccctctggacaaaaagggcgggcgcggcgacttcccagggcggcttagacgagcagaaaccttccgatggtgcgagcgtagatgacacgtcgtgctcaaagaagtcgtctgaccatgacaactcatgtgcctctggtgtcctgccaccaagcatatttagaatgcttctacccccccaaaaagtactgcctggtacggaaggaaaggcgaaaaagaagtcaggctggtcatcagacgattccgatggttgctgttcagcagatagttcagatggacctttgtgcaagcagggggggcacgtggattaccctgagaggcctggcagaccagaatatcaccacccaaaacagtcaaaagacaaagaagaggtaaactatcctgagaggcctggcaaaccagattgccccttctacatgagatttggtgattgtaaatttgcatcagcatgcaactatcaccacccaaaagacaaatacccagctgggagacctgatgaaccagaatgcccattccttatgaagcgtgggtactgtaaacttagggcacaatgtaagttttatcacccagaggcttcaaatcctaccatgcagagcccaacagatgcaaaaagatctgttaccactgatgaacatcatccatctacaagaatcacattacaagactatatgcttccccagcaaccgcagtatcctgagagacctggtcagccagagtgccggtactacttgcagagaccggctgtctaagaaacatgaagtcatccgcgccgaccacttgagcaaagcagggacacgctggttaccgcatgaatgctaccaacggaaagcattgtcttgatgtgtcgccaggtgttgttagagcaggctggctggctcaagtgtgagtgtgactgacgactgaagagagaggagtaggaggattctgatgaaccaaccaaagcttggagtcgtcgtttttctgggggtctatgagcgagtagttgctagttatgtccgttttgagcgcgtttgagctgtgttggtgaaaggcactccctccctccctccatttgctatcgattatgcgcttgcgacatactctatttgtgtggacaaggccaggccaggcaatcatgaatttgcaaactgtaatcttggcacgaactacaatctcaactctctcaagtgattgctgtctagctagctaatagcaaggtgtatcatgaatgaacacggatgagatgagatgcgattactacttacttagcatgatgatgcactcattttagtttgacacttttaaggaaattgtgacgaaaaaaaaaaaaaaaaaagccccta

SEQ ID NO: 5380 - DNA, 1016 bp, Triticum aestivum
  Clone ID: TRIAE-23APR03-CLUSTER8384_1
aaactgaggagggaccgtgcactgcagtccctcgttactcctctctacctggccatccagtcaccgttctcgggtaagctggctgggactagtagcagcagcagtagtgggagcaggagctgcttggcttgctgcctttcaggtccacctacgcgggcgtgatgggtggaatccaagcaatgctgctcggatctgcggatctatagccgaggcgaggcgctgggtggggtctggcaacagcaggggcgcggcgccggcgccggcgcgggagggccacgagcgcaaggcgcgcagtgggcagccaggccggaacgccgtgatgggcgccgccaggtagtcctgctacggggccgtcacgccagactgggacccggcgccttaggcgccagcgcggcgcctcctgctgcctggggtcgacgccggcgacggagccgcgacgcctaaactcactcacgttggcgcatcgggtcgagttgattcagcggggcctaacgcgttcacaagcgaacataggcctatgacatcgtaaccaaccgacagcagaaaaattcctttgtcagataccgacagagaccaagatgatgatgtattgcagaatgtcactgctaccaggaccgcagtcgacgacgaccaatcgccaaatccttctgaccggccgcgtccatgctttggtgtcaactttgggctgagtagagctgtcagcttgggatcatcggtggcatgctccattatgtcaaccggcctctcctcttcagctaatcctagtattggaaatatggaccatccttccgatgcgaacatccctcaacaaggtggtgcatcgacttctgggatttattcaagtctggatatgctaagagacagcgtcacaacgcaagctagagcggctcatcaggctaggagaaatttgctggaatctgaagatgctaacttgaggcattcgcacaggaggattggaccccaggaaccttctgaaggcagtgtcaggtttagccgaacacttagtgttggaagac

SEQ ID NO: 5381 - DNA, 1413 bp, Triticum aestivum
  unsure (1)..(1413): unsure at all n locations
  Clone ID: TRIAE-23APR03-CLUSTER83938_1
aacgccaaaacgtttgcctcgtcctcatatagctaccgcgtccgcgggcgggtgcggtgcgcctgagattgcttaacgttgccactattgaatttctgcttccttcccgccgttgccttctccttctcgtctccgatccctaactgctccatctccccctcccatggagggccccaagggaaacggcggcgagaagcacagcgcggaccaaaaccatagccccaatactcccgccgcagccggggccggaggggacgacgtgtcggccgccgcagggaggcgggtgggcaggcggccatgccacgaggagggcgaggtggcgccggcgcgcgccctcgagcagcaggagcgggcgtacatgaggccgagcacgaaggtgagggaggacagcgaggacgatagcgcggacgctgcgaggtacgagggcaacgacgaggaagaggaagggatcgagggcggcgaggagagcgacgaggaggaggaggggaatgaggatggggaggtgggcgacgcggaggggcccgaattggaccccgcgcggtacgaggatgacgaggcgtatgcgcgggccctgcaggatgccgaggagcgcgaggtcgcccagcggctcatggcgctcgctgggatcactgatttaggggaagagatggagcatgatgttgaagatggcgaatatgaggaagatggggatagcgcacaggatgcatgggaagatgttgatccagacgaatactcgtatgaggagctggttgcattgggtgaagtggtcggtacggaaagcagaggtgtttctgccgatactctggcttcattgccttctagtaacttaccaagcagaagataaccaagacagcaacatggaacaatgtgttatttgccgtgtggaatttgaggaaggtgaatcattggttgcacttccttgcaagcattcatatcattctgactgcataaaccagtggctgcagttaaacaagccattgccatgttgcaggtatgccctatgtgcagtgcagaagtttctaccccgggtaacaacgagccatgacattctgttgtggtcgtaatgatgggcgaataatgggaagaaatagggacagcatatattttctgatgctggtgagatttaagcaccggagctgttgtattgtccaaagaaactagcaaacaagcctcgagttcgtctctctgcttttcagcccagcagactcggacacatgtacttctggacttcaccgtgatgctgctttgtgtatcctgttaggggctcatggtccatgtatgatccattgatgtaaaatagcttaaatttatagccattctttgttagacgctagttgcccattgtgatttcgtggatgtaaaataattattatatttatagtcattnttttacacncaaaaaaaaaaaaaaaa

SEQ ID NO: 5382 - DNA, 2160 bp, Triticum aestivum
  Clone ID: TRIAE-23APR03-CLUSTER8397_1
caccctcggcacatcatccatcctcactccgcacgggcccagcccaaataccctcccgaccctccacccctctcgccgcaaaccctaaccctagccccccgccccctcgccgccgccccaatccgcgccgcgccggcggccgctcccctccgaggtaaagcgcggccttggtccggggataggcgcgttccgtgatggatgggctcgggaactctgcgctgaacgcctcagaagcggtgatgaagaggcccaggagcgtggcgtccaggaggccgaggcccaaggagcagctcgcttccgagtacaaggacatatcgtgcgcgccttcgcggagcatttcccccgaagacgaggccgctgccgaggccagcggtcaacggcgcaaggagctgtacctcaacgggcctgaaggtaggggctccacccaccataggaatgccctgtccaagaagataaagaaagaggagggatctgcaggggataatgatattggccacaatcggagcagcaagcccaacgatgccaagcatattactcatggtgttcttgcactggcctcctcaagaaactctggatcgactgatgcctcgcagttgtcctcaagggacacccctgtgccagtggaaaatagggtgagaaaagttaagctcaaggttagcggacttaaccgaatcataccgaaacaagagcctgttgacgttggcatgcctggcacatcggatgtctctttccatcgccaaaagcagaaggattctggtgagcagaaacatcacagcacaagaaaggatagtcatggtaatcacgttgatggaaaacgtggagataagcatgacatttcaccatcttctgacctggttcgcaaaagcaaaagggtccctaagaagcgaactcttgattctgatgatgaagatgatgaattacgttatcttgagaaacttaaagcggctaaagcggcaccagaacagcccatggctactgaccagcctctagcttatggttatggtgaggatggtctcaggaaaaagaagctctccaaggtttctaaaaataagagcactccttatgaagtggacaacgacttcactatgtcacaatttagcagagatgttaggaagaaggtgaaactggaggataccagtgattttattgtagaggaggaatttgggttggacgagtctgatagattaattgaagctgattcaccatcgggtgtaaagattgaagctcctggcctaacaacaaggcagcgagccctccaaggcaggggtggccatggtgaaagcatgattgaatttcccgacgggttaccagctgctccatcatctagaaggcaaaaggataagctttcagacgtggagatacaggccaaaaaagcagaagtggctcagaggcgtaagatgcaagtagagaaggcagagagagagcaacaggctgaagcaatgaggaaaatattggggattgacaccgagaagaagaaggaagagaggaagcagaaagaacgtgaagacaaggaaaagcaagcaaaattcgaggaatataaaagaagctgcatccagtgcgtaatgcgaccagaaggaacagttattacattccctgataccatgggccttcctagcatatttaactccaaacctatcagctaccctcctccaagggagaagtgcgcaggcccctcgtgcccaaacccttacaagtaccgtgactccaagacaaagctcccgctctgcagcctggagtgctacaaggccgtccagggaggcgctgggacgatggcgtgctgattctacagagtcgatggcgcaagtaacgcgcaaccgcgggcggacatggaggagctggagaactgcatctcacccaatgccctgcctgttttgccgtttttgcgttgcctttgctagtctgaggattgaaaactgagcgatgacagatgatgttgaggtgcctgctgctggtttcctttgttggtcctcgtggatgtatgtatgtagtagctgggccgtgcaaaagagtctggtttatgtgtgtggcaagtggaggattagttgtgaattgtgtacagtgatggtcgggcttgacgctaaggcgttggccatgatggtatgagttgagttaactcgttatcctttagtctcaatcttttcgaaaaaaaaaaaaaaaaaa

SEQ ID NO: 5383 - DNA, 1352 bp, Triticum aestivum
  unsure (1)..(1352): unsure at all n locations
  Clone ID: TRIAE-23APR03-CLUSTER84061_1
agatctcaagatcacctccccccgtttgccatctttagttactttcagccccacctcgcctccctccatccccctccattaaagcccgcgccctcctcctccgctccattcccctcgccaccgcccagatccagaccatgacggtgccgccgtcgccggagccgttccgcgtcttcgtcgggtacgacccgaaggagcacgaggcctacgaggtgtgccgccgcagcctgatccgccacgccaccgtgccgctcgacgtgcgccccatccggcagccggacctccgcgcgtcgggcctctactggcgcacgcggggccacatggagagcactgagttctccttcacccgcttcctcacccccttcctcgccggctaccgcggctgggcgctcttcatcgactgcgacttcctctacctcgccgacgtcgccgagctcatcgcctccgccgtgccctcggacgctgccgccgccaagcgcctcgccgtcgtctgcgtcaagcacgagtacaagcccctcgaggccaccaagatggacggcgccatgcagaccgtgtacccgcgcaagaactggtcctccatggtgctctacaactgcgcccaccccaagaacgtcgccgcgctcaccccggacgccgtcagcaccaagaccggcgccttcctccaccgattctcctggctcgacgacgacgagatcggggaggtgcccttcgtctggaacttcctcgtcggccacaacagggtcgaccctgacgacccggccacgcagcccaaggccctgcactacacctgcgggggaccctggttcgacaggtacagggactgcgagttcgccgacctctggatcaaggaggccgaggagctcagggcggagaaggagaagcgcagagccgagaaggagaggctcgagctcgaggacgacgaggacgacgaggggaattgatggatgatggggccggccaacaagttcactgcattgcattggttcttttgcgccgtgggaattctttcgattcaatctgtttgttatgctggtttcttggtataggtggtaggggaggccagagtagaatagctcgagtatattggtttagtatgctcttgtgtagtagctgcaatcgatctatgaatgaaccagtcctcattgccaaaaaaaaaaaaaaaaaggctcccccatcccttccccccgagtaggaggccgtgaccgactaccggcgcagagaaccgnattacgaccttacctgagcgcctacttgcccctgtgcccggagtgccccgttgcctctatggagggactagcccctgcccctctcaggacggcagtattataaccgcggcgacccctcacacgtnt

SEQ ID NO: 5384 - DNA, 1446 bp, Triticum aestivum
  Clone ID: TRIAE-23APR03-CLUSTER84291_1
gttactccgattccaacgttagctcacatccaactccaacaaccgccgacctcaccgcccggaattctatggcctacacctcctccctccacctctccaagcacctcctcctccccaagccccaccgcgccaggccttcctcctccaggtcgccgtccttcgtccgggccggccagggtcgtcaacggcgccccgcacgtcaacgggcactccaagaaggcgcccaacggcaaggtacagatcaacggcggcggcgccgttacacggcaagaagggggccggcgtcgtcaacgggaagacgcacgtgaacggccatgaccggatccaccgtgtcggtgaccacgggcggcgggggccaggacgggacgggcctccgcgtggcgtaccagcggcgcgcccggggcgcgtacagcgagttcgcggccaagacggcgctgcccgggtgcgagaccgtgccgtgccgcgccttcgcggacgcgctggcggccgtggaccgcggcctggtcgaccgggccatcctccccgtggagtccaccatggagggcaccgcgctgcggaactacgacctcctgctgcggcacgacctggtggtggcgcaggagatcaacctcttcgtgcactactgcctcctggcccatgcccggggtgcgcgccaccgaggtgcgccgggtcatcagccaccccatggcgctcgcgcactgcggccgcgccctcgcgcgcctcggcgtcgaccgcgagccggtcgaggacacggccggcgccgtcgagatgctgcgctccaacatgatgctcgacacggccgccatcgccagcccgcgcgccgccgacctctacggcctcgacgtcctggcgcacggcctgcaggacgagtcctggaacgtcacccgcttcctgctgctctccaagccgccgtcgccggtggcggtccccgtggacgcggacgccaagaccagcatggtggtcgcgcaccggggcgggtccatggcggtggtgctcaaggtgctctccgccttctcctcccgcaacatcaacatgtccaagctggaggtcatcaacaacgaagggggcgtcggcgagccgcggcccccggtgatgatcctggacacgggcgcccgcggcgcgccgacgctgcgcgcgttcccgcacgtcctctacgtggactgcgagggcgccgccgacgacccgctcgtccgcgaggccatcaaggagatcgagaaattcgccgtgttcgtccgagttcttggctgctacgccgcggacaccaacgtctacgatctgcaatgaggagaacagaagaatgatcctcccaccatacacgtgaagtggtcgaattagctagttcggcacaatcgaattggaattggaattggacctggaaatttccattctgtaaaaaaaaaaaaaataaaaaaaaaaaaaaaaaagcttatcgataccgtcgacctg

SEQ ID NO: 5385 - DNA, 1329 bp, Triticum aestivum
  Clone ID: TRIAE-23APR03-CLUSTER84361_1
cggcgccgcagggtttttctcactgccagcacgccactccccctccccaccccccttcagcagcgcaacacaccaacgccgccgccgcgccgccagcccaccgggagcaccgccggagaaaccagccatggatcggtaccagcgggtcgagaagccgcggcccgaggccgccgccatcagcgagaacgagatccgtatcaccacacagggcctcatccgcaactacgtcacctacgccacctccctcctccaggaaaaacgggtgaaagaaattgtgttgaaggccatgggacaagctatcagcaagacagtggctattactgagatcataaagaaaaggatccctgggttgcatcaagatacaacaatcagttcagtcagtattactgatgtatgggaacccattgaggaaggccttgtaccattggagatgactcgtcatgtttcaatgatctcaatctccttgtcacctaaggagctcgacacaagttcacccggatatcaagctccattgcatgcagagccacttaaaccaaggtaccagcaagttcagcgatatcaacaacagcaccagccaagacaaaatcaaggtcaaacagattcatatgtacgtggaagaggcagagggagaggaaggggctggggtggtaggggaggatatggtggaggttatggtgggtatgataataaccaaggaggttatggtggatatagcaaccagggaggatatggccacaaccaaggtgggtatggcaatcatggaggttacggccacaaccaaggtgggtatggcaaccagggaggttacggcaaccagggagggtacggccaaaaccaaggtggatatggagggggttatggttatgaccaaggtggatatgggggatatgataatggtggctggaattacaaccagaacagaggccgtggtggcggtggacgaggaagaggcaactggggatacagtggtccaggatacgagcgcggtggacgaggtgcaggcggcccaggtggcccaggcggcaggggatacgtgcggggccgtggtcggatgggtcctggccgcgggcggggcaaccagaactattaggtcacatagtgctgtattgttgcaaaaaaagagagaaaaaggtacgcgttctgtgaatcggaaccgaaccttgcgctgtttcattgtgaaccatcgactaggcttcccagtttttagctataattgccaatggtatctgtaccattgcttccattctgtgggattttgacaagcatgttatgttgttcctgggacacctttactgtatctaagagtgcagttttgaataaaaaaaaaaa

SEQ ID NO: 5386 - DNA, 1717 bp, Triticum aestivum
  Clone ID: TRIAE-23APR03-CLUSTER8438_1
gcccccgagtccttccccttctcctctccaactgctagatctagagtagccccgttaaagcccaaacaaaaaccccgccgcgagatctgcgcctatctccaaaatatcgcctagaccgcctaaaccacaacccaaatccccgctctgcgctccgcgcatctcgccccccccgacgccacgaccggcgtcgcggcgccgccgcgtcctcgccgtcgctgccgccgcggccctccccgccgtctggtccgtcggggacccttcgcgcccgggcccgcgcgggcgcaggccgctggggctagttgacgatctgcccgtccgcccatgccacccgggcttcttccgctccctccaggcccacgtgctagatctggcgtccccgcccgccgccgaccctcggccctcgcttcacggctgcagtcagtagctctacgactgcctcttgctcttcgccccatcgaccccgggcttcggcgggacggtggaccagaatgctgttctgtcgtttctggaccccgggatcgatatggttctgggcagtagctcatttcaggcttcagatgctgatccgcggcatcgcatcggtttgtcgtgcattgaggttgaaggggaccagaccttgattgctggcgatgacctgattcagtcagatgtgatattgggatccaaaaagattgaggctcctgttctgttcccgagggattgcgcatgcggctaatccatccaacagcttggcttttaaaggttctatctccctcgccatcacgcgtattcaggcaaacccggaggctaatctggcatccgtcccatctctcaccgggtcggccgtatcacaggtttccgttatgcacgctaggaataatgcccgtgtgataatatctggatcactggatttgtttagcaacaggttgctaaagtctggtgtgaagaaggctggcagcaaaatgagccatgacaaagcctggaaatgaacaatttgtgacagagacgagcaaatgggtcttccatgagaggggtcatctgaaggcaagtgaatgtaatgcaccataaggttggggagacaaatgagcctagcatgtaccgcatcaatgatgacttggaatactcagttgagatatatgaatggtctggtacaagttggaagccatatgttgctgatgatgttcagattcagtttttcatgatgagcccttatgttctgaaaaatatgtcaactgacaaatcggctgtatattcagcatccttcaaagttccagatgtttatggagttttccagttcaaggttgagtaccaaaggcttggatacactggcctctctcttgcaaagcagattccagtccgtccatacaggcatgacgagtatgagaggttcataacttcagcgtttccatactatgctgcctcattttcaacaatgggagccttcttcatattctcagttgcgtacctgtatcacaaatagatagctcatcaagtagtggaagtaaatcaaggcggtgatggaattgtgatgtcataagcatggtgatcttaggtgcaattttatggaaccatctttttgtagcgccaatctgtagtacctttatttttaagaaatgggcttctccctgccatcaacttaaataaatggaacttcaaccatgcccccaaccattattaacatttttgctaatttccacccccaacatttaaaaaaaaaaaaaaaaaaaaaaaactcgag

SEQ ID NO: 5387 - DNA, 1227 bp, Triticum aestivum
  Clone ID: TRIAE-23APR03-CLUSTER84390_1
agcatcggctagccaagtccagtaagcatcagcaaatctgacgtaccccattcgtgccccgtctccactcccgctaccgactccggcgaccaccatggccactcgccggagccccgccaccacccaccaccgactcctcctactcctcctccccttgctgctaatcggctcgttcctcctccccctctcgtccgcctaccgccccggcgacatcatccccatgctccgctccggccagtaccacggctcgaggtcggtgtggttcgacgtcatcggccgccactgcccggtcttcgcggtcaaccgggaggtgctgatgccgatccccaagccgacggggttcaccggtgcggatccgtataagataacatttcagattggacacgaaaagttccatgttccttggctttatgttattaatcgcaaaagctctgaagttccactgattgatttccatttaaaatacactggaaacgatttgcttggtgttacggctaaagtagtggacatgcctcaccattttgtggaacttcatcctgacataaagaagaatttctgggatccacagaattggccaaaatatgtacttgttagttatacatgggaggaacaatcagagatagatgttactgcaggattctatgtgttatttggatctggccttgttctttcgttcatccttgcaatctatgtattgcaatcatctcaagataaattaacaaggtttgtacgagaagcggtttctgatagcagtctacctgaaggaggggttgcaaaggttgagtgatgtttccgcgaggggctgttggattatcaacaaatgtccacttatggaaacaccgacaaagacattgtgaacttgagctttcttgggagcgtggacaatagcatgcatctgaagaaccggtgaaccatagcgagttaaatgagagatgaattataggtttttccttgctataacggaacatttagcaaactgaagtatgtgcagttgctagctcattacagttttgatatatgacctgtgtgatttcaatgttgcaagaatttgtcttctacatctacattttgtagaatgtgtaagtagaaacaggcaccgtgtacacctctacagaggaaaagattggtgcaaatgttcattcttttcatccggtggaaacaccaatcctcccttgaaactgtactgtttgtgttggttacatgggaaatgaacctgggttaaaaaaa

SEQ ID NO: 5388 - DNA, 2828 bp, Triticum aestivum
  Clone ID: TRIAE-23APR03-CLUSTER8439_1
ccaccacgactagtaccagggccgggggggcactcagtcgcagcgaagaagggtttgtcttgtcggccttcgctgccacctcctcccccgccaccgcgcccaccttctcggacgctcggctccgccgcgccctccccgccgtctccccgcgccctccggcgagcctgggggtcggcgacgccctcgccggacccccgagggaggcgggctcccggcctgctgagccctggcagcagggctgctgccgccgccgccggatcgcgggcacggccaccccgatccgcgaggactagagccccagccagcggatttgcgttaagttcttcagcggaacgggaaccgttctcatactaagtcccatcgccgccaaaagaaactgacagtaccaatggccaaggccggcattctccgccggagcaggagaagaccaagatcaggcgtaggcgtgatgctcgtattctcaccaggtatcggtcttgacctcggttacgtgcttgggtgtgttgcagcctacatacactacctccaagtgcctcccgccttcgatccgtaggtggcactcgtacgcggagtagtcccgtcgcaagcacggctgagtcctgcctgcacatcggccgcccgtcaccacgtgatcaatctctgactcccaggtcctcatgaacttcctaagatttatgttacctcacaccctcatcgtcctgcaaggctcccaccaggtattgccgtatctgaaacagacctctatccgcgacgattgtggggtgaacctagtgaggatcttactatccagccaaagtaccttgttacatttactgttggaatcgcgcaaaaggcaaatattgatgcagcagtcaaaaagttctcggagaacttcacaattatgttgttccactatgatggtcggactactgaatgggatgaatttgagtggtcaaaaagggccatccatgtgagtgttagcaagcaaactaagtggtggtatgccaagagatttttacatcctgatgtcgttgcccggtatgactacatatttatctgggatgaggatctaggtgttcaacatttcaatgcagaggagtacatcacgcgtgggacgaagcatgggctggagatctctcaacctggtttggaacctgatagaggtctgacagggcaaatgcctaagcggcgtggtgaccgggaagttcacagaggaactgaggagaggccaggctggtgttccgacccccatctgccaccgtgtgcagcatttgtagaaattatggcaactgtgttctctagggatgcatggcgctgtgtatggcatatgattcagaacgacttgatccatggatggggtcttgattttgctcttaggaaatgtgtggagccggctcatgaaaaaattggagttgttgatgctcagtggattgttcatcagggtgttccatcacttggcaaccagggcaagtcggagaatggaagagcaccatgggaaggggtaagaggacggtgtagaaaagagtgggggatattccaggcaaggctggccgatgccgagaagaagtattacttggatcaagggatcacgccaccaaattcgacttcagtctagacgaaatcacacggtgcacaggaaccatattaggtttctgttcaggaaacctggcccttacgtgctcagtatcgttcatgaaaatagcagctgcctactagtatagctgaagctccggggccagatctgtacatgggttacccacttaccacgacgaccatcaagagcatgttgcagagagagacgcatgctaataatcagacttgtgtactagtaaattattgtaccgatgccacttatggtggatgcagaatatgagttagaagtacatcttatttagacacttttgcaatgcaaaggtccaccaaatactggcatgcatacacatgcaggagcatgagcagataagtatcactgtaggtaggattgtatcacgctggtagtcgtcgccggtgggcaggacgcaggagctcagtagtagctgtgcttcttgggctgcgcccacccgccgccgtagccgccgccggagtacccctgggtggtggagctctcgtacgcctcgtactggctcccgccgccgagctgctggcggcgctcgtacgcggagtagtactgcgtgccgccgggcatggtgctgccggcggcgtatttatgcatgccgtatccgccgcccagcacctcctcttcgcaagtcgctatcctcctcgctctccttcgtcgctctcgtatccggcctggttgtactgctgctgcttctgcatctgccggcgttggacaagagcatcataccctgccacgtcaccgccgccgcacccttgctgcgacgggtacgcattgtacccgccgacgtagctcccatgcttgttctggacaagcgagtcgtaccctccgacgccgccggcgcacccttgctggtacgacgccttctgcccgccataggcgccgtgcttctgcgctgcgccgccgtggtaggaagcgttgtaccctccggcttcagcgccatgctggtaacccatctgcccgccgccatagccgtgcttcgtctgcttcgcgccgccgtactggaaagcagcgtcgtaccctccggcatcagcaccgtgcccgtaagccttctgcccaccgccgtagccgtgcttctgcgtcgcgctgccgtggtgggcaccgccgtaccctccggcgtcgctcccgtgctggtacgacgccttctgctcgccgtagccgtagttctgcactgagctgtcgtggtggacggcgtcgtaccctcccgctgcagcgccgtacgccttctgctcgc

SEQ ID NO: 5389 - DNA, 2285 bp, Triticum aestivum
  Clone ID: TRIAE-23APR03-CLUSTER8443_1
tgcaaggcgccccggggcccgcgccccccgccgctagtcgtcctcctcggcgcgggggcacacacccccccttcacagtgcggtgccatgccggaagcaccgagtgcccagccagctcccgcctccggctacgcccccggggcgcaccgcgaggcgctcgacttcatcgagcacgtcacggcgaacgccgggaaggtgcagcagcgcgtactcgccgagatccttgcgcagaacgagacggccgagtacctgcgccggtacggcgtctcctccagcagcagccccctcgatcccgtagacgccttccgccgctgcgtcccgctcgtgacctacgaggacctccagcctgacatactccgcatcgccaacggtgactcctcgccgatcctctccggcaagcccatctccgagttcctcacaagctccggcacttccggaggggaaaggaagctcatgccgaccatcgccgacgagcttgacaggaggtcgctgctgtacagtctactgatgccggtgatgagccagtcgctgcccgggctggacaaaggcaaggcgatgtacctgctcttcgtgaaggccgagtcgcggacgccgggagggctcgccgcgcggccggtgttaactagctactaccggagccggcagttcctcgaccggccgcacgacccgtcgtccgcgtacacgagccccaacaaggccattctgtgcgtggactcctaccagagcatgtacgcccagctgctctgcggcctcgtgcaccggacggacgtgctgcgcgtcggcgcggtgttcgcgtcgggcttacttcgcgccatacgcttcctcgagaagcactggcctctcctgtgccacgacatccgcaccggcgagctcgacccggagatcaccgaccacgcggtgcgcgacgccgtcgggaggttgctccacgccaacccagccctcgccagcgagatcgaggccgagtgttcgaagccgtcgtgggagggcatcatccgacgcctgtggccccgcaccaagtacatcgacgtgatcgtgaccggcgccatgtcgcagtacatccagaccctcgagttctacggcggcggactgccgctcatctgcaccatgtacgcttcttcggagtgctatttcggcctgaacctcaaccccatgtgtaagcccggcgacgtcgcgtacaccctcatccccaccatgtgccacttcgagttcctccccgtccattgcagcaacgccaatgccgagccgagccaccgcgacctcgtcgatctagttgatgtgaagctcggtcacgactacgagctcgtggtaaccaccttctcaggtttgtgccggtatcgtgtgggcgacgtactgagggtagcagggttcaagaacgaggcgccgatgttcagcttcgtgcgacggcggaacgtggcgctgagcatcgactcggacaagacggacgagacggagctgcacacggcggtgagcagcgcggtgcagcacctggcgccgttcggcgcatcgctggtggagtacaccagctacgccgacacagccgccatcccaggccactacgtgctgttctgggagctgcgcgagggcagcacggcggtgccggcctccgtgttcgaggagtgctgcctgtccgtggaggaggccctcaacagcgtgtaccggcagtgccgcgcctgcgacaggtccatcggccccctcgagatccgcgtggtgtcggagggcaccttcgagaagctcatggactacgcgctcagccagggcgcgtccatcaaccagtacaaggcgccgcggtgcgtgcgccccgggccggtcgtcgagcttctggacgcgaggatgcaggccagctacttcagccccaagtgcccaaaatggagccccggaaacaagcaatggaacacctccaaggagctgctgagcatcggagacgcctagcttgcttgctagatagccagctcacgggttggaggaggatgacaatgcatgacatgcatcatgatcaatgcgttactgtaggggctacgatatctcgtactatttcaacttctggggcagtgaggaatagttatcaaaattatgacttagttagctagggttcctacgtatgtctgctattatttttgtaatcttctctatttcggccgcattttatgtagaactacctgtcaattacttttattaaaccaccacgtacctcaagctgcattccaaatatagtttatcccaatgttgtatggacttctagtctctatgagaaaggacccaattatctacataatgcaaaaaaaaaa

SEQ ID NO: 5390 - DNA, 1592 bp, Triticum aestivum
  Clone ID: TRIAE-23APR03-CLUSTER8498_1
ccacactctcaaccacctcgtccccccggccgtgacaaactctgcctcgccgcagcagccgcacgcagcagagcatggctcccccccgcggccgcctcctcgccgcggcattgtgcctgctcttcctcgccggcgcagacgcgggcaccgtgggcgtgaactgggggcgggtggcgaacgacctgcccggcccggcggcggtgctgcaggtgcgcaagcaccacggcatcgcgcaggtcaagctctacgacccggagcccgccgtgctgcgcgcgctcgccggcagcggcatcaaggtggtcgtcgcgctgcccaacgagcagctcgcggccgccgccaggcgcccctcgtacgcgctcgcctgggtgcgccgcaacgtcgccgcctactacccggccacgcagatccagggcatcgccgtcggcaacgaggtgttcgccacggccgccaacgtcacggcgcagctcgtaccggccatgatcaacgtgcacgccgcctttggccaggctgcaacatggaccaaggccgtcaaggtgtcgtcccccgtcgcgctctccgcgctcgccaactcgtacccgccctccgccggcgtgttcaaggaagagctcgcgcagtcggtgatgaagcccatgctcgacttcctggcgcggaccggctccgacctcatggtcaactgctacccgttcttcgcctacgcggacaatgccggcgtcatctcgctcgactacgcgctcttccgccccaacgccggcgagctcgactccgggagcggcctcaagtactacagcctcctggacgcgcagctggacgccgtgttcgcggccgtgggcaggctgggcagctacaacggcgtgcacgtggtggtgtcggagacggggtggccgtccaagggcgacgccaaggaggttggcgccggcgcggccaacgccgcggcgtacaacggcaacctcgtccggcgcgtgctgtccaggaacgccggcaccccgcgccgccccgacgcggacgtcgacgtgtacctcttcgcgctcttcaacgagaaccagaagcccgggccgacctcggagcgcaactacggcgtgttctacccgaaccagcagaaggtgtacgacgtggagttcgtcctcggcggcggctccgtgggagggaaaggcaacggcggcctcgggtggcaggacaacggcgccgcctacgtcgtcaaccaggcgcccaagatgggcaagtgcgagctcccctccacagtttgaaacaaagcaagcaaatgcggcaccctccacgcatctcgggatgcgagattgatttactatgtaccgcaggtctgccagagtgcatggaatctctctctgctccttttctttggtctttgcccgctgcttgactgctgcagcgtacgtagaacattggtggtgtagtgctgtagccggtcggctgtgcgcctttctgcagctttggttcatggggatatctttgtttaactgctagtagtctctgtaactatgcttttactctaagcttggattattacttactagtatagattaattctaagtatagtaatagccctttgtgcccccaaaaaaaaaaaaaaaaaaaaa

SEQ ID NO: 5391 - DNA, 1346 bp, Triticum aestivum
  Clone ID: TRIAE-23APR03-CLUSTER8502_1
gggcgctcccagctctagcagtcccggctttccctgctcgcctcgcagccgccgccgccgccagccatgggtcgcaccaaggacgagctcctcgcgcgcctcgaggagcttaagatcgatttcaagcgctacgaccacccgcagctgttgccgtcccggctgtcccccctccccgcgcagacgcccccacggccgctagccatgggtcgcaccaaggagcgagctcctcgcgcgccgcgtaggagcttaagattggtttcaaccgatgcgaccacccgaatgtgctgccggtcgaggaacaggccaaacatgtgggcatttttggagctcctgtggccaagaatgtgcttatgaaggacaagacgcatcgcttgtgtattgtttctggacttgttcacaccgacgtcgacatgaaaattctgtcccagcgtcttggcttgggaaaaggtggtgtgcgaatggctcctgaggagaatttgcgtcaagtgcttcaggtaccgttaggatgtgttactccgtttgcgctattcaatgagtccgcgagtgccgtctcattattactggaccaagggttcaagtctaaacagagctgctacttccatccactgacaaatgatgtgactattgccctcagttcaagcaacctggacaagtttctcctctccattgggaagcaaccagcttatgtagacttggaggcctcaccagtggtaggtaaagataatccccctgatctagcagatcttgtgccttctggtgcactctgttcctcagaagaatcagttgagaatccgactcctaaagatgctcctcaagtcaacgtacccaaacagaaaacgtgtctaccagaagtgaaggctaagcccaaagttcagaacaagggtgcagaaagttcagagagtaaagttcctactaataatggcgcaaatgttgagatatttgcaagtgatgtgcttgaggtcatcttcccattgttcctgtctgagacatcaaagaaattgaatattaaacaggaagagcttactcaaattttaaaattagatgactttaaacgacgagctgctccagatctggagagtgcaacgaatatgttcaaaaacatggcatacagtgcaggatttcacgctggcttcgataccatgctcaagtcgggtttaggtgggatgccctctcggaaatagtgggttaattcgatatagaagactgtgagttgattcagtcaatttttgtatgccccttggtgtaaaatcaaatcataccatatagtacttattatgttgaatgattcgattgaatgtatcaccttaagccacaaaaaaaaaaaaaaaaaagcttatcgatccaaa

SEQ ID NO: 5392 - DNA, 1834 bp, Triticum aestivum
  Clone ID: TRIAE-23APR03-CLUSTER856_1
ccaaccccgtctatcgccagacgcaaaaagggacgaaaaaccaaacttctcccgcaagactggctcgcaccaaatcgcatcgcccttggagtcgcccctcactgatcccttggcgtcctgcttcccaagccacagcccccaggcccccacgcccagctcctcccgctccgatttcacagccggcgagctagccatgtcgattcggccgctgttgctgccggagccgccgggcgaggtggatcgggcgccggagatcttcgcgggtggcgtggccgcggtgcgccgcgcagttgtcatcgggaacggctgcgccggcgccgagaaccagtgcctcggcctcgtccgcgccctcggcctggccgaccgcctcacgctctaccgtattatcaggccaaccggaggaatcaacaagtggctgcactttctccctatctccttgcataaaatggtggaccaagtactcagacatatactgtctaacacgacattcacaacactgtttcaaggaaaactgtcggcaccttatcctgtcagtaatgttcaatctcttggattgtcttctgtactggaagcagattccaaaaggatagcgacaatggtccgtgataccttcgagaaggaaggcctggcgatagttgttgcttgtggccgtgataccataccatatgcaagctctgtaaggtgtttagctccagataatgtctttgtcattcagatacaacaccccaggtatcgccttgataggtttgatttggtggtgactcctcgccatgattactacgctttaactgcaaagggacaacaagaagtaccgtggcttttccggagatgaattactccacgagaaccacccggtcctaatgtggtcctgacgtctggagcacttcaccaagcagattctgctgcactacgcattgctgctacaaactggcatgatgaacttgctcccttgccaaagccattggtagtagtaaatattggagaaccaacaagaaactgtaattatggtgtagaccttgccaagcagttggtaagctcactgcacaatgtttcagagacctgtggaagtgtcagaatttcattttccaggagaacgccacaaaacgtgtccgatcttatattgagagagttcagcacacatccaaagttctacatttggggtggtgaagaacctaacccacacctagggcatcttgcatgggccgatgctttcatcataacagcagactcgataagtatgctaagtgaggcgtgcagcactgggaagccggtctatgtcgttggaactgagcattgcaggtggaaattctcagattttcacaacactctgcagaaacgaggggctgttcgtcctttcactggatcagaagatatgtcagacagctggagctaccctcctctgaacgatgccattgatgtggctgcacgggttcgtgaagtgcttgcacaacgtggatggacagtgggttaatagcggtcgaagcagagaaaaagagtgccatttttgctcagttacgttccaagcccagacaattcagagcctgcatttcagttatcttagttgcatctgcatgaggattttttttgccatatgaccgttgcaagacgacatcgcttcttttcaaaagatggctatatttttgggaacatactgtgtaaagttttgagcaatcacacatagacagcagtgtttattcttggcatattcatgcattattgtacctagtgttatgctgtaaagaagccgatagaagtgcgaacggaagttaaaaatctttgtccttggaacgaggtgacatcataaaaaaaaaaaaaagaatatcttaaccgtatc

SEQ ID NO: 5393 - DNA, 2269 bp, Triticum aestivum
  Clone ID: TRIAE-23APR03-CLUSTER8608_1
aggcccccggcgcccttgcgtctcgccttcgtcgcgtcccagtccagttccctcagtcccgttcctccggccgcctgggccggcctgcatcctccgttcgcttcctccgctccgtgtcatctctgcaggcaatccgccatcgctcgcccgggtgtactgaccaagtctgcgatgcaatcatcgtaacttcctgtttccaatgggccaattgcaattactcaggaagctaggcatgcttcagagtctactttaatcctccagcgtcttctttgagaccagtcttctttttcacgatgcggtgtaagaacaaaaagtgttatgcaatttacaaaatctgctactaacctctctcacaatagcaatgaataaggacgccagagggcattcttaggcgatttttgtccgccccagggtcattgacattttttcttgttcttcggagttcccttagcaaaagagaactagaaatttcaaagccgacaagctatcacataaaatagcagagttcccgaagggcttacgaggctattaatccagctcagtccattgtttgaaccgcattaccaaagactgatatcgcatagattctaggaggcatcattgatgccgtttccatgataccgtgtaacatctgatcttcagatagtcactctgcgtggatgatttgggtgaatgttgctacggtcagagagctgttacgtcttcctcaggcagcggtggttccaaagcaaagactagcctgccctgctttttgccaaagtcacggcgaacaccatactttccttaaccattctttccgggctctttattcaaggaagtgaggtaggctggcatgacaggttgcttcttgttgacattgaccattctggagaagcaaactcaatttctcgtcctaaggaacgccttccaaaggccaaggcctttctctgtcttcctgcaaaaaatgcagcgaatgaccatttatgttcccgccagcggcagcatgggcactgattgcacctgcagacgtggcaatccctccatgaccgaagaagaagtgattacaagaccgtcgtatcaggatagttcgattaagtaccgtttgaaggggtttcatgagactggtcgcccgctatggcccgtcgtctgctgttagtacttgcatctgtgcaatgttaatggtcaaccaagctgatgatgttgtaggtagtaatctcgtctatggcttaggcctgaagatatgttggtcctgatgtggatgctatgaaagctgttcgtcggatgcctactcgaaacgatctctcaagtactttgaaaccgctcttggtgactacaaggcccagctggaggaggatcctattgtccacaggcacctctcgtctctgtatgataccctcctggagcagaacctgtgcaggctgattgaagcctactcaagggtggagattgcgcacgtagcagagatgatcgagctgccaatcgagcatgttgagaagaagctgtcacagatgatcctggacaagaaattcgcagggactctggatcagggtgcgggctgcctcatcatcttcgaagacgccaagacggaggcgatcttccctgctacgctcgaaacaatttcgaatgtggggaaggttgtcgagagcctttacatgaggtcagcaaagatcatggcttgaggagatgttttgttccccagttaaatcttacacttgagctctgctagagtctccaggacatgaaatgcctgtgtgttgccattatttattgcttgcaaattgtcttctgttagctctataaaatgtctatgtctgcgtgatggaaatacagttagcacttgctgactctgatgttagaaacgagtttaacatgccatcagcggcttacagtgctgcctggatgccatggagtttgaaatcatggtgtgcatggaaggactgaccgaagtgctcgggtggatagaggtaccggtgattacgagtcagggcagtgatatgatgagatgcacgagccttgttcaggagcgtctgagtgtcaggaagagagtttgtgagacataccatacgttggcaaactttacatgctgtatagattcaaaagtccttttgatctaagtcgtttaggctaaccctgtgtaaataaactctatttggtgaagtgaaatctctctttttctcgcacaaaaaaaaaaaaaaaaaaaaaaaaaaaaaaaaaaaaaaaaaaaccaaaaaaaaaaaaaaaatgttaccccgccccccccgggggggggcccggcccattctcctctaat

SEQ ID NO: 5394 - DNA, 1961 bp, Triticum aestivum
  Clone ID: TRIAE-23APR03-CLUSTER8628_1
aacctccccccggccttcctttctcttccacgaacaccggctcttccctcgtacaccgccgccgccgccgccgccgccaccatccccacaatcctctctatgcagcaggagcaatcaaacaaggagaaaaaggataaaaagaagaagaaggagaaggagccgaagccggcggccgcggccgaggccgaggcggcagcggaggaactatccaacaagagaaagagggataaaaagagcaagaaggacaagaagcggaagctagcggcagaggccgaggaggcagcggcggaagaagaggccaagagcagcaagaatagaggggtggccacagaggaaccggaccaaggagggtccgtggagaagagcgtggcggtgactgggaaggggttcgcggaccccaagtatgcgccgctcaagtccttcgccgccgcggcgctgccaacccaggtgctcgactgctaggtgcgcttctgctgcaaggcgtccgaccggccgtcacccatccaggcgctagcctggccgcatctcctcgttggcaccgatgccaccggacctggaaacaccagtgcgtttggtgtgccggcgctgatgcacgtcaggaagaagctgagtgaaaaaggcgccaaggaggggttgccgcgatgcctcatgctggctccaacaagggagcttgctcagcagatcgcagatgtacttactgaagctggtgcgccatgcgggataaattcagtgtgcctctatggtggaacatcaaaaggaccccaaatatcttcccttaaatctggagttgaaatagtcataggaactcctggtcgtatgaaagacctcattgaaatgggtgtttgtcgtcttaacgaggtttcttttgtggttcttgatgaagcagatcggatgctggatatgggttttgaacctgaggtcagggcgattttaagccaaacatcatcggtgcgtcagatggttatgttcagtgcaacatggccttttgctgtccaccagctagctcaagagtttatggatccgaatccaataaaggttgttgttggatcggaagatctcgcagctaatcatgatgtgatgcaaattgttgaagtattggatgatagagcacgggattcaagattagttgctttgctcgacaagtatcatcgagcacagagcaaccgggttttagtttttgtgttgtacaagaaagaagctgggcgagtagaagcaatgcttaataaaagggggtggaaagctgtttctgtccatggagacaaggctcagcatgatagaacaaaagccttatctttatttaaagaaggaaaatgtcctttaatgattgcgacggatgtggcttcacgaggacttgacattcctgatgttgaagttgtcatcaattatagttttcctttgaccacggaggattatgtacacaggattggaaggacaggtcgtgcaggcaagaaaggtgttgcacatacattcttcactcaagcggacaagggacttgctggtgagcttgtcaatgttttacgggaggctgatcaggttgttcctccagcccttacgaaatttggcacacatgtgaagaaaaaggaatcaaagatctatggttcccacttcaaggaaatcacagcagatgctcctaaatcaacaaagatcacattcggtgattcagacgaggagtaactaacttgctttgctggtgttggtcatacaacagtagaaaattcatccgataccgtagtatcatttagatctaggtcaatcctttacttgttttcctgagggtggtttctatgttctttttggaagtgaagaaaaaacagtaaagcttgaaatgtaccaaaacagtatcggcagcctattatgtcaaagcctagtgattccgtggtgcacttgtttgtttccttggaattgctgcactattatcagcatataaatttgttcacgtgtcagaaatataacccttaagt

SEQ ID NO: 5395 - DNA, 1487 bp, Triticum aestivum
  Clone ID: TRIAE-23APR03-CLUSTER866_1
ttcaactagtaggctggcagacgctctcaagcaacaatctcaagtagtaggctggcagttcttctcttcccattgaaccatctgtacaagggagagaaaatcctgaagcctgactatcatcctaactagctagcttggtagaactatctcattgtgatctcctcatcaactccaaaggtagtcttttttttgagggggactccaaaggtagttaagatcttgcaatgggtggtctctctcttcagcacccgtgggcctttgcctttggcctcctaggcaacgtcatctcgttcatgacctacctggccccactgccgacgttctaccgaatctaccggagcaagtcgacgcaggggttccagtcggtcccttacgtggtggcgctctttagcgcgatgttgtggatctactacgcgctgctcaagtctgacgagtgcctcctcatcaccatcaactccgccggctgtgtcattgagaccatctacatcatcatctacctcacctatgcaccaaagcaagccaagctcttcacggcgaagatcctcctcctcctgaatgtgggtgtgttcggtcttatcctcctcctcaccctactcctgtcggagggcgagaagcgcgtcgtcatgctcgggtgggtttgcgtcggcttctctgtcagcgtcttcatcgcgcccctcagcgtcatccgccttgtggtgcgtacccggagcgtggagttcatgcctttttccctctccctctccctcactgtcagcgccgtcgtctggttcctctacggcctcctcatcaaggacaaatatgttgccctgccaaacattcttgggtttgccttcggtgtgattcaaatggggctttacgccctctaccgcaacgccatgccttcaccggctcccaagcaggtggacgatgctgatgccatcaaggtgcccgagcatgtcatccacatcgctaagcttggcccagcagctgccatcgagctcaacacacacaatcccatggaacgggggatgccaccgccgatggaggataacggcttggcctgcgccagcgacatgaccaaggggggcattgacatggttgagaaagcaacccgcgtcgagcaagtctaggcagtcatgcgttcatgcctaggatatatgcgtgcacttaagccatgatgggcaggggtcgagcaaaggagctatagggagagaaatgcatgcgcgtgagcttgtgatttccactgtcgacgttccattagttgctcgagccagttattttatcctggtcgtattcattagtatgttcatctatcaattccatgtaatggtcttattataaaagttgccattttctaatgaagcatagcaggataagaaaatggcatctcagtccatataaaaaaaaaaaaaaaaaactcagcttatccataccgagcatacctccagatggcatgcgagtacccgattctactcctatagctgacacaaattacgatcgatcacatg

SEQ ID NO: 5396 - DNA, 904 bp, Triticum aestivum
  Clone ID: TRIAE-23APR03-CLUSTER8674_1
tcacttaactactattctttttttaggagaatcggaaacgattttattcataaaatattcggtacattacactaaaaggagtttttttttttttttttgaatctgaaacgatttttttcataatatactcggtacattacactaaggagtcaggacaaacgcacgcggcacactactcgtctcacacgtacacgccacgcgccactccacgtcaccaccttgacacgtacacaccgtggagccgtcggcgccgtcatcacttgccgtcggctgcctcctcggccgcggtcttgtcgcgttcttcctggaccctggcggcgatcatggcggcctcgtgctccgcggcctcgagcaggaagctgccgcccttgtcgtccacggcgacctggagcggctggcagccgaggccgtcggcgacggcgagcatgatgcggcgcatctcgccgcggaactcggcgcggtccacggcgccgctgtggtcagcgtcgaactgctcgaacacggcgtcgtagagggccgcgacctcgcccgggagcggggccggctcggcggagccgaagcccgcgccgtcgaggaggcggaaggactcgagcgcgcggcggagctcggcgcgggagagcacgccgtcgccgttggcgtcgagcgcggcgaagcgcgcgtccacgctgcgcgcgaaggccgcctcgtcggccacgaaggaccgcaccgtcgacccgtccaggaccaccactctcatctcgtcgatcgaacgccggcgcctcactcgcgctcgctggacgcggtggctctgctcgtggcttgttgaatgttgaggagctgctagagagtggagtggagtggagtggaggcttccgacagcggattttggttttgccgtgggtcagtggatggatgggtttttgtg

SEQ ID NO: 5397 - DNA, 1639 bp, Triticum aestivum
  Clone ID: TRIAE-23APR03-CLUSTER8675_1
cataactggtactgccggcattatgcgtgttgtaatgagtaggagaagatatgggtgagagcacgagtgggtatgagatgtagttactagtgtgatttaaggggtgtgtgattgtttttctccactcttcactaatcgcgggcggtgcgcgtctccggcgccgaggagcgctggggttcgtgggacaggggggagtggcgtggtggcggccgcgacgagaggcggaccggcgggcggcacagtgtagaggaggagaagttaagaagagtagagtatggataagtatgagtcgcgaaccttactagcggacgacacccctgagagggcgggtaaggagcacggggagacacgacgcacatgcagctggggtagagcgccggaccggcgtggtcgcggtgggtgcgagaggggcgaggccggcgggaggggtggtgtggaatctctcctcccccgcctccacagcgccgccgtcggacgttcgcagtgcctcaccaatgttggggacacgagtggcgagaggggagggagcgaaaagagtagccgaggccaggccccgcacgatagacgagagcccgtaccatatatagggtggaagcggccttctattaggggtgcaaagaaggagagatcgcctggggggttttttttttttttttttttgtgaaatgaactggaatattcatagttatagattagaaattcggacaaagttaccagctcacttgcaaagttttgcttttttttttttttttattgaaaccccacatcgaccttgacagtgtgcctgtctgcaaatgaactgtaatatatcatagttgtagattagaaattcggactaagttaccagctcaccagcaaagtttcttctttcacttgagccaaaagccaaaaggaatagaaaagtacagtaacatccatgtgagatgtcactacttgttgatttttgaatggttgcccactgatgtagttaccctctgtttactgacgtcatcttgcaaatgctgcataattagctgctgctcccagtgatttcgttgtaagtgctcttgatgttgctgatcagagtttccctgtctggctgaaagatgaggttgcgatatgtgaaccatcctgtgtacccgattccaacgagctccaacacaccaggcaagataggaagcttgtcaatggacttgagcgcccccactgctgtccagagcgcgacgagcccggcgacgccaatggtggccacggcgtacttgtcctcaacttttgcccacgcgtcctgcgcagccttgaggatttccggcgtctccgccgagccgtcgcccgccctcaccgcgacgctccgtgtccgtgtagctaccttggtggtgcctatcgagaaagcgacgctcttggcgccggcgcagctgcgaggcagcggggcgagacccagtggcgcggcgaagcggcaggtggcggccatggtaggcagtaggtggtggcccgtggaatcactgcctctgttctgcctaggaggagggtaagatcgcgggcgtgatttgggagtaggatttttgtggtgaggtgaagcaaagattttggttggatttgggcgcggcgaacaccacacgttggcgggcttgagattgggctacggatagagctcccaagtaat

SEQ ID NO: 5398 - DNA, 2037 bp, Triticum aestivum
  Clone ID: TRIAE-23APR03-CLUSTER8746_1
gtctcgagtttttttttttttttttttgttagcagtcatatgtattatcagtcaacggaggaaagataaaatgtcgctaactggaagttcgacagaaaagaggtgttcgacagataaaatgtctacactacatacaaaatttcaaatggattttttttttttttttgatgaaacatgcaaacagtttggattgacaaacggccttacttcgttagcagtcatatgtattatcagtcaacggaggaaagataaaatgtcactaactggaagttcgacagaaaagaggtgaagtctacactacatacaaaatttgaaagggatatgtcccactaaaactgaaagaaaaaaaggggtaaacttgtctttgtttggcttccaaagttttctacatatcttttgtctacgatctgtagaaccctaggaagctgctccctgcatgtacatcactctcccagtatggagaagaggagttatagaaacaacttgccctcttgcatctttgcagaatacggtttcacatttggtcaggaagcccccttttgcaaagttgaaaagctctgttgtttaatgatttcctggctggacgatcctgtttcatgtacaaacttgacagattctgacagcctattcagaagatttaccagtgcaatgacctcatttcgctgcagctggaactgttgattcaaattgttctctccatcaacagaaaatagaatcttcagcgctgttccaagcccaagaacttgaagctttccccataatcgacacttctcacaaccaacacagtccataattgcactgatatttctaaactgcttctggatctcctgctttaactcagggccattttcaccttgccacagttttgcttcatcaaaaggtaatggacatgcagatcttaacttgtggttgtaaagcaattgcctcactaaagattgtgttttcaagtcctcttcaggattgccagtgttgtactctgcctgctcaaggtaatctgccgccttagtcactgcccgaagaacaaataggtatgtgaagtacagattttcgacacgctctgggtacttcagaacacggtcatgcaacaacgaaagattatgtccccacaagttagcagattcatcaagaagataatcataagcaatatgtacagatattgaggagtgcaatcctgaaattagcttgtaaagtgccttcttctcctggcacatatcttctgaaggatattttgggcaattttctttgtagatagcgtcccatatccttctagctgaatcaccagtataaccagtataacgttcaggattaagttgaagattcacataagtcatctcagcattatccgtctcatcatctgatgtccatggattgtcggtttcaacccaccctttgaaaaccttggtgtcaagggttctatcaaccgtggcttctggttttccttcttgacagatcatgttttcaggagaaaggccactgtaaggcttcttgaatggttcgggaaattcattatctgggcactcgcatacactacagtccctgagccgacacatgccatcatcaggccaaaaagggcagtcacaccacaacttaaccttgaagtacctgaagaagggcagagcgacgaggtcctgcaggatcgggttgagcacctcctcgttgatggcgtccaccgtctcgtagtcgcagcagcagtcctccaccatccccgtgtacttcctcgcgccggggcagccgcagcctccgccgcgcgagagggacgaaatggaggggaagccccggtagctcagggccacggcgaggagcgccacgaggagggcccccgcggccgccgcccatcgcctccgcctccggcgcacggccccgtccgcagcgggagggggcccctctgacatcccgcaccggggtggaagcttctagaagcgagatctgaccgaacggcggcggcggaggaattttctcgccgtgttcgcagtcggggcgttggcggttggggaaatcgcgtaggctgctgctactaatacagaggctgcggtggaa

SEQ ID NO: 5399 - DNA, 1243 bp, Triticum aestivum
  Clone ID: TRIAE-23APR03-CLUSTER8750_1
gccgaaaacacaccgtcaaaacgttttgtattcgatttcgtgcccctttcgcgtgcgtacgagcgagaccttctcccccttccccttccctgcccggtggccagcgaccgaggcagccgtcggagcggacggggcgcgcgtcagcgagtttgcccggatcccccgaagcgcgcgtggttccggcgggccatgggcacgccggagttccctgacctggggcggcactgcagcgtcggcgacagccaccagatcgatttcctccccttcacctgcgaccgatgcgacttcgtcttttgccttcagcaccgaagttatacatcacataaatgtccaaaggctaataacaaggatgtcactgtcgtcatctgcccattatgtgctaaaggagttcgcctgaatccaaatgaagatgcaaacatcacctgggagtctcatgttaatactgattgcgatccatcaaattaccagagagcaacaaagaaaaagaaatgcccagttcctgggtgcagagaacagctgacattttcaaacacaatcatgtgcaaagattgtagcaaagagcactgcctcaagcacagatttggtcctgatcacaagtgcccgggcccaagaaaaccagagcctaccttcccctttgccaacatgctaagaagaagtcagaaagttgagccacgcgcaaacagcagtggcagtggttcttcctggtggagctccagccttttgaatgcagcatcaagtttcagatcatcggcagaagcaggaatgcagaaactgagcattgccaccagcgaagccgtccagaaggctaaggatggggtcaccccgagcagcagtggtggtggcctcgtggagcaatgtgttcagtgtccagcaaggttttccactgtgggggccctaatcgagcacgccgagaaatcccatgggaacaactcgcgaccgagccgtggcaaagtgacgattgatgcttgccccaaatgtagcaagggatttcaagatccggtgttactagtggagcatgttgagagggaacatggaggaacttcaaaagcataaacctgcccgtgagtcatttctcatgagtatgtctatgttatatgcctgattgctgtgtaatttattcctcatttactcgatttgattgtactctagtgagctctgggctcgaattgtgcacatgaaagaaagtcttatctcaagccataaaaaaaaaaaaaaaactgcttctcgaggggggaaaggagtt

SEQ ID NO: 5400 - DNA, 1537 bp, Triticum aestivum
  Clone ID: TRIAE-23APR03-CLUSTER8757_1
acattcagtgatctgtacgcagcaaccaactggggaaggggaagggcgaggaagaccgcgtcgtgttcctcgtcccgtctcctctcctctccacccccttcgcattgctcctgaacttccgattagatcaagaagaaaggaggaaggaaaggaagcgatgggatgcttttcctgctgcggagccgatgatgttggcaagaaaaagaagcgcgatgatccttatgttccggtccctgccccagggggtaactatggttataaccgggggccagcgccaacccatgccatccgtaccagtagaagccagccaattgaagtaccagccatttccctagacgaaattaaggaaataaccaagaacttcagcagtgacgctcttataggagagggttcatacgcaagagttttccttggtgtactgaaggatggcaagaaatctgcagtgaagaggcttgactccagcaaacagcctgaccaagaattccttgtgcaggtctcggctgtttcaagactcaagcatgacaatgtcatccaacttctcgggtactgtgctttagggagcacccgtattcttgcttatgagtatgcaacaaggggctccttgcatgatgttctccatggtaaaaagggcgtcaagggatcccaaccaggaccagtcctatcctggatgcagcgggcgaggatcgctgtaagcgccgcaagagggctcgaattcctccacgagaaggcagagccacctgtcgtccaccgtgatatcaagtccagcaacatactgctctttgacaacgatgttgcaaaaataggagatttcgatgtgtctaatcaggcccctgacatggctgcacgccttcattctacacgtgttcttggcacctttggttatcatgctcctgagtatgcaatgactgggcagctaagcgcaaagagcgatgtatatagctttggagtggtgttgttggagcttttaactggccgcaaaccagttgatcatacacttccccgtggccagcagagccttgtgacatgggctacaccaaggctaagtgaagacaaggtgcggcaatgtgtagatccaaagcttggtgtggattaccctccaaaggctgtcgccaagatggctgcagtggctgccctgtgcgtgcaatacgaggcagatttccggccaaacatgagcatcgtcgtcaagactctggccccgctgctgaacacccggacaagcaaccgacctgccggctcggccggcgtcgccgtcgagtgatctccaaccgactgcattcgcacgattgcgaagatctggtgatgcttagggcgttttgccctggcttttgcggcgtggtgttgtacatgtcaacatgtgtggtgatgtgaggtgaggtttggtgtggtctggtggggggggatctcattttcttcctacttgaagggggcctcgcgctgttgaacgttaggcaggcaaggcatggtgggcttctcaaacttttctaatggagcaaaactcatggacgaagggcttttttgcttgggtaaaaaaaaaaaa

SEQ ID NO: 5401 - DNA, 1991 bp, Triticum aestivum
  Clone ID: TRIAE-23APR03-CLUSTER8776_1
aagcgcgcccggactctcttcggaaccgcaaccccacgcctcccgtcggcggccacccaccccaacctctcaccgtcccccccctcctcccgtcggcggcctacgacttgagagtgtcccccgccgcccctaaattgtaagtgctcgctgatccttctgtgtagcacgcggcggcgatgccgtgggatttcaccgcggtccggcctgagcccctcgtgagctgccggtccgccttctcacccgccgacgccaccgccgttcccgtcctacaacccaacctgcgactgttctgggtgtgcagcggcacgcagggcgcaccatcgggaacggcctctgcctgctacacggcgcgctgggatggcgacccagctgccctgcttgaagcagggcgccccgccgtcgcctcgatggggaaacggggccgggaggctccgggctgcatctggtagggcattggtcagccgcgttccattttcaggtctctctcgtttcaggtgtcggactaccccacgcagcgctaactcgtttcataagagagactagttcctggaccttcacccggaggtgtccctgctccgagtcgagcagaatgacgaggctcttaacccgcggctgccttcttcgggtaggaggacggcagagcggctgggggtgccgccgagccaggacgattacaacgctgccaagatcaaggtcgtcggagtcgggggtgggggttcgaatgctgtcaacaggatgattgagtactccatgaatggtgtcgagttttggatcgtcaacaccgatgtccaggcgataaggatgtccccggtgcattcccagaacaggctgcagattgggcaggagctcactcggggtttgggtgcgggtgggaaccctgatattgggatgaatgccgccaaggagagctgtgagtccatagaggaagcacttcatggtgctgacatggtttttgtcacggctggaatgggtggaggaactggaactggaggtgctcctgtaattgctggaattgccaagtccatgggtatactgacagtgggtattgtcacaacgcccttttcatttgaggggaggaggcgtgcagttcaggctcaagaaggaatatcagccttgagaaatagtgtggacactctcattgtcatcccaaatgacaagctgttgtctgctgtttctccaaacactcctgtcacggaagcattcaacttggctgatgatattctttggcaaggaattcgcggtatctctgatatcattacggttcctgggttggttaatgttgattttgctgatgtgcgagccataatgcaaaatgcagggtcatctttgatgggtatagggactgcaacaggcaagtcaagagcaagagacgccgctcttaatgccattcagtcaccactgctagatattggaattgagagggctacaggcatcgtgtggaatatcactggaggaaatgatttgactttgtttgaggtaaatgctgcagccgaagtaatctacgatctagttgatccaaatgctaacctgatatttggttctgtcatagacccatcactcaatggccaggttagcataacgttgatcgctactggctttaaacggcaggatgaagcagaaggtcgcaccgcaaagggtggccagcaaatgcaaggagacaatggtcgacatccatcttccacaggtggcagcaaggtggagattcctgagttccttcggaggagaggtccttctcgcttcccgcgaatttgactcttctccagggctccctttctcagatatgcctgttgagactcgcctctcgtagattagatgccctattgtaagataccagacctgtagagtctagctgttttccgtagaggttttatttttttgtagttttgtttgatctttctgttctttatcttggaatgctactgccaataatgtgtagctgtgagcatatcagtgttgtagaaaatgttctgccctcctggtgtgtcgtatcg

SEQ ID NO: 5402 - DNA, 1350 bp, Triticum aestivum
  Clone ID: TRIAE-23APR03-CLUSTER87876_1
ttttttttttttttttaaaataaaaaattgtgatttcacaacaatcgatcttcgaaagacggttgggttggtgatatccgtaatcagagcaagatttgaaatttgcatgccacaccgactacactagtagcataaacaaacaaacaaacacaagacagcttccagagtttcttggtctatttctaccacgtaaagaaaagactagatccactagacaagaaaaaagtatctgtatctaagatttttcggtctggatggtcaggtcatgtatccctaggtcctcgtacagtccatgcacgtattcgagcaccgattgatcatcactgctattcttcacccggatggagaggcaaccaacagcatgaccaggcacaagctcccaaaaccgagcctgggatacctcagagacatcctcacaagcagtaatctgtctgccacacttgatgaaggctgaaggtggcacgttgccaggcgcaatctgcagcaggacattgcccgtggctttgaacagaggcataactagcatgaacaccgccaccgaaacaattcccaggcacaacacctctgcgttctcaatccccaatgaaagaaaccaagaagctagtatcaagcctgcactccgcactgaatctgccagaacatgcaaacagatggagtgatggttcatatcctctgctttcctgtacactatgttaacacgagcatagctccggaagaaccagaacaccaagtaaattgacccaaaaggtttgtgactgcagaaacaatgaggtaatgcttgtgctcagattcatcctgcataaacgagtgcagcgcttcaacagccaaggagaaagacaggaacagcaggaacagggcattggtgaaggcggcgaggacctccaatctcttgtacccgtaggtgtatgtggagtcgggcttggtgcgggaggcggccatggcgaagagggagaaggagagcaggccgcagccgaaggtgaggtggaaggcgtccgagacgaggcccacgcggcccgtgaggaggcccacggcgagctccacggcggagtaggcggcgttgaggccgaggagcagcgcgaggcggcgcatcgggcgggtggcgagccaccggtaccggccgtcgggtgccttgggcggctgcggctggggcatggggatggaggagtcggagcgggcgaggccggggccggggggccgcggggaggaggaggagaaggacggctgccgggagtaggccaggcgccggtctccgctgcccaccacgccgtagttggggttccacgcccgaggatccgccatcgccatcgccggagctcgagacgatgttggggaatagatgatccgggtttt

SEQ ID NO: 5403 - DNA, 721 bp, Triticum aestivum
  Clone ID: TRIAE-23APR03-CLUSTER87885_1
aacaacaaaaccacatatttgcacactacaacaaacaatcatcttaactacgtaaagaacatcatagggcgatcagaacactttttttacagaacagagactacacctccatacaacatgcaaccaaataaagaatctcatctccccgtaggctaaacaggggagagaaagaaaataaaaatctataacatttgtttggcgaatgaactacttctgagcatggctagcaacttgagtaggtgtcctcgagacaacataattacgggatatgccacgccaatcaccttttcctaatttgttcaatccaagtagaaaatttttgtgctcctcttctgaccatgactcacctcgcttcctgtggggtttgtcgtcgtcgccctcggagccgtacccctcggccctggcaccgccgctaccctccgcgagctgcgcgaggttgcccatgctgacgctcttcctgattggcttgtcgccgatgcgcacgccgaagagcttcacggggcgcgccgtgcacgtgcgggagttgtgcccgtggtgcccgcactgcgagcaccgcctcggcccgtcccccgcaccgccgccggcaggcgccgccggtggcacgccgtcccgcgtcatggcaggcaggctagggttgtggatttttattttttaatctattatatctggttgattgatttgatccgtctttttctttttctcctctggtggtgcgtcgtgt

SEQ ID NO: 5404 - DNA, 1044 bp, Triticum aestivum
  Clone ID: TRIAE-23APR03-CLUSTER87903_1
tttcttttttttcatctttttattcgaagagaacaagcctacagcccttctcgagtcatctcagaaattttaccagaacctcttgcataataaggaagagctgtaactagatctttttattagaagagaaagctacagcccttctcgagcatctcagaattttaccagaaactcgtgcataaaaacgaagagattcagtgcattggagcgctcagagtaacatcgcagagagagagacccgacttgatgactaacttcaaggtagatgaggtaggatcatccaagcagcaggcgacagttttgcatttgctgccatggctagttctcgctgcttgaagcatttgccttgtccttcttgctgcttgaagcatttatcttgtcctgctttttagcctttttagtcttccacaaagagctctgcgaaacggtctcctcaacgatcttgggcaccgtaaaactgaagctttcagctgatatgcggtctttgtactctgggtttgtgtcgaggaacttctgcacgtccccgatgccccttgcacgcttcccgtttggcaggacatagtagatgtccattttagacagatcacctctcatgatcacaagtctctcggtcttgggcggaggctttggtatgttgggcttgtcgatgacccagatgcggctgctgtcgtactcaatgtctggagggtcttcacacgagcactcaggtcttttactgcagaaccatgggtcttcagtgaagttctcacgaattgtctcaaattcatctttcgttgaaactgtacgccatttatgacattcacaacactggacagcatacaggccaattgattccgttgcacctcgttttttctgagaggaggaccccggcgaggccggaaccggcgccggcgaggccatgttcgacagtgaggtggcctgcgtcgggaactcggaggcgccccgctggagaagccaccggcgacggcgccggtagtaggcgggcggatgcgagaggacggagccaaggtcggccgtccggatggggacggaagtggggagagt

SEQ ID NO: 5405 - DNA, 1080 bp, Triticum aestivum
  Clone ID: TRIAE-23APR03-CLUSTER87956_1
tttttttttttttctcccgtcacccccccactcaaacaatgaggaaggaggcgtctgtctctctcccacatgaggggggctccccacagtcatccagctgcagcagatgaatcagtacgacagccctgacccatcggatttctccctccctgcccccccttccttcggccggccttgcgcccactggcgtctccagtgcgccataacttcgacgccacctccccttttttgtgcacaccccgcgtccccaagacccaacagaggccgtgccctttctcggagatctcgatctgacaaaggttgaaaacggagaacatgaaatgggcagagctgtatgtgttacagaatttcatatagatatagccagcctttcttaaacaatgtagcactacgttgtgctgatgttgtctattgataaagggcagcgaagagctcgacagaaccatgtttttatcttacaactgaagggaatcctcacaatctgctagatacagcaaggtactttgtatgacgcgcctgagccatcaatttgccgctccttttcttcctgaaatcaacagagacaacacccactgattttccagcacgcaatagcttcgcctcaacctctatttcttccccgacggcggcggtgtcgacgtaggacacgctgatctcgagggagaccccgctcgtgcccaccccgctggagaagaacacggccgagcccaactggtcggcgagcgttgccgtgacgccgctgagaaggtacccttggggactggcgatacggggggtgacgacgaaggagcagaggacgcggccgtgctcggcggcctcgaggcggacgccgctgatgacgaaggagtcgtaaggggtggagcccgagatgtccgcggcggaagcggtgggctcgagggtcctccgcaccgcctccgggtccatggcgcggcggtggcgctggggccggcgaggaggtcgtggtcgccgccggatcggggaaagagttgcgggggtttggcggggcacgcaacacaaagacgagtgggtggctacctgcggtcaatgtgcgtggttggctggcagtggcagcgccttgcg

SEQ ID NO: 5406 - DNA, 1841 bp, Triticum aestivum
  Clone ID: TRIAE-23APR03-CLUSTER880_2
atataaaagcccctgtctccgtctccggttagcaggagagagagagaggggagagaggacgggtggaggccaagaacgcagcacgactgcacagcaccagctgccgaccgaccgcgggcggagctgaccccccgacccgatcagatccctcgccgcccgccccctcagatctccccgcgcgcgcccctcccagatccagctccgagcacctggattttccacaaagaggtcctgccggcggcggtccgcgtctggaagctcgtcggctgctgctgctgccgcttcttgcttcccgtgctctgtggcgaaggcggccggcggagatggggctggcgggggagaagttccagctggggacggtgggggcgctcagcctctccgtcgtctcctcggtctccattgtcatctgcaacaaggcgctcatgagcgccctcggcttcatcttcgccaccacgttgacaagctggcatctcctggtgacattctgttcgcttcatgtggcattatgcatgaagctctttgagcacaaaccttttgacgcgaggaccgtcatggggttcggagtgctcaacggcatctcgattgggcttctcaatctgagtctgggtttcaactctgttggtttctatcagatgacaaagctggccattattccctgcactgttatattggagactcttttcttcagaagaagttcagtcgttacatccagctgtcccttagtgtgctcctttttggtgttggagttgcaactgtgactgatctgcagctcaatgctatgggatctgtgctgtccttgctggcaatcgtcacaacttgtatcgctcaaattatgacaaacactattcagaagaaattcaaggtttcttcaacccagctgctatatcagtcttgtccttaccaggcattgacactgtttcttatcggcccgttccttgatggattcctgactaaccaaaacgtcttcgctttcaattacacatctaacgttgtgtttttcatcgtcttgtcgtgtttgatatcggtctcagtaaacttcagcacctttcttgtgatcggaaagacatctcctgttacttaccaagtcctgggccatcttaaaacgtgcctagttttgaccttcggttacgttttgcttcatgatccatttagctggagaaacatacttggcatcctaattgcggttgttgggatggtactatattcatacttctgctcaatagagactcaaccaaaaaataacgatgtctccggacagcagtcaaaagaaggtgactcggcacctttgatctctgattctttgggcaaagttgaaaatggaggtgatgacgatgagcctttgaaggtaccgatgtggagctcaaagtacccaagggcgtgaaaatttcgtctcttagacggcggatggcattatacaggattcaatttagtaggcagatagtagggttggaagccaactttccaacccaagtaatgaagcaatggacatttcagttacaagtaatggacatgtcagttacaattaaaatgatctgattctttggagggttttaccttccaaaattgcagatctaccatgaaactagatagcagatactgtaaaattgtatctggatatggtccaaatcttctcactgtaacttcatgttgggacactggtctgcagatagactccattctttttgtaccaaaggtcccgaggtcaagaattgtgcaagactttaaagtatttataggttcaagtttgtaactgtactttcagatttaccttggaccatagtagtgcaagtgatgtacatttcagtttaaggagttaaaaataaccaggttcatttccatgt

SEQ ID NO: 5407 - DNA, 1051 bp, Triticum aestivum
  Clone ID: TRIAE-23APR03-CLUSTER88244_1
tttttttttttttttttttttttaagagaaacgggtgaacaagtgctgtgctgaagcaaataatccatccgacattttaacattttggcgcttctagtcaggatcatgaacgctgggtgagcaattttttttttttttttcgagcaagcacactagtaaaactcagatctctcattacagttgattgatgagaggaaacagcttacaacacaacttgtttctttctttcagcaatagttgaaaaaagaagacggcctaaaataataagctggctgtgaagcctaaacgtatgctaaagcatcatcactcttcccctgctcaaatgatattgtttttcagatcttcaaatttcgcaaacagttcgtctctgctttccttaaagaggaggtaccgtgtgatgaaccagactgagtagccagttcctacgatttccagcacatttggaagcaggggaacagaatccattccagaaatgattttagataggatcaacagagcaatcaaagcaccgcctccgaggatgacagtagtgggtgtcacttggatgtccaacttgccgagtaggtcgtccacgccgccatccgcctcgggcgacgacaccggcgcatcttccatcgtcacctccacaaatccaccggagacctccccgtccggcgcgtcgggcttgtccgtgacgacggtagtggtggcggaccccgacgccgacgcgggctcctcggacggcaccgggtcaggcctggtcggcgcggcggagcggcagcgccagcctcgtcgggccggggcgcggaaggtcacggaggcagggagcggccggcggtggacgcgggccgaggataagggagcggaggccgcggttgtggagacgaggacctccatgctttcctctctctctctcactcaacactgcttttttctttttcttttctgtggagggcgaccagctggctggggtttgaggtttcggcgagctcccggggaggatgaggggtggtgggctggctgcctcgctgacgcacagccgtgtgctccacgctccccccggggagtgtgt

SEQ ID NO: 5408 - DNA, 1041 bp, Triticum aestivum
  Clone ID: TRIAE-23APR03-CLUSTER88381_1
ttttttttttttttttaaaaggaaatcatcattagaagtggtaacactgcatcagtacattgttgttacagctcgggggagcagcctcgtcaggattccgtctcgggcgcggtaaaaaaaaactacccacgatccatgaacgggctacatccatcagcagctccctcgccttgccatcccccaatcacacagcaacagcagcggtggctagagccagagcacggggcggagctcgtcggtggccccgacgtccacgcccccgccagccacctgcacggcgcacggggtcggcatcttcttccgcccggcgccggcggccagcagcagtgacgtcggcatcgggacgctgctcggcggcggcgacaccgagtacatcgagtccatcgacgtccacgccggcataggcggcgccgctaccacgatgggcgccgatgccgccccgcccgccggcttcttggggctcttgttggcgcgcgggtcgacctggcgctggcggcctgccggtgccggcgaggcctggaggtgctgcgggcaggggcaggagcggcggctgcgggaacggcctgcaggccatcatcagagaaggcgacgctgcgggggaggagctgctgctcagggatttcaaaccacactccatctgtgagtcagtctttccaaatctggtgccgaaacaagcggctgatctgagcagagtcggctgattatttcgagtaaacgttgagagctgaagaactaaactagaatgcaaaggaaatcaagctccaaccaacaaaaacaggcggagagatgtagaatgaatgtatgtgtgtatcaaaagcaaaagaaaatggagaagcttgcttgcttgctcggatgcagatctagatcgactaaaaacagatcgagatgcgcgggagcaggtagcagccctggcaagctagctaaacttgaacagaaaagagaaagaaaggcagaaaggtgagccggagaagaaagaaaagacgagcagagctgatgagccaaggaagggaagaagacgagtggaggtgaggtatccgttgt

SEQ ID NO: 5409 - DNA, 999 bp, Triticum aestivum
  Clone ID: TRIAE-23APR03-CLUSTER88577_1
cagtggtagctgatatattactcagctcgcgcatgtaatcttctgattgtgcctgaatgttttttctccttttggttgccagtacaaaaaatgttatgcaacaggttcatctgccagcacaaaattgtacagtaatgtacactcgagcaaatgacggacatgctatcacgcgaagggcaatccttcgatttctcccggggatttaagcaattgattaacaaaggaacctaaagagtatttctgtcaagtacttcattcctcaaggatatgcattgaatatcttgcagctagctactgtacattcttcagtcagctaccacagctattcaagaatcgtttgtgtgcacacattaccagtaaaacagaaaggataatgatagtcgctgctgtaaacatgattgccagaagagcagaagcggcaagcccaggccgttctcgaggatcacggttgtagtacttgcagcaataaagaagagctgctatgtaccaaattaacgggcacaggaaacctaaaagaaaacaacaccatccaattccacaaccaaagaagggaaggcgtctttcgaacattgccaaccttggattttcttcatcgccaagtagtgtgtacttgccgaggcacacttggcaactgcaatattcgtttgagcttcctcccctcataatactacagttgtttggtcaaggaaccagcaggaagaaacatggagcttttcagcatttcaggactccttgctgtaatggctaatgtaaactatgatctaagagctatcatcacatcaagcagatgaccgaatctaatctcctgcgaggaaagtccatgtaattctgcggcggatgtgcctttcagcttccgcgggtggtcctttgctgagatgcgaaaaattggtagaaggaggagggcggagaaggcgtgggcgtgagcggcttctgccttttggtatccgtcccgtttgggtgattgcttgccctttcccggacgcgtgggcggacgcgtgg

SEQ ID NO: 5410 - DNA, 875 bp, Triticum aestivum
  Clone ID: TRIAE-23APR03-CLUSTER88701_1
gttttttttttttttttttttacccaacaatttttctattatagaaatagaaaagaacatgtaaatttacaatatgtactcatcatgtatgaacacgagacgaaccaaataaaaatcccaaataactgcgagaacaaggacatggcctctattattttttatctgaactttttttttttttttttttttttttacccaacaatttttctattagaaatagaaaagaacatgtaaatttacaatgtgtactcatcatgtatgaacacgagacgaaccaaagaaaaatcccaaataactgcgcgcacgagtacatggcctcagaagaagtagccgaagacgagcgcggtgagggacgccatggcgacagccggggcggcagacgacgcgccagaggccggtgctggagctggtccatcggctgcggagaccgtgccgaccatgacggcggcggctgccgccacggcgaggatcctgagcttcagagtaaccgccatttgcttcctcggctggcgttgctgcaatgaactagtagcaaagatgactgttgctgggagggaactggagatgttgtcaggcttgtgatcttcgatttttcaattaggatgttctagggaaggggccccggggaattccggaaaccccggggaccccctaattctaacaagggcccgcccccgggggggccccccgttttggtccccttttaggggggctaattgggcggttggggaaaacggggaaaaaggtttccccgggggaaattgtttcccccccccggttcccctttttctcccccgccaccccaaaagggagaccccggggggctcaaatggggcccccccccccgggctgtggggggcgccccgcgcgctctt

SEQ ID NO: 5411 - DNA, 1031 bp, Triticum aestivum
  Clone ID: TRIAE-23APR03-CLUSTER89354_1
tctcttttttttttttttttcccatttctttcgctgaaccaacatggtaggttttatacttctgactatccagacgtgaaactcggctcactacttagagcaactcacttcacaggctcaagatctcacttctcgttactaatcgcaaacttatccgtcacaagaactcttggctcatcagctcgggtgacgatatccttcgagcgggtacgtagaccactacggccgttgcaatgcttccacagccacttctgagacttcgtcgctcgttatgaagccctcgtagagagtgtcctctggctccatgacaatgttcccagtgggcggctgttctgtgagccctccaggcctcacaatcgtgtaatttattcctgatcccctgatgtatttctccgcctgcagcttcgcaacgagccaccaagccgaacagattgagcacgatgtaggctggattcagaagttggcccatcgcggccccattcactaaaatggagctcacgagcacgaatcttgtaactccagcctttcggcatgcttccacaaggttcactgtccccaggttgtccaccttccagggagcaaaggggtcaaaggaccgccggaagcccgtcgcgcagacgacggcgtcgacgccgcgcacggcctcgaccagcttgtcggcgccctccgtcacgtcggccctcacgagctggaggttggggtcctggggcaggctgccgcgggccctgcccacgtccgtcgtgccggcgacgacgccgaagcccctctccagcagcttcgccacgacgcgcttgccggttttccccgtcgagccggccacgaagacggtggtcgtcttcttggcgcccggagcgctcgccgatgcctcgtccatactcaaggcggccgggcgggtgacgtggagctttcgcgtggtcggggagaggcaggcgagcacgagaggcaggcgggggcgggcggtggtggcgtggaaaacaccggccatgggttatgtgtggcctgtgggtctgttcgtttgagatgtctctagt

SEQ ID NO: 5412 - DNA, 1084 bp, Triticum aestivum
  Clone ID: TRIAE-23APR03-CLUSTER89414_1
tttcgtctctcttttggggccgatccgacggccaggaggctcaaatcgctgaggagcctcctgcatccctccctctcatatttctggatactgtactgttttccatgcaacaatattacagccgtgaaacaaaacaaggtctcataagatctctttactcaaaaaagtcgactagctggctggagattcaagtaaccctttcccaagagaagccgcagaaagaaaagaaggatgtgcgaggtaataaacccaaccctgagccctgagctattgacctactcatcagccgtccaagggcagctcaccacaatccacaattcgacagggctgcttgggaatatcggacctgctggtttcttgcgattcaagctccctcacaacgtccatgccctccaacacatgtccaaacacaacatgacggttgtcaaaccatggtgtcttcacagtgcaaatgaaaaactgacttccatttgtgtcagggccagcgtgggacatgcttagtacacgaggaccaacatgctttaatgtaaaattttcatcatcaaagcattcaccataaatacttctcccaccagtaccatcgtcattctcggtaatcaccgccctgaatcatgaaatccttgataattcggtggaaggagcagcccttgtatccataacctttgtctccagtgcacaaggcgcggaagttgtcgacagtcttggggacgacctcgccgaagagcccgattaccaccttgcctgcgcgatccccgccgatctcgacgtcgaagaagcatttgctcgtcaccttagcctggagatccaagtcaccctcggcagccgccgcgcggacgacgaaggcggcggcaggggcgcggcgcgcgccgagtctgaccgcacccgtggagctggagcggagggggcagtcaacgcgtcccccagtgctgctgcggccagggacgacgcgtcggcgcggcgccggcgtgagtgcggaggggttggatacggccggcctgcacgccatgtcagggttggttgctagtactgggattatcagatttctttttcttattgggttggttgctagtactgggattatcag

SEQ ID NO: 5413 - DNA, 1329 bp, Triticum aestivum
  Clone ID: TRIAE-23APR03-CLUSTER8941_1
ctcttggcgccagaaccatccacggccacgttcgcgcctagctaagctctaggatagattagatataaaacagatccatacggccgtgtctcctggctgagaagagataagccagccgcattgatccatcgatcgatcggggtcaggtatggagctgctgtccaaccgcccggcgcacgcctctgtgccggacaagtacgtcttcccgccggagaagcgcgccgccctgctcgacgacgcgcccagctccgacgtggcgctccccgtcgtcgacctcaagcgtgccaccctctccgacgccggccgccgccgcctcgtggccgaggagatcgtcaaggccggcaaggagttcggcttcttccaggtggtgaaccatggcgtggcggaggacgtggtgcgggcgttccgggaggcgtcggcggagttcttcgcgatgccggcggaggagaagctgccctactgctccgacgaccagagcaagcccttccgcgtcgcctccagcacctcctacgaccggaaccagacccgctactggcgtgactacctcaagctgcgttgccacccggtctccgacgagctcgtcggccactggccggccaggccggagagcttccggacctcccctcgccgagttctccgaacaggtgcacgagctggcgcagacgctgctgctgctcatcgcccgaggggctcggcctcgacggcggcttctttgcgggcgacctcagcggcggcgacacccagatgaacgtcaactactacccgccgtgcccggacccgagcgtcacgctgggcctgctcccgcactgcgaccgccacctcctcaccgtgctctcccagggcgacgtcgccgggctccaggcgaggtaccgcgggcggtggctgctcgtccgcccggtcccgggcgccttcatcatcaacttcgggcaccagatggagatcgtcaccaacggcgtgctggcgagcgtggagcaccgcgccctcaccaactccgccgtggcgaggatgtccgtggcgacgctcatcatgcccaagatggactgccttatcggcccggcgccggagatggtgagcgaggcgaatccgcccaagttcagggagtttgtgttcagggagttcatggcggcgtacgacaccgccgctgctagcagggaggacgtgctggagtacttcaggatctaacaacactagatcgatgctgatggatctacatctatgcccagactttcttcctagcagcttgatgtaccaaataaacagcggttttgctaaaactcattcagctgagaaattgtttggtctaaaaaaaaaaaaaaaaaagcgccccta

SEQ ID NO: 5414 - DNA, 715 bp, Triticum aestivum
  Clone ID: TRIAE-23APR03-CLUSTER896_2
gcaccaagcagaaaaaaaatctctcctcgctctcgtccgagtcgcgtgaggagaaaggagggaagccggaaaggggttctcgccgaggcggaaggaggagatggccgctcgtcccgcgcgggacttcagttccctgtgggccgtatccatcgtcagctgaagcaaaggactcaggccaatggccgtgttggtgctactgcggcggtctactctgctgccatcctggagtacctgacggctgaggtcctggagctggctggcaacgccagcaaggatctcaaggtgaagcgtatcacccctcgtcacctccagctggccatccgtggagacgaggagctcgacccacgcgtccggggcaccattgctggtggaggtgtgatcccgcacatccacaagtccctgatcaacaagtcctccaaagagtgaacagaaaaaatagcaaaggagcatctctagcttgaactggacattttctcagtcgtctgtcagataagtttatcgtcgtgtcatttagtgtttagctgtgctccttccagatcgaagtcgttgtctgtctgtgtaatgtttacctggtactgattcagtcatttggacatggtgtttatgttcgttcgttgactctgtgattggactctgaatgcaaaaaccttttaaacaaagaaaaaaaaaaaaaaaaaaggcccctagggccttctatagtgtcacctaaatccca

SEQ ID NO: 5415 - DNA, 1484 bp, Triticum aestivum
  Clone ID: TRIAE-23APR03-CLUSTER89703_1
ttcaaaggggttaaattggtaacccgccttcccccccgcccggctttgttcccgccggccagccccccgtcttcgttgttttcttggggtgccattggtttccgggccccgcccctgaggttgccggtatcggtaacattttttttttttttttggttttttttttttagccaaaaccagtctcccactaattacggaaaaccacggttacgaatagctagagttgttcgagactgccaagataagtcaacaagaatgtcacagatagatttattcgcaatttacaggcgatgacatccgtaggttcagtttggccagcctcccaaatagcatgcttgcatagagggatgaggaagatgacatcttcaaatgcgagacaagcaagccttgtagtagggtatgacatctgcttctgcgcgggagagagcaaccaaaggagtaacagtaatatatccatctgcaagggatttgtagtccatgtcctccccttcctcttcatcataacttctctttactatcactcttttaaacagtaggtcattcgccgatgaagtgtctatatctctgtccttttcaccgtcaatatccatgcttgccgtctggtaactttctacagaaggcttttggtagactgtttgctcccatccaattctggccatatattttccttgctttgtaattttgtatcccttgtggtgtgcagcatcagatggcacatctatattcaggaatgatcctttagggtaggttccactcttgatctcgaccatgacagcatttatcagagggatacaaacctctgcagccactttgaggtcattaacactgctctgaccagcaacccaattgtatgacatagataatgcaggaatcccgtatataaatgcctccctagcaccagcaactgttccagaatatacaacatgtaatccacaattattgccaatgttgattccgctaagcaccaaatcaggaaccaaaccatcaaagagcttcccagagatgcctaaagaggcacagtcagcgggagttcctgaaactccaaatgctgtagcaccattgatattgacacgtttacagcgaagtgcagaacgccatgtaatgcagtggctaacgcccgacctgtctgtgtcgggcgcgcagacgaggacgcggtagcgcccctgggcgacgagctggtcgacgaggaagcggagccccggcgcgtcgatgccgtcgtcgttcgtcaccatcaccaccggcgccgccgccgcgcggccgccgtggaggccatggaggcaagagccgtgtacgggcgcgggtagagaagtttccgtttccgttcccgctcacgcgttggggttgtgggccccctagtttcccaggggcccccccccgccggggggcccccccccctttttgcccccaggcgcgagcgaattgcccgccccggggggaaccggcggggaaaaggtgttcccccggggggaaaattggtccccccc

SEQ ID NO: 5416 - DNA, 1611 bp, Triticum aestivum
  Clone ID: TRIAE-23APR03-CLUSTER89761_1
ttttttttttttttttgcaacaaaagaaccgtgtatctatatttcagtgtaataatgtacaccctttcgtgttgctcatacacacaagtctacttgatacacgtactttgacaacagctcgtacacaaaaattgctattttcgtacaaagatacaagttaaccataagaccaagatgttgaatgcggaaatcaactttcagagtgtatcagtggcctgcagagtttctgttccatgacaagtagttgttatctcccaattttcttggttttatcaagtagagtaaggtgaatgcaaatgccaggaagaagcagagtccaccaacagtgagatatgcaagaccaagaaaatcattctttccaccaagccaagttgaagtagaaagcaccaaactctttttgccatcaaagctatatgtgttgtaattgttgtccagcgtaacagtaatggtgtcattttctttgaggtcaacacgtatcctaccatacagttttctgaatgtaggaagcgcggcagttcgcatccaaacaataaggtcctcttgctcactcagcggtatagattcgttgagtgtttttccacctataagaggacctttctggaagttttttgggaagacatcacttccaaatttgtggtccctatcactcttccaagagatgtctgtcttgtcgatagttatgttgttagtgttgtgttggaaggtatatgtatcattgaatgtgctccatgcaatcagaccacatggaacaatagccattccatctctggtcttctcagggtcacaaagcgtggtctcgtttgccttactagcatctcttagctgttggtcattccggctcttaacatatctcctatgattctggtagaagttattcaactgataatacacaaaaattggctgcttcatatccttcgggaccttgagtgtcctttggcaggttttagatatcgttgagttctggatgtaggcaagcttgtcagtaacattagacgggacgcacgcatcatcgtatcgatcaacaatctcaacgaccttatttgaagctagcaacgaagcaacacctatcgggacaaaaatgacaccgacaagaagaaacaccgaaatgacccattttggagtaaggattggcttgcaagctgggagctcctgctgcgtaaacttggaatacttgggcttcctggaggccctcctgggcgcgcccgcgtccccggatccgccggagctggacccggcggcgtcgccgctgttcatcccgccgaacgaccggcccggccgccaagaaacgccgccgccggcgaacaagcctccccgccgacagccgaaatgcgcgcgccttttcctgcgcgtacgtgtcccgcgctcgaggttccgcgggcggcaatgggggaggggggatggtctgctggcctggcctggcctggcgctcttgttgctgccgctgttcctcttacgaaggttacaaggaaaggagggagggagagggagagggggagacggggcggtttgactcgtggggggagaagagttggcggtcgtggcgggcgcgttgagcccagccggcgggcgcgaccaatggggaggctgaactggtcaagccaagaagatggt

SEQ ID NO: 5417 - DNA, 1495 bp, Triticum aestivum
  unsure (1)..(1495): unsure at all n locations
  Clone ID: TRIAE-23APR03-CLUSTER89763_1
ctcttttctcttcccttcgctacgcctttctgtttgtncatttacagtgttctttgtgtgtcgggccccgctccagactactttttactcctcaatttttgtttttttatttggtccaacaagaccgtgacggctctggtccgttgtgcctcgttgaacatcttgtaaatttgattgatgaaatgtcacgaccaaaatggtgatgatgacaacacacacaatggaacgggaaactaaaagtatatatacagagatgtcgatgagccttgcatcggtcgaagctagtttttactcctcaattcctgtcaaatcttatcatcatcttacccgagatcaaacaaaggggaacgaacaaaaactagagctaccactactacaggggggtgtgtctcgcgataaggagaaacagcgaggggccagccgcgaaagcgcaccgaccggtccgaaccgacccaccgacccctcgccttcacgccagaaagaacaagagaaaaataatcggtcgccaccacccgcgcaccaccaccaccatggatttggattcattaatcggaaaatcggtgcgcgattttaccgaaacgcccctgcggccgagccgggagggccgggctcgagttgaccaccggagggaggcgcgggccggcgactgcgggttccggtcggatcgatcgatcacggcagcgcgccgtaggccgccccccggccggcgagcttctcggcggtgcgggcgagggactggaggttgcacttgacgatggtgtccacgaagacgcgggtgtcctcgggggtgttcccggggggcacgtccaccacgtacgactccaccaccagcgtcgccgacgcgctctcccccggcgccgggtgcaccgtggtcaccgaccggtagttgcggagccggtgctcgccgcccaccacgctgaagctcagcacgtgccgctcgtcgtccaggatctccagccgctcccggctggacgccgcggggaggcccgacaccacgcgcacctcgcgcagcgtgcccacgccgccgtcgccgtccagcagcgcgcagctgcgcacgaagctcttgtacgcctgcggctggtcgaagcgccggaccacggcccacacgtccgccgccggcgccgccacgcgctgcaccaccgccgagcagcagcagcgcccccccggcgccgcgtgctcgtggtgccgcgccacctccggcggcaccgtcccgtcgtgctcgccgcacctgtgggcccccgtcgccgccaggccgccggaggaggagaccagacgctggtgctgctgcagcgccgccgcgctgtacggcgtcggcatcggctcgaggtcggagcgggtcgcctcgcctgctagctgtttgtttggtgggatgggtgcgctgcgggctgcggcgctggttcgtttggcttggtttgggagtaaatttgttcggggtagggatgttgtaggtgttaaactcgagagagttgggggctggaggaaatggagattattc

SEQ ID NO: 5418 - DNA, 1418 bp, Triticum aestivum
  Clone ID: TRIAE-23APR03-CLUSTER89788_1
gaggtccacggtacagacatgctgattttttttcttttctacacaactaaaagatttattaacatgcaaataggtaaatgcagccgtaaccaaacatatatacaaatcgagcgtctaggaaaggctggctgggtagtcatacaccgaaacatgacagccgagctgaaatcacaggtatgggctacagtagtgactgactactcataagctatatgcagatgtaaccaaatctacagatgatcggatggtggccgtacgttaatcatgaacacacattccactactcagcatgcctcttggccatcgtcttcttgaggccttttaggatcttggagaaccaaagcacattcatcacgaagattatgcaaggcgcaataagtaccagaaaatagccgaaggtgttcatcttcttaatctggtcataatgtacaaacatgtggtaaaacaagtacatgaacaggattatccttgcaaccagccaagtaacaaccattgcaactccgttaacaaggtaagctttggagttcttcattccagcaacatcaaggaaccatcttagattgattcctggcgttgtagtctcagtgatgagacccatgtatatgtatacatgtgcttccccagaaagcatagcgtacattgtagacataagtgacagcatgtggtggataacatactccattccaccaagggcagggtaaagccaatatatcatggcaatgtctgtaatgaaatacccaatagagacccctaatgtaaaactggagaggcttgaacttctcactgttactggtccatccagctggtcagaaaacatacccgagaagaacactaggtatactgacataactgtaatgaatattgcatggacagtggacatccccctgttgttccattcgatcttctgcatattgttaagagaagcataacctttgaagttaaatgaactgataatgcgcgtgaaatcataggccaatttgcacatcaggatccccccgagcacagcagcgtatggagcatacgagtctgcgagcaagtagtccctgacaagaacctctttgtacttgtaggctttaaatgccatggctggagccgcaggcacatccatatccagatttctggccactcaacagcctgagcgtggcgaggcgaggttgcggggagcggaggagcttgtggtcgccgcggggcctggttggggttggggttgggctggaggggaagcgagcgcggcggattccttgtctcctcctctggtggtagtcctcttggcaaagctttgcttgtgtcccagttcttgcttggctattggaggggaagggtggggtgggagcgaggagaaagcgctggactggatggaaggaatccgcagacgagacgatgcccacgggccacggcaagagagaaaattccgggag

SEQ ID NO: 5419 - DNA, 1043 bp, Triticum aestivum
  Clone ID: TRIAE-23APR03-CLUSTER89947_1
tcgttttgcttttttttttttttttttctttaattttttttttttgattcaacaaaaaagcattcccttcctcatttgcataaaaagaagctttgaaaagcatcaaatcatgacattgcacaaagcggtctcttctactttttgttgctacaatgcaaaacaaagttcagtatattccacatagaaataaggaaaagagaagggtaactcccaacatcattatccatactaatgtagaatgaagttagttccttcctggcggtacgatttcatgctgcccattattgtgaggaacctgctgagaaaatgaaggtctgtgctcttgtactgaaggacctctctgcatagtttctcttcgttcaacctgcatagtctctcgtcgcctatcatagcggggacgaggcctactccttacctgctgcctctcagtgaactgaaattgtggcctatgaatgactttgccatctacgaagagatcacctccataatccttgttaggcacatccaaatatgaatcaggtaatacccaaagaactcccggcaatcctttaactttgtatgataactcctccgaaatcaacgcaccaaaccctgtgtaagttgtagtgcatactgagtagatcttcttctttgcctcctcctcacttccgagcacagcggtgagggtcttgacgtaggcggctaccatatcctcctcggagggcttggggtcggcggggaactccatgacaatgagccagtgctcgtagtcgcagccatccagcaggatggtctccttgggtggccggttgctccagttcggggacgggtcgttgagcggagaatacccgggccttcccggcaacgccgtcttcgccccccgcgacggcggcgcccacggagagaggtgggctgaggacgcggaggcgccggcgccggtgaggaggaggaagcgacggggtgtcgcacgggaggagaggaggagcgccgagagcctgcggcgtgtgaccgctacagccgccatggttggggaatttgggaagagtcggacgaggagggtttgc

SEQ ID NO: 5420 - DNA, 1730 bp, Triticum aestivum
  Clone ID: TRIAE-23APR03-CLUSTER89994_1
tggttttcgcttgttgctgagcgtcggttcttttgcttattttgttcttatcctcccccatcatccacatgctcaatacattgaacatcacatttgtcaacaagcctgtcttagttcatcggaccaacacaccaagtctctgctccccaacagacaacaagtagtagatacgtactagtacaagcttaattcatccacaactttaggaccctgtctttgccaccagagacaaccttctcgccgtcggggctccaatccacggcgtacacctcgtccgcgtgccctggcaggtcctgcttcagcttgcgcgcccggcatatcccacacctttagggtcgaatccttgcttccactcagtaggagccgactgtcggcggaccagctgatctggtacacatccgcgacatgccctcggaaagctgcgacaaacttgcccgtgatgccgttccacagcttgactgatttgtcaaaggaggcactcgccagccactgcccgtcaggggagaagtagacatggttcaccaccttctgatgaccagtcatgcgagctttcggctgtttgctaatcgttggttcccaaagaaacatggtaaaatcatctgaaccagagaccagcctctcaggagcattacccctcatcttctcatatcttgcaagagctgcctctttcatttcctctggacttgaaaatgtcttgccggtatggtcatatgccccagtgcggagaacatattctgtgctcaaggcaagcgaatttacccagtgcccatgaccctgcagtgttttgaccaacttgccttgagtagtttcccatactttgattaaacaatcttcagaacctgtatatatcaaaccgtctccaccccacttgacacaggtcacagcattggtgtgacctgaaagggaaataacacacttcttcgtggtaatgtcccagattcgtgcatcgccatctttacttgcacttacaaaacggccggtacggcctccctgtggcccgcgctcccaagatacagcagtaatccactttctatgtcccgtaagaggagtgcccaattgattgcctgttttggggtcccataatataagctctcctgacttgcttccactaacaagatgtttcccatcaggtgaccatgcaatgcagagaacccaattcttgtggcctttgcatgtgtacaatggggtctgtgtgctgaggtcccagaagcgaacggtggtgtcgcctgaaccgctagccaggcatctcccgtcggggctgaaagaaacggccaatacagcctccgtgtggcctgcgattgtggctgagcagcggttgacgggcctgatgcggaagacggcctgcggctggtagacgatgcgcagggtgacctcggcggtggcgttgttgcgttgcatgaaggcgccgagctggagggagagctcctcatcgccgacgtagaaggcgtagggaagcttgtcctcgttgtgcagtagttggttgacgatgtcctggagctgcggcggtccgacgttgtgcggcaggtagagcgccgcgcccagctgctccccctccgcgctcaccagctggcacatcacgctgctgctgctgccgttcccggcggcggcggcggcggcggcgtccatctctccctctctctctttttcttctctggtttggaagggaggggagaagcggcggcggaggaggagggaaagagagagggcggctgctctgctctgtttgggcc

SEQ ID NO: 5421 - DNA, 2044 bp, Triticum aestivum
  Clone ID: TRIAE-23APR03-CLUSTER899_1
cccccacgcctccccccccccttggccccagcgcgccgccgctgctcgccccccacccccccccccccccccccccccccccccccgctcccggacgtcccccgcttctccagatccgccgccgaccctgctgccgccccgtcctgacgaaaatggcgatgatggtgaatcccacgaatgacatgggaaaccactgctagccattgtacccaatgttgtagaccatgttcgccatgcgagagcaagtaagggccgatcaacccccatcctgaagaggcacctccagcatcattctcccctcagaccaaacagatagaatacacaacagatttccgtcacgcatgacacaccgggtgttgagataatacccacctaggcgcctccgccctcccctcgccatctctccccactgctctaccttcccctctagattgaaaatggcaatgctggagggtatgccggttgatatggtgaaccaggttaaggactattaccttattcgccagaccttgtttgacattgacacgcagtatgtgcccaacaaaccccaaggcctaggagcttatggaatactttgctcatccataaaccgtgagacagacgagaaagtagcgataaaaaagatacataatgtattcgacaatggagtctgtgaactaaggaccttgcgggagctgaaactcctccggcatctccgccatgagaatgttatgttctttgaaggatataatgatgcctgtacaaaggaggagctttaaggatgtgtacttggtttatgagctcatggatacagacctgcatcagataatcaaatcgcctcaggggctttccaacgaccactgccaatattttctttttcagttgcttcgaggactgaaatacctccattcagcagagatactccacagagacctaaaacctgggaacctactggtgaatgcaaactgtgatctgaagatatgcgattttggtcttgcacgtacaaacagtagtaaaggccagtttatgactgaatatgtcgtcacccgctggtatagggctcctgagttgctgctttgctgcgacaactacggcacctccaccgatgtttggtctgttggctgcatctttgctgagctacttggccgcaagcctattttccccgggacagagtccttaaatcaactagaactgatagtcaatgttcttggcacgatgagcgagtctgacctggagttcatcggacaacccaaaggcccgcagatatatcaagaccctcccctacactcctggtgttccacttgcaagtatgtacccacatgcacaccctctggcccatcgatctattacagaagatgctcatcttcgaccctactaaaaggatcagtgttacccaggcccttgagcacccttacatgtctcctctgtatgacccaagtgcaaaccctcccgcgcaagtgcccatcgatctcgacatagatgagaacatcagctcagagatgatcagggaaatgatgtggcaggagatgcttcactaccaccctgaagccgccacggcagtaaacatgtgacgacgatcttgcagtgccctgggaagaacccggcaggctcactccttttttcctcgaaaagactactgcgattatcgcacctattaagtaaccacgacgtgcagtgtggagagttatctccgtgtaaatatgcagtgcgataagaaccgcatatggatagttcttgttatggaccactttggtgtatgtatactgttgtgttgttgtataagctcatgaaagaactgttgaagcgaattcagtaagttgttaaggaaaaaaaaaaaaaaaaaagcggttcgcccttcatgagccgattacaactactggccctgcttacaacgacggactgggaaacccggatggcccaataaaagcctggagcatcccgcttcgcaagtggtttatacaataggcccccccatggccttcaaacatagcatccgaaggcagggaattttatctgattctgtaaagccgtgaaatcagtagccgccctcttatcatgttttttt

SEQ ID NO: 5422 - DNA, 1664 bp, Triticum aestivum
  unsure (1)..(1664): unsure at all n locations
  Clone ID: TRIAE-23APR03-CLUSTER899_2
ctccgcgtgcgctccccacccccttcctcccccgctcccggacgtgctctgcttctccagatccgccgccgacgctgctgctgccgcgtcctgagaaaatggcgatgatggtggatcccccgaatggcatgggaaaccacgggaagcactactacaccatgtggcagaccatgttcgagatcgacaccaagtacgtgccgatcaagcccatcggaagaggagcctacgggatagtttgctcctcgatcaaccaggagaccaacgagaaggtcgccatcaagaagataaacaacgtctttgacaaccgcgtggatgcgctgaggacgctgcgcgagctgaagctccttcggcacctgcgccatgagaatgtcattgccttgaaggatataatgatgccgatacataggaggagcttcaaggatgtctacttggtctccgagctcatggacacggatctgcatcagatagtcaagtcgtctcagccgctgtccaatgaccactgtcagtatttcctttttcagctgctccgaggactgaagtaccttcattcagcggggatactccatagagacctgaagcctgggaaccttctggtcaatgcgaactgtgacctgaagatctgtgactttggtctggctcgcacaaataacactaaaggtcagtttatgaccgaatacgttgtcacccgctggtacagagctcccgagctgctcctctgctgcgacaactatggcacctccatagatgtctggtctgttggctgcatctttgctgagctacttggccgcaagccgatctttccaggaaccgagtgccttaatcagcttaagcttatagtcaatgttcttggcaccatgagcgaaactgacctcgcgttcattgacaacccaaaagctcgcaactacattaaatcccttccatacaccccaggggattcccctcagtagcatgtacccgcacgcccatcctcttgccattgatctgttgcagaagatgcttgtctttgacccttccaaaaggatcagtgtcacccaggctctggagcacccctacatgtccccgctgtatgatcccagcgcaaaccctcctgcgcaggtgcccatcgatctcgacatagatgaaaacattggcacagatatgatccgagaaatgttgtggcaggagatgctccagtaccaccccgaggccgccaggatggtgaatatgtgacaagcaggaatgaacatgtgagagcagtgtgccacaccagggtcttcacatgttcgttcttggtataaagctttaatgcaattatcgcaatgccgtcgagtgacctgtttatgtaaatatgtgcacaataaacggcgtatggatttctctagctgtgggtcagtacttggtagtatatatggactgctgtgttgtagaagcggaattcggttatgaagaagcttgtgtaagttgtaatctttttttttccttgattgtaagtttgtaatcttagacactgctctatgtatatggactactgtgttgtagaagcggaattcagtttattacgaattgggttatgaagaagctcgtgtaagttgtaatcttctcttctccccatggttgtaagttgtaattttagaagctgctctatgtatggaggtntaaactttcaagtgaccttgttttgcttc

SEQ ID NO: 5423 - DNA, 1225 bp, Triticum aestivum
  unsure (1)..(1225): unsure at all n locations
  Clone ID: TRIAE-23APR03-CLUSTER90403_1
ttttttttttttttttctaancacaatatgaaacaccgtttatccaatanaaaactgcaaaagcgcaaactaaaagagaggtcataaacagcagtattagcacacaanatgtgcacgtccacgactgcattttttacaacagaaatgccatagcaacaaaacaggccactgtatctgatctgagggttgtcaacatcttttcataatcgctatacacacagtatataataatagtagtaatacaaagaagatggatcagtaaccgagcagagttgtgcctactacacaaggaccagagatagcaaactttaatctgaacaacaaccccccttccttaattcctcatgcactagtgtgcccacctctagaggacatttgaaactagtgcgtccatcgccaaaacgcaaccatcagcacgacggtgatgatcatgccgccatacgcgatccgcttgtcgacccggtgccgcttctcgataagcttcaagaccgagtttgacaggccaacagtgttcaggacatccagggccttcctttgcgcactcttcagacgatccctctggtcagagtacttgtggaggatggccactcctgtctcaaaggcttcgtcaagcattcgagaggagctacgggccgattgcattgcctgggcttcgtcgtcgaatatttgaaggacatgcgacgactcaccattagctctctcaaatagctccgccctttccttggcttccaaaatccgctttcgttgccgcaatgagtgcttgtcgagggtttccttcaatgactcgacctcttcagatagctgctccacttttctcttccagaggtcgcgctggcccttggcggggatggagcgccagaggcggtccatctgcgcgcagaggccctggatctgcgccacctccctgcgcacggcctcggcgcccgccgggtccggcgcgccgacgagcggcgccgaggcggagtaggaggaggaggcgggcgccgaggcgagccgctccacgcgggccacgccgtcgcgggccgacagcagcagccgccgcgcgctctggtacatctccgacagcgtcgcgccccccgccccgccggagaaatccatcgccgccgcggtcgagatcgatcggtcgatcgaggagggagagaggggaggatttccttctggccgagcgaggcgttgtcgccgccgcccccgccgcggtcgaggattgtctccggtgtctcggatc

SEQ ID NO: 5424 - DNA, 1569 bp, Triticum aestivum
  Clone ID: TRIAE-23APR03-CLUSTER90410_1
ttaaatatgaactcatgcaagcttcacaaaccatcgaagcccgtgtactgtctcggttttttttttttttttttgacaaaggggagaattcccatactttcttacgggattttctgcatgagggcacaaaataaaatcaaacttttccactattaacacaagtacacaatatccctattaaagacaagtacacaatctatgcttttgaacatcctgtgaagatagatacatatggacaaacttcaccgcaaccccttgagatcaatggcaaaagaatcacccatccagaataaaagcagtacattacatgtataatcacttgtgatcagaagaacaatgcacattcatcactcagctgacggggtcgcgttccggtccggggttgtagaggggcagctccaggaggaatgccaccttgaaccaatcgggcagggctccatacacgaccggcggcaatgggataagagggcttgtggttttcttgtatgtgcggtattcctcagaccgaccaaagcgcttatcagcagatgactcaagaagtgggatcccactaacgaaaagaagcaagagcgtcaggaagatgggccccaagattacaagccattcagctcctgagagaaccggggttgatgctacaaacaccccccaccaaaggaacatctccccaaagtaatttgggtgccgagtataactccaaaggcccacattacaccactttcccctattgcttggagagttcttgaatttaagcttttgctgatcagctatagcttccacagctagccctatggcccacattatccaaccaatgatatcccgagcttcaatagaagggtttctgctacttgcgttcacaatagtaacaggcaagctgacagtccaaacccagacagcctgaaatgtccagaagacagctaattttcccaagttactgcgcatctcatcaaaccgtttatcctctccccattgcaaaatcctcattagtaaaaacactgccagacgaagtccccagattataacaagcactgtcaacacgatctgacggaagtgccatgttcccttcaaagctgctaccaggacggcgattatgacaaaatttgtactgcctgcgaaatccgtgaccttgtcgaagcggaggagggctgtgatgatgaagaacaccagctggtacccgacggtgacgagggcggtgagcgccaggaagtgggagtccagcactgttcccatcttctcgccttttcttccccgccggccgtcagtggatttgttggtctgtttctttatccttctccctttcctttctttgagaattaaaatgaagtgagaagcgagcacgcgcgccggccgggcttttaacgggggttggactgggttcggtcgacggcggcggcggcggcgatgcgacccggcggagcgcgttgggagggggaggaggtcaggaggacttgtcagttgtcacttgtggctggaggctggacagggaggcgggcgaatgcgtgcgacccggccctggtggtgcgaatgcgcggctgtgcgagacgggaccgtggtgcgatcgcctcctcgtgc

SEQ ID NO: 5425 - DNA, 755 bp, Triticum aestivum
  Clone ID: TRIAE-23APR03-CLUSTER90420_1
tttttttttttttttgggtaaaacatccgcagatttttatgagatactgttattcgaggccatttggagcgcatacataagctcagctctcatgtaaatttagaagaagaagaaaacaatttgaactcaacaaccgcacaaccggcgaagtgaagaagccttgatgctccgatcctgatgatttctagagatccatgtacatccggtaagcattcctctgcgcggagtagtagccctcgatggtggcgtcgacctgcaacccggccttccggtaaagcgccaccgcggccgtcctcgccgggtcgacgtggagggacacccgctggacccgcctcctccggcacctgtccacggcggcctgcagcagcgcctcgcccaggccctgcctccggcagctctccttcacggagtttggtgatggaggcgcagaggaaggtggtgcaggtgtacatggcgtacccagcgacctcctcgtcgtcgccgacgccggacgtcgagtagatcaggccggtgttccggcgtttgagctcgtcgtggaacgagcgcgccagcgactcgtgcttcgggaagatcctcttctccagccgcacgatgtcgtcgataacgcggccggcgcgctcgtgcgaagggtccagctcgaggatcgtcgcttcggtcgcggccgccgccatagctcgtcacggatgggagtgaacgtggagctctcttttgcaatttgcccccgcttctcccccgggtagtctggcagtagacct

SEQ ID NO: 5426 - DNA, 1323 bp, Triticum aestivum
  Clone ID: TRIAE-23APR03-CLUSTER9100_1
cgcggccagccccgcattcgcgttcccttcttcttcccaccctcgccgcctcggcctcctccctccctccctccctccccccatttcaaaccaacccccgtaccacaccacaccacctagggtttcttttccttccaaggagcaagtagcaccgcccgatccggcggcgggcggcccatggacaagtacgagaagctggagaaggtgggggagggcacctacggcaaggtgtacaaggcgcgggtggcggcgacggggcagctggtggcgctcaagaagacccgcctcgagatggacgaggaggggatcccgcccaccgcgctgcgcgagatctccctcctccgcctcctctccgcctccctctacgtcgtccgcctcctctccgtcgagcaggtcaccaagccctgcggcaagaccgtcctctacctcgtcttcgagttcctcgacaccgacctcaagaagttcgtcgacggcttccgcaaggggccctcgcccaggccgctccccacccaggtcgtcaagagtttcttgtaccagttgtgcaaaggaactgcgcattgccatggccatggcgtccttcaccgggatttaaagccacaaaacttgttgatcgacaaggagaaaggggtactgaaaattgccgatcttgggctaagcagagcttttactgttcccatgaaaagttacacccatgagattgtgacactctggtatagagctcctgaagttttacttggagccacacattactcaactggtgttgacatttggtccatcggttgcatctttgctgaaatggtcagaagacaagctctttttcctggcgactccgagttgcaacagctgcttcacattttcaggttgttggggactcctaatgaagagaagtggcctggagtatgtgctctgagagactggcatgactatccacagtggaagccacaacatttgtcacgtgcagttccaacactggagcctgaaggactcgacctgttagggaaaatgcttcagtttgatccagcgaacaggatctcagctaaagcggcaatggaccatccctacttcgacagcctcgacaagtcccagttctagttgttgctgctgtcttgggagttggtccttcgccatggagcgaggagattggagatttgatttgcttgccatctaggcaacctgatcgatcttgatttatcagctactcggttttgttattgagtgggcaatcgatttgcctgtctttttatatatcattgtatggattcggggtcggaaactaaactgccactcatgatattccctgatgtttccctccggcatgatgct

SEQ ID NO: 5427 - DNA, 1423 bp, Triticum aestivum
  Clone ID: TRIAE-23APR03-CLUSTER91097_1
ggtagcgttttttttttttgccttgtcaaatcaacagcagccaaacacaaccgaaaatgttcatacaacctcaaacgccagaaccaatttcagttcaatggacattatggtcgatcatacaacgcatcaaactccttggtgctaaacaagacaatcacgctcttgtctggaaaagatcttggagatcgattatatcagcgagaactcctgcggcagtggtgtcgttcccggctcctgcaccctggatcaccagcggggagctctcgtagcatctgctgtatatctccaccacattgtcacttcccctcaatctccccagtgcagaatcttttgggacctcttgaaggcccacttgacaccctgtgcttccaatgacacaaacatagcgcagaacatttcccctcaaagatgctgccttgaccctttcttcaatcgtctcatcaagttttgccaacccactctcaaggaaatccgttgtggacataacctcaggtcctaactcactcggatataaactctcaacattgatattctccatgctgatctgctgcccgagaagcctagctaggatcaacgcctttctagccacatccatcccacttagatcatcacgtggatctggttctgtataaccaagagccttggcagttttcacaacttcactaattttttttccatcctccagctcactcatcacatagccaagtgtaccactcagactgccaacgattcgggaaactggatctccagatgcaataatgcgggttacagaagctattacaggcaaacctgctccaacggtagattcaaatcttatctgacggaagtgggatgtcaactttttaaaatcctcataagcacatgtaagaggttttttgtttgccaaaacaacgcagcatccatgatccacggcatccttcagcacaccaacagtgtcataagttgcagaacaatcaactatcaccagaccggttgttcttccaagcatggtagcagcatcgatgactttccccattgcctccggcttgttgaacacctgacagtgcccgcgagcgagcagcgaggacaggggcgagccggcggacttggcggagcagaggtcgttgaggagcgcgtcatcgaggccgctggcgcggacgtcgtctgcgacgagcagcgaggagctgtcggcaacgcccaccacccggatggcgacgccctggttggcgtggagaggcctgcaggagacgatgtggcggaggaggtggcggccgacgccgccgcagccgaggagcaccaccggcaggaccgccctagcctgcgcctgcggcatttggaaactcggatcggcttcgattcgtctcgtccagagaggagttgctggagtgttcctagcgccggcagcagagtttttagctgctccgttgggggttcggccgtttgg

SEQ ID NO: 5428 - DNA, 1844 bp, Triticum aestivum
  unsure (1)..(1844): unsure at all n locations
  Clone ID: TRIAE-23APR03-CLUSTER9148_1
cttcctcattacgccgcacgttcccactccccctggcttcgttcccactcctccaccaccccaaccctaccgacccaacacaaacagcacagggcgacagcgcgggcccgccacctcgccgcccgccatggccggcgctcccccgacgcccgccgagaaggacgccctcgtctcctccttcctcgagatcgccgccggccagacgccctactcggcaacccagcccctccgaaggaccagatcgcatctcgaggaggcgctgcaactatcctacatcgccgggagggccgcgagcgccggggcacctccgccggcgcagcgcgccccggaggccgcgcggccggcggctcccgcggccgccgaggtggaggaggggttcaggttccatccgccgccggcagccgcgcttgaagatgggatgctgcaggcggtcgggcacgacgacgatgtccgtccggggctgggcgaccaacacgatgcactccgggggcgcgccgccattcaaggaggccgggccggccacctccatgagattccgcttctgggactaggcccatgttaacaaggccccatcatcttgcaagtcgtgccattccttggggggcttcgtatgtttagttcctcctgttctcgtgataaactggcttctttatatcgcccacctttcgatttgatgttcaatggaccatttgacaaggcaaagttagaggcctcttctctagacaagtggctcttgatcaatttgcagtcaacagaagagttcagctctcacatgcttaatcgagacacttgggcaaatgaagcagtggctcaaacaatcaggtcaaacttcattttctggcaggtttatcaagataccggtgaggggaggaaggtgtgcacctactaccatttggtctctgttcctgccattctcctaattgaccccatcactggacaaaaaatgcgtggttggagtggaatggtttacccggacagtttgctggaggatttgatgccttacctggagaaaggtccaaaggagcaccatgctgctcaacctcaaaaacgcccaagaaaagttgaccaggaaacctctatggataggcaaggtaaaacagctgtagagagtgaagatgaagaactagcacgggcggtggcggcttccttggaggagaacaaaggagccgggggatcagatggcgctgatgagaagtctaatcccgtggaagagatggagcccagcttgagcgtgaagatcgagtatcccccactccccgaagagccgaaagtgagcagggaccttctctgcagggtcgcggtccggctgcccgacggtcagaggattcagaggaatttcctccacacagatcctatcaagctgctgtggtcgttctgctcctctcgggtggaggacggggagaagcgggccttccacttcgggcagcccatcccgggcgcggccatcaacaagctgcagtactcgagcgagcagaccttcaaggaggccgggctggccaactcgatgatcaacctcttgtgggactaggcccatgttaagaagaccccatccccttgcaaatcgtgctattccttggtgggcttcgtatgttttgttccttttcgcgaggattttaatttaacttatcgccttttgtttttcactcccggtggtcgtagacttggttggtaggcttggagctcaagtgtgtcggtcatgttttgtttatagaccccctcccaccctgtagtaggacttggttcgacttgatgcacatattattcatagcgaccggtgctggtactgagtgctagtggtttttnctaaaaaaaaaaaaaaaaaaaaaagaaaaaaaaaaaaaaaa

SEQ ID NO: 5429 - DNA, 1403 bp, Triticum aestivum
  Clone ID: TRIAE-23APR03-CLUSTER91532_1
acggtatcgataagcttttttttttttttttttggagctaattcttaactcaaatttccatatatcattagccgcatgccactaaaatacaccacagatgaatacaccacagatgaatgctgaatcatggaacaaagagttggccatccacagtaactctgaacacatggcacaaaaattgtgaccaagaaaaatcgaaatgctatagaggcctgcacaagaagaccaaattcttgaaagcaattgagggaatggctgttaaataagttgtaataattctcagcccttggttcttagtattgtgatgctgcctttcccaccttctgttctgattcttgtcttgccaatgacgggcttcccagagaaagctgaagtttccaggatttctggaggcttctttggaggagcatggatgcgctgatttatatccttgagagtgacatctccttcttcccaagatggtttgataagggtaaaagggtatgctatagatgtagttacattttgcttcgccttgatcatcgagcttcctcctttagatactttgagcgtagaaagtttcctagtctcatgcattatgagactttctgtcaccggagcaatctcacttgttcctggcacatcggtttgacaaccaatgtatgtaacgctctcctggctagaaggcatttgatcaggcgtgtagtacatagtagctccttcagagtaattatccaattgattatctgatggctcgtaggatgcttcattagacaaggaactgaacttatctaaatcatctgaattgagctgcatattccagtttaaactctgtggttcatcagtgcaaagcaatgaagtctctgctacctcagatgtcacaaaattagaacacatttcatgatcaccaacttctggctgattaacctcagaagggtactccaacacgcgtcgccgctttgattcccgagactcctccaggtctagtgtctccttgcaagtgatatccccaatatcaaagaaggcccggcagtctcgcagaggagtttgatttcccagtaatccaagtagctcatcatcatcatcatctcggttgaggcaatcccacacgaacttagcaacatcatgatttccatcactaggttcgccatgctccttctcttgccaatcccacagaatttggttgttgccgtcgccatcgccggatgcgccgcctccgcctccgcctccgtcgcggcgcgggtccatcggccccggaaggcctgccccgactagccgttgcgacgggaccccccctcccctccctctcctttgactctagtggacggggagacagacagaaacactgctcctccgctgtctactcgattccgcagcggctcgggtagcgccgcatttgtagtccgagagaccgaggtgggaga

SEQ ID NO: 5430 - DNA, 1606 bp, Triticum aestivum
  unsure (1)..(1606): unsure at all n locations
  Clone ID: TRIAE-23APR03-CLUSTER9169_1
cggacgcgtgggcttttcttctcctctcttctcttccacctctcggcgacgggtaagtcacaggtacggtattcgtaatcggttcctttcgctgttcttcgtccgattgtattccaggcgagcgttctgtctcggtcgtcgtggtgctctttccgtcgatgtcgaggtcttagtcccggtggtttcaccccgtctgttccgttgatatcggtaccgtgttctgaacctttgctgctttgatttagggtcgcggctaatctattctgctttgacttctgatctgatctagggatccatcatgctctgattgcgatgtgatttagagccgtgccttatcatttatcatgatcatggtcatgattgctgatttgatttaaggttgtgatgggtaatggagattatatttggcgggaataacgagttccgttggtaacttggtatagatacgtggagcggttcgtttggtttaatttctgttcgttattcgcggattcgtctcgtcggtttagttggttccttggagatgtttgacatgatctgaatgagagattgaaggttgtggtttcagttttgattgttctgttcaattcaaggtgattcagtaatgttctgcgtacaaagtggttcatatttttgaggcgaaaaacagagggttggagacagttcaaacagtcaaaattctgcagttcttttgcttttgatcccgttccttcatacttagtcagactcaataagaaatctggatatatttgctttctcctagccgcctatacatgtcagattatatatgaaaaggattgtgctatattaccatgttatgaaggtagagctgggatatgcctttcttgaactgtgtggacatgctcatggcggaggtgattcaacttttggttggtttcatttcaagattgctaggaaaatcggaggtgcttgttgtgtttgcattctagatgtaattttcttgagaagtacctcaaatgaacatggaagttttgcctttgaagcgatctgtttgaaggttctttcaagtagagtgaagaaactcttggattgtgtctgcaaaattagtttactgctgctgtgtttatctcgagtggtatgtcaaggtctattcagatgctggttactgtgtgggattctaccaatccttctgatcactagtttgtgcgtttgattttctacatggatattcgtttgggcttcagccggtttcatgctctgcctggtgttggattagtcttcgcttgataattagtattcttattgtaatttgtagccatgtttttatgattagtatgttctaatgcaatttatgttgtacacaattgtcaattatgcatctgttctgatgttgcgtactgtaactgatgtaattgttgaatgatatatggatgccataatttagccccaaaaaaaaaaaaaaaaagcttatcgatcggtccgaccttcgaggggggggcccggtaccttgatgttcttttttcctgcataagttacatttctattcattgttcatccatgcaaattcagctgagattattgtgaacatcctgtttttgtagttctcatcatctcaagttaataananactttnacctaacatttt

SEQ ID NO: 5431 - DNA, 1144 bp, Triticum aestivum
  Clone ID: TRIAE-23APR03-CLUSTER91_32
ttttttttttgcaaaatcattcagccattcaccaagatataaaccaagtagctacagaaccaactttgtctaagcttatcaccaacacctaagttcctagtactaattaacgacagaccctcataacaaagtattaactatttccttcaagtcgccttgggcttcttaggcatcctgtagccaccgacaacgcaggcatggtcacgctcgaagggctccagggtcacctgctccgaaggcttgaactgctcaagcttcagcttctcaacttcggcggcaaacacggcctcaggggcctgggtggagtcgatacagttggccttgattgaaatgacaaagtgaccaccattcttcaagaagtatgaagcattaagggccaagatcctagcctggtcaggctgtgcaacatcagagaagataacatcaaccatgccgaccaacatccggtacttggcagggtgcctagcatcctcgatgatgggaatcacattggtcctcttcttggccatgttgacaagatccctgccactgcggtgcgagaactccacagcatacaccaacccagtcggtccaacaatatcagacacatgagacactgtcgttccagaggcagcaccaagatacagcacacgagcaccaggagcaatccagatgttgtcgacgccaccaagaacagcggcggccagctttgacctgaaggggttccacaccctgtactcaaccttggtgccgtcctcgttctggacggagacgcgcttctcgccgtagacggactccccggcgaccatgttcttggtgcagagcgcgtcctccttggccttggcgatgaagacgccgtcgtgcttgtgcggcaccacgaccaccttgctgccgcccttcatgccggcccctccccttccaccgccgccacgaccaccacggcccctgggcgtcctgcctcccctgccgcccctgcccccgcggccgccgccatcgctcctgccgccgaagcccctgcccccgcggccgccgccgtcgctcctgccgccgaaacccctcccgccgcgtcctcctcgtgccggtggcctcatggtgtcggaaatttgtcgctgccgccgccggagatggaggaaggagggagcaggaggaggctagggtttttgag

SEQ ID NO: 5432 - DNA, 1001 bp, Triticum aestivum
  unsure (1)..(1001): unsure at all n locations
  Clone ID: TRIAE-23APR03-CLUSTER91_33
acgaatccctccgcctcgcgtaggacgcacgctctcctcttcttctccaaaggcaaccacacctccctctgcgtctccgtagcctctactcgcttgtgctttgggcgattccatccaaggacagaagaggagaggagaggagaggaggaggcggcggaggagaagtttggtagggagatcgatggggctgtcgttcgggacgctgttcggggcgctgttcgccaagaaggagatgcggatcctgatggtcggcctcgacgccgccgggaagaccaccatcctgtacaagctcaagctcggcgagatcgtcaccaccatccccaccatcgggttcaacgtggagacagtagartataagaacatcagcttcactgtttgggatgttggtggccaggacaagataaggcctttgtggaggcactacttccagaacactcagggccttatctttgttgttgacagcaacgacagagaccgtattgctgaggcaagagatgagctccacaggatgctgaatgaggatgagctgcgcaatgctgtattgcttgtttttgctaacaagcaagatcttcccaatgccatgaatgctgctgaaataacagataagcttggtctacactctttgcgtcagcgacactggtatatccagagtgcttgcgccacaagtggagagggtctatatgaagggttggactggctctccaacaacatagccagcaagtcctgaaggcttccaatggattggcagggccgcagaagcaactagcggctggacaaatgactggaatatgtaggcatgttaaaatgctgccagagtgttgacatgtctttgtaagctcgatctttgagctgttatcacactgctactatgttgtatcaatgattgaatgtacacacgatgaaaccctttatgctatgtgaaaatgataccatgtcaggtgctncctggcctgagcctgatgagtgatgatgatgatncctgnccctggttttgtgaaccg

SEQ ID NO: 5433 - DNA, 1679 bp, Triticum aestivum
  Clone ID: TRIAE-23APR03-CLUSTER91_34
ttttttttttttttttttactgtagaaaaaaaatcatcttttattcagagcaagcgtgcacgaaagatttatgttactgataatacatccctttttgtcccccacgaaattacatttcttcaaacttcttcttgcctgtaaaaattattcttctgctgtgggtctttctttgctgcttgtgaggatgatcgatttggtttggtttcacgcctctactttgcagcatccttggacaggaagttgtgcgactggatgtggcgcacgttggagagctcgtccaccgagtcgccccgctcgaacacggccgccgcgcccatgccggacccgatgcacatggtcaccacgccgaatctgcagtccctgccccggcgcttcatttcgttcagaagggtcgagatgcaccggggcacctgttgcgccaagaggatgccccatagcgatggctcctccgttcacgttcacctttgaccggtcgaggcccagcttgttgcagcagtagacaaattgggaggcaaaggcctcattcaattcaaagagatcaatgtcgtcaatgtcaaggccagcagacttgactgcagcaggtatggcgaccgcaggaccgacgcccataacagctggatccactccaacagcagcgaaactcctgaaaacgccaagtatagggagccccttgctcaccgctacagatctcttcatgagaagaacagctccagcgccatcactcacttggctagaattacctgcagttgtagtcccatccttcttaaaaactgtcttaagcttggccaatccagatagcgtggtccctggcctaatcccatcatcaactgatatcacaactttcttttcctctccagttttggggtcaataagctttgtatgcactgaaataatctcatccttgaactttccggaagccgtggctgcagcagctctcgcatgagactcaacagcagccttatcttgctcttctctggttacaccgtatcgctgagcaacattttcagatgttattcccatgggtagaagacaatcctgtgctttctgtagttcaatgactcttgggtttacttggccttcccaaccaacggagttcaccgacatggattcaagacctgcaccaatcccgatgtcatagaaaccagcttttatagcagcagcaacatctgctactgcctgtagccccgatgagcattggcggttcacagttctcacaggaacggtctcaggaattccggccaacagagatgcagtcctgcactcaatcgcacgctgagaacctgggcctagcaccgtcccgaccacaacatcgccgatttgagctgggttgattccagttttgtccagaacagccttgagaaattgggtaaggaagtccttccgggtaggtgtccttgaagccccctcgcttggcctttgcatatcggcgtccgggtaggcagcgacgatgacggacgtcgttccccgaagcaggagctccgctggtaggcggcgctgtccccggccgcgcacgccgacgcggatagctgggcctggctggatgcggaggggaggaggtgcgcgaggagcacgcgctgccggtcgatcgccttctccatggaagaagcagggagagatctctcgcgctgactctgaggagttcggggtcgggggagggaggcgtgcggacgcgtgggtcg

SEQ ID NO: 5434 - DNA, 1258 bp, Triticum aestivum
  unsure (1)..(1258): unsure at all n locations
  Clone ID: TRIAE-23APR03-CLUSTER92158_1
aattgctttctgtaatctcaaaatcgattaaccgtatccgtctccacctttaagctttccaatggcggaaccctaagctaattccacgcctcccacctcgcgcagcgcgcatggaccagccggcgtcggacgccggcggctttctcgaggtccgcctcttctacgtgcgcctatcgccccgcggctccggagctgccgccccgccacggctctcgctggccatccaccacgccggggccgaggcctccccctcctcgctccctctccgcctcgaccgccgcgacccagtctctggcgaggccacctacgtctccaccgcggccgcgcgcctccccccacccgacgcctccttcgaggttgcagaccaccgcgacgccgccctcctccgaggcacccttcgacggtgccctgacgccaaggccgattcccctgcctgggcgatcgactgcgtccccgccgatgcagcggtggcctcagcctcggcctttgaggtctatgttgccgggtactgtgcaggcgaacccgccgttctcacgcgagccctgcggctggccaccccggaagaggctgctggcgggttggttcgccggcgatcagcgcctttggcggctatgtgtgatgaagacgagagtgacttgaacatgggaaccagggcataccctgaaggatggtactctgatgacgacgacgggcaactcacatggttcaacgctggtgttagggttggcgtcgggattggcctgggagtctgtgttggagttggtataggcgttgggctcctcatgagctcctaccaagcaacggccaggaacctgaagaggcggttcttctgacactgtcgctacaaaggcacacgctcggacggccagtaagtagagacagcccatccgatgatgttccgcagtgaaccaaccgccgtatgtatagttggtggatttgttgttcgttgcattattgctggtcgtgtggagtttttgactcgtgtagctctcatctctgtgtatgtaatctgtgaaggtgtccctgaacttgtggaagtggcaaaaatgggttcggcatggagcagccgcactgtggccttattttgtacgcttcagaattgtgctataagtcaataatgtctatacaagtgcgacctttcgctatgagcgaatgttgtcggatgtgggtaaaaaaaaaaaaaaaaaaaaaaagaaaaaaaaaaaaaaaaaagcttatcgataccgtcgnaccctttcgagggggggggcccgggtac

SEQ ID NO: 5435 - DNA, 1565 bp, Triticum aestivum
  Clone ID: TRIAE-23APR03-CLUSTER9217_1
aaaccaagaccaccccgtccccaccctccctgccgccccgccacgtcccccgccgcccgtctcccgcccccgacgcccccgtctccgctcccctgtctgtccatgctccgtgcggtctcggctgaccgagggggcggggcagcctggtccgcagcgagttccggccggatggcagccggaacggccaccacctgctcaagcagatccaccaccttaccaagctacttgctctccatgctgttggcgtttgatttgggatgttttcgcacaagatttgttcccgtttctatttggtgtctttgctcagcagcgtgtctctgttgagctctagctgtactgcatcgttatccaatactggcgatacttgtggtgggttttgggttttggatgagcacccacaatgacgagtgccggcggtcactcacaatccctgtcatgggtcttggaggagtcatttttctcatgtcgctggcgggatttgtgggtgcttggaagaacatttcttgcttgctttggacatatctaataatgctgttcgtggtcctggtggcaatcatggtcttcacagtgcttgcgtttatcattacaaatactggaactggtcatgctgttcctgggtccagatataaagagtatcgtcttcaggactacagttcttggttcgtcaaacagctcaatgacactgataaatggactcatctgagaagttgccttgtgaagtcggatgattgcaatagcttgtcaaaaagatataagactctaaaacaatacaagctcgctgagctgactcccattgagtctggctgttgccgcccaccagcggagtgtggatatccagctttgaatgcttccaattttgatctgagctaccatccggtgagcacaaacgtcgactgcaaactgtacaaaaatgatcggttcctcaggtgctatgactgtaattcttgcaaagctggtgttgcgcaatacatgaagacagagtggcgagtggttgccatcttcaatgtgatattgtttatcattttgtcattcgtgtactttgttggctgctgcgcacgtcgacatgctggaggtagtgattctaaagttcctcgaagatgactcttactttgaagtgaatcctctctatgattcacgtgtcacagcgagagttagctttaccgtcccttgtaaaacattgttcattcaagttcagctgatgaaatggagtgtcaaggcttctgttctgtgggcgatttctttgtgccagtagcattttggacatctatgaaaatgaacgtcccacaatcttctgaaatacagcctcatgatcttgtaaaaaaaaaaaaaaaaaagcttatcgatccggcgacccccgggggggccggggaccaggtccccttaaaggagccctactccccccctgcccgggctcgcggggggaggaggcgaaaccctggggtaccaatttaacccttgggacaatccccctttcccggggggtaatagaaaaggcccccaaatccccttcccaatttggcccccaaggggaaaggtatttaacccttaaattttgtaaaatccgg

SEQ ID NO: 5436 - DNA, 1103 bp, Triticum aestivum
  Clone ID: TRIAE-23APR03-CLUSTER922_2
aagaaccctagctaccccgcccccacctcgtcgcgtcccctctcccactctcgccgtcgccgcctcctccccctccggtctccgcccgcgaggcagcccccctccccccctccgccttgccgggagcagcgacggtagccgccgtcccaatcgagcgggagagaggggatcaggacagcaggaggaggaagagcgaggtcctcgagcgaggcactgcggagggagaggggaagaagatggtttcgctgtcgacgtggttccgctacgccgcccacaagtttgagtactccatctccctctcctggaagaagtacaccgtcgggcagatcaacagcactgagatgactgacgctatatggaagagcttcttccagggcaagctcaccttccgcagtggatcaaagggggcgaagccatggcccctgtcgtggctccgacaggaggaaccgtcctcgtcagaaagctcgccactttatccccaaaagaactctttgttggggacatcgtcttgttgaaggacccagagaaatccgacgatttaattgtccgacgactggctgccgtgcaaggctatgagatggtctctactgatgagaaggatgagccctttgtacttgacaaggacgaatgctgggtcatggcggataaccaagaactaaaggcaaaggaagctagggacagccgcctatttgggccggtccctatgactgatattgttggcagagttatatactctttaagaactgctgttgatcatggcccagtggacaacagccgtgtagccatgttccaggattcaccggttttggcggtagagctcgacgtggaagagatggtgaagaacaataaaatgtagataatgacatcctgtggtgtatcatttcccttgtgcggatcttttaaatttgtcgcttcaagtagaaactgcacgtggatgattgtcattcgatgttcgcttgtgatgtggtgaagtcaataatatctcatcataagaaataagcacacatgtttgctgaattctgatcatccctgggtctgggttattattactccatctttgtttgcgctatttgatgtgtgtgtgcttatgttgctattgctgt

SEQ ID NO: 5437 - DNA, 1502 bp, Triticum aestivum
  Clone ID: TRIAE-23APR03-CLUSTER92478_1
gtaccggggcccccccctcgagggtcgccggtttcgataagcttttttttttttttttttgaaactagaatagtaacctcggaatagagattttcgattttatatatctatctgaatcatagcttacacaacttattaaacaaaataagatccactcagtcgaccaaacaatcagctcaaaaccctaactgagtcagggccctggcatatatgccaggtaatgtacatggaacaacattgatctggcaggtcagtaacggggtaactcttgtaacccaggagctactcatatatccaatgcaaaatttaacagacaatcacgtgggattgtcaacactgcactgaaagcaaaagggattcttcgaaatttgtcctagtcttaatctgctgccatgaacgggtcgacgtcaccaagatcagcaatgagcggctccatgtcttccaactcgccttcttgtgagaagtacgtagggaatggcaggaaagctctgtcgggtttcttgtaaatagagtccttgacgaaaagaaagctgccttgaggaccaggaacctggcctttcagatacagtaagttcctggcagggtcaatttggtaaacccatacatttttcaccgtgcgttgaacaccacccatgcgcccaggcattttcctgtttttgaaaaccctgccaggagcatccctttgacctgtagaaccgatgctgcgatgtgataaagaagcaccatgtgatgcaggcatcccactaaaaccatgtcttttcatgccacccgcaaaaccttttccctttgtgattccaatgacatccacaaattgcccaggtacaaaatgacgaaccgagatggttgttccaacaggaagaagtgcatcctcagtaacaggaaactcctttaattttctcttaagagggactccttgtgatctaaagtggcccacttcaggctttgttagatgcttttccttcttttggcctgctccgagctgcagcgcgtagaacccctccttctcggcggtcttgacctggcagacgacattgtcgtcgacccagaggacggtgatgggaaccttggccccccacttgtcccacatcgccgacatgccgcacttcacgccgatcacgccggtccgccgggaatccgggcccatgacagcaggacgcgcctctatgatccggcctccgccctcgccgccggcgccggcatcgtcgtcgtcgggatgggagacgagaggctccgcggagaagaggcggcaaggggggaggcggggcccggcgagggagaggtggcggaggcgtgcgagaagacttctcgaggcggccgccatggcggtagcggcggcggcgttcgcgttggcgttggttgtgcgctggagatgggccgcgcggcgggatgggtgggggtttacgcggcggcgaggtgggtagggtttagtgaagtggggagatcggggggaatggcccagatggggaggagcacgcacatggccacacttgttagttgtaact

SEQ ID NO: 5438 - DNA, 1136 bp, Triticum aestivum
  unsure (1)..(1136): unsure at all n locations
  Clone ID: TRIAE-23APR03-CLUSTER9250_1
gttttttcacacaaaaacagaacaccgagtttctgtcttggttcggtacagcccggctgtggcacgcacggcaacggcgggtgacccgacgccaccctttccttcttctccctcgctttcctcaacgaatccgaaccagacggctggccgtcccgtcgtcgatcctctgaccattcgagttccctgcaaaggagaggaagggggaggatgggtggcgcgcgatgtccccggatgtgccttctcaggtctacaagctcgaagtccagggtcgcggtcacggcgctcggcccaccatgggcaggaaccccacgcaggtcggtcgggttccactgaatacacgctcggtaacgcgccggacccaccggtcggcagcaaaaagcccgagcagatggtcgggttcaaagaatatagcggcttccgagcttgtggggatgcttagcaggacaagaggcgcctacgcgacttcatgggcgacagactatacagtacctcatgctgtcatatgtggtaatcgacagcaccgggctgtgctcggatcaacatcatcaaggatgagctcttccggttgattcagcatgcagatcttgacaacacggtggtccttgtgtttgcgaacaagcaggatctcaaggatgccatgtcggcggctgagatcacagacgccctgtccctccacagcataaagaaccacgactggcacatacaggcctcgtgtgcgatcactggtgagggcctctatgatgggatgggatggatagcgcagaaagttgccggaaaggccacggcaagctgaccacaaaaacattgtgtgttttggtgaatttgttggaaatgggtgggaggatgggtttgttgttcctgccatttgggtgtttatttatgttgttacatactccctctgttccttcatgtaaggtgtattattttcggcactgtgaccaaggcacaaaattatagacatgtgatgacgaaattacccttggcaaaaaaaaaaaaaaaaaacgaaggtaggaaatcaaaagatagaagaataatgaaagtagagaatatagagggaagtgaggaaaagaaaaaaaaaagaagagaagaaaagagaagaagagnaaaaaagaaagggggcgccgttttagagggat

SEQ ID NO: 5439 - DNA, 1080 bp, Triticum aestivum
  unsure (1)..(1080): unsure at all n locations
  Clone ID: TRIAE-23APR03-CLUSTER9250_3
attccctaggccttcttatcggaaaagtttttcccacaaaaacagaacccccgggagtttctttctgttcggtacagcccggctgttgcacgcacggacggcggggtgacgcgacgacacctttttcttttctcctccctcgctttccttccacgaatccgatnccaaattcttcttctnccgtcccctngttagatcccgatcacccatcgaagggtttcagatntgagggagggggaaggaaatgggggcgtggatgttnnccgggggtgtggttttctccatgtttcccgggcnaaaggaagtacaaagatcggtggttcgttggggctcgaccaacccccgggaaaaggccccccccgctcttttccaagctcccctttggggagggcggtgtttcccccccccccccccccccccacctatcgggaacagtgaggagggtgtgttcaagaatatacgcttcgaggtgtgggatcttggaggacaagagagcctacgcgcttcatgggcgacatactatataggaactcatgctgtcatcgtggtaatcgacagcaccgaccgtgctcggatcaacatcatcaaggatgagctcttccggttgattcagcatgcagatcttgacaacacggtggtccttgtgtttgcgaacaagcaggatctcaaggatgccatgtcggcggctgagatcacagacgccctgtccctccacagcataaagaaccacgactggcacatacaggcctcgtgtgcgatcactggtgagggcctctatgatgggatgggatggatagcccagaaagttgccggaaaggccacggcaagctgaccacaaaaacattgtgtgtttcggtgaatttgttggaaaatggaggcaggatgggtttgttgttcctgccatttcggtgtttatttatgcatactccctccgttcctttatgtatgtaaggtgtactaccttcgtttcagtttacaagtcctacgcgtatatctagcgtatatctaggttgccaatttgatcaccttaatataaattatataacaccaaaattatatcgtttgaaaattgaacatctg

SEQ ID NO: 5440 - DNA, 892 bp, Triticum aestivum
  unsure (1)..(892): unsure at all n locations
  Clone ID: TRIAE-23APR03-CLUSTER9250_4
aaaaaacaaaacaaagaaatccgccgagtttttgtcttggttcggtacagcccggccgtggcacgcacggacggcgggtgacgcgacgacnccttttccttcttccttctccctttcctccacgaagccgatccaatctcctctccgcccctcgtagatccgatcaccagcgaggttcggatttgagggagggaaaggatgggggcgtggatgtcccgggtgtggtttctcatgttcccgtccaaggagtacaagatcgtggtcgtggggctcgacaacgccggaaagaccaccacgctctacaagctccacctcggcgaggcggtcaccgccgcgcccaccatcggcagcaacgtcgaggaggtcgtgttcaagaatatacgcttcgaggtgtgggatctaggaggacaagaaagcctacgcacttcatgggcgacatactatagtggaactcatgctgtcatcgtggtaatcgacagcaccgaccgtgctcggatcaacatcatcaagggatgagctattccggttgattcaacatgcagatcttgaaaacacggtggtccttgtgtttgcgaacaagcaggatctcaaggatgccatgtcggcggctgagattacagacgccctgtccctccacagcataaagaaccacgactggcacatacaggcctcgtgtgcgatcactggtgagggcctctatgatgggatgggatggatagcccagaaagttgccggaaaggccacggcaagctgaccacaaaaacattgtgtgtttcggtgaatttgttggaaaatggaggcaggatgggtttgttgttcctgccatttcggtgtttatttatgcatactccctccgttcctttatgtatgtaaggtgtactaccttcgtttc

SEQ ID NO: 5441 - DNA, 811 bp, Triticum aestivum
  unsure (1)..(811): unsure at all n locations
  Clone ID: TRIAE-23APR03-CLUSTER92735_1
gacatnaccacatacaataccacatgccaccgcttctgtttcttctcttgtcttgtctttcttcccaccaagattcatgagagtctgcatgccatagaataccgttggcttttccttctcataaacttgcagataacaaagacatgtttttggggcatagccagtagcccacagcagtatacagttaaagattttgcgcaaaaggacacatcatatggcagccacctagctagcgcggtttcctatcaaactccgactcgcgacagtgtgggtcaagccagtcgcgacgagaactcttcgccatgcccctaccatctgttgtcacagcccccatgagctctcttaggctttccaccttgttctcctgagcattgccactggatttcctatctgcttccttcagcttgtttctgacactctgcttacggccaactgtgttaagttgttgctgctttgctcctgatggtggcgccccatgaggtcccaggtatatcttctcctctttagcctgctgaggttcaggatcccttgctttggggacactgtgtgtagtaacatcatcatcatcatcttgaatagtcacatcaggaataacaaatccatccgcatcccactcgtcgtcggaggcggaggcagaggcgtcgaggggcggcggggacgcttccggcggcgaaggggcgggggcgggggcggccgccatggaaaccggtgagcggcgaggaggatccccctccccctcctccaaggatacctacctctcggttttggaattggattccgattccagtgctcgcgtgggcggacgcgtggg

SEQ ID NO: 5442 - DNA, 1549 bp, Triticum aestivum
  Clone ID: TRIAE-23APR03-CLUSTER9275_1
gccggactctacaccacttccctcgtctctcgttctctaccagtccacccgctcgatccagcggtccgctcgaccccgcggacctagggttcgcgccgctagccggcgacccggccacgtcccgttccccgctgaccacgccccgccccgtccgccgccgctccatccctgccgccgccgccttatgccgtcggctagccccccccggcccgtcacgtccgcaggcaggctctatccaaggcatagatccggcagtagacctgccagtcgcaccggcacttgtactgtattttatgtcaagattgtgctctgtagggaagcggagatcgacggggcgctgttgtacaactgcgagctgaggacagggcagcaggaggggaaggagctctataagatcctcttcttccactcggctgactgccccatcctgttcaggctcaaagtcattagccccagcaaaagcatcatcaccttcacaagaatatttcctccaacagatgtttttgcggtgaaagactctgaaaaacactgcaatgtattttaccttgatgtgccacatactttgatactactgatactagtggtactgtagcactatgtactaaaatgtggctccgtcggactgaggagcttatgccattaatctctttggcattatgggatccttaatataccaatactgactttactttcctcactgataaatggagaatcaggtcttgctcatgtgaagaggcatcttcttgaaaatgcctcacagaacattgtcactgttgaacaaaaattatcacgaggatggggaggagaaaatgcctatcatgtcggtggataccgttatatactctctgatccaaacagaaaagtatcaagagcctccccacctgggaaagtcatcaccttgtcaaaggattctcttcttgccctcaacaggctaagaggagaaatagatctagagaagtcaagagctaagaggagtgaccctacccatgacaaggattatgaagtatgcatcagagcgaaaaataatgcatggattattgctaaaatttctcgaggaaaagaactctatatggctatagagaagggcggcgaaacacttctctatgcatctacagctgttgagaaatttagcaacaggtactgtgagggggcattctctacagactaaaagcaccagcaccagcaccagcatgattcccaggatccagtccagcactgcacatggttgtcgactggatcactccctaatgtgtgtaattgatgtcgatctcactcatgcaataactggattcataccagttgtacagctgccatttggaataaaattatgcagaggaggaaccagcatgttctgccttcaggttctgcggccttatgggatacagtacggcttgggaacattctcgtttctatctgatgttaaaaaaaaaagaccatttcgatctgtaaatgctgacggaggactgctaactcgtactatatgtattacgggccagtttttttggggcttgtactagatggcttaacttggaaattaagtctccttcag

SEQ ID NO: 5443 - DNA, 1214 bp, Triticum aestivum
  Clone ID: TRIAE-23APR03-CLUSTER9282_1
ctccacccatccctctccctcactccgcaccgcccgtccctatccctctcgccctctctgtctcactcggcgcccgcggccgcccgatggagacctccctgcggctgcgcggcgccgacagcacctccgggcagcagctgggcacaaccctatccacctctcactctgcaggtcaggagccgccggagggagggagggagcgatggagacctccctgcggctgcgcggcgccgacaacacaaccgggcagcagctgggcctccgcatccacgccaagcagaagctgcccctcgcctacaacgcactcctccaggctcacgcggagatcgacaccgccacccggaagcccagcctactcgccgtcctcgcaaggcacttcttcccacagctgtcggccaatgttggagccggagtccagctggagaggggcaacatcttcaggtacaccctccgggggaagaaagccgtctccttcaccgacgacggcctcctcggcctcaacatcaagggccgcctcctcgccgacaagaacttcaagccgaggaggaagagcggcgccatcgagctcgcctggaccatactcgacttcagaaagggccaggacgtcaggatgaaggccggctacgagctataccgcaagatgccttatttccagctgagggagaacaactggacgcttaatggttacatggacggaaaatgggatgtcagattcgatatgtgatagaccaggaacccgttagtggaggagggacttgtctggcgatcagttagcgatgtagtagagttgcccctcctttagaggcctccatttcatttcattgtattgctctggaaggataccattcacctgcaaggaccagttttatggagaaaagtcgtatgtagaagtaggaaccctagacatttcattgatgtgattgagtctggaaaattcagaattcagttgtgtgttcatgtagcgttgatgagattattggttggatgaaggcatgtaaatgcccatgaaatgctaataagaagaatgtactgtacaaggtgaagtgcatgtaagagaaacacaaattataaacttgagtgtttcccggtgtgcctttgtgtaacgctgatgagaatattggttggatgaaagcatgccatggctatgaattgccaaatagaaagatggtccaaggtgaagtgctggtaagaaaaaccccaggaaggttcccaaa

SEQ ID NO: 5444 - DNA, 1865 bp, Triticum aestivum
  Clone ID: TRIAE-23APR03-CLUSTER9286_1
ctgctgtcacatcccagattcaccccttctcctcgttgctttcagccggcttcccctcctccctccccactctccccccgtcgccaaccccgccaccgccgccgcagttgccgacacccgccgcccagtccgccaccacgagggcagcaggttctccccctcatcgcccctccctccgctcctccgccgggctcgcggggagcgcagatccgcccggacacggctcctcttgctgatttcgggggttgctctcttgccgcggcgagatgttaggataatgagctaagacgcgttcccgcctccaagcctgggccgcttatcaggtgctcaactagcctgcgagaggcgtgattgaggtttgaggtgagagagggatccagtgccagtgtttcggggagcggagagtgttgcctcagcgggccttgtctgcggggcgatcctgaaggtagtgaacaaatggcgtcctgacagctacgagttggccggtatggccctttcgggcgagactggggtggtcgatcccgctcaagaggtcgtctgagaatgcatcgtttctcaagcagtacaaaaaagtggagctgtttgtagatagtaacatttgcatatgactaccttgtatttccagcccaaaagaataaaaccccagagcgtttgcccccggcgcggcgataagagtaaagctaagaaaaacactccgagttctccgtccactaaagcacccattgcaagagtgtctgatccagatttagttgatagctcttcaagcaatggtgatgctgatgttaagaaaaaggcggaaaagagcaattctcgaccagttgctaaggagagcttaccgttcgaggattcaaaggagaagaggaaaattcagaaagcatctaaccaacgtgtcgtaaaaaacgatgaagaatctaattgtgaaaaagtaaaacctcagaaggttggcagcaccccttcatatggggtttgccttcaaatgcaatgagagagctgaaaagagaagggagttctactcgaagctcgaggagaagatccatgcacaggaattggagaaaaacaacatgcaggcaaaatcaaaggaaatggaagaagctgaactcagacagctacggaaaagtttgaatttcaaggcagcaccgatgcccagcttttacaaggaaccaccagctcccaaggttgagttgaagaaggtccctaccaccagacctcgatcaccaaagcttggtcgctcaaagaacacaacctcagcaggcacagcagtaagtaccaatccttcaagccgtccagttcgtctgagcctcgaccaaagggcctcccagaacagcgccaagacagcagcacctgctccgaagaagtcccaacggaaatctctccccaaattgccgtcagagcagacaggttctgttgacattgcaacttctatatcttctgcagaacagctagaaattagcaagtcaactgcggatcccatccggacgccaatccgcgctcaagttactccagacgaccatgtgctccacgcatagaaaacagtcgaccccagtctctcggaaagctgagagtcatgcctcagcgtcccatatctgcatttttgttatttgggtagtgaacttctggctggtatcatgtgcttgaattagtgtgaccacctggagtttgaagcatggcaagcagccaatgtactgtttatcttctcagtttgtgttgtttttcaaacagtacaagggagtggtgttatttgtagttagtaacatttgcatatgactaccttgtatttccaggtcgcgagacttcttttccccaagcatgcgctttccctcgtcttctttaccgcaaaatttgcgccaatctgggatgaacttggc

SEQ ID NO: 5445 - DNA, 1188 bp, Triticum aestivum
  Clone ID: TRIAE-23APR03-CLUSTER92871_1
ttttgcttttttttttttttttttcagaaggtaaaacaaatttgagcagcacgcaacaatcttgtacagaacataaatcatactacttcagtcccaaaataagcgtagctgatttagtacaactagggaataaatcatactgcctccgtcccaatattgcccttccccttcgctcctgccaccttgttggaacaacaatattaaaaaaaactgaccacccttagtttttttttaacacagtacaaacgcaagcgccacatcatgtcttatgtattgcaaattcaccttatcaagcccttatcatccaggggcttgcttagaaacagatatgagatcgaataaacactctagtctgtaaacatcattcctaggccatttgattcttgcggatggttacttccattttcctcgaatatatcgcaggcattttctctgcgtgccttgcgctcttcaatcaagtcttcaattgaatctgagcagtacagccccctcgactgcccccttggtttctcagctaccacaaatttattgccttctcgccctctttcaggaaagccagcccagaccccgaagtggtggagaacaattgatgctgcaacggtaacattgagtgatgcagttccaccaccatactgagggatgtagacgaagaagtcacagacctcacactccttttgtgagagtcctgtaccctcattgccgaagaggaacgcggtgctcctgcggaacgggtgggccgtcacaggcagcgcgtcgtcggtgatctccacgccgcaaatgtcacaccccctctcgtccttgaggtaggcgcaggcggtggcgagggaggtgaagtgtcggaagcggaggtgggaggtggatccgtggctgccgaaggcgctgacgtcgcggcggccgaccaccaccacctccgccacgccgaaggccgttgcgctccgcgccagcgttcccacgttgtgccgtttggccacgttgtgcaccaccaccacgctctccactgccgccgtcgccccgctcgccgccgcagctgccgccatggccgccgttttcctggtgtttttctcactaggagaaaaggaaaggacgggagtgacgtggccgggctagggtaagcaatgcggggaaagctgcccattcggccgacaagcaggccccacgagtcagccgaccaccgagctatccattttt

SEQ ID NO: 5446 - DNA, 1792 bp, Triticum aestivum
  Clone ID: TRIAE-23APR03-CLUSTER92887_1
ctggggtagaagaggggagtgttttttctaataggggattaataatgggggtgaacaccccatgaggtttatttcccccttccccgacagtgtttataaaagaatcgaggccacatgtggaggaccagcggatataataggtacaccccctttaaataggcgagaattggggggttaccccggaggccccacccccttagggggtttggaagagcgtagttgaagaaaaagagactgttttgttggggtgatcagatatatgcgccagggtgtgagcggcgcagagagtctgagtgcctggagggggcgcggtgagggtgagaggtattttaatatcccaaacgctttttttttttttttttcttttttttcttgttttttttttttttttttttttttaaatctaatccaacctccgaacagctacaacaaaataattatacatcaaaacatttcaccaacgtatggcactcgacacaacataacaccaaaaccaaaagcttgtgcaaaacattggcaattgcggcaccaagatagtacattcttctgaggcattagcaaggtcaactacgggcggtcagcgtgatcacggtatcttctatgctttttctctactcatccgctactgcttcagcagctgcgaatgctgattccagtagagtatagaaccgttggcttacattcttggccacggatatcatatcaaaaatgacgcttggatccaaccctgcgcctcccctcttggttaacccacatatctggccatggctgttgactgaaacggaaaccgcagaactcatctgcgattcctcctccgaggtggcatcaacaatgtagtgcttaccaaccttggtcaatgtaattatgacaggcacaccagaagtgtcgaattgcaaaaattcttcatcactgatatcaacctcaggctccccatccgtttcattattaagagaaacattaacttttggtatacctgtatcactcaaagctacctttatcgcagccgccagtgcatcaagcaaattaccatcagaactgaccacaagtccatcaatgtacagatcccagcaggcttttccctcaacaacaatcagagacgataaatcgattgcagcccctgcaccacttttaccacccagtaaacatctttgcagcccaacagagagctcagcagacaattcttccgaacctctaccctcaaacataggcgcagcagttggactacaatcaacataaatggaaacttttcctttgtcgggatgaagaatggttggtttccccaactcagccttgacgctggcgatgacttcggtcgcacccatcctaacacgcgccgagccgttggcctgagggatgattcctgtctcgacggtgagggcccggaactgcagccgcctgcggccgtcggcccggaggtcctgcgcgatgccgccgcggatgaagtgcttctccccctccgagagccccaccatcgtatcgtcccgggcacggcgcgaggcgggagagccttgcggtggcggcgcggcggaggaacgaaaaacgggaggcggagggagcttggagggtagggtactgtcgaggtttaggtccccggagattattgaggcggcggcggcggcggcggcgggtgcgaacgcttgggacgagcgattgtgggccgcgtgaggcggtccctggcgtgggtcccgggggtctgccccccccccggggactcccataattctaaagaggccccacccggggggaatcccccttttggtccccttaagggggttaattggcgccttgggaa

SEQ ID NO: 5447 - DNA, 1361 bp, Triticum aestivum
  unsure (1)..(1361): unsure at all n locations
  Clone ID: TRIAE-23APR03-CLUSTER93024_1
caaaaaccaacnnttnnncnttttcctttctttttttttttttttttttcactaaaatccaactctttattaggtactcgccaattaccacctacaaatgggaacagtaaggtgcccaaacagatttgctccctaaaacccgaatcatcgactaaacaagagtacaccaaagtccagaaaatggagaccctaaaagtttcaattcagaacacaaacaaatgaagccatcaccagttcaccagtgctcattcactccagtatccatcttccttctcatcctcctcctcgccctctgcttcaccaatctccattgacgcctccttgaaccgcttgacatcctccaatgccgccttccggaacaacccaatgtccactgcacctgcaaccatatggtatcccctgtgcttgagctgctcagctgggtcattgggcatcgcaaacccacccaagtaagccgcattggtttccggagcagcgtccttcttcttcctggcctccagcaccttcctctcagcctccctcagcgccgctcgcaccttcctgttcccgggatcccacaggtaccccatgctcgccgacaggtcgagcgggcccatctggacgacgtcgaccccttcgacggcggcgatggcgtcgatctccgcaacgccggcggcagtctcgacctggcagatgatgagggtgtcgtcctcgcagcgggagaggtaggagtcgtcgaggccgtaggcggatgcgcggacgattgggtaggcagcgccacggacgccgcggggcgggtagcggcagtgggatacagcctccgcggcagcggccggagactcgacggcgggaagcatgaggcccgcggggccgaggtcgagcgccttcttcgcccagacggggcaggcctccgggaggcggaggacggcgggggtgcgggcggcgtcgagggcgcggaggcaggcgagggcctccgtgatgccgcccggcccgtgctccatgtcgacgaccacgtagtcgtagccggcgagcgcggcgatctcggcgagcgtgggggagaaggagaggaggaagaggccgtagagggtgtcgccggcggcgaggcgggacttgagggacgggaccggggcgaggaagtcggaggccgcggacgcggaggcggagatggccccggcggctccggagcgcctgcgggggaggagggagaggcggggcggggttgtgggcttgggtttcggcccgaggaggaggtgggagacggacgcggcggcggcgatagaggcggccatgtgggccagtcggcggtgagcggcggcttcgctggtggttgggggatctgcgactgacgaggccggcggcggcggccggggagtgtgggggga

SEQ ID NO: 5448 - DNA, 1354 bp, Triticum aestivum
  unsure (1)..(1354): unsure at all n locations
  Clone ID: TRIAE-23APR03-CLUSTER93041_1
ttttttgataagcttttttttttttttttttgtgaatttgatctttactctgccattaattattgcattcacagagactgcctaattatcacaaaccactgttattcgacaaacgagatatcaggagtcatcctgatggaatgtggaaacccagacatggccaaccagccccaggaccagcatgacaaacctacctacaggaaggaacgcatgcgagggcgcacgatggactgcgcgccgtcgacgtagatggtggtgcccgtcatgaaacgggactcatcgccgaccaggtagagtacagtggacgccaggtccttctccgggtccagccaccgccgcagcggcatcacctccccggtcgccttctcggccttctcctccccaacagagacagggaacttgtcccccaggtgcaggccgcggcagacggcgttcaccctgatcttgtgcttgccgagctccatcgccgacagtctgacgagctggtgaacggcgcctaaacttgtgccatatgccgccgcccccggatacaatcctctctcggcgccgatgatctgggtcaagcataccacagagccgccggactgcgcatcgcggaaccgcttggcgatcgcctttatcagaagccagggtgtgattgcattgactttcatggtcttgttgtactcatcttcagtcacgctgaggcagtcttgcacttccccctcgtaggagcagcagttgacgagggcgtcgagcccgccgtggccgaagcagcgccacgccgcctccaccgcggcgccgacggccgcctcgtcgcaggccgcgaggtccagccccaccaccgcgacggccgacgcccctccggccgcgcagcgccgcgcctcctccgccgtcgcggccagggcgccctcgtcgcccagcaggaccagcctgcagccgtgcctggcgaggccgacggcgaccccccgcgagacggcgtcaccgccgccgttgcaggcgagcagcacccgcttcgcgtaggcggtgtcggcggccatcccctttccccttcttcttcccttctctgcacgtgaagagttatagcaagacaagaattacccagccacagcaggccgggaagtcgaacgcctcggcctcgacgacatcggcgcggganaanacgaacgccccgcacgcggccgcgcagacctgccagagcgggaagtggaacgactcggcctcgacggcgccggcgcgggagaagacgaacggaggcgatggtgacgtcttgaggaggaggatggagagggcatgaggggggggggtcagatcggggattggggtccgcggcgggtgcggctggaggcagggagacgaggggaagctagggttc

SEQ ID NO: 5449 - DNA, 834 bp, Triticum aestivum
  Clone ID: TRIAE-23APR03-CLUSTER930_3
agcaccgagaaatatccccttgttcaatttgctacggcttgagatatacacttggataataagaacatttaaggaccaaatacaaatcgaacagtatacttaaagaaagttataagaacaaaaccgatccatagtataaataaagacacctaaaatcaccaataaaaatctctaataatatacatgtgcacacaccatatctgtggaaaatatgaactaaaagaatctatgacaaagacatgtagaatagtagagttacaggtgccaccgcctcaccggtccttttgctcaccgaatcaatcgacgaatctatgatttgccgccggccgcggggcggccgctgtcgtagtcgacgatctcgtcgtcggtcatggatcgggagtgctggacaatggagcggccgatggagttgatccagtcctccttctccttgtcggagtcggcgacgaagtacatggtctcgcccggggtggagagctcgaaggcgaacttgcggttgagcacgtcctcggcgcccttgacggtgaggcaggaggcgacggcgatgacgccgcggggcacggacgcgcgcgtgacggacgagtccttgaaccagaagatcttcccctgcttgagcacgaaccaccgccgccgccacgtcttgatgtactcgccctgcttgtccagccacccgccgcgctccggctcgcgccagaactcgatgccgtccgtggcgtccgcgggcggggcgccggtgcccatcaccgctcgccacaggctcgccgccatgagatgcggagggatttggggatcgggtcgggcggatcgggagagttttttcgattaggatgttct

SEQ ID NO: 5450 - DNA, 1773 bp, Triticum aestivum
  Clone ID: TRIAE-23APR03-CLUSTER93116_1
ttttttttttttttttttttttatttttgggtgacacgattcacagcacaacacatcactctcttttttttttttttttattagcatatcatggtgcgacaatggcggcaccaacacatcatcctcgtttgtcccaggataaacatcaccaatgggtccggcccaaatcactctttctaaatttctaacagcttcgacccgaatttcacaccagacagaggatcttcacctcactggcgctttttagctttcgatcgagacgcgtccttcctcatcgtccaaaatgccgcgcggtatcgattctgcatcatcgataccatatttgctgtgtaagtggtatctatcattttctccacctccatcacaaatccataatggtaagctacccttttcacgtcttccaaacttagttcgatagacatatcatcatctggtccataggcatcagcaaagtgataaagaagcggacccatgtttacccagactccaccatccttgagaatttttgatattatctcaatatattcaacaatattgtgtgccgtatcgaggaagaagcaagttacaacagcatcccatgcagattcttggctttcctcattgtagacctctacaaaatctccagcacacatcgaaaatccttcagttatcccagcacttgagggatgaatatcaggaaatgaaacagcccgaagttgatctttgtctgaaagagaattgcaattgttgtgtatccaaggataaatggtccattcattggcctcttgggtgtggtttagaatgaaacttgaacagatcatcatgtaatatgagaactcatttccctggcttacaaaacccagagaagagatctccagagccaatctcccaagcccagcaccagggactaaacatgaaggtggcctgcttcggtcaggaaaaagacgattaagttcctcaagaattggtttatagcactcatcacgttcaatttgaccctcctgggcccagtctctcacaatatttcttatgatgcatcttactttgtcaacgtcaactggaggaacatccagtggcaaagatggagccctgcggtgccctggagttacattttcatcagtagaagatgcaaaacaatctgtatcttgacagttagcagctgcactcgcatctttaccatcattacatgatttatcttcaccttgggatatccccaagttgcaggcagcaggctgggagcagcccaccatgtggacttcctcatccttcttgttctcagtttctctagtatttgcaccttcctctgggcaacaatgctgagcaagcaattcagaattatttatggtatcagcatgactatgtccgtgcatgtgctctgcacaatcatgacaatcaccatctacacactgactcatgtcgaaaggaggttcaaatgcctcaagcatattcatgataaaagatgtattcatggatatacaccatctcagtcgttggtacttaagaccaaggtgaaatagaagttccttgtgggcaggagaaagctttttgaatgaacgttcatatctcttgacatctttctctgctgcatcttgatagttgatgtaggcggcgatgatgcggcgaagggacttgatctcgagcgcctcttcgtgctcggtataccgccgcgcggccatgttcccggcggcggcggcggcagtggcggcggctaggtgatgctaattttcttcagatggaattggtttttttttttcagatggaattttttcgtttgaaatgaggggcaggtttttc

SEQ ID NO: 5451 - DNA, 2413 bp, Triticum aestivum
  unsure (1)..(2413): unsure at all n locations
  Clone ID: TRIAE-23APR03-CLUSTER93274_1
tggtcgcccccttggctcccctcaattgctccttccgccactacccacatgcttttttttttttttttttgaggcaaaaaagagattaccttgattcacagcaggatacaatcatgtagaacaaagcaaaatacccaaggcaaacataacatttctgctgccatgtgtttgtaatcaaggcaattcactactaactggaaatgtgacaaaataactagtcgccaaacaagtcatcatcactatcatcagctggatttgcaccaacgtccctgctagacttcttttcatcaacaactttgacttgctctggctggccatctgatttgtacgcccatgatgatcccagttttgctggaacagagtccccgtaaaggtcatcatacataccacctctggatgtgcttttaactttgttaagcatatgttgtagcttatctgttaccccactgtgggaggcactgtcctttgacgaagtttgctcctttccttttggtatgacagtgacctgtacaagagactcgtacttcccaacaagactgccttccttcacacctactgggcctggttcagtttcaacatctgcaccatcagaaatcccaaccacctgaataagctctccaccaacctgatctctaaatgacactctccgctttctgattctctttgatggtctaccgactgcctggttgtcatcatttacagcagaagcagaagcatccccagaagaaccttttctcttcaatggcacgtctgatttgctaacaccatagcgattaagtattgtattgtatgcaacaacggcgtcttcatcgtcagagtctggaggagacggcaaactcacatctgaagggagactttgagtggggaaaaaagcagctgtgttctttcgtagaacatacgccctggttgatgcagcaaagcgaagtgactgtccaacttcaagttcaacagggttgtccttggttaatctctcgtttgcaacaaatgtaccatggacagatcctaaatcgataacatagatgcttccatttttgtgtggaacgacagcagcatgttggcgtgagacagactgatggtccaagacaatctcgcaagcaggcacctgcctcccaaatatatgcctcttcttgtccagattgatcctatcaatggcattcccatccttcatcacctcaagatagtaaaccccagggcgcggctcaattgcccagtccggcggttgccacgtcgactgcccaccaccaaactgtgtcccggcgggtctgggagccccagcagcttcttgcccgcccatgcttgagccagcactctgcggagcatgctgactctggctgggaccaagatgtgagctttgcggcggcaccaacggagctggctgcactttcaccgcagggggcacgctctttgcgccggaaccagactgctgcaccgagaacggctccaaggcctgagctttcttgaagcggtcaagcccaccacggtacatctcctctaagcttaccactgccacctgttatggtctctatcactgaatcactctttaacagctggtgatgaacccaacaggactgtactcaagttctgcaagaatccccagagaccgcgcagggaggctcgcaccgccgtcgaggagcgcgtccgacgaggctagccgccgtcgaggggcgactccgacgaggcagccgccgccgggagcgagagggagagctggagaaggggaacgatacgggggagaggccgagctcgttttggcctgccccccgnnnnatccnctanttctnnagnnnncgcccccgcnnntggagctccnnctttttgttcccttnnnnnnnnnnnnnttgcgnnncttgncnnnntcttggnnntannctgnttcctgnnnnnnnnnttnnnntccgctcncnnttccncncancntncgnnnncgnnnnnntnnnnnnnnnnnnnngnnnnnnnncnnntgnngnnnnnnnnntcnnnnnnnnnnnnnnnnnnnnnnnttgnnnnnnnntnnnnnnccnnnnnncntgnncnngncnnnngccncccncccccccgcccgncccccgccgcggggggccgggccgccncgggggcnggggcggggcgggcgccgccggcggggccctccgtggcgccgggccggcggggcgggggcgcgccgcggggcggggggggggggggggcgggccctgccngccgcgcccggggcccgcggcgggggcgtcgggggggcccgccgcggcgcggcgggcgggtggcggncgccgcgtcgcgtggtgtgtttcgggtgctgccgctgtgttcggcggtgtgtggcgttgcggtccggggtgcgccggtccgtgtctcgcgttccgcgggtctgcttggtgggcgggggttcctgtcgtgctgtgcgtgctgccccgtn

SEQ ID NO: 5452 - DNA, 1106 bp, Triticum aestivum
  unsure (1)..(1106): unsure at all n locations
  Clone ID: TRIAE-23APR03-CLUSTER9365_1
gggccagcacggcccggcgtatcgatcgagagagaaagagagagcaaaacctagaactctgaaggaagcggggccgtcggactcgagaaggcggcgagggagggagatgtcgatcctgtgggagaagagcccggcgtggcggtggctggtggggcggacgcgggactccaagcccttcttcttcaccttcgccgcgctctgcggcgtcgtccccggcgtcgtcggctacggcgtcatgcagctcaccagctcccgcaacgacaagctcgaggacagagagcgagacgaggggaaaaagctagaactctgaaagaagatgggcaggagaaggcggcgagaggcggcggggttagatgtcgatcctgtgggagaagagccgggcgtggcggtggctggtggggcggacccgggactccaagcccttcttcttcaccttcgcggcgctctgcggcgtcgtccccggcgtcgtcggctacggcgtcatgcagctcaccagctcccgcaacgacaaactcgaggcccacctccgctccaacgcccgaccggagaccacgatgatggggcaagtcaacagggagagactggcagagtttctcggagagatacaaaggaaggagaacacaaatgacagatacgttgctgctcttaaaggcgagacgctgacaaggaagcgctatgaacgtatccagcccgtcccccagcaggctgcacaggagaatgcgaaggaccagcaagctaccaaggagagcgccaaggcaaagtgaatggcgcatgtttgatgatcggggtgggtgaaacgtgcttctactaaatgaatataaatgggctgtagctccaaaagcttcatgaattgcgaacctttttttgtgagcatcattatctactcgcctttcgtttagtcgtggcactgctccatagagaaaaacagagaaactttggtgacggtgttgaatcttgtaaatgttttacctgcgtgttacgtggtaatattctaggaaccttcaaacaatacttttgatatcctggtgcgtcgttgcgtcatttatttatttcacttagtaacggacccggcctttcncgtgtttcttgcagtggctaataatann

SEQ ID NO: 5453 - DNA, 2112 bp, Triticum aestivum
  unsure (1)..(2112): unsure at all n locations
  Clone ID: TRIAE-23APR03-CLUSTER936_1
gtcccgtgtgcgcctgcctccccgtagtcccactcccatctcttctcctgcgccaacaacagcaggcagcctacttccttgtcggcggtcgccgggggcagcgagcgaatcgttgggtagaggaggagggaaaggccgggggcggcgctgggcgcccaccgcaggtgcatggtggaagccgccgcgggacgccggtcgggtaccagccctcggcggcctagcggcggaggggagcagcagctgccccttgtcgccgtcgcgctcgccacgcgcgtcgtcatggtcacgtccgctccgcccgcggggggcggtgtgggaggaggtggagcggccgctggtggccggtgtctcgatgaccttctcggctgcctgctcggcgtgctccgcgtgcttggcttcccgtgggccgcgtcccctcagaggcagccgcgcccagtgccgccacgcggggccatcccgtcgacagcggacggccggcgcttcgcggcggagctgangcggatccccggccggattgctggcaatggcgcctgcgctgttgcgtcgctttacacgatgcagggcaagaagggcgtcaaccaggacgcgatgatcgtttgggagaacttctgttcaagagatgacaccattttttgcggtgtgtttgatggtcatggaccttacggtcatttggttgctaagagagtgagagatctcctacccgtaaagcttggtgcggatatggggacagataagggtagagagacacccgctagcaacatggaaggcaacacaaatgaagtaggtttacccgtaaacccagagagaaaagaaaccaccacttctgttgcagctgagcaggatagggaatacccagagatattcacaacattcagaacttcattcttgcgggcttttcacataatggacagggatctgaagttacacaagaatatcgattgctttttcagtggaactacagcagtggcagtgctcaaacagggtcataatcttataataggcaacttgggagactcaagagctatcttaggcactagaaatgaagatggtcagctcattgctgtccagttgacggttgatctcaaacctaacattccaagtgaagcacaacgcatcaggcaacgcaggggcagaatatttgcacttcctgaggagccagaggttgctcgtgtttggctgccaaagtataactcacctggattggccatggcaagggcatttggagacttctgtcttaaggagtatggtctaatttctatgcctgaagtctcctgtcaccgtgtcacagagaaggatgagtttattgtgttggcgactgatggggtgtgggatgtgctgtcaaacactgaagttgttagcatcataagcagagccacttctcgggcttctgcagcacgcttcctggttgaatcagctaatcgtgcctggcgtactaggtaccctacttctaaaattgatgactgtgctgttgtttgtctcttcctgaatacacatgaagcagatcaaccatctagttctgcagccaacaatttagcaaatgctctagaagttagtggtgataagcactcgacagttgtccaactgagcactggagtatctgccgatgtggttaatgcacttgtgaaagatacaaatgagctatctcttgttgatgctgttgcgaagccagttactgtctcagatttgacaaaggatggttcaggcacaaagcaaagcatcatttgagcttgtgtgttgcatgagattgaacatttgttgggcgatttgtgctgtgttgacagtgcgctcccattctcccattcagaattctgagcctgatgcctatttttatgagcgcgttgaaattcactgcttgctattttctacatgcaagtccgagtagggtcttgagttttcgtcatttgtgaagtaccacttcggttttggtgtgacctgccatatttctttgtaataattttgttcttaatgtttgtttagtctcgtaacaataatagtatccctataggaagaagccttccgtgttttcacagttctgtaatattcattcgattgccgtccattacagtggtgttatgcatttcaattttgtcttcaaaaaaaaaaaaaaaaaaa

SEQ ID NO: 5454 - DNA, 852 bp, Triticum aestivum
  Clone ID: TRIAE-23APR03-CLUSTER93703_1
tggggtccccccttttttttttttttttcaggaccgaagaccgcatgcatcaggtttattcggtcggcgtcggttttgagatataatttaccatgtattttgcagtacataacacttttactcacgattcacagcctgaataactgacaggaaatggaactcatctgaactgaactacgatgagaaaggggccccagaacgtcagaatgacacgaaaccagcacaaaaatcataccccggagaatgatccaggttacagaagaaccagccatgagttctcacactgaggttactgaagaagcagtcatcgtcgatttcttttctttcccctcgctttggccctcttctgcctcgcctcctctttctgtctctcagcttcctccctctcaaacttctcgctctccctcttctgcaagaagtcctgcaccgccagatagatcaccccgatggtgaggagggagaggccgacgaacgagaccgtgagcagcaccgacaccacggtggcggtgatgctatcgtcgtccgcagccaccctcatcatggcctcggtctgctccacctcttcgatggcggcggcaggcgggcgcagcctcctggcgaggcgcaagcgcccggtgcctcccccggcattcctaccacggcgcggagcagcgacgcacctcgagaagagcgctggcctgggtgccacaggcggcgcgagagggaggggggagagggagcacgctgccgccattatcccgtccctcgcgccagcggaaggaaaggggatgcaaatgaacggtcggaacgaacttttcgattaagatgggatgcaaatgcacggtcggtggaactggaggggggaaatgagtt

SEQ ID NO: 5455 - DNA, 1930 bp, Triticum aestivum
  Clone ID: TRIAE-23APR03-CLUSTER93891_1
ttttttttttttttttgtcaatttcaacatggtcatgggattataaggccgcatcaagttcagtctgttcatgagatcacaaaagctaattacctgacactaaattcagtactaagagcataaacatgagagagcaagtactaagagtaggatcattataagttatacttgagacatacatcaagtactacatacaaaacttgaaagtgtattttttctttccataggtacacagcctttagtatatctcaaccaaaacaaataaaacaatctcctaagagaatgttctaccgacagaatgggtgtagtaaagtctcactattacaatgatacagaatcatcttgatgaaaagcggtgaccaatggccacgattttttttctgttaatcagtcatacctgcaatggaggtatagtagatctataagacatcaattatctatttacataaatctgggtaaaattatgtatttgacctatcaaaaaggaaaaatgaatcatatattcttactattttaaaactaaactttgcattgtgtgactaatcgtccttggactcaattccaagcacttagtgccaatttgaagaccaaaactaaataaaaccataaagtttagacttttgtgcttgctctgtgacaatgttagtgtagctgtgcaaatataagaaccattaaattcctcttatgcattttcctggaacagaacaaatatactctttccgttcctaaaacttgggccttctagcaagttccacatacacgcccccaaaggggcgtatttagtgtctatattcatccgtatttggtacctcttttgaaatctctagaaagccctatatttaggaacagagggagtatgtagttaatttagtagaaataatggggttggtttgtttctagaagcagaagtacccaataaaaaggaaggatgaaatgaacaaaaactctaaatgtgacggaccaaaagcgggagaaagccaccagcgcaagtggccaacacccgacgctgctgaagatatcaatgaccaccgccggccacaccccctgctcggcactgtgttgtgggctggcggcaagggccatgacgacatcggagaccatggtggcatctggtcgtcagcaaccatggaggcccccaccagagttgtggcctacggtgtttccattttgggccatctcgatggtgtgctcctctatgcggagcagcgacacagattacgccctggcacatcacacgcttgccctatccacccggtggtccaacgcttaggccactgcacagcatagccagagcaagatattgatttgcatccctaaataataccaatagaaaacattaccataaatacatatcctccatattatcaatcaaaagtacttgaaactaaaattacagaagaacatttatttcataagagcataacctaaccacatgctaaatcaaactgtcattaatttgaaagtttcatcatcagccaaactcatctcgaagttgtcataaatccatatcttcgatctaaaatggtctactttcttcataaagcaatcaaccaaacaagtatcttttaagaatgagcatagatacgacatcaggagctctctcacagaacaaacatgggaacgtgtcaagaattagcaagactaaaacaacaaacatgaattgtgtgttgcttgcggatttgtaaagaaaataacatctgaatgaaaaatcaaaattactacatggtacatcatgaattgttgaggaagaaaataaagatgcaggctacaaaattcaaaaaatttctctctgagcctacaatactcactttgttgcaattatgaaggaataacagcaaacgagagccaggaacacgctaatagctatcattccatgataatatcaaatccagtcttccacataccctttgtcctagaccaaaagaaatgc

SEQ ID NO: 5456 - DNA, 1555 bp, Triticum aestivum
  Clone ID: TRIAE-23APR03-CLUSTER9390_2
acacgaacccctctgactaaaaaaacaccagccatatattcctgggtcttgggcggccgctctccgtcgcgctaactccgccgccgccgcagtgctgccagtcatcttcccttcgcaggactgattctggcgcgccggtgtgacggagaggcgaggcggcacagggcagggtgtggattgaatctggcgccatcgtccgtccccgattcgccctccaccgcaggcagggcagggcggcaggaccatcatataataaaattcataggctcgatctttctgccgaaactcttcaaggaacgcttagattgggtgaacacagaggccgagctgcagcaggaggaggattagatagattactctgttattactattaggtcttctgtcaaatcgcagtggggatgtctaataagcgccggggatatgccggcgacggcggtgaaaagaggtcgcggcggttcaagcatctgtacctcgtgttggatgactggacaaaggggtacagcagctatgagctgcaaagcgaaagcttccattctggccctgaatctggctctccaggcggtgcatgaggagctctctgttcccctcggtactgagcgaacccatcggctggaagtgcgcggcttttcaatggaccccaccgaggtatatagttaacccccctttgccccaggcggttccaagaagagacagcccgctgcccccccaactaacaaaccaagacgcacctcctatgcactgctcccggatgcacgcaccctctgtacggccacagctaactgctggtcggcacctagcaaacgatgcatgggcacctacccattcaacaccaaggattctgtgtggagatggcatggggagtgggccttgccattcagcggccaagcgtccacagtaaacagcccattatgcgacgaaggagaggatgagcgagcgatgccgatgcctgcattagccgaccgattagcgatatactccgccgccgcctgccgcccgccgccgctctcgctcacgctccaccgccgccgccaggacctccagtgatcgcgggacggagaggagaggcgaggcggcgcagggcagggtgtggattgaatctggcgccatcgtccgtccccgattcgccctcaccgcaggcagggcagggcggcggcagggccatcatataataaattcaaggctcgatctttctgccgaaactcttcaaggacgcttgattggtgaacacagaggcagagctgcagcaggaggaggattagatagattactctgttattactattaggtcttctgtcaaatcgcagtgaggatgtctaataagcgccggggatatgcccgcgacggcggtgaaaagaggtcgcggcggatcaagcatctgtacctcgtgttggatgactggaccaaggggtacagcattcacaagatccaagccgacagctttcaactttgaccttgactctgactttgatgaccagcacaggggcgctggccgggaccttccggagccttcgaccctgggggttgagtgcccgggttggcactgtcccccattccg

SEQ ID NO: 5457 - DNA, 1075 bp, Triticum aestivum
  Clone ID: TRIAE-23APR03-CLUSTER93936_1
acggtatcgataagcttttttttttttttttttgttcaattcacacttaaaatctttaatttggcacctcgactacaaccatcgaccagacaccattcggatcaaaatcgacaaaataagaaaaaggaaaatggaacaatcaagcgcacaagaaccaatgtttaagcttaaccaaggaggagggggaggaataaattaacagagaagagaaaatctgacaagatctgagccaaactggacttaatggagaacggaattgcaagccagatcaactgatcagagcatcctgagtagcatggccgcggcgcccacggcggcggcgaggggagcggcgttgcgggcggcgatggggggggcggcggatttggaggatgacttggcggccggcgaggaggaggaggaggaggatgagccggagtcgggggaggaagaggcggggcccttcttggcggtgacggcgagcttcatgccggagtagcagtagccgtagctgcagatgaagaagtagtccttggcctccttgagctggaacgcgtagctggtccccttgctgtggctgctgatggcgctctccttgtcgcagttgtcgtacccgacctcgtccacctgcaccacgtccgaccgcccattctggtactcgaacaggagccagtcgcccttgtagaaggggcggtgcttcttcacccaggaggtgtagtccaccttggggttccaccccttctcgtcgcccaccgtgtagttggtcgccaccgccgccgacggcagcgacgccagcaccaccgccgccaagacggccatcaccggcagcagcatcttccctcctctccctgcccggtggcacacctcccgatctggattggcagccatggcaagctccaggcgcttcttgtcttggatgtgggatgggggtgtgctggacttcgctccaagtagttagtctatattaccggtggggagtgagtgagggggtgaggtcgttggtggctcaaggtgaagatgaagaatgggaccgtcgtcggtcggcgtcttgtctgtcacgctggtgtactgtaccactgtctgaaggattccttgc

SEQ ID NO: 5458 - DNA, 2747 bp, Triticum aestivum
  Clone ID: TRIAE-23APR03-CLUSTER93_1
ctcccactcttctctccccgcgcacaccgagtccgccccggcccgccccccatcacctcggcctcggccaccggcaaaccccccgatccgcttttgcaggcagcgcactaaaaccccggggagcgcgccccgcggcagcagcagcaccgcagtgggagagagaggcttcgccccggcccgcaccgagcggggcgatccaccgtccgtgcgtccgcacctcctccgcctcctcccctgtcccgcgcgcccacacccatggcggcgacgggcgtcggcgccgggtgcctcgcccccagcgtccgcctgcgcgccgatccggcgacggcggcccgggcgtccgcctgcgtcgtccgcgcgcggctccggcgcttggcgcggggccgctacgtcgccgagctcagcagggagggccccgcggcgcgccccgcgcagcagcagcaactggccccgccgctcgtgccaggcttcctcgcgccgccgccgcccgcgcccgcccagtcgccggccccgacgcagccgcccctgccggacgccggcgtgggggaactcgcgcccgacctcctgctcgaagggattgctgaggattccatcgacagcataattgtggctgcaagtgagcaggattctgagatcatggatgcgaatgagcaacctcaagctaaagttacacgtagcatcgtgtttgtgactggtgaagctgctccttatgcaaagtcaggggggctgggagatgtttgtggttcgttaccaattgctcttgctgctcgtggtcaccgtgtgatggttgtaatgccaagatacttgaatgggtcctctgataaaaactatgcaaaggcattatacactgggaagcacattaagattccatgctttgggggatcacatgaagtgaccttttttcatgagtatagagacaacgtcgattgggtgtttgtcgatcatccgtcatatcatagaccaggaagtttatatggagataattttggtgcttttggtgataatcagttcagatacacactcctttgctatgctgcatgcgaggccccactaatccttgaattgggaggatatatttatggacagaattgcatgtttgttgtgaacgattggcatgccagccttgtgccagtccttcttgctgcaaaatatagaccatacggtgtttacagagattcccgcagcacccttgttatacataatttagcacatcagggtgtggagcctgcaagtacatatcctgatctgggattgccacctgaatggtatggagctttagaatgggtatttccagaatgggcaaggaggcatgcccttgacaagggtgaggcagttaactttttgaaaggagcagtcgtgacagcagatcgaattgtgaccgtcagtcagggttattcatgggaggtcacaactgctgaaggtggacagggcctcaatgagctcttaagctcccgaaaaagtgtattgaatggaattgtaaatggaattgacattaatgattggaaccccaccacagacaagtgtctccctcatcattattctgtcgatgacctctctggaaaggccaaatgtaaagctgaattgcagaaggagctgggtttacctgtaagggaggatgttcctctgattggctttattggaagactggattaccagaaaggcattgatctcattaaaatggccattccagagctcatgagggaggacgtgcagtttgtcatgcttggatctggggatccaatttttgaaggctggatgagatctaccgagtcgagttacaaggataaattccgtggatgggttggatttagtgttccagtttcccacagaataactgcaggttgcgatatattgttaatgccatccaggtttgaaccttgtggtcttaatcagctatatgctatgcaatatggtacagttcctgtagttcatggaactgggggcctccgagacacagtcgagaccttcaacccttttggtgcaaaaggagaggagggtacagggtgggcgttctcaccgctaaccgtggacaagatgttgtgggcattgcgaaccgcgatgtcgacattcagggagcacaagccgtcctgggaggggctcatgaagcgaggcatgacgaaagaccatacgtgggaccatgccgccgagcagtacgagcagatcttcgaatgggccttcgtggaccaaccctacgtcatgtagacggggactggggaggtcgaagcgcgggtctccttgagctctgaagacatgttcctcatccttccgcggcccggaaggatacccctgtacattgcgttgtcctgctacagtagagtcgcaatgcgcctgcttgcttggtccgccggttcgagagtagatgacggctgtgctgctgcggcggtgacagcttcgggtggatgacagttacagttttggggaataaggaagggatgtgctgcaggatggttaacagcaaagcaccactcagatggcagcctctctgtccgtgttacagctgaaatcagaaaccaactggtgactctttagccttagcgattgtgaagtttgttgcattctgtgtatgttgtcttgtccttagctgacaaatatttgacctgttggagaattttatctttgctgctgtttttttttaatcaaaagagggggtttcctccgatttcattaaaaaaaaaaaaaaaaaaaaaaaaaaaaaaaaaaaaaaaaaaaaaaaaaaaaaaaaaaaaaaaaaaaaaaaaaaaaaaaaaaaa

SEQ ID NO: 5459 - DNA, 2789 bp, Triticum aestivum
  Clone ID: TRIAE-23APR03-CLUSTER9420_1
gtacgatcgaagctccggcagcccgaatctcctcacgcttgaagcatctgtgctggctccttgactatgaccatcgagaagatgggtagaaagaagaatccaattgtctttctggatgtatcgataggtgatgggcctgacgaaagaatgatatttgagctgtttgctaatgttgctccccttacagcagagaacttcagagcattatgcacaggtgagatgggaattggacaatcaactaagaagccattatattacaagggatcaacattccaccgtgtcatcaaggggttcatggcacaaggtggtgacttctcgaatggagacggaaatggtggagaaagtatatacggtgaacaatttgaagatgaaaattttgtgctacgccatgatgaccgggtctcttgtcaatggcaaatgctggacgtaataccaatggctcccagttcttcattacgttcaagcctaattctcatcttgacaggaagaacactgtttttggcaagcttattcttggaaatgatgtgctgaagaggattgagcatgttgatgtggatggttctactaataagcctattgttccagtaagaatagtggattgtggggagcttgttgatggtaaaggccggggatctgtctcaactgaaaatgataaaaagaaagttaagtcaaagttgtccattgattcatctgaagacgaaggtaatgaagaaaaacacaagggccgtcgcaagaaatctttgaagaggagaaagaagaagagaagatactcttcttcagaatcagaaacctcatctgagtctgagtcgtcagattccgagagtgaatcagattactccagcgagtcgtctgacatcagcagctcaagtgatgacaagcggagacgaaggaagagacactccaagaaggataaacgcaagcatgggaaaagaaggcgagatcgcaggcgcgagaaaagacgtagaaagcgtgacaggaaatcaaagcagaagtcaaaaaggatggtagagagtgacagtgaaactggaaatgcgagtgatggcagctctgaggatgccagaagaaagcggcaacgccatggaaggaaatctaaggccacatctcaaatttctgctgaagatcacacagcagtagctgctctgaaggatgccacttcaactcaggaaaagattggaacaccaaggagtctggcacaagaagacaaatctcaactggagaatggcgagatgcgcacaaatggtgttactgactccaaatctgaaaggaagtccggtatcatgcctgttctaactggcaaccgaagcaaatctaggagccagagcacgagtgctaatcactccatgagcaagagcatgagtgtaagtcccagaagcccaatcaaaaggtcaaacgtcagcctggagagattggtaagcccgagtcctgttcatcagcgtagtagaagtcctgtccatgcttccaaacaaaaagaaagcaggagcccaccccgacagaggaatatgagcatgagtcctcatcgaagaagccccagcaagagcccacctggaagggcaagcagaagccctgttgtccgcaggaacaggagtcctgttgaagttcggacaagaagcattagcaggagcccagctaggtccttgcagcgaagaagtccaagtaggagcccggaaagaacccatgtgcgaaaaagtgtcagtccaagccccacacctatggagaagggaaaaagcattagccgaacttctgcaagatctccactgcacaagggttttagccggagccctgatatgcctcctagaaagactacaagcagaagccctcaaaggaatgctcatagaaactttagcaggagccctgtgggatcttctagaagaagcttgacccctgtacgaggtggtcgatctcgcaggaacgccagcagaagtcctagcccacctcgcagggcagtatcaccacccaatcacggtaggagcccatctaggagtgtctctcccgatggatcaaaacgcataagaagagggaggggctttactcaacgttactcatttgcaagacagtatcgttcaccttctgttgatcgttctcaccgctatggtggaagaggtgatcgtgacaggtatatcagtcacaggggctctcgttatcgatcacctccaagacgatacagaagccctccaagaagagcatcgccaaggtacagaaggaggagccgaagcgtgtcacgcagcccaccagcttatcgagaccgcacaaggggaggtggctacagcaggagtccagtacgtagtcgttcgcctcctggtgggaaaccaagttcccgcggtgatcgtgcacggtcgctctccaggagcaggagcctgtctgggtcaagatcaaggtccccaccacctgtgcaggatcgctcccccattgcctccccatctccaaaacgtgcaagtaacgacaggtcccggtctatgtcggtgagtcctgaagggaagaagggtttggtttcctatggagatggctcccctgattctgctgggaagtaggggaaaaagaaagaaggcattcactagctgtttcccctgctgttgttcagctctgttaaaatgttacatatgtgattcgagatgattttgaatttggttgaattatctctggacaaccataatctgaggttagtctatggttttgttaattgcatgccaacattttcttgtatcaatccttgttaatggtgcgaatcatggtttttatcaaagctgctacatgtagtaatcctatacttttgacaaaaaccccacacaccc

SEQ ID NO: 5460 - DNA, 1267 bp, Triticum aestivum
  Clone ID: TRIAE-23APR03-CLUSTER942_26
ttaaggggagattttgagacaatgttaaaaacctcgttccaatttcccatttccattataaagttggcccaatttttttgggaatggggggcttccggagcgggacctcctttggtgaatgcggcctgggaggaaaaaagggggataggtgctgcccacgccaccttaatctcgggaaacgccccgggttttccccagccgtgagcgtgggcataaagccgcgccggttatcgtcgcgtaaatcccactgctggctcagtgcgcaattgcattcccgacgccccccttgagttgggcgttatcgcataagcttttttttcttgttttttggctcacaatagaaacttgtattagcaaaagccagtgacaaacaccacgcataaaccacgcaggttatcatgtcagtctgcatgttcaatgcagctcttacactgggacatatgacaaacacattttagagcacgagaatataatgatacataaagtcgttctgtggcatagttattcagtatcaaccaacagcaacagcctacaagagcttttgggctacttcaaggcattacttcttgctacgcagcttagctccaagtgccctctcaagctttccaattatctgattgttcggaatcgctttgcccgactcgtactcctggatcacctgtggcttctcattgatcatctgagcaagttgtgcctgggtcatcttcttatccagccttgcttgcataaggtttttcttgaggtcacttgaaacacgctcatgggaaaggttctcggtgtcgtcgtcgagccgcttggtgttgagggaagttccgctagatgcagccttgttcgttccagcgttgtacttcttggtggtgtcgatctcggcgccggagcggcgggcagcgttgacggccttttcgtccttcttgtcggcggcgttctgcgccttcttccgcaccactatcggctcccagtcctgcctgataggaccaatcccagccatatctcctaactctcaggtctcacacggcaactttcctcgctcggtctctcgagttcacagactaaaaccacgcaagggataatggaggcgcaggaaagaggaggaagatatttttggagatgaacgaaaggttctcgagtcgcaatcgagggatctcctgtccaataagacgacccaaggaaaggcccccgagccaaatcatggcagcccggggggatacacccattttcaaaacgcgccgccaccccggacgaaccccccaccctttcgttcccattt

SEQ ID NO: 5461 - DNA, 1687 bp, Triticum aestivum
  Clone ID: TRIAE-23APR03-CLUSTER9440_1
acaagaactacaggaggcgctagcaagctctcacacaacacagatatcacgcgtgctgtaccaccgccggttggtccgttccccggcgacggccgtgcgttgatcagcgatgggggaggcagcacgggacggctagcaagctgtcagagaacccagggatcacgcggcgctggtagcaccaccggtgggggtcgtcggccggcggcggccccccggtcagggagccgtggggcggttcgggtgggcggcggtggcgggggttctggtcccgctggccgggctggcgggcgacgccgcgggccggccggcgcgcgcgtggggctggccggcgtcgctgggcgccgggcggcgcggcagcctgccgccgggcgacatgcgggtgtgccgctcgtcggcggcatgtgggccttcctccgggccttcaagtcccgcaggccggactccttcatcgactccttcgcccgacggttccggcgggccgggctgtacagggcgttcatgttcagcagccccacgatcttggtgacgacgccggaggcgtgcaagcaggtgctcatggacgacgacaccttcgtcaccgggtgggcccagggcggaccatggccgcgcccccgcgcgccccagacccgcgcagcccctggctgggccccatccccccgacggcgggggcccacgcaccgggccgagcccggaccggagcttcgtaggcggcgccgccgcgcgcacgggggccgagctggagagcacctacccgggggtcaactttggcgggcgcgccatggccatcgacctgccggggttcgcctaccacaaggccatccgcgcgcgccgcaggctggtggcggcgctgcagtgcgtgctggacgagcgccgggccaggggggcgaagaccgccggggtggacatgatggaccggctgatctccgcggaggacgagggcgggcggcggctgcaggacgacgagatcatcgacgtgcttgtcatgtacctgaacgccggccacgagtcctccggccacatcaccatgtgggccaccgtcttcctgcaggagaaccccgacatcctcgccaaggccaaggcggagcaggaggcgatcatgaggagcatcccgccggggcagaaggggctcaccctccgggacttcaggaagatggagtacctctcacaggtggtcgacgagacgctgcggttcgtcaacatctccttcgtgtcgttccgccaggcgacccgcgacgtcttcgtcaacggttatctgatacccaaggggtggaaggtgcagctgtggtacaggagcgtgcacatggaccctcaggtgtaccctgaccccaagaagttcgacccttcaagatgggagggcccgccgccgagggccggaacgttccttcctttcgggctcggcacgaggctgtgcccgggcaacgatctcgccaagcttgagatctctgtcttcctccaccatttcctccttggatacaagctgacaaggaaaaatccaaattgccgggtgaggtacctgccgcacccccggccggtggacaattgcctggccaagatcaccagagtctcctcctcccattgacgatgatgaaaacagagaatccaaaaccctagacggcgtcgcccagaagcgccaaatttaggaaaactcatgtgtccagacaaaaaaaaaaaaaaaaaagcttatcga

SEQ ID NO: 5462 - DNA, 2315 bp, Triticum aestivum
  Clone ID: TRIAE-23APR03-CLUSTER9466_1
tcaatccgctttctcatttacaaagggagagaatcctggcacaaagactttgtgaccatggctaatagagtggaggttgagaaacctcaccgtctaacatcacgtggagctcaagcgggccttcgaatcgcccgtgctcacattcacatacaattcccctcgaccagaccctatggctatttcaattcgtatgttgtgataaccttaacgatcacacttgatcacccggaagcaaatcaattgcatatagcctccgtattctatgagttatctgtcaagcactctgatgtggtctgacaatctgccatgggcctttcacttggcctagaccaggatctcaggctttttgtaccgtctgacatcagcaggagcagcccaagcggaccttgtaatcgcccgggctgccatggcagttctatggaccgcgcgcagccgcccaacggcgcgttcacttcatatggtgtgataacctgaactctatctctttagcagctcgcaatgtacgtactgctgccggttttgtccctcgatggacccgactgcagcaggcgcgctgttgatacaatctgtaggttcgagctgccgcatcctgcaaacccccggagccggtcagtccgtgccgggtgacgtggctacctacatagaagagaacatccacttgacgtccgaaggagacgggaaagacgtccgtacctccagtcttctataatattctccccccgcgctaataccgcggccccccagccgcctcctcgccgaaagccgatcggggccaccgtgcgtattctctaggccactcgggacgtccatcagaacggtggacggaagcccacccgaatgcgcggcattagaccagcattgccagaagcggccgaacgctcccttgcctcgtttcggcgtccaaagtacgcctacgcggacttggtgaaggatccatgttgctcttacttgtggacagaccatcggcagcgtccatgggctctttcctgggagtgaagtgctgcgggaagacctctattcttccgtaaacatcatccatccaacgacgcgggtgctctattcaattcatagcctgaggtggggagaagggaacagaggagcctggcccttcacttgaacggcgggcgcagatgagatctggctcgcgtggtcgccggggaaaccgaggcgaatcagtgccgtgcagcggaaggaagcttcacttccctggacgaagacaaatccagttccgctgcctcgtgcgctgactggcgtgtggtggtgaagagggcagggggccggggcatgagaagggatatgcttagtctatccagattcctgaaagtaaataccacgtagccatgtgagtggctaggaagcatatttttaagacattacagtttagcatcatttaccggagctaaattacataaatttctatagctctttatccctgtagtggaaaactatgtgaaacaatacaaataagagaaaaatgaggtatcattttggaaacacaaactttgggagccctcaactacaccgaatggaaatacatgatgatgctaagcaccatagcatgatagggaacatggctctggtgtcgatgcacattgtagcagaagtttccactgcagaggtagtacacataaaaccatggtggccgggagtctcaaaaagaataaatgaagaaataaaaaccagccttgcattatagtatggtggaaccgggcttgcaataaactcccgaggcctcagttgagtagatcctctgatcggcccccttggaaaaatcaccaaacttttgcagaagagtggaggagtttaagaataattgaatcttctgaccaccttccatcgataaaagagaagaaattacatggtaaaattatgcagtcatatcttgcaagaacccttcactttggcagcatgctctccaactgccttcttctcttctttggttccaaaaaggtcaacattgttgtcatcgtcattatcagcggcagtagccactacacttcagatagtagtataaacactgtccttgtaggacaacaaagcgaggaagccagtcatcgacatcggcgtcgtctatgataggtggctccccaggaagttgagtccatctacttctgatatggaggtacccggaaaggagtgcatatctcaaggcttcgtcaatattttctaaccgggcttttagctgggacaccctttcatcggcatcggcaatttcgcttcgtaatgattctacttcagctcttgtcaattcggtcttgtcatcatccttgttgctggaagaccacctaatgcggacgcgtgggcggacgcgtggg

SEQ ID NO: 5463 - DNA, 969 bp, Triticum aestivum
  unsure (1)..(969): unsure at all n locations
  Clone ID: TRIAE-23APR03-CLUSTER9466_2
agaagtcagancaaagggaatatgcatcaaatatgatttcacctacattcctcatgtacacttcacaaaaaaatagtgttggcttgcttttcataaaaatagcagtggggtcttatcctacttgtacagctaaaaaatatatacgaattcaccccactcaaagaagtacacctttttttaggaatcaagtgtaaatcagccaaacctgctgcgccatcttcagatggaccatccacttgtgcatcatcatcatctgctggtggtggtgaggattgagctccaggagccctgccattgctaagttttttagaatctccttgactatgtcgaggtcgccgtagccgcacttccggatccaggcgaggtaccgtgaaacttagacatggagagaaaggtgtcttcttgacttcttgtattcctctcatttgctactcttttataattgggttgagcccaatccagcacaagggggcctaatacattttgttgtctttcttttcgatgtagtggccatggtcgctgcagcaggcaccgcggctgtctcagcctcctcttccgtctctacggcccgcgctcctccttccgagtcctgaggaaccgcaacggtgtaagcccctgagagggaggttgtggtcgaccgccgtcgtcggggtaggacgtgggttccacgtcgcgcagcagcagagattcctgcgggctcaggtctgtagacttcagatagtagtataaacactgtgcttgtaggacaacaaagcgaggaagccagtcatcgacatcggtgtcgtctatgataggtggctccccaggaagttgagtccatctacttctgatatggaggtacccggaaaggaatgcatatctcaagacttcgtcaatattttctaaccgggcttttagctgggactccctttcatcggcatcggcaatttcgcttcgtaatgattctacttcagctcttgtcaattcaat

SEQ ID NO: 5464 - DNA, 1811 bp, Triticum aestivum
  Clone ID: TRIAE-23APR03-CLUSTER95004_1
aaatgggcctatgcgtcatttggcaggtcatctagtcttcatatgtaccaaagaagagacattcatggagctcatgcacataaacataggaaggtaatacattaaagtaaaaatgtctttgtgcctcttccttttgaaatgtaaacataggaactgaataccacagagcactttattacatgcaaaatgcgacaggatcttcaacgaggaatgacgaagtgatcgcttcaggcactttatagtatagcacccgacaactattgccagtcgtcaggtctcctttgatgtcatagctgagagaaaatgtggtcaaacgatacagacagcaacaaggtacatatcgctcttccatgagctcctgatcatatccctcgtccatgagctcctgatcatatccctcgtcctcaatagagtaaccgggaccatccacatctccctcttccttgagctcctgaacatctccctcttccttgagctcctgaacatctccttcattgagcttcagatcagcaccccggtcctcggtacggtaaacaggtccgcccacatttccctcttccttaagcttcggaccatcgctttcatcctcaatggagacgcactgcactaagcagaatttgctctggcccacgtagactagggtggcgcctacatgcctctcagctgggtcctgactgaacagcctctccttgccgagcttccactcaaggccgtggccagtgctggagctggacaagcagcaggagtagacttgcccaagggtgtcagaatctttggagagcccaacaaaggcattgaggtacggatcaaagtgaccacggcctgcgaagggcagcgcccaactgccaagttgttcccacttttgcttttccatgtcaaaggaaaaggtggcctcaatgtcgttcatcttggtgctgacgaagatggtacatctctggggatgcacagcgtaggacgtgacgttataactcttgaatggcggtttctcaagccgttgccacgaccactccttgctgcgacgtcgacccagcggcggggggcagagaggttcccagtggagcatctcgaaggaggcttcgctgagacagaatagcctagtattgccgacggagagatagatgggattaatcggatattcctggccagggcaaaaggtcatgctcagcgaggagacgtccaacatggggacgaaggtcccggacaacaatctcttgcctccgggatccctggtatgcatcgccaagatcctggtgccaaaggctgaggcgaagtactctggcgacccatgcgctgcctccaagcggaagagtgccggaggcaggcacggcacatcggctggtgctgagaatgcagtctgcttacgtcggcgagagcagggaaacaagtttaccttgtggatgctatatccgtacgaccagtcatcaaaaacaaggtaaacgtaatgcttccgacgctttctcttggaaccagacactcctacttgctcgcctgttgcacacaccactgggcagggaaggtttcctggattaattgtagatctgattccttcgattcctttagtaggcgttgccgttggctcttcatcgttgccattggatttccaacccgaatccattgtcaaagggaattcaatcaagcccaaatctcaaatctaaagagggcagcaaaaggcaaagaaacggaaatcaacatcaagcagaagaaacagcaggtacgcacctataagtcgaagatggtgcagcggccatttggcttcagagtagattgggaggaggcggcggcggcggcgacggcgaaggcgtcggtaaaaa

SEQ ID NO: 5465 - DNA, 1148 bp, Triticum aestivum
  unsure (1)..(1148): unsure at all n locations
  Clone ID: TRIAE-23APR03-CLUSTER95015_1
ttttttttttttttttgtanagagagggtcacacaacatacatagttcatcttatagattggatcaatgagttcagtcacacaacatacaacggagaacaagaaaaattgacgggggataactcatcccaacaatgtcaaaagagctgccaattcagggcggcgcacgtgcatcagttgacaaagttctagaatgcaaagcatggcaagggcactccagcaagcttttgctcaggaaccctcacctccacaaacaagattaatacaacaacatggagtaaaaagaaagcacacgatcatctgagtaacgatgatgaggttcttcaatgaccatggtagatgtccaaatgatggtctgcttctaagagcgcagggaatcatcccccttgccatgaatggagctcacaggaaaatagggagatgattggccgtcttcacttccagcatccaaaagaagcgcacagccattgatcagttcttgcccttctccttcatgtcggagtgccggaacccctcccagagctgcaatgcggccgccgcgccgaagtggctctccgctgtggtgggggaggccaccgcgacggctgggctgaacaagaagggtatgtgcggagcatccagtggagtagacagcctctggagctgctgctggtggtggtggtggccggagaggtgcggctgcgaattggactgaagggtccccctagtgttgttgacacccacaagacccgaggacatggagaagttgagactgtagtctactgccggacccgacgctggcgccgcatggacgggcatgtagtggtcgtgcgagaaggagaagtgcggcatctccgtctgcgaatcgccgccgccggctgataagctgaagtgctgcgctggggccatggcgacgggcgcaatgttgcccaggtgcggggccggggaggcgaaggtgtgcagcatcccgtgcccggatttccggggctgggagaagccgaggtagtccgcggtggcagacgcggtcatctgctgccacgagttgtgctgcttgtgctgagcaacagctggggtggcggccgccaatccagtgaggagctcggtgaaggaagccgcctgcgccgacggggcgcggccgcgcacggcggcagtgaccgagtcgtccttgtc

SEQ ID NO: 5466 - DNA, 1576 bp, Triticum aestivum
  Clone ID: TRIAE-23APR03-CLUSTER95462_1
ttttttttttttttttgtgccaggtaccctgcagcccgggtaaaccaccatgcatagcagaatttgcctcgttgtttatcacatgtgtacagtctcgtgaccagtgagcccgggcaagtgcccggggtggccgggcgctggctccgccactgcccctagtggagtactagtaatttccacaaggtttacatttcaaaacagctgtcgcccccacaagccatacattgatctctactttaaataagcttagtagcagtggattattcgttgcattattggaagcgatgtgtagcaggaggaggtccgtcgcctacttcgcccacggcagccaccggctgctcccagcggacgctgatgacgacggcgagttcacgtgcgacggctgtctggttgccggcgccgggccccggtacctgtgcggccaccccggctgtggcttcaagctccacgaggtatgcgcgcgcagcttccccaggacgctcaagtccatcgtccactcccagcacaggctgaaacggcgcgagagcgctggcgacggcaacgtcaggtgcgaggtgtgcggggaggacgtgaagggcgcgtgctacggctgcagcgccggtgggtgcgcttccgcgacagtcgtggtgcacccgctctgcgtccgcctgccgcccgtggcgcggggtccggccgcggcgcacccctgcggccacgacgcgtggctcgtcaagaagtcggatggcggcgccgcgccggcgtctatgtgcgcggcctcgatgtggcgtggaggtaccggtgcgggacgtgccgggtggacgtgcacccgcggtgcttcgtgccgcctgcggaccagtgccgcggcggcgaggcgtcggccatctccatggggaagcgctgctgccttgtgtttgggcaggacttgacgagctgcctcaacatcagctactactaccgtggtgctgggtagtactatagtcaaagaaaaaacaaccatgtttcaaacaaaaacagcatgatgttgctagactcctctattccacgttactacatatagcaaatggcatggcatttctaataagaacaatccggtcatgcaaatggaagaagaaggtaccatgtctctttctattttcctgaactggaactagcggccgcttccgctcgcagtctcgccatcactgcaacgacaacaacctcgccgaggacgcgcgcagaagcatcaatcctccgggcgcagcggagaccacagccacgaaacgccgggccgagggccctcggcctggctctccgcagcgcagccgcatcacgcggtggaggtggccccgcgcccggcagcccggcctccgcgccgtgcccccgcgctcctcccgtggctgcgctgcgctcggctgcctcccggccaccgcgccgagtcccacgcccggccgtgcgccgcgctacgctggccgccctgcggcccggcctccgcccggccacgcgccctcttgcacgcagccaagaccgcccgactgtggccgccgccctccaaccgccggcgtcgtgtaggatgtgggggatcgagcggggtggtgcgggcttcgggtctccgaccctt

SEQ ID NO: 5467 - DNA, 1322 bp, Triticum aestivum
  unsure (1)..(1322): unsure at all n locations
  Clone ID: TRIAE-23APR03-CLUSTER95593_1
gnaggnntttattnttgnctggattaagagcccctccctgcctgtccccatcacccatgccacatgttgcacaaagaaaatatcgagatggcaactcgaacttatacaccacagtgtaataatttaacagacgcggctgctcgcagcgacttcgacagtgaaataggctatcagccaacaatataacatcagcagagacggggacgtacgagatccacgacgagttgtcctaatcatcgtctctagttctctaggcggtcgagctcggcgcggtgctctccacgaacgccgagatctccgcgacgagcttgccggtctcgggcagcgccgggaagaagtagaaggcgtgtacagcctccgtgaactccatcacgcgcacctccttgcccttccggcgcagcatgccggcgtaccgcctcccccagtcctggagcgggtcgagcccgccgacgaccaccatcgcccgcgggaacgcatccggcagctccggctccgggccggcctcgcccgtcacgtgcgcggccgggtggtttcggtcggcgccctccggcaagtacgccttccaccagaagtcggaccggcggaggttcacgatcggggccacgccctccagcgcttgctccgactcggtccggtcctctccgccgaagtaggaggacaggagcaggaggccggcgaggtggacggctggaggcgttgtcgcgggtgccgccgtccagcgctgggccacgtggtgcgcgatgttggcgccggcgctgtcgccggcgaggaagcagcgggagaggtcgacgcggacggggacctcggcgggcaggccggtggtggcgaggtaccggagggcggcctccccgtcgtcgtaggccgcggggtagcggtgctcgggcgcgaggcggtaggtcacggacacgacgacggcgcccgtctcgcggcacatggtgcggcagagctcgtcgtagggccgggtggccgcggagaacaccgtgaagccgccgccgtggaagtagacgatcacggggcgcggcgacgcgtctgcctccgcccccgccccggccgtaaagtagacgcgggcccgcacgccggtggacgcgtcgacggtgacgtccacggagcggacgcccccggcgtcggcgcgcgcggggttggcgggcgcctggcggtccacgagcagcgagaagaggaagcggttgacggtgccgtcccggcgctgcgtggcgtcgacggcggcctcgagcgcgcgcagctggagccgcaccgcccacggcatcgcccccacgcgcgcccggagctccctgcgcgcgacgtcgccggccattctctccgtt

SEQ ID NO: 5468 - DNA, 1261 bp, Triticum aestivum
  Clone ID: TRIAE-23APR03-CLUSTER9565_1
cccccgaccgctcattctcgcaataggaggagctgaggcggctggtttccccctgccagctcccctttcgctccggctgcaatctcatctcgatctccgaccctgatcgtccccaacctcccccctccccacacaaatccatccacatacccaaggcgccgatcaaagatccatccacaaagatccggagaggaagagatctgcaagatcttgacggctctcgatctgcgaatccatggacagcgagctgagctgattttgctgcttcttacctcggcgaggaggaacccgccgggaagcgaaacagctggcagtaagcagtcaagaaggctgacagcagtccaaccgcaggagagcgaaaggtattgattttccgcagggacccaatcacacaggatccccccgtcctgaatccccctgcttatggctacccggacggcggtggcgaccagcgcaagcttcgtcctcatcgagccacacgcctcctttgccgaccgcctcaacgccaccaccgccgactgcggcttggacggtctctgctctgcctcgagacctcttgttctcaatctctacccccatcgcaccgattgcctcaacaccgtgtttgcctcccagcatctattacctgaaccagagcctgagggggccttccttattcgatccgtagacgtgcgtgggcccctttcctatgcgccgcgtcgcctgaaactgccctgccttttccataaagcatgcttcccggtgctaggaacatcaaccaggccaggactaccaacctgtcgcccatcacgccctatcgcttgggccccctggtaaacctgaatgcaccttcgtccttgccgcacaagctgataagttagagcatgacctacttaactcttgtatcaattctccgggggaaaatcaaggtaaaggcgtgaatacggaaatgacctgtgatcccccccttgcaagaagctgagctgggaccggagaggatgtcattctgatagtggaaggagtttacatgtgagatgaactggactatatgatctgagaataatgcctatgtgtcgatggagggggtagtggattatggatgatcatctatctggactgtctttcatttgtctgttaattttaggattatgaatactctcaaggattcctcaccttgttttattatatgtatccatcttgtctcaccacctattcttatcgcttatctgcaataagaactttccatgaactagtatattagtcaaaaaaaaaaaaaaaagct

SEQ ID NO: 5469 - DNA, 1666 bp, Triticum aestivum
  Clone ID: TRIAE-23APR03-CLUSTER9582_1
tgtgctgcgcgttgctcagcccgcgaacaaatttcatctggcacgcccccggtccaatgggctagcgctcctcgcaggtactaggcgccagcccgcctagctagctggcgactcccggctctcgctagccctgcctgctgctctgccacctccccaccctagccacagccacacgccctgaccggctcccgggcgcccagcatcagaggaggaagggcctacacacatcatttatcagttgccaacacgtacgcgtacggtgtgacgcacgagcatcctgtgactcgagtaaagtgctggttctcagtcggtcagaagcacttcttgtggacgatggacgggcccgtctcgtcgtagtcgcccttggtcacgtgctggttctgggggaagaccaccttggccaggatcgcgccgcccagccacgccgagtgccgcgccaggtcctccggcatgtactccggggccttcacaagagtcgggcggatcgccgaagccgacagattcgcttctctctgaaacctgtcctcgaaaccagtcatagatacagtgccaccacatagcatagtgttctcgagcacttgcttttggtactccgatgcgacgtttgaaacactagtaattagctggtggacaataccataatcttctaggccccggcgtcttggacgaatcatagcttccccgtcgacaaagccctctttttctaaggccaaagcctgttcgtttgaaacaaagcttcgcccactttatagcgtctttttttcaattgttataacctgcccatcttggaagaagcatgcttcctggttggcaagtccttcatattagcttcaaagcatggtttactgatgggttggacttctttagtccttgtgcacataggttcgtcaagtcagttcctcctatctcaaatctctttgatgctacgtgctgaacagcaccttcacaaactggagcaatatctattttcccatgtccaatgtcaaccgtacaacccgaaatgcgaccaacagcataaagggacaatacagcctgttcagaatcataaaatcctgatacgttgaatttttcgaacataagttgcactaattgctcccggagagccttgggcgtgaagagcggctgggtgaagaggatctggccctcgtcccccatctcccagccgatgttcctgtagaggacgtaggtgagcaggtcctccatggcgtcccagtccttgacgaagccgcgcaccaccggctgcaccacctcctccaccaccgccgccgcgccgtcggccacctcgctctcctccacctccgtcttcatcttcgagggcatcaccagccccggggcctggtcgggcagggcgatgccggccttcagcagcttcgaccccgcgtcgacgaccaccgcctccatggccggcggcgggtgcgggcgggagactccggctccgcggcggcggcgcggggaggggcgagcgctagggtttgcggcgaggggagaggatttttgaaatttttgggcctcgcgggaaagggatggagaggttttggaggatttagcggaccagaggggaggaggaagaagctcttgctgcagaggagatctcgctccggccgcaggcgagcgccagtgtaccggttacgtattcccaaaggcgagaggcgggttacgtaagtgt

SEQ ID NO: 5470 - DNA, 1676 bp, Triticum aestivum
  unsure (1)..(1676): unsure at all n locations
  Clone ID: TRIAE-23APR03-CLUSTER95862_1
cacagacaaggctctcccgataggagtcgccaggaagtcactcagctccctccgatactgcacaccaaaagcacaaattagccataaattgagccagcagctaggcgctaatagccaggaagtcactcagctccctccgatacctaggccagctgcggagaagtcgacggagaaggaccgccaccgccggccgacgccgagctccgcgtcatctcagcggctcgttcccgcgccgcgcgcgcggcctcggccacgcggcgcgagatcgagtaccgcccgtccaggcgctgcgcggcctgtcgcgcctcgaaggagaggcgctcggcagctttccaagattcattactgaagtggcatttgcatgctctacaaattacagtctccctactgcactcacaaaatgtaacaagtactgcataggccagaagtgagtttgcgcatgccagcccatctgtaataacaggcacatataatgtacaacaacacacctaataacgaacacagccgcatatacaaaacggcgcaccaatcgcagcctgagcacacggtcttctcattccctctcctcctcgctgattagcccgtgtaaactgcaagaacagcgcgttcatcacttctcctcgaactccacgtcgatgtaatcaggccctgagcttcttgaaccgccaccgccaccgcctcctgaggacctgctgtttggctgccacacaatgttttggcaattcatgcaccggatcacctggttgcggtaacccacgaaccgtcttttacatgctgggcacgatccctcaatagcaaccctgttagcaaaggtcccaaggagaagaggggctgcaaatggtagcacgaatgtactgaaaatgaaaattctgaagagccaccccgacagtgcaagccacacgaaagtaagtgtagacaaggctctcccgataggagtcgccaggaagtcactcagctccctccgatatctaggccagctgcgggagaagtcgacggagaaggaccgccatcgccggccgacgccgagctccgcgtcgatctcagcggctcgttcccgcgccgcgcgcgcggcctcggccacgcggcgcgagatcgagtacctcccgtccaggcgctgcgcggcctgtcgcgcctcgaaggagaggcgctcggcccccgcgttggcgccccgccaagcgcgctgcagaaggccgtcgaggtcggcgcggccgaagaaggcgcgaggggacaccgtcgaggcccgcccgagctgaacacggcgagcaggaacagcggagcgcgagaggtggaggaggcggccggggctggtccgggtcgacggcggtggggggtgatgccgccgaggaggtgcgagcgtggacgccattccggcgcgtgcgagggcgagagtgcgtcgcgtggtcgcgagattattgtgcggatggggtcgctcggttcgtgggccgtgttgggttaaggcctctgctntcgtgctcgaggccgcccgttggttgcttcaaaacaaactgtcgacgtaatgcgcagcccaacgcgcgtcttgggccagcccaactcgggttatcattttcctcttttctctttcgtttcttcttttttctattcacttttaattttaggactgtgctaactcgggttatcattttccttttttctatttttgatggtacatttccctt

SEQ ID NO: 5471 - DNA, 1508 bp, Triticum aestivum
  Clone ID: TRIAE-23APR03-CLUSTER9590_1
cggatacaaagtggcgaaagactccacctgcctgaacgcacaccccgccgccctgcgccactcactcctctccaccgcctggacgccgcgccgccgcctcgaccgagcctcggccacgcggctcgccccgtcccccggcccgccctgccgctcccgccggccggcccgctccgtgcgactcctctccaccgcctggacgccgcgccgccgcctcgaccgagcctcggccacgcggctcgccccgtcccccggcctgtcctgccgctcctcccggccgacgcgctccgtgcgcccgatggcgtcgtcgacgaccgcggcccgggccgacgcggcgccgccggggctgaaggagggcatcgcggggctctacgacgagtcgtccggcctgtgggagagcatctggggcgagcacatgcaccacggcttctacgactccggcgaggccgcctccatgtccgaccaccgccgcgcccagatccgcatgatcgaggaggccctcgccttcgccgccgtccccgacgatccgacaaacaaaccgaaaacgattgttgatgttggatgcggaatcggtggtagctcaagatacctggcgaacaaatatggagcacaatgctctgggatcacattgagcccagtgcaagccgagagaggaaatgccctcgcagcagtgcaggggttgtcggacaaggcttctttccaagttgctgatgctctggagcaaccatttcctgatgggcagtttgatcttgtctggtctatggagagtggtgagcacatgccgaacaaacagaagtttgtaagcgagctggcacgcgtcgcagctccaggagcaactatcatcatcgtgacctggtgccataggaacctcgcgccgtcggaggactcactgaaacctgacgagctgaatcttttgaaaaagatttgtgatgcatattacctcccagattggtgctcgccctcggattatgtcaagattgccgagtcattgtctcttgaggatatcaaaacggctgactggtctgaaaacgtggccccgttctggcctgctgtcatccaatcagcactgacatggaaaggcctcacttctctactaaggagtggatggaagacgataaagggagcactggtgatgcctctcatgatccaaggctacaagaaaggcctcattaagttcagcatcatcacctgccgcaaaccccaagcagcaatagaaggagaacctgaggccgcatcgcccagtgtagaatagaacccatgtgattggaatagactcggcttgctgtcgcctcgtagctgaataatttcatgttaccgtgcatctgtatctgcaactggaagtgccatatgaaagtggttcctaaagcaaaattctcctcacattcattaaaaaaaaaaaaaaaataccttaccgggacccctgccagatttacgatgcgcgctgatgtgtattgattggtagaaaaaggaagaatacaaaatcctatgacgctacaaaaaaaaaaaaaaaa

SEQ ID NO: 5472 - DNA, 2426 bp, Triticum aestivum
  unsure (1)..(2426): unsure at all n locations
  Clone ID: TRIAE-23APR03-CLUSTER95_1
gaacacccgtccaccttgacgacctcgagaaatctcatcactgctccccagtcccttccgccatggcgatctccaaggtctggatctcgctgctgctcgcgctcgccgtcgtcctgtccgcccaaacgtcatcactgctccccactcccttccgccatggcgacctgcaaggcctggatctcgctgctgctcgcgctcgcgcgtcgtcctgtcggcgccgtcggccagggcccaggaggccgccgccagcgcggagccggctgcggccgacgaggccgtggccacccagcacgccgacaacttgcacgacgacatcgccaagcaccccttcatcctcgtcgagttctacgccctatggtgtggacactgaaagagcctggcacctgagtatgaggaaggcggcccaactgttgagcaagcacgacccagccgattgtccttgctaaaggttgatgccaacgattgatgaagaacaaggccgcttagcgggcaacgtacgagggtccagggcttccctaaccctcaacgtatcttccaaggaactgggggagaaagaaacatcccatgcgaatacaacgggccccagggaggctgagggaattgtcgagtacttgaagaagcaggttggccctgcttccaaggagatcaaggcacctgaagatgccacttaccttgaagacggcaagatccacattgttggtgttttcactgaattcagcggcactgagtttacaaacttccttgaggttgctgagaagctgaggtctgattatgactttggccacaccgtgcatgccaaccatctcccacgtggtgatgcagcagtggagaggccattggttaggctattcaagccatttgatgagctcgttgttgacagcaaggattttgatgtttctgctttggagaaattcattgatgctagcagcaccccgaaagttgttacttttgacaagaaccctgacaaccatccttacctcctgaaattcttccagaccaatgctcccaaggccatgctctttttgaacttctccactggaccgtttgagtccttcaaatcagcctactatggtgctgtagaggagttcagtggcaaggatgtgaagttccttattggtgacattgaagcgagccaaggcgctttccagtacttcgggctgaaagaggatcaggcaccactgatcctcattcaagacagtgactcgaagaagtttttgaaggaacaggttgaggctggcccaaattgttgcttggttgaagggattactttgatggcaaattgacaccattcaaggaagtctgagcctattcctcgaggccagaaaatgagcctgttaaggtagttgtggctgacaacgttcacgacgtggtcttcaaatctggcaaaaatgttcttattgacgttctatgcaccctggtgcggacactgcaaaaagctagcacccatcctcgacgaggcagctgccacccttcaaagtgaagaggacgttgtgatcgcgaagatggacgcgaccgcgaatggccgtgcccagtgagttcgatcagctagagtggctccccacccgcctacttcgtcacttcccaagcggagacgaaggtctcgtacgagggcggcaggacggccgacgagatcgtagactacatcaagaagaacaaggagactgctgggcaggcggctgcggcggacaccgagaaggcggcggaaccggctgccaccgagcctctgaaggacgagctctgagcatcggtctgtctagcagcagacaggtagaggagggggaaacatgttttggcaaggcagcttccaacgccagattttgcgagggggggacgagagttggtcgttggatgtgttggccccggttttgcctgattctgtatcccgttgcgagaaatactgtaacaaatccgtcagtggtgtacctagttaaattatcttcaagtgacagtagaaatggttcgtggagagctttggtaataaatggcgcttctgtgcttggtagaaggtgcttatgtgcctggtagaatcaacaaaaaaaagaataaaaaaaaaaaaaaaaaaacctgcccggccgcccgctcgaatccactagtgaattccgggccggcgacctaaagacaacttctcttggaccaagacagtttttagacccaaagacaacttctcttagatcaagacacatagtaatttacgcacattaattctttcattttattcataatgcactctctcactgcatgcagccaaagataacttctcttagnntcgcccccccccccccccccctccnttcgatttcgattggaatcggagccagctccgctgcctgattagccggccggccccggccccgtctccgtccccatggcgtccaggcggatcctcaaggagctcaaggacctgcagagggatccccccacctcct

SEQ ID NO: 5473 - DNA, 1441 bp, Triticum aestivum
  Clone ID: TRIAE-23APR03-CLUSTER963_2
gtttttaactcgacttagccaagtttggcaaacgaacaggccccgtggccccgcccccgcgcgacagcgaccgggcgcccgaagtgtctcgcgctcgcccacggcacccgagcggagcccccgcccctaccatgtgctctccctgcccgcagacccctcaaaacccacccgcgcccgcacccaggcaccgagcacccagcagaaagaaacgcaccaaatctttatcccctgccctcagcagtgccgacctgagcgccggagatctgcggcgagcgagatgaaagtggaggagcagacggtggtgggaggaggaggaggggggctctgggggctggccgggcggccgtgcgacacgtgcgccgtggacgcggcgcggctctactgccggtcggacggcgcctacctctgcgccgggtgcgacgcgcgcgcgcacggggccggctcccgccacgcgcgcgtctggctctgcgaggtctgcgagcacgcgcccgccgcggtcacctgccgcgccgacgccgccgcgctctgcgccacgtgcgacgccgacatccactccgccaacccgctcgccagccggcacgagcggctccccgtcacgcctttcttcggcgcgctcgccgacccgccccagcccgccccctccccgtcctccgccgccgcgacgcaggaggacgcggacgacgacgggagcaacgaggccgaggcggcctcctggcttcttcccgagcctggcgatagccccgaggacagcaccgctaccttcttcgccgactcggacgcgtacctcgatctggacttcgtccggtctatggacgggatcaaggccatcggggtgcccgtcgccccttccgagctcgacgtcgccggcggcgctctcttctaccccgaacactccatgaaccacagcatgtcaacgtccgaggtcgcggtggtgccggacgcgctgtcagccggcggggccccggcgccggcgccgtcggtggcggtggtggctagcaaggggaaggagcgggaggcccggctgatgcggtaccgggagaagcgcaagaaccggaggttccagaagaccatccgctacgcgtcccgcaaggcgtacgccgagacgcggccgcgcatcaagggccggttcgccaagcgcaccgccgaggacgacgcgctggagcgggacgggccgttctcgcccgcgtcgtcggcgcacctggcgtcggacggtgactacggcgtcgtgccgtccttctgaggagaccggcgacggcgacggcgactctgctgtagttttggcgcgcgcatccatccgagtgcgctcgcgtgcggtggctgcgacgcgcgctccgtgtaacattgaataatctgtacagttttgttccatgggattagtgccgtgaccgtgccgacctgaaaaaaaaaaaaaaaaaaaaaaaaaaaaaaaaaaaaaaaaaag

SEQ ID NO: 5474 - DNA, 2171 bp, Triticum aestivum
  unsure (1)..(2171): unsure at all n locations
  Clone ID: TRIAE-23APR03-CLUSTER96635_1
gggttcaccccctgttttgcgtggtcccggccccccccgggagtgcactactccggagcgtggttttttttttttttttgccaatccacggaggaagtatagttgaattgaacacttctttctaatatacaatgcccaacatacatcatacagtacatggtggattagtagtacaatagatggcacaaactaactgaaaaagggaagaatcatgagaagtagcaaccacgatcatgatcttcctctacacgcacagtacacaccagcgatcatacgaatgaaatgagaccgaattacatgcacctatcgcatcatgcatgatatatattgagtcttagcttatggaggacctcctcctcttgggcttgaccacattcatggcgccgcccctactctcacggatgctcgacgtgtccttggaccacccgccgccggccctgaacgggttcagccggctcagcgtgcgcgacatcgacccgaagaagctcgctttcttccccgccaccgccgccgtctagccgccgtcctcgagccgctccccttgctctgctgcacgccggacgacatgtgcgcccgcatccgggccagctccgaccgcagtgcctcgttctcccgcgccagcgccgcgtccgccttggcctgcatgcgcgccgacccggcctccgaccgcgcatcgctatcctcgtcgtcgtggccgacgccggcgctgcggagcttgagctggtcgtagtagagtgcgctgagcacggcctggagcggcaggcgcttgttctgagacgcgtggatgcgcgccgtgtaggagagcttgagggtgtccatgacgctgcacaccttctcccgctcgatctcgtccagcttcgggtgcgccttgaggtagatgtccacggcgcggtagaggcagtcgtggggtggcgcgggcgtccttgggcacagcgccggcgacgcccacgaacttggagatcggtagggactcgtccgtcgcgatctccgccgccacttcgtccaccatcttggccaccttctgcagcgcccctgcgcccagcgccgccgctccggacagcgacgccctcctgttccgcccggcgccggactcgcgctccacaaacgcggcgatgacacgccggagcgattcggtgttaatgacgcgctcaccagcgccatcgaacgcgaaggcgagcaggtcgcccgcggtggcctggtcgagcacggccgcgaggcggagctccaggtcgcggcacgtcttggccgaggcctcggtggtgacggcgtcgtgcaggaggcggcagaggaacgctngcgggaaggggcgcgtcgtccgctgaagggagcacggcgacaacagactcgaggagggcgcggtggtcggaagctttgccgtcggccagtaggagttccgcgtaggcggtggccgcggcgacgagcacctcaggaccggcgcgtcggcagcgcagcgccgtaaagaccctgtggaacgacactggcgagagagctgcgagctccgacgcccaccactccggcggcgaccgcgtcgggaaaagcacctcgttgcagatccgcagggccacggcgtcggccgcgcgccgggcgacaccgagctcctcggcggccgtgaggagcgggccctcacaggaccgcagcacggcgatcgcgttgggcagcgtccggagacccgcctgcgcgaggaactcctccacgcggcgcgcgaggccgccgtcggccggctgcatgtcgaggaacgcggcggcgcagaggagcgcagcagcgttgcgtgcggatatctcgaagttggcgccgtagcagtaacgcgcggccttctcgaaggcgtcggcgccgcccggtaggccgtcgagctcgatctcgacggtcgccgcggggtcggggcgcgtggccacggcgacggccttgcggatgtagccacacttgggcaccatcaccgccttatgaagagggaaggcggcgccggcgacccggacgacgaggtccgtttgtacgtcctgcgacgacaaccactggctggtcctctccatggagctggatctggaagaagcttgcatggacagcaaagcaccggtgaggcgcgcgtgtctagagctagaagaaggcgtgcgttcgtgcaactcgagctctgccccgggaggcagcatccagaacaccacgggatatatagagat

SEQ ID NO: 5475 - DNA, 1774 bp, Triticum aestivum
  unsure (1)..(1774): unsure at all n locations
  Clone ID: TRIAE-23APR03-CLUSTER97090_1
ttttttttttttttttgaagcaaagtcgagttcttttgttttgttgatttttcanaccccagattctccanaatctgctcaaaagaactgggcctttgtaagaaacaacagttacaattctacgaagtcataaggaaaacaaaagatttaagcacatttcaccatctttgatgaactgccaacacaaacccaatcattccatactgaaaccatacatttataacgccaacacaacaaagatatacatgtctatcctagcagcacatcagagtacaagatttcagtaccacataacttttgtctcgttacaaaaaatggtttctgcagagcctctcaagtcatgtactgtcatttcaccaggtctagctgcagctggcttgggttcatatgaaaagacaggagtcagggcaaacatggcactgatgaccaggaaacatgttgtgtcatacccagaaaactgtccataaggcaacaccgcgcatttctccatctacaagaaattatatactttgaccaccttggatgtgtcgcacacaatcaggttatctgaatcagttggagcagtacacaaccaatttacctttttcttcacatcaatatccaacaccagttcactattgctgcttgtttcaggagaaaatcctttggaccaatcccatactttcagtgatgcgtcgttaccacctgaaacaagtaactttcccttctcaccaaacgctgaaaatgccacacaggagacagctgcagtatggccacccattgagtaatcaagatggatccttctcctttgacattgattattgctcccatccccaagatcagttgtttttgagctcatggtcgacccccttgcccgagaagggcctttggattttgcaggggccaattcatattctagatcaactacatcaacagcaccgtccccccttgcaacggcacaaactttgtacaaccctcctaaaatgccctcttcagaaactgctaccgagtgaacgaaagcagggttgagacattgccctgtactacccgaagaactgctattttgcaactcaggtgatccataatcaatagaaaatagtgttcgccctttggagaaatcccacacagcaagctttgagtcgaggccaccagtaattgctgtccaaggtctccaaggaatgaattgtacactgctgcaaatacttgtgtgggcttccctcaatcttttgtacaagcactttgagtggtattgacaatcttaacatccccactgtcatctgcagcagcaagatagcctttagaactgacagcaatctggttgatttcatctctattgtagttatatgtctccagtggctttgattgagatcccatacgaatatcgaaggacagaatttcatttccagccgatacatatacatgatcttcatttcctgatttaaaacagatggaagaaataggtttatttgctgcctcaatggtcaagagcacatctttggtgcgcaaatcaaaccagcaaagacatccatcctcgccggatgacgccacgacgcccgggcgggcggaggacgctacgcagcaggtgacggcgcccttcttgtgcccccgcagccgccggggcttccgctccgtcgatgtcgccgccgccgccgccgtttctgtctcggacatggcgcgcgtggccggtgaagacgcgaggctttctcttccccccttgacccttgtcgtcggcgcagaacctcccccggctgagaaagcacggcacgggtgcgtgcgacccgttcgattgaagtat

SEQ ID NO: 5476 - DNA, 1575 bp, Triticum aestivum
  Clone ID: TRIAE-23APR03-CLUSTER9715_1
gcccatcccatccgggccgcacgagagcatccaaaagccctaaacctttgccccccatccatccgcaccgcaccagagcatccaaacgccctaaacctttgcccccattcccccacccatgggcgccggccgcctcctccacctcgtccgcgcgccggcggccgcccccgcgggtcccctccgcggccacccccagccccacagccgggtccgcctccccgcgacgcccgccgccgggatgcgccgcgttgccgtctcctgctccggctcgggctccggctccggccccgccgacgaggaaggcatgacctacaagggcgccggcgtggacatcgacgccggcaccgagctcgtccgccgcatccgcaagctggcccccgggattggcggcttcggcggcctctacccccacggggatgagtaccttgtggctggtactgatggagttgggacgaagctgaagctcgcgtttgagaccggtattcatgataccatcgggattgacctggttgctatgagtgtcaatgacattgtaacttcgggtgcgaagccattgttcttcctagattactatgctacgagcaagctcgatgtggaccttgcagagaaggttatcaaggggattgtggatggatgccagcaatcaaattgtattctgctaggaggagagacagcagagatgcctgatttctacaaggaaggtgaatatgatctgagtggttttgctgtgggtgccgtaaagaaggataaggtcattgacggtaaaaacattgtggagggtggatgtcctgattggccttccttccagtggggttcattcgaacgggttctctctcgctaggagagtactggacaaaagtggactctccttgactgatcctctcccaagaaatgatggtgtaacaactaccgttggtgaagctctcatggcaccaactgtcatctatgtcaagcaggtacttgacattatcagcaagggtggtgtaaaagggctagcccatattacttggtggtggctttactgataatatcccaagagtatttcctaaaggacttggggcgaaaattgtcaccgggtcatggcaagtgctgcctgtgttcgagtggcttcaacaggtcctgcgaactgacaacatggaggttcgggatggtccttgtattgagcaaggaagcaggcggacagaatcctcgggaagaagtcaagcccggcttaccgcatcggagaggtgatccagggcgagggggttcagtacgtctgagagcctacacaagcatctcaaacttctaatggttgagaattgtttagctgatgatgggcaaagctgcccaggtttttccgtaaccccgcaatctatcttacggggacaagtatcggagtaaaagtagtttactccagtgagatttgacaaaaaacgggaataatgtttctgggttcgtgaccactcgctgcaaacagctggtgttgctatcctgaacgtcacttcacagttgatgtgaatgcctctggtgtgctgaattttcttgagaaatcacatatataaattacatcttctggccaaaaaaaaaaaaaaaaaa

SEQ ID NO: 5477 - DNA, 2973 bp, Triticum aestivum
  Clone ID: TRIAE-23APR03-CLUSTER97316_1
ccgtgaggagcggtgtgaggcttggtaggggtgacagcggggtgggtagggggagaggttggggaagagggggagggtgtggatttgacggggggatcaggcgttggtgggcacgctaaggaggagttaagagtgcgtgctgaggaatatgagccggtctgatatggtaggcgtaggtggtggggtacgggcgcgtgcgtggggggtggggtcgctgggagtccgtgggcggcggggccgcggggggcgccagcgcggccggggttcggtggcggggttcccgtgtggggggccgcgtgtggggggttggggtgggcgtttgggtccttcggggggggcgggcgggggggtgtgatcgtaggagggcggttcgggggggcggggcaggttacggtcgccgcggcgggccggggtggatggtgcagcgtgggaaactggcgggtgttgacggggggcggcggtgggtctgggggcgtgcttgagggagtgggtggcgctgacgggcggggtgttgccgtttttggggggggggggtggcaggcgccccccctgggggggggcgggttttaaaaacctttttttttttttttttcttttttttttttttttttttttttttttttttttgttttggttgtgtggtgttcactttgaaataaatagagtacaatcagaaggtgcgaatctgaataacacatgtctagtgttaatttttgaattttgtccagcatactagagtaaaagatttattcgcaaaaaaaatactagagtaaaagattccggataatctttgtacttcagatatacatatttcagcgtggtgcataaaagcaacaaagaaatatgtagtttgcaagttctagatccaatttaggatctcatgacatgagtatgccatgtagacctcggttttgtgaataaactaaactgaacacaaaacactaaagaaaatactccacactccttcaattataaagatatgatgatgttgtggtgtagtggtagtagtagtatgccctaggccttctccattttgttgattttgtggacccaactcctaacggatctgatgcaatttcactaagtgataatcagatgcaaaaaattccctacaaaaagatccaacaattggccagtttctttcacagccgttggaagtcttataccagccatagatcagagaggaagtgaaaaaacttcactgccaccaatatcggtcacgtatcatacgctgttcagtggtgaaatcccaccacaatgcatgtaatgttgtctgagctgtgccgagagtgggccatttccgtcagcttcactgccgccacctcaggctcgtccgttgctctcataagtgaaataacatcctcattttgcacgacatcccaaagaccatctgtagcgagaaccaggtattccaagtcactgctgacctgcgtttcctgaatgtcaggctctgctatcacataattcttcaatgaacggttgccaaatgcacgggacattgccagaattccatcaaccctccaagtaaaaccatcataactaacaccacctccagcattctcaattctcgttctctcatcctttaagttaggtttatggtcatctgagagtgggatagctttgccaccttttaaagcgatagcacgtgaatcaccaacatttgctacataaatttggtcaccaaccagaacagcagccaaagcagtcgaaccatcctccctataaggagtggttaccgactctaagaaatcagcatcagttttcaggaaggtcgtcttcagagcaagctttgggtttctcaggaactgaggatgctcgataaggttgtcaagcagatgttcctttagatattcagcggcaagtgctcctgcatgaccatcaaatacaccaaacaagctaactgactgtcccttcattttagcgaactttacatcgtagcgatcctccatagtaggtctcctccctttaaaacttgaatatccgcagctcagcttaccatcctcactctctaagccgccgctaatcaagttacgcagcaccgctcgtctcgtcgccaagccgcgccgcggctgcagctgtggtagggccggcgaggacgaagaggaggattcaggagtcgtcctgcccccggagcctgaggccacggcccggaatgcgcgcccgccgggcgacgcgcggggtggcgcgacggaggcggtcacccgcctccggcccgccgctgcaatgccgaccaggccacgcaggttggcggcagcggcgcgtgccatccctagcaggtccgagggggcgagtgagcccggtcttgggggttctagatgagagaaaaagggaaaagcgggtttttcgattagccgcgcggcccgcccccgccaccccttttccccccccccgccccccccccctccccgcccccccccccccccacgccaccccccactctttctcctgctcaccccgccccgctccccctcctgtcccccccctccccccacctctttttccccccctcctccccccccccccccccacccctcacccccccccgccctccccccccccttcttcccctccacgtccggcccccccaccccgcccacccctccccttcattaccactcccatccacctcttactactctcaccctacctgtccccaccacttttcctctccctccctacttcctcttttcagccacaccccctcctccacactcccacattaatccccctttcctgtaccccttctctcactccccgccctccctccctacctgtccgctcgacttccatcctgctccacctacccgtacctactatcacaaccaccaacctcactctctctccttctctcccttccacttcccgtctccaccctcacctctcttccttctccactcaccaatcacactcccgaaaactcatctacctcctcacatctcctctcgcaccatggtcccttgtccttcccttcct

SEQ ID NO: 5478 - DNA, 2357 bp, Triticum aestivum
  Clone ID: TRIAE-23APR03-CLUSTER973_1
ccccgtccgctcacctccgcgggagaagatcgaccccgacacgctctacctgcgccgccttctcgcctctccgggcctcccctccccgccggggcctcccgcggagccgccccctcgccgcccaccccgtgccccgctatacccccgccccgcgccgtcccctccgcaccccccgcgaccccgccggcggcccaggcaagcagcaccagcggggaccatggcggccgcgcacgacgcccaccccgccgtcgacaccgcggcggtcgttctccggaacggccgcaggtgctctactgacgccgtggacgggctgccgcgggcggggtacgtgggcctgtacgccgccgtccgagcgggcgctcaagctcgggcagccccccgcggctccgcgcgatccttccacgggcgcgtcgggctgctggggtcgccggtgtcggcgacgctgccgcaggatcgggtgggcgcctcttcgtcacctggggccatcctcgggcacgcttccccgaggcatcgaggacacacatccgggtgtagctcattggtaagtcatgctggtgcctatcaccgaagagctttattaggtgctccattttcaggcacaaaaggagctgttttggatctgcccagatcagtgcttcttatggattgaggtatgagctcattccttaggtaaatgatacccaaccggcgatcagctagcggaggtttggcttttgatagtacattgcggtttgtcagattcatcaaggtcatcgagagaaagtacgtgacatctagaattggcccacacaaaatggcaactattcaatttgattacttctatgcatcaatcctggtactcacttagtctacgttccaggaagcccacatatgtacacctacatgcttgggcagcgtaagaaggcgcttgcaaagtcaaagaccgcgtaaatcttatcgatatgtcttacaaaattcggtgtcacatcactgtgtttctcatttacgtcagcaaatcaaaagtctgttcttgttgggcactagattattaaactctctgtcatgtgaatgtggttgttgctgaatttgcatttggttgctagatacaatgtcaaacagtaaagacaaacatttcgtttgacgtagaccttgctgaatataagctttacctacaaaaaaaaaaaaaaaaacaaagttagcagagctggacttggaggctgcatctgcaaaaaaacgatcggatgataaacttcttgatgttaagctgtgtcaagcagccgcctggcggtcagaggggtgcctactacgccatccatcacatgcgggcgatcgtacgggaccatcatcaacttctgctaccgagtaaactcaaagattgggccgcgagcgtgtcggcaatccaggacgcggacctccgacaagaattctttcgcatccagtcggagtttgcggaaatcatccatcaagatgtccttcgtacctcggggcagttctacctcagaaatcaaccgtccaacagtgacatcgacacaatgctacaaatgcaggctgacaacgaccgttatttcatgactcccacgatagacggcggcttcatccacgctccggtcccttgagtcgagtcgaaagcagtgatgctgtgtctagttctgaaacatcgattggctcatgttgtaattaaactttaatgaacttgtagtatgtctctttggtttcgagagtcgttcaacttagatgtaatcgatgctattaatgtcttgcttttctcttccgatcgttctgttgcatacttatatattgcttatgtattgtctgtgaattggtactaacgtttcgtttggctactgcatagcgatgccgtcgtatgtcgtgtacaagggtaaggttcccggagtctacgatgactgggaggagtgtcggagacaggttcaccgattcagcggtaacagttacaaagggtacaccactagggccgaggccgaatctagatacgcccgctatctagcgggagaggggagggagcgttggaggaaccggatgaagacgagtttcatcgtgatgatgctcatcgtgatgaccgcagctctcttctatgtgatggtagtttagatgatcgatatcgacttgtaatgtgaagacaaactcgctactcgcggtctcgagacttgtaatataatgttctatctttgttcggtcttttcaattcggagactaatatgatgaattgtattcggagactaatatgatgaattgtattcaaagactaatcttctattgtatttgatgaatctattgttgatgtgtgctgtctatattttgtcaaattatacattttgtaacctgtgcaaaaaaaaacggcattaacaaaaacaaatgaa

SEQ ID NO: 5479 - DNA, 2325 bp, Triticum aestivum
  Clone ID: TRIAE-23APR03-CLUSTER97516_1
cctttttggggcctgcgggacccggcccccccccccgggcgccacccggtccggtagcttttttttttttttttttgaaatatgtagcctacatgagtatatcatatcacgatatcgccaacaacattaatattcgattttccaaggggggcaccgcccattatactcctaacacatcacacagaagtcaccatacattagcacaataacacaacatgtaatcccaaatctgaagtgcacctgctgctcttattttgaatgcgcctccgactttgtcggcatggtacgaacgttcttgagaaggtcctgaattttggacagcatcaacgcctgagagggagcctgagaggaatcagcaggcacgctgctgctcgcctgcgggggcctatggccgtcctgaagctttattttctcaaaaagaaactgcttctctgcctccgcttcctccaggcgccgcttgaggtagaggctagcgtagtcctgctcagccctctcagatttggcaagcgcgatgctctggagcctctcagcctcctggcgagcctcacttgccttgagctggaacatctcagcctcggcctgtttcaaccgaacaatgctctcgagctcctccacctgctgcttcttccgcagcctctcggccttgaactcctgaacttgtctggccttctcatcaagctcacggtcacaggcctccacagcggtgcgagcctttttgtacagtcccattttctcttcagcaacaagctccatctttctgacagcttcttggactacctctgcaatacgattacatgcctcctggggagtgatcaagcgtcccgattcttcattttcagagctcttaggggaatccatctcaagctctcgaagtgcatgcagtatcatcctaggattgacagaatcaggagaactattcctcaatctttcaatcagattcgcacatttcctgaacaaatttcttccttttgggtcttcgcttagacgaaatatcttacaaacaaactcaagctctcgtactaaggcatccctatcccaaccaggagcacattgttgaaacacatccttaacccaaccgaataattctgatgtcttctggcaagcctggcacctaaaaagcatttcggcatgaccggtgccgctcttaattgattgccctgtcccaatctggccaacacgaatcgcacagtcggtgtgcgtccaatgggaacagaaatcgcacccaacccatcggcatgtgttgacctcaaaatcaaacttgttgcaaatcacgcacatgcaaaggttgcaaaacccatttctgttagcacatacattgcatctgcattcctcagccgggagagcactctggcaagcaatgttccggcacctcttatacaagaagacctccaccaggtggctttggggaatggtgacgctggggtgcaaaaacgcctggattccagtcttgattgccacgaggatctccagttggacatgatgggccattgaaagcatagttggtgtcaaatcacctctgccctggacaaacttctgcagatacagaaactcctcaatatgatgagagccccctgtcccctccagaatcgacctgagctcatttttaatctcctccaggtgctcctctggcattaccttcattttctcaacaactaggtccactctctcccgcgcaatctccctcagtgacaccctatcgatgcgggagcttccacgaataacctgcaacttggggataccatttctgatatccttttccatctccacctttttcacagcaccgccactactagcagcagcagcattgctatgttccggctctacaggccaggtctccctcgaacttgcactttcggtggcagagtcatggccctggtcagaattggacacaggttcctgcatttcaggcgagccaacctgttccgacgaggccaatgagagggaagtctgcaggctaggggcccgggcaccatggcgaggcggcagcatcccctggggcggaggctgttgatggaaattcgcacctgaagaagtccccatgacgcacaaactgtaagctcggcgcggcggggcgacgggatcggcggcgcgacagctctatctaatcggaacccggaacggcggcgggttcgcacccttcttcgtcgcctctaataatttttggttttgtgtgcgacaaatggagtccaacccaacgaaaccaaacgaaacggagacgacgagtcgagcgaacgcacgaagggaagcgagaccggacgtcgccggtgtggggaacggagggagaccggcttgaccggtgggcgacgcggggttggagctcgtgcc

SEQ ID NO: 5480 - DNA, 1009 bp, Triticum aestivum
  Clone ID: TRIAE-23APR03-CLUSTER9756_1
ttttttcgtccccgcgagctctcgacacaagtctcgaccgcagccgccgtcagagcgcagcacacgctcgcgagcccaccgaagcccaggcgcgcggagacccagacccagcgaggcctcgccgcagatggcagtccccggcggccgcaacggcctcgtcgaggacgacgacgtcgccgaccaggccggcgccttcgtcgccccctccgacgacgaggaggcgccgctgcccccccacctccaggctctctccgacgccgcccagaacggcgacgtcaacgccctccgcaccgcgctcgataactatggtggcagcattgatgatccagttgaagatggtgatactgtgcttcacctggcatgcttatatggacatctaccttgcgtgcagctactgctggaacgtggagcaaacttagagtgcaaagatgaagaaggggcaattcctctccatgatgcttgtgctggaggcttcactgagatagttcagtacattctcagttttgctgcaaatgctgagggttgtgcaacgcgaatgctcaacaccgttgatgctgaaggcgatactccactccaccatgctgccagaggggaacacatggacaccgtcaagcttctgctcgaagctggcgcatgtcccaagaaggagaatgcctacgggcaggcagccgccgagatggccgatcaagataccgaagtccgggccctgttaaccgccaagcaagtcgaggccagcatacatatggcggactgatgatggacctgtcggaggaaccattggttgatatcagtcatgatgagtgggcagtaaaatgagtggtagtattagactattagtatcatcatacacagcttgcctagtatgagaattgcatttctgttgtcaccagaactatggagttatctgcagagaggaggacatggtgtttctccatttgccctttgtatctgtatttttcgagttatatcaaaggcacaatcagttgaacccctaaaaaaaaaaaaaaaa

SEQ ID NO: 5481 - DNA, 1613 bp, Triticum aestivum
  Clone ID: TRIAE-23APR03-CLUSTER9764_1
agatgcccctggttcagatcgtgcccactcgagatatcccggacagatatggatggccaacaagccaaacgccacctaaaggtatccggtaccggatatccaggacagataggatgcctcggagatgcccttgctccccgatcccaagtcgtcaagttcgctgcacctcccgtccccgtggtgccctcgccgtgacctcaccggcggccgctatgacctcgccggcttccacctcttcctggttctccggaatcgtgcgcacagcatccggcaatcccccttcttcagccatgcctcccgccggcggcgtcacctccgcccccgtctcccttcccgacacccctgctgccgtgagcggcaagggtggcgtcgttgcccctgtagccaccacaggcgtaggtgctcgcaggaagcagctccagggcacgctgttcaagtacgggcccaagtccgctcaggttgcgtttaggactggtgattttacccgtcaggtgattttcattggtggtttggcagatgggctcttagcaactgattacttggaaccattgtcacttgcgttggaggttgagaaatggtcactggttcaaccattactttcttcatcatatactggatacggaatttccaccttggagcaagatgcattggaacttgatcagctcatcggttacttgataaataaagataattctgaaggagtaatactgctcggtcacagcactggttgccaggatattatacattacatgcggacaaactttgcatgttccaaagcagtttctggggtaattttgcaggccccagtaagtgacagggagtatagggcaactcttccagaaacaggagaaatgatagatctagcagcgaaaatgattagtgcgggccgtggaatggatttgatgcccagagaagcaaattcagatgctccaattactgcctacaggttccactccctttgtgcatatatgggtgatgatgatatgttcagttctgatcttagtgaagatcagctgaagcagagacttggtcatatgtcaaccacacagtgcctggttgttttttcaatggcggatgagtatgtccctgaatacgtcgataagaaggcacttgtagacagactctctcgtgcacttggagattcagagaaagttgaaataaaatggggaaaccatgctctttccaacagggtgcaagaggctgtcgaggttattgtagattttgttaagagggagggacccaaaggatgggacgatccatggagctagatacaatagtcatatgatgcaatctttacccccctttacctgttagaatctttcgtttttgtagttttcttagtcaattttctatgtactaatgttctgatctatttaattttattgtgtaaacccttgtctagtacttgattctcgatctcgtgttcatctgtggacattcagatatgctgtttgaaaattgtaagttgtaatgctactatctctggaatgttcctctttgtctattcagagtgtttttttaaggctatacaaaaaaaaaaaaaaaaaaccaaaaaaaaaaaaaaaaatttttttttttccgccccccccccgaggggggcgcccgggaaccca

SEQ ID NO: 5482 - DNA, 1698 bp, Triticum aestivum
  Clone ID: TRIAE-23APR03-CLUSTER97673_1
tttttttttttttttttggacgacgggatcagacggatggaaacaggagaccggacgttgcatggccgaccggttcaaatttgcgccggcacgccggcgtctatgagtacaaagctccaaacaaacatcgacctcaattatgagtttcatactaagcctgcacgactagccggcatcaaccacatagcaacgattatatttactcaccattattggcatgggtctcactgacctcctgaaccatccgcgccaagttttcaaacgaggacccacctatgtccatggtctttctagaagacatggagagctcaccagctctagcagcggcgcgtttcccttcctctcccaagatcagttcccttgccaacgcctgcacgtctccacccataaccaacccactacctcccttgctggcgtcttccttcggccgaactcggagccccacatggatcacgtccacgacgaatttggcattgagcttctgctcggccgccattgggaacgccagtattggcacgcccatggtgatgctctccagcaccgagttccatccgcagtgggtgaaaaatcctttcactgatttgtgacccagaactccgagctggttaatgaaaccttccaccaccttgcccctgtctccgaacctctgattaaaccggtcatctggattgagccatttggaccggaccacccataggaagtccacaccggagctgtccaacccgacggcgatctcttccagctgtgcccggctcagctcggcctgcgagccgaacgcgacgtagagaaccggccgacccatggcaagcctcgagtccagccactctgagatctcatggtcgtccttggtcgggactgccggttcggaggccgcaagacagagcggtccgatgggccacatcttgacgtcgaactcccggttccacaggtcgatgtagatcgactccagctcgtggaaggaattgacgatgatgccccggctggagtacatgctgatgcggttcttgcaaattaagtcccagtgcgggccggaaggctccgggtcgtcgaacggcgggttgaggtcggccttcgtgaggcggaggtccggcacaccgtggaccgggaaccgctcggacggcgagctcacgcgtgcgtgcggcctgtgtgccgtgactgcccggttgacgtacgtggcgaagccgccgaagccgagggtgacaagccgcggcatgccgagctcgtcggcgatgtccttggcccaccggaggaagccgtcatggacgagcaggtccggcctgggctcgatcttggcgagtgcgtccgcgaacgccggctggagcgccgccaccgcggtgacgaagtcgacgagactggtcgacgatgggagctcgtccgtgctctgcggggcgtcctgctcggaggggaacggaagctcgacgaccgcggcgccggcgccggcaccagcgaggccagcgcggatgaagggcgcgttgcgcggggtggtgaagaaggtgacggccgaggcgaggcggcggccaagaaggagatgcgcgaggtggaggagcggcatggcgtggcctttcgccatgaaggggagcatggccacgtgacggagcggcggtgaagcagccatggatagtgaagctattggtgaggctagctgtgtggccgcgcgtctgtctcttgtatgggtagtgcagctgttggcgaaaagct

SEQ ID NO: 5483 - DNA, 923 bp, Triticum aestivum
  Clone ID: TRIAE-23APR03-CLUSTER97809_1
ttttttttttttttttgatccatccaatttgcatcatgcatcaatatcaaactttgtgagccaggcctctgaacaagctcagtacaagcgtagcaaggctagcagaatcaggactcggttttctggacgatacatactctggttcagattaccgcttactgtcggaagatgatggttaagactaaaatctatgacatggcaaatccctggcgactaccaaaaaatcactgaccaaggctggcccaagattgcaggcctagcagctccctctcagtatgtcatggcagcaagcctgcgaggcggagtcctagaccgtcgctgtgctggccgtgcacttgtgacgttctgtataggacctctgttgaatgcccaatcaacatggatggtctttgttaacagctgtgtcccattcatacttctgattgcagtttgtgcttcctcaaaacatccatattcaaccaatgcatatcccttgccatatccagtgcggcgttccaggttgagatgcaagtccttgacctcaccaaactcagcaaaagcatcatacagatcactttcttctgcatcttctttgactcctgagacaattattatccatccttcaattgagcgctgcgggccgccgtgcgcggaggtgccggcgaaggggagggagtcgaagcggtcgcgggtggaggcgatgacggagcggctgcggccgacgaagcggcccctgctggtgcgcggcacggcgggggcggcgatgtggggcacggggagcgcgcgggccgagacctccccgtcctccatccccccgtcctcctcgtcgccgtcgtcccgctcgtagtccacgaactccacgtcctccgccgccatcgccgccgccgaaacaaccggatggtaaagcgagagagggcacagagagagaaagtggagcgtgcgtg

SEQ ID NO: 5484 - DNA, 1229 bp, Triticum aestivum
  unsure (1)..(1229): unsure at all n locations
  Clone ID: TRIAE-23APR03-CLUSTER9784_1
aacagacggccggccggaacatgcccgctcgtcgggactcgggagtaccgaccaatgctcgccgaatgccacttgaaatccgggataggctccagccagaaagcccagccccccgaccgacacctaacaacctaaccacatggccgtataatactccactgcagaagcgaggtgctcgtgaagtcggcttgatatccggagtagccagcaagcccagcccaggggccgatccgtgatccgtgttggagagagcgagggagagaagatgcgggccgcggctggtgctcttcggcgactcaaccaggcgcagcagttctttgcccgcggcggggggggcgccgccgctggcggcagcgcttcggcggcggcaagggtgtttgtcgggctcagcgggctcagcgggcacaacaaggtgcagggcgctgaaggtggtggcgcacggggcgtacgagggcggcggccgcccgacggcggtgaccctgcggcactgacggtcctccgccgcccctaccccacgacccgcacccgcaacacgcgcgtgcgcctcggggagttccaggactagcggcactcgatctgtgcctccgccaggaataagtggccatccgctgccaacatactcatcacccctccaccgatccacgagccggcgaggattccgaggacatatatggagataatgacccttcaagacagcctgaaagaacaaatgaagctgctggcacttatgcacaagcatgcataactgttgctaaagaattgggtcatccagttatagacatctggacacagatgcagcaatgtcctgattggcaaacatctgcattaagtgacgggctacatttcaccccgtccgggaacaaaattttgttcgacgaggtgctgaagacactggaaagtgttggtttcagccagcacagtctccggtccgatctccctctcttccatgaaattgaccccaaggacccactgaaagcctttgagatttgaagaaggtatctgccgcatggttggattcccagaaggaaggcactatgactcagctttatgttctgaaaacaaactatgttggtttggtgactgatgtgttctgtaacatggatatattgtgcctatgttctatgtcaaaaaaaaaaaaaaaatcanggnaaaaaaaaaaaaaagtggganctccccgggggggggnccggccccnaattcncccctaaaaaagnngncggcattncnng

SEQ ID NO: 5485 - DNA, 1720 bp, Triticum aestivum
  Clone ID: TRIAE-23APR03-CLUSTER98395_1
ccaacacccgggcccagaagccaaaaacccaagcagagcaaactgcacacacaagcgcttccacacagaagcagccgggccatggcactgctcctccttgccacggcggcgtcggcggcggtcgccggagcctcctggagcccggcggccagaggccgacctcgtcaccgggctccccgggcaaccagaggtcgggttcaagcactacgccggctacgtcgacgtcggaacgggcggcgacaaggcgctcttctactggttcttcgaggccgagaaggagccggagaagaagcccctcacgctgtggctcaacggagggccggggtgctcgtccatcgcctacggcgccgcccaggagctgggcccgttcctggtcaggggctacggcgcgaacctcacccgcaacgcctacgcgtggaacaaagccgtgaacctgctgttcctggaggcgccggtgggcgtggggttctcctacaccaacaagacggcggacctgggccgcctcggcgaccgcgtgacggcgcaggactcgcacaccttcctcctcaactggctcgccaagttcccggagttcaagggccgcgacttctacatcgccggagagagctatgccgggcactacgtcccacagctcgcagatctcatctacgaggggaacaaagcggcgggcagaggcagaatcatcaacctcaaaggtttcataattggcaacgcggtgctgaacgacgagacggaccagctgggcatggtggagtacgcgtggagccacgccatcatctccgacgagctccactcggcggtgacgcgggagtgcgactacttcagggaggaggccgacggcggcaagcccggcaagggctgctcgtcggccgtccgcgccttcatgggcgccttcgacgacatcgacatctacagcatctacacgccgacgtgcctctctccctccgccggccccggctccacggcgccgcgcccgtccaggctcgtcgccgcgccgcgcctcttctcccagcacgaggcatggcacatgatgaggcgtgcgccggcggggtacgacccgtgcacggaggcgtacgtgaccaggtatttcaaccgccaggacgtgcagcgggcgctgcacgccaaccgtgacgggcctcaagtacccatactcgccttgcagcgcggtgataagcaagtggaacgactcgccggcgaccgtactccccgtcctgaagaagctcatggccgccgggctgcgcgtctgggtctacagcggcgacacggacgggagggtgccggtgacgtcgacgcggtacagcgtcaacgcgatgaagctgcgggcgcgggcgaggagcgggtggcgggcgtggttctacaggcagcaggtagccgggtgggcggtggagtacgaggaggggctgacgctggtgacggtgcgcggggcggggcaccaggtgccgctcttcgcgcccgaccgctcgctcgccatgctctaccacttcctccggggccagcccctgccggccgccgctccacgctagcggaagtgtgtctggtccattcttctgctcagcaaagctacgagcaagtgcttcatcattgggtggtagcgttgtactatgcctgtaactgatgtgacgatatcaatgtgggattttcatgggaaccaaaaaaaaaaaaaaaagttcaatggaactgtcgagcattgccgtatatcagtttatactaccagccaaaa

SEQ ID NO: 5486 - DNA, 1610 bp, Triticum aestivum
  Clone ID: TRIAE-23APR03-CLUSTER983_1
ccgcatcctcccccacactttttcccttccattcctccctccccgccgccccaataaataataaaaacccaaccccaagccccaatccctagtcctcgttccgattcctcggccaattcacggggcccttgtgccgggggcgcgttccgggggggggatcggcggcgggctgaaatggttggcggggcgggcggcggccccggcccgcgccgatgccgtgccggcggcggcggcggcggcggccgaggcggccgctgaggcggccgcggcgggggccgcggcggcggcggcggcggaggaggacggggaggaggagaacagggacgacaggaggcaggtggagaagctgaagaagctgatcaactccccggaggagtccgtggagctgttcggccgcctcgggggcggcgcgggccgccgcgcgcccggcgcgtcggccgtcgtctcccccgccgtctaccactaggtcgaccaccacccgccccaccaccagcagcagcatcagctgctgcaggtggtgcgggggggcggtggcgggggcggagccggtagcgactccagctccgccaacggccagccgaatcgacggagaaggaatggcttcaaccaggggagacgtaggatgggagttcggccacggcgaactgatagggaggatagtgtacggcgaactgtctatgtctcagacattgatcaacatgtcactgaacagaaacttgctgaggttttctcaaactgtggtcaagtggtagattgccgtatctgtggtgatccaaactcagtgatgcgttttgcttttatcgagttcgccgatgatgtcggtgcaagagcagctctaacgcttggtggaaccattcttggtttttatcctgtcagagttttgccatctaagactgcaattttgcccgtgaaccccaaatttcttcctctaacagaggaagagaaagaaatcgtatagaggacgatatagaattggtatacaggacaaaaatgttcccgaggatgttgtgaagaatttctttgagggaatttgtggggaggttgctcgactgaggctgctcggtgattatgtgcatgccacatgcattgcctttgttgagtttgttcaggcagaaggagcaattttggccctgaactgcagtggcatgcttcttggctcgcttcctgtcagggtgagcccatccaagaccccagtgcgtccccgttcgcctcgtgcgatgtcgcactgaatctgtctctcgtctgaagccggcgtccagggcagcaattccgggcaacaaacccctagtcgtggccttagagactgttgcgtcgcggatcagtaactgtcgttgaagagagtgagtgttaccgttttggtttatcagggttagaggaagccctttccttgttgatgcaggagagagacccatctgtatgttcttcagctgggagctctatttttacttcttctttttttgctatatctttattaacccgttttttattttgggatggatcttgtagctcccttcgacaggcatgggaaccataatgtatatgccttgttcagtttctggaacaataatgtctatggcttgtcctaaaaaaaaaaaaaaaaaactcgagac

SEQ ID NO: 5487 - DNA, 2266 bp, Triticum aestivum
  Clone ID: TRIAE-23APR03-CLUSTER986_1
accgcaccaccctccccgtcccgttccgttcgtttcggtccgtataaccgcgccccccgcatctcctccgcccccgcccccgcaccgcgtctcgcccataactactcctccgcatcgccctcccctctccgccccgttcccctcccctctctctcctcgagccgcatcccacctgcctgcctgcccggggggccccgcagcggccgccaatcccgccccatccaatctccctgcccgacccctccgccgccccgatctcgtcgccgtccgaggggcagcgctccgggtgccgcagcgcctgccctcgccggcgttcgtctccgtcgcccggttccgcccgcccgcccgctgcggccgtgtcggcgacctgcgacggcggcgggggcgagccgcggcaacagtggcgtcggcgatggccacggcctgagattgaggatgcgcacagagggtttggactcttgtgtatagggctccctcgctgttgaaatattgttgtagattctgacgggaatgttggagggtcaatccttgcctgagtctcgaggtcactgcccagctcctgcgaacaggaatccagattagcttatatgacttaccacctccttgagatcacgaggactaagcgcccatctggggtcctggctattgagcatgatggaattgctgtggcggcagtgctggcaaagcggcctaagtctgaggatagccatgatgctgtgccggtagactgtcaaggtggtaatcagggctattctgattcaagcacactgataagttctattggcagagataattcaatcaattgtctagcccgctgctctcggtctgattatggctccattgcatcactgagccggaacttccgttcccttgtccgtgatggtggtctgtacagagaaaggcggaggttagggattgcagaacactgggtgtatttctcctgcaatgtgcaggagtgggaggcatatgacccataccgtgaacggtggatgacgctcccaaggatgccacctaatgagtgtttcatgtgctcagacaaggagtcactagctgtgggcactgaacttctggtgtttggcaaggagattctatcacatattggtcttagctatagcattctgaccaactcatggtcaagaggcgttgaaatgaatgcccctagatgtttgtttggttcggctagttttggagagaaggcaattatagctggtggcatggattcttttgggagtgtgcttagttctgctgagctgtacaactctgaaactaaaagttgggttacacttccgagcatgaacaagcgtaggagaatgtgttctggagtcttcatggatggcaagttttatgttattggtggaatggccagtaacacggaggtgctgacatgcggagaagagtatgatttagagaagggtacctggaggttgatagagaacatgtcagagggtctcaatggtgccagtggtgctcctccccttgttgctgtagttgacaatgagctatatgcggctcaatatgcaggaaaactagtaaggaagtataataaaagtgataacacatggacaactcttggggagttaccagagcgcccagaagctgtgaatggctggggcattgcattccgaggatgcggagagcggctcctggtgattggtggaccaagagtgctgggcggcgggatgattgaactccattcgtggatcccaagggagggccccttgcaatggaacatgatcggaagcaaaccttctggcaactttgtttataactgtgctgtcatggggtgctgatttctgtgccaccacccacccgtcgaacatacttgtcaacaagaaagatttgtgatattggtttcgcaaatgcgcataaaagcactgattctgcctgattggtaatctctgccttctttttttccttctcctctggacatttcagattttactccatgttccatagattagtcagtcacatccttccttgtattcgttaacagttacactgttgggtctctgttttccgtgcatttggtttccagttgggaatttgtacctggtctggtccgtatactctgtcgaactgagaatttcctgagatggatgcatctaggtgacaaactgtaattgatgtagccttgcatctggacaaaattgtactccattggactctgaattgtcccagcttcatagtgctcctgtgcaaaatgcctgttaacaaaaaaaaaacaaaataaaaaaaaaaaaaaaaaaaaaaaaaaaaaaaaaaaaca

SEQ ID NO: 5488 - DNA, 1861 bp, Triticum aestivum
  Clone ID: TRIAE-23APR03-CLUSTER98906_1
gggtgcaggatcgccgaggcctttcctgacacccatcgaaatcgtcggcccttctctcttctcccgaccgaccgctgcctggaccggtgagccatggcgggcgagggggaggaggacgaggcggcggagatcgagctgcagctggaacagcacctggaggagcagcggtcctccctcgccgccgtcgacgaggccctcgccgccgacgcctccaacgcggacctcctcgaggtgcacggggaacttctgtctgcgattaaggatgcagaggaagggcttctgcatttgaagcgttctaggctagtgaagcaaatcgatgagatctttccaaatcaggagtcagcatcgctatcaactgaagctgctattgagccattagatccacatgatgttgagccacaaccattggagccacaggaattttcagtcggatcaaagtgtagattcaggcacaatgatgggcgttggtataatggatgcattctgggacttgaaggttcaggcaatgcacgggtctcatttctgacacccacatcagaaaaaatgtcgatgtgcaagttctttctgcagcaacggtgtcggtttgctaataactgccgcttgtcccatggtgttgtgattcctacttcatccttgaaacggttcactccaactgcatggcgacagtccttggcaggatccagcatactggcagcttctgggcaccattctggcctttggaggagagctgaacttgagtcgtgggatgatgagttgaagcgtggtcaggtggtctttcaagatgatgggagcactgcaacgcttccgggtgattccctttctatcccagaatatgctgatgtgagcggggaagatgatgaaagaggctcaagtgaggatgaatctgagttaagtgaagatggcgatcaagaggatgaatccatccatcagggtcttggccgtttggaaaccacaaatttaactggtgttcagtctgagaccgtgatctttgcaaaatgggaacagcacaccaggggcgtcgcctccaaaatgatggcaaaaatgggttaccgggagggcatggggctaggcgtgtccggccaaggcatgctcgatccaatcccagtcaaggtactaccggccaagcaatcactcgaccacgcggtcgctgcaaccacaggcgaggacggccgaagcatacaccgtgagaaagacaagaagcgcagccggggcgggcaaaggaagcgcgaccggaagtttgcggagctgaccagggccgccaaggccgaggaggcggagaggtccgtctttagcttcatgaacagccagctggtgagccaggacacgtcagaaggctcctcggccgccaaggccaggaaagagtcgccatcgggtcaggccaatgggcatcccaagaaagaagacaacagaaggtctctgctcgcgtacgacgacgaggtgaaggagctgcggagccaggtcgggcggctggaggagatggtgcagcgcaaccgcaaggacaaggcggtgcatgatgcggcgtcgaggaagctggagcagacgcggaaggcgctcgccgacgccgaggcgacgcacgcctcggccaccaacgcggtcgccaggaaggagaaggagaagaagtggttgaaattctgatatgcgacgtctgtgtgtgcacagcccgtgggtgtttaattggagctctgttgtagtggttggctggatgtgatatccagtttagaggggttttcgtatggccctagaggtagaaccattcctgttatagttatctgaacaaagaaacatctcgcacaattggtcaggtctggtcatatgcatatctgatggttggatgctttgcttggtaaaaaaaaaaaaaaaa

SEQ ID NO: 5489 - DNA, 1879 bp, Triticum aestivum
  unsure (1)..(1879): unsure at all n locations
  Clone ID: TRIAE-23APR03-CLUSTER98_1012
gcagtctctagtctagttcctgctgctactaccactaccaccacaccaccaccacaccacacttgctcgtctccctctgcccctccccttcctcctatagcaatcaaaccaccagctccactcccccctccccttcctccgtcctcaccctccccctcctgctactccccagttcatgtcctgctgcttcccatgtcgccgcctctcgagctcgactacataggcctctcggccgccgccggcggccgcccggacgacgacctgaaaggcaccgagctccgcctcggacttcccggctgcgagtcgcccgaccgccgcccggtcgccgccaccaccacactggagctgctgcccgccaagggggccaagcgagggttttcggacgaggtcgtgccgcctgcgccgatttccgccgccgggaaaggcaaggaggcgtccggggatgagaaggacaagaaggtcgccgccccgccgcagcctgctgccaaggctcaggtggtgggatggccaccagtccgcagctaccgcaagaacacgatggcaaccaccaccaaccagctgaagagcagcaaggaggattctgacacgaagcaggggcaagagtttctgtatgtcaaggtcagcatggatggtgcgccttacctgaggaaggttgacctcaagacatacaagaactataaggacatggttgtggcgctagggaaaatgttcattggcttcaggaccgggaaggatggtgcatctgagaacagaaaggatggtgaatatgtgatgacttacgaagacaaggatggagactggatgctggttggtgacgtcccatgggagatgttcaccgaggcttgccggaggatcagggtcatgaaaagttcagatgtagttgggcttggagttacaagggcaggggttaagtccaagaataagaactaaaacggtcgctgcccacggtttgaagacgaggtcgcacatgccgtctgtactactgcatggttttcctatcccacaagtaaaatcacccgttactctaccgtttaagatttgcgacatctcctagagacttatgctctatattttgttgtgcccacgttgttgtacgcgtgttatttccatccgtgtaaatggttggtaagcagtgcgagagctactgctgtgtttgatgactcctatgtattttgccactcttgtcctgaaccggtcgttcgtcgtaaatgtgaaggttgcaagcctatcaaaaaaaaaaaaaaaaaagcttatcgaaaccgtgtaaccttaagggggggtcccgttgtaccgctctccaccgtatagtggagtcgtattcgcgcgcgcctcacttggctcgccgtttttcaataaccgttccgagcaacggttacaataccactggcagaataaccaaaccgtaatacgccgctcgcgatcgaattttctcccatttatgatccctgcttgggcgccacatgattgtagaacatgcttcaccgcatccgattcggcggtctcttcactatccaattactggcaaccacccccccgaaactggagcgcataatcgatcaaatttgccaccggctccttactccgagctctgtgcatcacaggatgccacgcgccctaacctgttcttcagtcaacacacctatttgctttacttgtgctgtacatcaaatattattctctcgaaatagctgaccacattgccgtatcgtaccctntttacacataatattcacatccccatacataggcgtttacacaagtctttctataccacctttgctacatcgtcgaaacccccaccgctgttaggcgctcctctctcccttctacactctttcctgatgagtggaatagcgctttcatctgacgtgactctagg

SEQ ID NO: 5490 - DNA, 1051 bp, Triticum aestivum
  unsure (1)..(1051): unsure at all n locations
  Clone ID: TRIAE-23APR03-CLUSTER98_1020
cgatggagcggtagatcgtgtggagagagcgacaagatgaggagtatagaccttcttctggtttatgtgtacgccggtgctggcgcataaggaggggtattatgtcaccgaacggcgaatatagaggacgaggtaancacggccgaggtgtgttctacccaagattcttgcgtgttattcgataataatcctctcccgcgccagttgaacatcgcgcgccttaatattcgtggacttcggacgtttgatgggcgccgagttgtggtagttggcgtcggggttcccccctcatttcgggagcggttcggggacagattgattatgataagaagacctcgttgggcgtgtcttgcacgtgtagtgttggtaacgcagttacatgttgttagtattgagataagatgtgctggttagggaggggaaaaaagattatacacgagcccgcagatatcacgcatattactctccaggggtgtggtcgtgggagcagtgtacatcttgcctttaagcccgttgcgattgccctttcacggatgtgcggtgtgttctgattgtattcattcgaacagtacgtttagagaccaagtttggcggtagggagctataaaggcttgggagtgcaggggtaatcgtgcccggtgctggccggatgggcctgccgtcggtttgtcggttctgtattgcgcacacaaatgccttcaatccaccatatataataggcgccccacatagctaagctggctagcacaaagtgctcttccttccagttgccggggttcaagggctcctgccacatgttcaccttggtcgatccgtggtgatctgcggcgccggccatacggcggctggagatgaggcgggcgaggggggaggaggaggcggaggaggaggaggccgccgcaagcagacgagacgccatcgcttcgattcgacctagttgggcgatgtgtctggagagctggtggtggtagcgcaggccctctgcctgaagcctaaatgccggtggtggtggatacggcccgctccccgctcaaagcgttctttttcaaca

SEQ ID NO: 5491 - DNA, 1619 bp, Triticum aestivum
  Clone ID: TRIAE-23APR03-CLUSTER98_1036
gaaaaccccctcgccccctcctccctattactctcccacctgctctccccgccgctccagaatcgccgccaccttgctgcgctcaccaacggcacgcgcatcccccctcagatccctccctcacgcattccgccttctcccgaggctcgtagctgctagcacggacgatggccccttgtgcaaccgccggcgcgcagatgctggccgcacgcccctgcgtctcggcctctcagagcatgctcacctcgaggccggccgtctcacggatcgacctgacgctcgtcgctggtagcttcgcgaactgtcccagaatctcctgctccaggtctcttggttcttcccggagcggcgctgtcgccgtaagagcggtgtcaggagaaggtagctcttctgggctgcccatcgatcttagagggaaaagggcatttattgctggggttgctgatgataacggctatggctgggcaattgcaaaggctcttgccgcagctggtgctgaaattcttgttggtacatgggtgcctgcacttaacatatttgagacaagcctgaggcgtggaaaatttgacgaatcacggaagctgcctgatggatctcttatggagattgttaaagtctatccactggatgctgtctatgattccccggaggatgttcctgaagatgtcaaaacaaacaaaaggtacgcaggatcgtcaaattggactgtgaaggaagctgccgaattagttaagaaggaatatggcagcattgacattcttgtgcattctcttgctaatggtcctgaggttacaaaacctttgctggaaacctcaagaagtgggtatcttgctgcaatttcagcatccagttactcctttgtttctttacttaagcacttccttcctattatgaatccaggtggtgctagcatctcgctaacatatattgcatctgaaaggacaattcctggatatggtggtggcatgagttcagctaaagcagctcttgagagtgatacaaaagtacttgcttttgaagctggacgcaaaggcaaaatccgagttaacaccatatctgcaggtcctctgggcagcagagctgccaaggcaattggattcattgagaagatgatcgagtactcttatgtcaatgcaccattgcagaaggagcttctggcagatgaagtcgggaacacggcagcattcctggtgtctcctttggcttctgccatcactggctcgactgtttacgtcgacaacggacttaacaccatgggtcttgcggttgacagccccacagtatcttcattgttgtgattccggtaggcggacctatttttcctgattcaccgcggcttgattgttgaataaggagcttagttagttagtactgtaagaagctcttgctaagagctgagggcaggagaaaaaagagaagggggtggctgttgaaaatgactttttaagcagtccagtacctcctctttggcccatttctaatattatctcaaatgttgttgttgctgatactgtgttcagtgtggctggttggtgctgcgacaaactgtgttatatatatacatcagaaattgtgttcaagaaataaagcaggtatggttggatggttgggatcgtact

SEQ ID NO: 5492 - DNA, 2393 bp, Triticum aestivum
  Clone ID: TRIAE-23APR03-CLUSTER98_1037
attaaaactcaaacccacttccgcagacgggatcgagacaaggccgagaggaggaggaggaaggctccgggaagctcgagaagaggcgcgtcgtcgtggcgatggatcggctccgcggctccgcgctgctgctcggcgtcctgctcgcaggatcactgtttgcactttgtgctgcgaaggaggaggccaagaagcttggtaccgtgatcggtattgatctgggtaccacatactcatgtgttggcgtgtacaagaacggtcatgttgagatcatcgccaatgaccagggtaaccgtatcacgccctcatgggttgggttcaccgatggggagaggctcatcggtgaggctgccaagaaccaggcggctgtcaaccctgagaggaccgtctttgacgtcaagcgtctcattgggagaaagtttgaggacaaggaggtccagagggacatgaaacttgtcccctacaagattgtgaacaaggaggggaagccttacatccaggtcaagatcaaggatggagagaccaaggtcttcagccctgaggagatcagtgctatgattcttggaaagatgaaggagaccgctgaggcataccttggcaagaagatcaatgacgccgtcgtcactgttcctgcgtacttcaatgatgcacagagacaggcgaccaaggatgctggtgtgattgctggcctcaatgtggctaggatcatcaatgagcccactgctgctgctatcgcctatggtttggacaagaggggtggcgagaagaacatcctggtgtttgacctgggtggtggtacttttgatgtcagtatcttgaccattgacaatggtgtctttgaggtgctggccaccaacggtgacacccatcttggaggtgaggactttgaccacagaatcatggattacttcatcaagttgatcaagaagaagcatggcaaggacatcagcaaggacaaccgtgctcttggaaagctgaggagggaagctgagcgtgccaagagagccctcagcaaccagcaccaggtccgcgttgagatcgagtccctctttgacgggactgatttctcggagccactgacccgtgcgaggttcgaggagctgaacaacgatttgttccgcaagaccatgggacccgtgaagaaggccatggatgatgctggcctcgagaagacccagatccacgagattgttcttgttggaggcagcaccaggattcccaaggtccagcagctcctcagggactactttgacggcaaggagccaaacaagggtgtgaaccctgatgaggctgttgccttcggagctgcagtgcagggaagcatcttgagcggcgagggcggtgacgagaccaaggatatcctcctcctcgatgtggcgcccctcaccctcggtatcgagactgttggaggagtcatgaccaagctgatccccaggaacactgtcatccccaccaagaagtcgcaggttttcaccacctaccaggaccagcagaccaccgtctctatccaggtctttgagggggagcgcagcatgaccaaggactgccgtcttctcggcaagttcgacctttctggcattcccccagctccaaggggcactcctcagatcgaagtcaccttcgaggttgatgccaacggtatcctgaacgtgaaggcggaggacaagggcaccggcaagtctgagaagatcaccatcaccaacgagaagggccgcctgagccaggaggagatcgaccggatggtcaaggaggcggaggagtttgccgaggaggacaagaaggtgaaggagcgcatcgacgcccggaaccagcttgagacctatgtctacaacatgaagaacaccgtcggcgacaaggacaagctggcggacaagctggagagcgaggagaaggagaaggtggaggaggccctcaaggaggctttggagtggctggacgagaaccagacggccgagaaggaggactacgaggagaagctcaaggaggtggaggccgtgtgcaaccccatcgtgtcggccgtgtaccagaggtccggcggagctccgggcggcgagggcgccgacggcggcgtcgacgacgaggaccatgacgagctgtagatgggtttaaaggggaaccaatttttgtaatgggttagtagggagaggagacatggataattggtgctacttactttgtgttggggttgggggtggtcgggtttattcgcagacaccggagacttgctgttattagtctgttggccgagttgtagagaactctctttgctgctgctgttacttccttctgatgttttttcgttttgttattatatagccggatggattcgcatcggaactttatgtgaagaatagatgatgcagttttaaaaaaaaaaaaaaaaaacacctcgg

SEQ ID NO: 5493 - DNA, 1704 bp, Triticum aestivum
  Clone ID: TRIAE-23APR03-CLUSTER98_1039
accgaccccgtcatcccccccgcggcccaaatcgcaccgagaacccgcgtgctctcgccgcctcctcctccctccccccgcggcgtcgccgaacgaaaccctagctccgtcgcgcccgcccgcgccgtcgtctcgccggagagcggagagggcggagagggagagggagcgggaggcggggatggggaagaagaagaagcgggtggagaaggtgttctgctactactgcgaccgggagttcgacgacgagaagatcctggtgcagcaccagaaggccaagcacttcaagtgccacgtctgccacaagaagctctcgaccgccggcggcatggccatccacgtcctccaggtccacaaggagtccgtcaccaaggttccgaatgccaagcccgagagggattccaccgagatcgagatcttcggcatgcaggggatcccctccgacgtgctcgccgcccactatggggaagaggaagatccttcatcaaaggtggccaaagtagaagtgccgacaataagacctcctattatgcctaattatccgctaggcatgccttttcctcctcggccttatggtgcagcccgccctatgtataatcctgcaatgatggtccgacctccgatttggcctcttcagcagccgcaaccttggtttgctcaacaaccaccggtttcagttcccccaatgatggctgggcaagcaccacagcaaccactattccccattcaaaacatgcccaatcctatgatgacatcagcacctgctaatttacttcagacatcatacgctatgcccaccacaggggttccttcacctgttgcccctcaggcttcccagcttttgtttcccgttaacaccagtggcaatggagcagcaaattcgtcattcagctcgtcaatttcacctgcaactattgcagcaaattctccagcatcagttggtactgcaggatatggctatgtagctaataaccatggtacaggagggccagcaattggacagccacctgcacctgccactaatagtaaaacgtctgctactcaaccagctacgagtgaggtctatctggtgtgggatgatgaagcaatgtcaatggaggaaagaaggttggcgctgcccatgtaccaggtgcatgacgaaactagccagatgagctcggttgatgcagcgttcgatcgaagaatatcagatattacattttctagacaattgacataaacaagctgcgcctggtgttcagtaaacagcttgatgcgattcaccaacgggctcacccgtgcatccatgggagggacgccgtgcaatcggtggtcctggatcccccctgttgttgatctacttagttagtgactggagctaccgcagtggaaagattgtgttggtctgacttggagattttgattcaacatcgtttgtcctgtcttttcgtaccgagagtggaaacctgttagacctagaagtcatttgttccgttgtcgattgactgacgatatgagtatcttcagctctgtaaacctgacgatgagattagcagtgtcttttcagcggctgtgctgctgttgagtaccatatgttgttggcaccgtcattttgccttccgcagcgtgatcatgtatccatggctagcaaaagcaaaagaggtgttgcttgtttcagcaaatttctcatagggaatgcaaaaaaaaaaaaaaaaaagctatcga

SEQ ID NO: 5494 - DNA, 1801 bp, Triticum aestivum
  Clone ID: TRIAE-23APR03-CLUSTER98_1052
ttttttttttgaatctcccaaacaaacccagtagaacagtttcaacagatactattatgtttcacatctcttccaatatctgtaccaattactacaaaccagacagatgtagagttactgtagaacaacaactggactggggaacatttcttgggtaaaaaaaactgggggcatcagacgccgcacggtggcacagcgagcaatgaattacagtgatatgtgacctctaacaacacaagaaatcgacggcgggatcgacaaaactaggggcaggtagctagagaggtagtacatgagaaaagaggcgtaaacaagctgcttctgcagcagcggcccttagacttgcgccgtgccttgggtgaacttggggtcctcgcacctgtacttgccgtcggggccgatgccgaagcccttgggatcggcaaacacgttctccagcagctggctccgtgggggcagcgggctcgcgtcggcaaactccacagcctcttcgacgacgtcgtcaatcttcttctcgatgttcttcagctcggcttcggacgcgaggttctgctcgatgatgtacttcttcagggaggtgatggggtcccttgcggcgtagtgagatttctcatcgggcctccctgagttcatctggatcagcaagagagtggcctctgaaccggtaagtttcacattccactagagttggtccttcacctctccttgccctgtcaattgcctccttagccacctccctgaccttcaggacatccatcccatcgacgtgtaccccaggcattccgaatgctgggccccttcttccagatcttcgggatctgaagtagcacctagggggagaaattcccgattgcccataaggtggttctccacaacaaaaaataaatcggaagctttcacaagctggagccatgttcaggcactcaaagaactggccgttgttacaggtaccgtccccaaagaatgcaagtgtgacatcaagcccatcagggctagactgcttgagcacctcatggcggtacttggcggcaaaggcagcgccagtggcgacaggaatgccctcgccaatgaaggcaaagcctccaaggaggttgtggggttcagagaacatgtgcatggaaccaccctgtccacggcagcagccggtggccttgccaaagagctctgccatgactgcacgggccggggacacccttggacagcgcgtggacgtggtcacggtacgtgctaacaacacagtcaggttggttcagctgcttgatgaagcaggtggagacggcctcctgccgcgttgtaaagatggacgaacccaaacatcttgccacggtagtacatttgcgcgcacatgtcttcgaagttacggccaaggatcatgtcctcgtaaagctccaatgcctcttcgcgtgtcacagccgggtacgcggcggcggcgggcgcggccttgagcacgtcggaggagacggccaggacggagctgaggcgcctggcgggcctgtggcggagcgagcgcatggagaacgcggacggcgcggggaagggccgcgcccggtcgccgccggatctggccgccgccggcgccaggaacttggcggcggtgaaggacgcggccgccatctcctttcctctgtctcgaagatccgctgccggctgtccccgcttgcccgtgtgctcggcgcaatgcggcggaatgggggaggagagctcggggcagaggcgtataaagagaggagaggatgggaggggagaaggggaggggcggagagcacgaggaagacggatggggagagggtttggcgcttgg

SEQ ID NO: 5495 - DNA, 1745 bp, Triticum aestivum
  Clone ID: TRIAE-23APR03-CLUSTER98_1054
gacaagaaggagggagagagagagagagatccccgctccgctaaacctcgcaacaacccccgtgggcgaccaaccagccgtccccctcaccattcaccaaccccgccgagagtcggaagcagagccgcgatcgatggccggcaccgtgcccaagctcgccgccccgaggccggcggccgcggggccgctcccctcgcagcccctccgctccgccgcgctcgcctccgccccctccgcccgccgcttccgcgtctccctcgccgcccgcgccaggagccccgtcattgcgatggcttccgccaaggaggggaacggcgccgtgacgaagaggaccacgctccatgacctctatgagcaacagggtcagtccccgtggtacgacaacctctgccggcctgtcaccgatttgctgccctacatcgccaacggtgtccgtggagtcaccagcaacccaacgattttccagaaagccatctcttcatcaaacgcgtatgacggtcagttcaaggagcttatatcggctgggaaggatgcagagagcgcttactgggaactcgtcataaaggacatccaagacgcgtgcaaactgtttgagcccatctacgacgagaccgatggggctgatggttacgtttcagtggaggtgtctcctaggctggcaaatgacacccaaggaaccgtcgaagctgcgaagtggttacacaaagtggtcaaccgccccaatgtgtacatcaagatcccagctactgcagaatgcgttccttctatcaaggaagtcattgctaatggcatcagcgtcaatgtcactcttatcttctccgttgcaagatacgaggctgtgattgatgcttaccttgacgggcttgaggcttctggtttgagtgacttatcccgagtgaccagtgtagcatccttctttgtcagccgagttgacagtctgatcgacaaaatgcttgagaagattggaacacctgaggctcttgccctgaggggaaaggctgctgtagcacaagcaaagatagcaaaccagctttacctcaagaaattctctggcccaaggtgggaggctttggtgaagaagggagccaagaagcagaggttgttgtgggcatccaccagcgtgaagaacccggcttacttggacactctttacgtcgatcctctcatcggacctgacaccgtctctacgatgcccgaccaagctctggacgcgttcatcgaccacggcacagttgctaggacaatcgacgctaacgtgtcagaagctgagggcatatacagtgccctggagaagctgggcatcgactgggaagaggttggcaagcagctggagcacgagggtgtgagctccttcaaggggagcttcgacagtctgctcacgagcttggaggagaagggcaacgccctcaagaccgctgccaacctgtaggcgctaaaattatcggatataatggtttggtaccggcgctggccatcaaacgagacccaataaaaatgccagcttgctggctctctccttccatttggaaatgaaatgctaccagttttctggttgagcttctcctgtattctaggtgcacctggctgtcattgtgtaactgaggcttgttgcttgcaactgctattcgttttctgatcaattgtttttgagcaagtgagccatatttgtgtatctttgggaaatgcatttctccttgctgttgttattcgtactttctacaagattatgagaattttggcaaccc

SEQ ID NO: 5496 - DNA, 2032 bp, Triticum aestivum
  unsure (1)..(2032): unsure at all n locations
  Clone ID: TRIAE-23APR03-CLUSTER98_1079
ccaagctcgaaattaaccctcactaaagggaacaaaagctggagctccaccgcggtggcggccgctctagaactagtggatcccccgggctgcaggaattcggcaccagctcgcacaacagaagaaaaaccaactacctcctcctacgctccgatggccgcagcggtggctgacgcggcggtgccggcggcggcgagggcgaacgacgccggggcggggtgctgcgcggcgaaggggcccggctacgccacgccgagggaggccatggagaagggcccgcgggaggggctcctctacgtcacctgcgtctacaatggtactggaatcgacaagccggattacctggccacggtggacgtcgaccccaattctgcgacctactcccaggtgatccacaggctcccggcgacgcacatcggcgacgagctgcatcactccggctggaacgcctgcagctcctgccacggcgatccgtccacgagccggcgcttcttgattcttccttccttgctgtctggtcgcgtgtatgtggtcgacactgcgaaggatccgagggcgcctgctctgcacacggttgtccaggctgaggacattgctgagaagaccgggcttgggttccctcacacatcccattgccttgcaactggtgatataatgatttcctgcctgggagacaaggagggaaatgctgctggcaatggctttctcctattggattcagagtttaacgtcaaaggacgttgggaaaagccaggccacagccccttgtttggctatgatttctggtaccagcctcgtcacaagacgatgattagttcttcatggggagccccggcagctttcaggacaggttttgatctccagcatgtccaggatggtctctatggaaggcacctgcatgtgtatgactggcctggtggtgagctcaagcagacgctggatctaggcagcacaggtcttcttccgctggaggtgaggtttttacacgacccatcaaaggacaccggctatgttggctgtgctttgacaagcaacatggtgagattcttcaaaactgcagatggatcatggagccatgaggtagctatatccatagaaccattgaaggtgcgcaactggatgctgccagaaatgccaggattgataactgactttgtcatctctctcgatgaccgctatctctacttggtcaactggcttcatggggatatcaggcagtacaacattgaggaccctgcaaagcctgtgttggctggacaagtgtttgtaggtgggcttcttcaaaagggcagtgatgttgtctatgtgaccgacgatgacaaagaagagcagtatgctgtgccccaagtcaaggggaatcggcttagaggtgggccgcagatgattcagctgagcttggacggcaagagggtgtatgtgaccaactctctcttcagccggtgggacgagcagttctacggccctgaccttctcaagaagggatctcacatgttgcagatcgacgtcgacactgaggaaggagggctggctgtcaaccccaacttctttgttgatttcgggaccgagcctgaaggtccctccttggcccatgagatgagatatcctggtggagactgcacctctgacatatggatctaggaggaagggtgtaggacacaggcagctggagatccatggtgttgagctcactgtaattaagatggtttcttcactgcctgcggtgttgtatgtgatgtggtatcaattggaataagttcctgatagaacctctgacattggcatcatgggagcttgtgccgtaataagagttgcctctgattctgaaaaaaaaaaaaaaaaaaaaactttgtgcttctctcaattgggatgtgcctcttcaagtgcttcatcgtctagccgctgattatatcctcgtaaatgttcctgaccttagcgannnacgctttcctgtcgggcttgaatagcaggttcttgacgtccgtccgtccgtgctttgcttgtttgttgtgtacctgcccgggcggccgctcga

SEQ ID NO: 5497 - DNA, 1746 bp, Triticum aestivum
  Clone ID: TRIAE-23APR03-CLUSTER98_1115
agggacaaggaagggaaggagagagagatccgtcgtgcgtgtgaggcagccccgctaaacctcgcaacagcccccgtgggcgaccaacccagcccagccgcccccctcaccaaccccggagtcggaagcagagccgcgatggccggcaccgtgcccaagctcgccgccccgaggccggcggccgcggggccgctcccctcgcagtccctccgctccgccgcgctcgccttcgccccctccgcccgccgcttccgcgtctccctcgccgcccgcgccaggagccccttcattgcgatggcttccgccaaggaagggaacggcgccgtgacgaagaggaccacgctccatgacctctacgagcaacagggtcagtccccgtggtacgacaacctctgccggcctgtcaccgatttgctgccctacatcgccaacggtgtccgttggagtcaccagcaacccaacgattttccagaaagccatctcttcatcaaacgcgtatgacggtcagttcaaggagcttatatcagctgggaaggatgcggagagcgcttactgggaactcgtcataaaggatatccaagacgcgtgcaaactgtttgagcccatctatgacgagaccgatggagctgatggttacgtttcagtggaggtgtctcctaggttggcaaatgacacccaaggaaccgttgaagctgcgaagtggttacacaaagtggtcaaccgccccaatgtgtatatcaagatcccagctactgcagaatgcgttccttctatcaaggaagtcattgctaatggcatcagcgtcaatgttactcttatcttctccgttgcaagatacgaggctgtgattgatgcttacctcgacgggcttgaggcttctggtttgagcgacttgtcccgagtgaccagcgtggcatccttctttgtcagccgagttgacagtctgatcgacaaaatgcttgagaagattggaacaccggaggctcttgccctgaggggaaaggctgccgtagcacaagcaaagatagcaaaccagctttacctgaagaaattctctggcccgaggtgggaggctttggtgaagaagggagccaagaagcagaggttgttgtgggcatccaccagcgtgaagaacccggcttacttggacactctttacgtcgatcctctcatcggacctgacaccgtctctacgatgcccgaccaagctctggacgcgttcatcgaccacggcacagttgctaggacaatcgacgctaacgtgtcagaagctgagggcatatacagtgccctggagaagctgggcatcgactgggaagaggttggcaagcagctggagcacgagggggtgagctccttcaaggggagcttcgacagcctgctcacgagcttggaggagaagggcaacgccctcaagactgccgccaacctgtaggcgctaaaattatcggatagaatggtttggtaccggcgctggccatcaaacgattaccgaataaaaatgccagcttgctggctctctccttccatttggaaatgaaatgctcccagttatctgggtgagcttgcttcttgtattctaggcgtgcctggctgtcattgtgtaactgaggcctgttgcttgcaactgctattcgttctctgatcaattgtttttgagcaagtgagccatatttgtgtatctttggcaaatgcatttctccttactgttgtaaaaaaaaaaaaaaaaaagctttcgatgaaaat

SEQ ID NO: 5498 - DNA, 742 bp, Triticum aestivum
  Clone ID: TRIAE-23APR03-CLUSTER98_1124
gaccaagacccacattaagtacccatttcattataaataaactcatcgagacaatccaaaacgttaacaccattcagcctcacagataaaggtgcaaattcaagatgcggggtaataactttgacaaaggtctatgatagtaggataggaaacaaggctagggcagcacaattctatgtctatggcgtaatcgactttcaacgcttcccgccgccaccgccaatctttgggcccttggaacctcgtgccgaattcggcacgagcgccgccgccgcagccgccgccgacgccgaagccgccgctgcgtcttcgtctccgccgcgacgatgccgtcccacaagaccttccgcatcaagcagaagctggccaagaagcagcgccagaaccgccccatcccctactggatccgcatgcggaccgacaacaccatcaggtacaacgcgaagcgcaggcactggcgccgcaccaagctcgggttctagatccggcccgcccggccgcggcgtggtggagccatggctcaagagttatctgcattttgttttatggacgtttcagtgtttgttatgcaagctaggaagtgattccaggatatgtctctgttatcaatttcgtcgtgttatgaggatattgcttgtactctggtgtactcatgttaccatgctgtgccaagtaaagaacctttgctatatgccacccttgttaaatttgtctccatggcttaattttggttcgaatggtc

SEQ ID NO: 5499 - DNA, 3480 bp, Triticum aestivum
  Clone ID: TRIAE-23APR03-CLUSTER98_1136
ctacagctcaataatacgtacatactccctccatccggaaatactcatcggagaaatacataaaaatggatgtatctaaaactaaaatacatctagatacatccattcctccgacaagtatttttcggacggagggagtacattgattcttgcgtatatacaaacaatgcggtgcattacaaacaagtattacaacagacagcgggaaccatggctagcgactgtagatgaaatagggcacgcgatggcagctgctatccagaggcagctccaatggtattctctatgtgccgcttacatatgtatattttgcaacaatgcccctcagaggaagaagggaaagcccttctgtgattgtggcttggtgcactctgaattggcccatccgatctgcctccgctcattgtcatacacaactagtttgccgcgcagagaaacatctccgacaattatggttgacccatgattgatctctgttccatttagcagccccagacaaacattgcccttttcactgataatcaagtaatcatcgggaacaatggtgaatgttttcggcacgacaaaccatcttctcccaaaatgaaggttcaagggcttgaagaaggacctaacagaaaaatcagctttccagcatagaggtaatgtcgtatctgagctatcctggacaaaactgggagagtcatccttaatagcatcaataaggtttttatacatttcctctggaaggtatgtatatgagctcccgctatcaaaaatcacttgaacagaatttcctgcgtgcccatgcatgctgagctcctgatctccataatttactttctgggcttctgtgtggtataagttgtctggaccacctcgaataggagcccatgtcattccccatcttggtacataatcatcacccagaaaacatgtaccccccaccatttgtttctctagtgatacaatgaccgaaaatgttggaaataattcctttgctggccagctgactaggaaggcttattgctgcactgctaagaccaagaatcccatcggtctttgctggtgaggacaaaagctggccttgctgatcatatgcacacccaaatacaaagtctagcttttcctttccaccatttgtagcgattagatgcatatcatccttcgcaagaacacccatagacgagcttctatcggcatattcaatctcatagtcacattgcttgcaagtttcgcagtagttctgatcgccttgcaactcttgacatagcaaatccctgggagggactatcttttcttttgctggcttatataaaggatgaggtccttgggcacagtttgtgcatggtgcgtcacactgaatccatgttaaatcgcttccagtatcaacatcaaggaaataaggtcttggtggattgccaacaaagatagatgtgtaatactgcccaccggggaacacattgcccttgatcgggagcagaactgtggagttcgcggccgcgtcgacagggaagcggatgggggccggcgatgcgcccccgccgtatgcggaacggctcttgctggtccgccgctcggctcggggtgtggactgttgtcggccgcgccggcggccaaagcccgggggccctaggtgcccccggtggccgtcgtcggcacggccggtacccgcgcgccgaaaggcgtgtccctcggggcactgcgctgcaacggcctgcgggctccccatccgacccgtcttgtaacacggaccaaggagtctgacatgccgtgcgagtcgacgggttctgaaacctgggatgcgcaaggaagctgacgagcgggaggccctcacgggccgcaccgctggccgaccctgatcttctgtgaagggttcgagttggagcacgcctgtcgggacccgaaagatggtgaactatgcctgagcggggcgaagccagaggaaactctggtggaggctcgaagcgatactgacgtgcaaatcgttcgtctgacttgggtataggggcgaaagactaatcgaaccatctagtagctggttccctccgaagtttccctcaggatagctggagcccattacgagttctatcaggtaaagccaatgattagaggcattggggacgcaacgtcctcgacctattctcaaactttaaataggtaggatggcgcggctgctcccagatccatatcgacatgcccacgctgtctgatgaggataaagatgttatgaaaaaatggggtgctccaaacaagattgacttcctctctctttcttatacaaggcacgcagaagatgtgcggcaagcacgggagttcctctctaagttaggtgatcttagccaaactctgatttttgccaaaattgagaatgtggagggcttgaaccattttgatgagatcctggaggaagcggatggtatcattctctcaagagggaaccttggaattgatcttccacctgaaaaggtgttcttatttcagaagtctgctctgcacaagtgcaacatggctggaaagcctgctgttgttactcgtgttgtggacagtatgacggacaacctaaggcctactcgtgcggaggcaactgatgtggcaaatgcggtgctggatggtagtgatgccattctccttggtgccgagactctccgtgggttgtatccagttgagactatttcaacagtgggcagaatttgtgctgaggctgagaaggtcttcaaccaagatttgtactttaagcgaactgtgaaatatgtggggagaacccatgacccacttggagtctattgcttcctctgcagtgccgggctgctattaaagttaaggcttcggtcatcatttgcttcacctcatctggacgggctgcaaggctaattgccaagtacaggcccaccatgcctgtcctctctgttgtcattcctcgtctgaaaacaaatcaattgaagtggagcttcacaggtgcatttgaggcaagacaatcactcatagttagaggcctctttcccatgcttgccgatccacgtcatccggctgaatctactagcactacaaatgaatcagtgttgaaggttgctcttgaccacggcaaagcatccggtgtgatcaagtcgcatgaccgcgttgtcgtgtgccagaaagtgggagattcctctgtcgtgaagatcattgagctggacgactaggcaaaattagtctttgctcagggcttgccagatttttgactaggccaaaacgttgcttggtggctatgtataattctatctatagttttgcaaaacgagcagtttttcctatggtgtcatcataggatccgcggttaccattcgaaaacctacgctagttattatggatatgtcctcagattttactgaagtgtagcgagtaaatgatctgatggaataatgatatcaaaactttgtgacccttgcttatcatcttatgactgtcagttggagaattctggtatatagatattttttttcgcggcaaaaaaaaaaaaaa

SEQ ID NO: 5500 - DNA, 835 bp, Triticum aestivum
  Clone ID: TRIAE-23APR03-CLUSTER98_476
gcattgatttctgctttaaaaggttatgcttgaagaactaagctccatgcccactactacaagtttctgtttcaagtttggcactttccgacacaagtagggccatgaaaaagtttctgtttcaaaaaccttcgtgtacccatcattttcagtatgcatgtactgtactagaaaatgtgaagcaccaatcactttaagaacagtagctggactccaggatgcaccgaagtattttccactcacttcaacttggtttccctctccaaacaaaggacttccagtgtccttcgtgctggacggactggcgttggccaggctgggtgcgctgggcgacggtgcgggcgacgaagatgatgaactcgtgtgcggctccgtgccggaagaagccgaagtgcctgacgtccgtggcgttggccagcacgagcgcctcggagccctgcccgccgctggaggaggagccctcggtgcctccggccgacggcttcagcacgacgagggccgtgatcttcatctccgctccgccgagcctagatccgaggggagctaggcgcgggcgcacccggtgcgcggcgagtcgctggccgcacagaagcagtcaaacatgcaccccatccccgtcctccacctcggcctcaccacttccccctcgccgagcaccgagccttggagccgcggaggaaggcgaggggagaggatgcatggcggagacaaggtcggcgatggtgggtgggggtggcggcggtgggaatcgcgggagcgagaggaaggcgagggcggcggggtgccttgattggatctggggaatgggagaggatgggtgggtgggttagggttt

SEQ ID NO: 5501 - DNA, 649 bp, Triticum aestivum
  unsure (1)..(649): unsure at all n locations
  Clone ID: TRIAE-23APR03-CLUSTER98_481
acaaatttccgccgaagcagaaaagcatcgtctctcgtctcgtcgaggaatcaacaaccatgggcggtggcaacgcgcagaagtccaagatggsgngggagaggaacctcgagaagctgangggcggcaagggtaacggagctaatccccttctcttggtcgccagatcttcttggtcttcctgatctgatcctgtcggtgttttctcttgtgatccttcgcagggagccagctcgaggccaacaagaaggccatgaacatccaggtgcgccgttaatcccgcctgtccaatcgatcgaatcgatctaaccctctctagcgattggggatttttttttccgcagacgaaactgttatctgtggaatttgttgaaattacgcctttaactgggacgggatgcgtgcctcttcagttgcaacgacgattggtagcctatttctcgataggactctgggtggatggatttttcttttttgtgcggcgattatcggtaggattttgagctttttttttgtcaattacgcctagagaaacgaagggaatcatatacttttggctgccaggactatagctagcgtatcgacatactagcatgctagattacaagttaattggaccaaaattgcccttcgggcatagatcttgggg

SEQ ID NO: 5502 - DNA, 794 bp, Triticum aestivum
  unsure (1)..(794): unsure at all n locations
  Clone ID: TRIAE-23APR03-CLUSTER98_556
ccagactcttccacagttccacgtctccctcccctccaggcctcgctcaccgaaatggcgaaaccctcccaatcccgccccctcttcgtcttccccgtcgccgccgtcctcgccgcggccttcctcctcccgctcgcccgctccgacgcctccgggcccacccccaccgccaccgcctacgacgagctccgcctccgtggcttcccgcgcggcctactcccggccaacgttcgcgggtacacgctcgacgccggctcgggggacttcgccgtcgacctggactccagctgccgcatcgtgctgccggcggggagctacctcgccaacttcaacgaccacctcaccggccacctcgacgaccgtcgcatctccggcctcagcggcatccgcgtcagggctttcttccgctggtggtccatcaccgggatccgcgccgatggagacgagcttgtcttcgaggtgggctccgtctccgccaagttccccgcccggccacttcaacgccagcctcgaatgccccgccaaggccgactccgtaagtactataacaaggaactcttggcgtgcctcatgacactgggcataccatcaaatcgccttgacgtccgaagcactatgattgtttttaaatctctcaactgcctttggtaattactacttgtgtacaaatccgggttcctaagccacactcaactttcggacacaagaaagcgggataatgtaaagtctccttgccctttggttggatggttgnctaataacccnggaacgggtaatggtttaattcatttgta

SEQ ID NO: 5503 - DNA, 1424 bp, Triticum aestivum
  Clone ID: TRIAE-23APR03-CLUSTER98_567
ataaatgagcgaccaaaaccctagtccattcttccccaccgccgccttgccccctctcgccggattgccgctccgcgtccaccgaagaatcaccaatggctccgacgtcgaagatggcgctcggcataaagcgggcgtcgagatcgcacacctaccaccgccgcgggcttcgggccatcaaggccaagcacggcggcgccttgcccaaggccgagaagccggccgccatcgccgagcccaagttctatcccgctgatgatgtcaagccacgcaccgtgagcacacgcaagccccatcccaccaagctcagatcgaccatcacaccggggcacggtgctgatcctgctcgcggggaggtacatgggaaagcgcgtggtgttcctcaagcagctccagtccggccttctcctcatcactggacctttcaagatcaatggcgtgccaatccgcagagtgaaccaggcttacgtcattgccacatccacaaaggtcgacatctctggtgttaacgtggagaagtttgatgacaagtacttcgccagggacaagaagaccagggcaaagaagactgaaggggagctgtttgagactgagaaggagaccaccaagaatctgccagaatttaaaaaagatgatcagaaggccatcgatgctgagttgatcaaagctattgaggctgtccctgaccttaagaactatcttggtgctcggttctctctcagggatggtgacaagccccatgagatgaccttctaagttgctacaagttcctgagttttggatgtgttttgcctagattgttgctgaaatttgtaccctgttagttgacttcctatgtcagttgaagtgaccgtaagatattatgagaagatcaagagaatccttatctgctttggtggttctttttttacttatgcttaatggaacagtttgtcgtgtgtgccattgtgtcckgtataattattctattgaagcaccactgcaacccagtttgtttatcaaattgatgcaagaaacaaactaatacatagaaagtataaatttattgcattaatctgtatatccctgcacctagagataggtagagatggataaattttgtagctttttgttcccagtttttcctattgaaattatggatttggaagctaatcatggagtgtttcgattgcctgcttacggattcgcaatgagcacaagtctgcaaccttgaaggaaaacccgttgcaactgatgacataatattacgtcgcaacaagaatgtatagagctgcaarctctggtggatccttctcttcacaaaaggtgttgccggttgacgggggcctaaccatgagtctaactgaragtgaacgggagcgatgtgcagaaaaaaatcttagcacataggctggatttgtatagtatttgaatttattagcagt

SEQ ID NO: 5504 - DNA, 718 bp, Triticum aestivum
  Clone ID: TRIAE-23APR03-CLUSTER98_607
atctcactcacaccgtcacacagacacagttacactgctgcagatacttcactgctactgctagttcacttccctcggatctccgccgagatgtcgacggtgacccgtgcctacctcgatcagaagctcgccgccgccaggcgctgttccagagaggccgccgtggcgggagccaaggccgcggccgtcgccaccatcgctgccgcagtacctacactggcgagcgtgaggatgctgccgtgggcaagggcgcacctgaaccccacaggccaggcgctcatcatctccaccgtcgctgggatggcctacttcatcgtcgccgacaagaccatcctctccatggccaggaagcactccttcgacgacgcgccagaccacctcaagaacacctccttccactaattagcccacaatagatccattagtggcgcgcaataagatactccctctgtccggaaatacttgtcgaaaaaatggatatatctagtcgtattttagttttagatacattcatttttacccgttttcgtgacaagtattttcggacggaggaagtactactattactagtagtataatgttcaacaattatgtgacatcacgcgaggcttgcagacagcgagtgctgtactgcgctgctctgcgtgcagaagcactaatctcatgtatccgtgtatccagccagtaatcttgaattaataataacctgcatttgtac

SEQ ID NO: 5505 - DNA, 1654 bp, Triticum aestivum
  unsure (1)..(1654): unsure at all n locations
  Clone ID: TRIAE-23APR03-CLUSTER98_665
agcccaggctgaaaaccccagccccccgcgccgcactgcaggatttctccggcgtcgcccacatcaaccccgcgagcacgagcgaggccggcgggactgggccatggcggcggctccgttcgtctactgcgccccctccggcgacggcggcaccgatgagaatgctctcctcatggtggcgctccacggcaacctcggccgcctcaaagatattgtaaacagtcttactcgggggaatggtggcccatcggcgattttttctttcaacaaagatggagttggtgcgttgcatggtgcggcatgcggaggccatctggaggtttgcaagtatttggtggaggaccttgggggagatgtgaatgctcctggaattggaagcgtagctctaggtgcaactccgtttatgatgtcagctcagtctggtgatgctcccactgtcaagtatttccttgatcatggtggtgatctaatgaaagcagatgacaagggacgcacaattctccaccatgctgtctcggcaggatgctgcaaggtaacagagttcctcctttcaaaaggggtgccagtcgacatagactgtggccgtggaccaccactcttcatggctgctacaaatgagcaggataagacgctgaagattttattggaccaccatgcaaatcctaacatcattatcagcggtgctactactcccctgctgagtgctcttatttaccgttcattgaagtgcatgaagctactcattaaggctggtgccgatgttaattgcaaggcttccactatgacacttttggtgtttgctacaatgcaaggaggttataccaacttcattaagtttctgttgaaggctggagctgatcctaatattcccgatgatttgggtaggttaccaatagagcttgctgcattacgagattgcaaggaagaggttgaaatgttgcttcctttgactacgccaattccaactgtcccaaactggagtattgagggggtaatttcccatgtgaaaaatgaagataaaaaaccaatggagcaacggcaccgtgaaagaagacaacgtttgctcaagtcacaggctgatacagcattcaagctgaaggagtataagatggcatcagagtgttatggtctggcaatagatcatggagagagtgcaacactgtatgcaaacagaagtgtttgtaaactgctcttgggcgatggtgaagggtctttgtcagatgctctcaggtgcagaatgctccggcctgattgggcaaaagcttgctaccgtcaagctgcagctcatatgctactcaaggagtataagcaagcctgtgatgctctcttggatgcacaaaacttggatcctgggaatgctgagattgaacgtgaactacggaaggctagggaactcatgaagaatcctcctgccgaaggtgagcagtgaggcgcgggcgtgtgcaggctggaacatgttccacctttcactaaagtagaactatggcaggaacttctgatccttgtgttgtgctacgaaattcatgcggaaaaactcgtgactgcagactgctaaaacacgactttgtctggaattatctcgtcttgccaaaaaaaaaaaaaaaaaaaaaaaaaaaaaaaaaaaaaaaaaaaaaaaaaanaaanaacanaaaca

SEQ ID NO: 5506 - DNA, 1853 bp, Triticum aestivum
  Clone ID: TRIAE-23APR03-CLUSTER98_696
aacttttccgaataaccccttcttcctcgtcgttgccctaggcttcttatcctctccagccatggcgaacgccggcgatcccgcctccctccccccctccgcctctcccttctcatccacccgcgcgctcgagtcggtccccttctcctctgggaacccccgcatcgaggagacccgcggcgtcgtcctcctccaccccgacccacccaccgctgccgcggccgcctcctcctcgtcatctcatcttccggcagagaggaagccgcaggtgttcgtacctgcggtgcccaaccacatgacctacgcggacttctgccgcttctgcggctccttcgtcccccacatgctcgagatgcgcatcgtcaggattgatggagcggaggaccagtatagcgttctcataaagtttgacactctgagctccaccgatagcttctacaagcacttcaatggaaagcagttctcatcactggagggtgatgtttctcgtatacgttttgtggaagacgtgcactacactcaattgatcgagcatgcccatagctcgattacgagctcagctgagcagcctacttgcccagtgtgtctagagcgacttgaccaagatcctggaggcattcttactacaatatgcaaccattctttccactgttcatgcatatcaaaatggacaggctcttcgtgcccagtttgtaggtattgtcagcagcaacctgagaaatcaatgtgttctgtttgtggaacttcggaaaatctttggatttgtctaatctgtggtaatgttggctgtggaaggtacaaaggtggtcatgctattgaacactggaaagaaactgaacactgctattcacttgaattagaaacacagaaggtttgggattatgctggtgacaactatgtccatcgtttgattcagtccaaaacagatggtaaactggttgagtacaattgctatggtggtcatgaagcagatggtatctgttcaatatgcagtggtgatgcaggaatggatgaagctctactaaacagtaaagttgaagctgtaatgtactaaatgttgaagagtacaatgatctcctcacgtctcagcttgacaaacaaagaaattactatgagtcacttctgtcagaagtcaaagaggagaatgagaaagaaatttctgcagccacttcgaaagctgtgagcatgatgaaactccaaaagttacaggcaaagcttgataagtgccttgaagagaaaagttttcttgatgacatcaatgccaatcttgtgaaaaatcaggagatgtggaaagaaagggttcggaaagttcaagaaagggaacaagctgcacttaaattgaaagatgagaagattgagaagctggaggcggagctaagagatttgatagcccatatcgagtgccaaaacgctgtggcagcagctcctggatcaatctcaagtgatatacaagggggcacaattcttcctggaccgtctgcaccatcctcgagcagcagccctgttcgccccacaaaggacaggaagcggaattgagatctgcttaccctgactagatttttatgattgactttagactgatagggtacattcttatcccaaatctccacccttcgctgctctgctattggttctcaggtccatgtccattgggcacttatgaattgacagttacccgttgcccatggtggcatttggtgtggaaatagtctcactgatgaggggacccgacgtttgattggacatttgctcatgggttttttcattgtccatgatgttgataaaatatttgtgtgggaagtctcactgaggttgtgatgaagacgaaaggtactggaggatcctccgaagct

SEQ ID NO: 5507 - DNA, 810 bp, Triticum aestivum
  Clone ID: TRIAE-23APR03-CLUSTER98_717
ctcttccctcctctgcctccgcgccactgaggagacattcacgccaccagaagcgaaacagagcaccgctcctctcaagaaacgcagacacgccaccgacgatcacgatgatgctgcgcgcggcggggaggaggctgatcggcgcggcgggggcgcgccctgcggcgctcgccggtgactcctccaccggcgcggcggcgctgggggcggtggcggcgaggagggggtaccacgagcgggtggtggaccactacagcaacccgcgcaacgtgggggcgttcgacaaggacgacgccgacgtcggcaccggcctcgtcggcgcgccggcctgcggggacgtcatgaagatgcagatccgcgtcgaccaagcctccggcaggatcgtcgacgcctgcttcaagaccttcggctgcggctccgccatcgcatcctcctccgtcgccactgagtgggtgaagggaaagcagatggaggaagtggtagcgatcaagaacacagagatcgccaagcatctgtcgctgccaccggtgaagctccactgcagcatgctcgccgaggacgccatcaaggccgcagtgaaggactacgaggcaaagaagacgaaggcggccgaggcagacgagtagttcgtcagacgcataggaagtgacacatcatgtacatatactgcataataaagggagagtgatggtaatgatgatgtttgtagtattgaaaaaaactgatgtgagcaataagcattgtgccgcgtttggctaggcatattctgtccaaaaaaaaaaaaaaaaaaaaaaaaaaaaaaaaaaaaaa

SEQ ID NO: 5508 - DNA, 725 bp, Triticum aestivum
  Clone ID: TRIAE-23APR03-CLUSTER98_745
atcccatctcacacaccactactcatcttgcctcacacacttcactactctgctcgcaagttcacttccttgggttctcgtaccaccaacctccctcgccaagatgtggacggtgacccgcgcctacctcgaccagaggctcgccgccgccaagcgctgctccagagaggccgccatggccggagccaaggccgcggccgtcgccaccgtcgctgccgcagtccccacactggcgagcgtgaggatgctgccgtgggcgagggcgcacctgaacccgaccgggcaggccctcatcatctccaccgtcgccgggatggcctacttcatcgtcgccgacaagaccatcctctccatggccaggaagcactccttcgacgacgcgccggaccacctcaagaacacctccttccactaataattcgactataatagatccattagtagtgggtaataatctgcacgcccggccctggaagtgtctgctgaaagatagtactgtaatgttcaggcagcacttatctgatatcaggcgaggcttgcagacagccagtggcgtagtaccgcgcttctctgcgcgcaagaacttatctgatgaagtgatcttgatttaatatgaatgaggggactcgattttccaagccaaacatcttgtcacgaattattataggcttatgaggacgacttgagaatcaaaatgtcaagctgaacagctgataacataggtc

SEQ ID NO: 5509 - DNA, 1294 bp, Triticum aestivum
  unsure (1)..(1294): unsure at all n locations
  Clone ID: TRIAE-23APR03-CLUSTER98_752
ttttttttttttttttaagcggcaaaacatggtaaaacacctgaccataacaaaaggaaaattacaaagattggggcacttcatgaacaagaacaacatttcaatgagcagacagttacagcaaaccacagcctcaaaaggccagagcanaaaagggggaaaaaacaaggagcanaaaagggcaatctatacagnggccataacagcaaagcggtgccatggatggaacanatatccaagctttgtttcaccgtcacaaagctacataaactgtacttacatttcaaaacagcacggctcaagtgaatatctctctcacgagccagtccaaggttggataagcaaagtagaggatcagaaacgacggcagcgcaaacaaaaacgtgacaaggacgtacaggagcanaaccgcagcgctggcagggacggcgtaaanaactattaggaggaacattatcacgagcgggaacttggccgtcagctgcacgaagcacaccatgagcttttggagagacacgctggcagtgttgggggtgttggcagcggcatttctatctctggcagacgaggaggtctctgctcgtgccgtgggggttcttcggtggtgttgactggaactggtgccaccactggacggacatactgattggcgctcttcatgaccagaggaatggaactttgctctgtcaccattcatgttctcaaccatccacagcagaaagtagttcttgcgtgggaacttgaggttgccctttgtacaccagccggaaagataataggttgcaccaaggacacgagacaaagagaggcagctggataggaagggttgggaacttgacaacagcccactgaaggcccaagatgcagttcttgcacattgtgtgaccacaccacaagacataaggaacgttctctacgatgttgaaggattcgcagcatattgggcattcaaggccttcctctcgacttgcacatgaagaaccatcgtcatcagagcaatcatgattggataggctgccttttgatggttgtacctttttctttatgcttccagctatggcatttgatgcaaaactccacatgttgagtgaggaagagctggtacactatgttttgtgcatctgcagtccgaagatggcccggatctctgtcggcgcgacgcagggcgggcgggggactctgcgggaggccggttccggtgtgctagaaggcggtcatctcggcggcggccgccgcgtcgagggggtcgcgacaagagtggggagtggcggtcgggtggagacgatgggagagt

SEQ ID NO: 5510 - DNA, 1182 bp, Triticum aestivum
  Clone ID: TRIAE-23APR03-CLUSTER98_762
aacacccaactcatctcacactaaaccgagttcactcacaatggctactagcactaagcttgtagctcttggctttgttgtcctcgtgagcattgggttcaccaatgcttcgaggatgctggctagctcctccagtgctggaggcggaggcgggggaggaggaggcggtggcagctcgtcgggtgggggtgggagtggatggggccatggggccggaggaggtggtggcttgggatatggcgagaatggtggagatgccagtaacaagtataacttcgccaagggagctggtggaggagggggaaacggtgctggcggtggttctgaaggcggatccggttccggttccggctctggcggtggcaacggtgttggttcgagtggctcggcgtcagcccctagtggcagtgggtatgccaacgctgatggtcagggtgggggcggtggtgcaggtggtggcgcagatgggtcaagcggatctggagccggaagtggtgctggcaaaggagaagctgagagtggcatagcaaccgccccggctgtagctccttctgctggtggtgtcagctactctgatgctggcggtgctggcacaggcggtggtggcggtgatggtggagttggaggtggtaatggtgctggaggtggacaggccgccagcgatgacactaccggaggcaatgctagtggaagcggcagcggcaatggtggtggccaaggtggaggcgtagctcaaggtccaagcatgggagttggttctggctctggcattgggggtggacagactggtagcactggttcttatgggcaaggctatgccaccggaaccggtgctggaacgggtggcggcggtggtggcagcaacaatggtggtttcggcaatggtggaggtagcggatcaggatctggcagtgccggatacccctaaatttctatttcgaacaagttaggatcggagcccatcacacatttctagtctcttcattttactgttccatgtcatttgtgtttcttttcattcatagggttttcactaggcgtctccctaataaagggctccatgattctagtggaagtactaagtagttagtggagcaatctactaacatgtaatcgctacctacgaatatgttatgttatgatttctgaaaaaaaaaaaaaaaaaaaaacctgcagcccggg

SEQ ID NO: 5511 - DNA, 1898 bp, Triticum aestivum
  unsure (1)..(1898): unsure at all n locations
  Clone ID: TRIAE-23APR03-CLUSTER98_776
ttttttttttttttttgccaggtcaaataaagggaaccattatatatattaattcttgttagatcatctaagtagtaaacacacagacgcaaacttgaatacaaactcttttactaactacaacacacacatggatgaatgaatcccagccaaataatgtacctctgtgaatacatctctacaccgtgcgctcttcttcccttactctcttactctactctatcccctcctcgactgtcgacggacggcgaaacccctcgagacctcgactcgagggcgaaactaaacaaacacccgtcatccatccatccatccatccatccatcataaaaggaaaaatatccttgccaactgtgcattgaatttgcacccatcattcaatgttttgctacatcagggtgtcaacttccccacgtcgacagatttccccaccttggcaacgctaagctaaaccccgagttggcgaagagagtcgggacccaccaggtatatccgtctccggctgcccttgtaccggaacaccaccacgcctttgtaagccgcccgtggaacaccgtccttccactcttcaaatattccaaactgccgagctatacgctcaaagtcgccctgattgtcatactgaatccttacgtccacatccagattgtgggccttcaacagagcatcggatccatgcacaggtgtggcgctagccacgtctttcccgaatttggtcaaaaacttgtcctccttgaggtagctcaggtcctcggaattccagtcaatatgagcatcatttaacttgataggtttcaagtattgatcaaagaattgtcccatgcttgatccatgctcgccaaagttgtatgtcctgcatacttctggccgaataaactgccgatctctgtgtacctcctttagcctcacccagtcatcccaataagctttgggccactttggcgacagctccatccatgttgacttcgttagcatccatccaagccccggaaagaagtccgaacggtaaagagcctttgggtcataaacgaactgcttttgcccattatcattccaagatgaaacagccattattgtcttgtcagtgtcaagtaatttcgctgcagcctcaaagtagtcaaagaaatctggggcgatctccatgtcatcttccagaatgattactcgacgaaaatcatgcttaatgaatagctcatccaaggcccatttatagtggttagctatcttgtaatatgcaacgttttctcctggtctttcagtgcgcacaggctcaagatcccacatgctgcataaatgttatttgattgtaactcaaagctttcttttttacttctccatttgttccatcctgtgatataaatagtggaaactttgaagcaactgctttctggtacttgaggatagattccactgtcctctgcaaatagtctggtcgattgcaagccattatgacaacagcggcgacaggaaccacgttcttgtttgttaaggtctgtaaactcctcttttcaagatcttggattaaaatcttgagctgcacacgctcctcgtcttggcgtaccttcatctcttcaagtgcggcgattttctcctgctgggcgctgacctggtcgntcatggcgtgcagctggctctcgcatttctctgcttccgcgaggcgtccggcgtctgaagagtgggaattagaagaagaaggagaagactgggtggagaacagccgcacttggatgtagatgaaagcgacggcggcggcgacgaggaggaggcggatgtcgcaggggttgcgcgccatcgccgggccggcggcggcggcggagcgggggaagaaagacgactcctttgcaggcagagcagtcgcgccctgtctctctgtctgtctgtctgactgacttgggatt

SEQ ID NO: 5512 - DNA, 1262 bp, Triticum aestivum
  Clone ID: TRIAE-23APR03-CLUSTER98_782
aaacacccaacccatctcacactacaccgagctcactcacaatggctactagcactaagcttgtagctcttggctttgttgttctcgtgagcattgggttcaccaatgcttcgaggatgctcgctagctcttccagttctggaggtggaagcgggggaggcggaggcggctcgtcgaatgggactgggagtggatggggccatggggccggaggaggtggtggcttgggatatggcgagagtggtggagatgccaataacaagtataactttgccaagggagctggtggaggaggggggaatggtgctggcggtggttctcaaggcggatccggatccggttccggctctggcggtggcaacggtgttggttcgagtggctcggcgtcagcccctagcggcagtgggtacgcccaacgctgatggtcagggtgggggtgggggtgcaggtggcggtgcaaatgggtcaagcggatctggagctggaagtggtgctggcaaaggagaagctgagagtggcatagcaattgccccgtctgtagctccttccgctggtggtgtcagctactctgatgctggaggtgctggcactggcggtggtggtggcgacggtggaagtggaggtggtaatggtgctggaggtggacaggccgccagcgatgacactactggaggcaatgccaatggaagtggcagcggcaacggtggtggccaaggtggaggtgtagctcaaggtccaagcatgggagttggttctggctctggcattgggggcggacagactggtagcactggttcctatggtcaaggctatgccaccggaaccggtgctggaatgggtggcggcggtggtggcagcaacaatggtgggttcggcaacggtggaggtagcggatctggatccggcagtgccggatacccctaaatttccttttcgaacaagctagaatcggagcccatcacacatttctagtctcttcatttcactattccacgtcatttgtgtttcttttcattcgtagagttttcactaggcgcctcctaataaagggctccatgattccagtggatgtattaagtagttagtggagcaatctactaacacgtaatcgctacctacgtacgaatacgttatgttatgatttctgatatgtttcgttgttagtgtgagtgcttggttactccttccgaagcaatatgcctagctaaggttgtctaaaaacaaagctaatggttattctggttgcctctaaaaaaaaaaaa
